United States Patent Application Publication US 2019/0348154 A1 - sequence listing, part 108

SEQ ID NO: 405421 - DNA, 525 bp, Staphylococcus aureus
gtgaaaaaagttgtaaaatatttgatttcattgatacttgctattatcattgtactgttcgtacaaacttttgtaatagttggtcatgtcattccgaataatgatatgtcaccaacccttaacaaaggggatcgtgttattgtaaataaaattaaagttacatttaatcaattgaataatggtgatatcattacatataggcgtggtaacgagatatatactagtcgaattattgccaaacctggtaaatcaatggcgtttcgtcagggacaattataccgtgatgaccgaccggttgacgcatcttatgccaagaacagaaaaattaaagattttagtttgcgcaattttaaagaattagatggtgatattattccgccaaacaattttgttgtgctaaatgatcaagataataacaagcacgattcaagacaatttggtttaatcgataaaaaggatattattggtaatgttagtttacgatactatcctttttcaaaatggactgttcagttcaaatcttaa

SEQ ID NO: 405422 - DNA, 576 bp, Staphylococcus aureus
ttgtcgtttcatcaagtagaagaatggtttgagatatttcgacagtttggttatttacctggatttatattgttatatattagagctataattccagtatttcctttagcactctatattttaattaacattcaagcttatggacctattttaggtatattgattagttggcttggattaatttctggaacatttacagtctatttgatctgtaaacgattggtgaacactgagaggatgcagcgaattaaacaacgtactgctgttcaacgcttgattagttttattgatcgccaaggattaatcccattgtttattttactttgttttccttttacgccaaatacattaataaattttgtagcgagtctatctcatattagacctaaatattatttcattgttttggcatcatcaaagttagtttcaacaattattttaggttatttaggtaaggaaattactacaattttaacgcatcctttaagagggatattaatgttagttgtgttggttgtattttggattgttggaaaaaagttagaacagcattttatgggatcgaaaaaggagtga

SEQ ID NO: 405423 - DNA, 1332 bp, Staphylococcus aureus
atgactcatattcaattagattttagtaaaacgttagaatttttcggtgaacacgaattaaaacaacaacaagaaattgttaaatcaattcacaaaacaattcatgaaggtactggtgcaggtagtgacttcttaggctgggttgatttaccagttgattacgacaaagaagaattttcaagaattgttgaagcatcaaaacgcattaaagaaaattctgatgttttagtagtcatcggtattggtggttcttacttaggtgcacgtgcagcaatcgaaatgttaacgtcatcatttagaaacagcaatgaataccctgaaattgtatttgttggtaatcacttatcatcaacatatacgaaagagttagttgattatttagcagacaaagatttctctgtaaacgttatttctaaatctggtacaactacagaaccagcagttgcatttagattgttcaaacaattagttgaagaaagatacggtaaagaagaagcacaaaaacgtatatttgcaacaacggataaagaaaaaggtgctttaaaacagttggctacaaacgaaggttatgaaacgtttatcgtacctgatgatgtaggtggaagatattctgttttaacagcagtaggattattaccaattgcaacagctggaattaacatcgaagctatgatgattggtgctgcaaaagcacgtgaagaattatcttcagataaattagaagaaaacattgcataccaatatgcgacaattcgaaacattttatatgcaaaaggttatacaacagaaatgttgattaactatgaaccatctatgcaatactttaatgaatggtggaaacaattatttggtgaatcagaaggtaaagacttcaaaggtatctatccttcaagtgccaactacacaactgatttacattctttaggtcaatatgtacaagaaggccgtcgcttcttattcgaaacagttgtaaaagtaaatcatcctaaatatgatattactattgaaaaagatagtgatgatctagacggattaaattatttagctggtaaaacaatcgacgaagttaacacaaaagcattcgaaggtacattattagcgcatactgatggtggtgttcctaacatggtagtgaacattccacaattagatgaagaaactttcggttacgtcgtatacttcttcgaacttgcttgtgcaatgagtggataccaattaggcgtaaatccatttaaccaacctggtgtagaagcatataaacaaaacatgttcgcattattaggtaaacctggttttgaagacttgaaaaaagaattagaagaacgtttataa

SEQ ID NO: 405424 - DNA, 1206 bp, Staphylococcus aureus
atgaaagagaaaattgttttagcatattcaggaggactagatacaagtgtggccgttcaatggcttatcgacaaaggatacgacgttgtagcttgttgcctagatgttggtgaaggtaaagatttagacatcgtttataaaaaagctttagatatgggagcagttgaatgtcatattattgatgcaacaaaagaatttagtgatgagtatgtaagttatgcaatcaaaggaaatttaatgtatgaaaatgcatatccattagtttcagctttatcaagaccattaatcgctaaaaaattagtagagattgctgagaaaacaaattcagtaggtattgcacatggttgtactggtaaagggaatgaccaagtacgtttcgaagttgccattaaagcattaaacccatcattgaaagcattcgcacctgtacgtgagtgggcatggagtcgtgaagaagaaatcgattatgcaattaaacataatatccctgtatcaatcaaccatgattcaccttattctatcgatcaaaatctatggggcagagcgaatgaatgtggtattttagaagatccttatgctgcgccaccagaggatgcgttcgatctaacaaatgctttagaagaaacaccagatactgctgatgaaatcattttaacgtttgataaaggcatcccagttcaaattgatggcaaaacatatgaattagacgatttaattttaacgttgaatgcattagctggtaagcatggtatcggaagaattgaccatgtagaaaatagacttgtaggtatcaaatcaagagaaatttatgaggcacctgctgcagaagttattttaaaagcgcataaagcattagaaacgattacgttaacgaaagatgtcgcacactttaaaccaatcattgagaagcaatttgctgaacaactatacaatggactttggttctcacctttaactgatagcttgaaattatttattgatagtactcagcaatacgtaagtggtgatgtcagaattaaattattcaaaggtaatgccatcgtgaatggtagaaaatcaccttacacattatatgatgaaaaattagcaacttatacaaaagaagatgcatttaatcaagacgctgctgttggctttatcgatatctatggtttacctactcaagtaaatgcgatgttgcatggaggctatagcaatgagcaataa

SEQ ID NO: 405425 - DNA, 1380 bp, Staphylococcus aureus
atgagcaataaagcttggggcggtagatttgaagtacaacctgaagagtgggttgacgactttaacgcatccattacttttgatcaaacgctcatagatcaagatatcgaaggcagcattgcacatgcaactatgcttgcgaatcaaggcattattagtcaacaagacagcgaacaaattatacaaggactaaaatctattcaacatgattatcatcaagatcaaattcaatttagtgcatcattagaagatattcatttaaatattgaacatgaattaattaaacgtatcggtgatgctggtggtaagttgcatactggacgcagtagaaacgatcaagttgcaacagacatgcacttgtacactaagaaacaagtgcaagatatcatcgcattaattaagtcgttacaaagtgtaattgtagacatcgcttccaataatgttgatacaattatgcctggttatactcatttacagcgtgcacagccaatttcatttgcacatcatattatgacttatttttggatgttacaacgagaccaacaacgatttgaagatagtttaaaacgaatcgatattaatcctttaggtgcagcagccttaagtggtaccacataccctatcgatagacacgagacaacagcattgttgaactttggcagtctctatgagaatagcctagatgctgttagtgacagagactatattattgaaacattgcataatatttctttaacgatggttcacttatcacgctttgcagaggaaattattttctggtccacagacgaagctaaattcattacattatcagatgcattttcaactggctcatctattatgccacaaaagaaaaatcctgatatggcagaattaattagaggtaaagttggtcgaacgactggtcatttaatgagcatgcttatgactttaaaaggattacctctagcatataacaaagatatgcaggaagataaagaaggtttattcgatgctgtccatacaattaaaggttctttacgtattttcgaaggtatgattcaaacgatgacaattaataaagaacgactcaatcaaactgttaaagaagatttttcaaatgcaacggaactagcagattatttagtaactaaaaatattccatttagaactgcacatgaaattgtaggaaaaatcgtcttagaatgtatacaacaaggtcattatttattagatgttcctttagcaacatatcaacaacatcattctagtattgatgccgatatttacgattatttgcagcctgaaaattgtttaaaacgacgtcaaagttacggttcaacaggtcaatcatcggtcaaacaacaacttgatgttgctaaacaattactatcacaataa

SEQ ID NO: 405426 - DNA, 930 bp, Staphylococcus aureus
atgactaactcttcgaaaagcttcactaaatttatggctgcttctgctgtttttactatgggatttttatcagtacctactgctggcgctgaacaaacaaatcaaattgcaaataaacctcaggctattcaatggcatacaaatttaacgaatgagcgattcactactatcgcacatcgtggcgcaagtggctatgcacccgagcatacgtttcaagcatatgataagagtcataatgagttaaaagcatcttatatcgaaattgatttacaacgtaccaaagatggccatttagttgctatgcatgatgaaactgttaaccgtacaacaaatggacacggtaaagttgaggattatacccttgatgaattaaaacagttagatgcaggaagttggtttaataaaaaatatccaaaatacgcaagagcaagttataaaaatgctaaagtacccactttagatgaaattttagaacgttatggcccgaatgcaaactattatattgaaacaaagtcacctgatgtatacccaggaatggaagaacaattattagcttcattgaaaaagcatcaccttttaaataacaataaattaaaaaatggacatgtaatgattcaatcattttctgacgaaagtttaaagaaaattcatcgtcaaaataagcatgtgccattagtaaaattagttgataaaggtgaactacaacaatttaacgaccaacgcttaaaagagatacgctcttatgcgattggattaggtcctgattatacagatttaactgaacaaaatacccatcatttaaaagacttaggatttatagtacatccttatacagtgaatgaaaaagctgatatgttacgattaaataaatatggcgttgatggtgtctttacaaatttcgctgataaatataaagaagtcattaagtag

SEQ ID NO: 405427 - DNA, 1245 bp, Staphylococcus aureus
atgactgagaacaataatttagtaacttctactcaaggaattattaaagaagcattgcataaattgggatttgacgaaggaatgtacgatttaattaaagaacctttaagaatgttacaagtgcgtatccctgtacgaatggatgatggcacagtaaaaacattcacaggttaccgtgcgcaacataatgatgctgttggaccaacaaaagggggcgtgcgtttccacccagatgttgatgaagaagaagtaaaagcattatcaatgtggatgactttgaaatgtggcattgtaaacttaccatacggtggtggtaagggtggtatcgtttgtgatccacgtcaaatgagcattcatgaagttgaacgtttatcacgcggatatgtaagagcaatttcacaattcgtaggtccgaacaaagatattccagcaccagatgtatttacaaactcacaaattatggcttggatgatggatgaatatagtgcattagataaatttaattcaccaggtttcatcacaggtaaaccaattgtattgggtggttctcatggacgcgacagatcaactgcactaggtgtagttattgcaattgaacaagctgcaaaacgtcgtaatatgcaaattgaaggtgccaaggttgttattcaaggtttcggtaatgccggaagtttcttagctaaattcttatatgatttaggtgcaaaaattgtaggtatctctgatgcttacggtgcattacacgatccaaatggcttagatatagattatttattagaccgtcgtgatagttttggtacggtaacaaatttatttgaagaaacaatctcaaataaagaattgtttgaattagattgtgacattttagtaccagcggctatttcaaaccaaattacagaagacaatgcacatgatattaaagctagtatcgttgttgaagctgctaatggacctacaacaccagaagcaacacgtattttaactgaacgtggtatattattagttccagacgtattagcaagtgctggtggtgtaacggtttcttacttcgaatgggtacaaaataatcaaggttattattggtctgaagaagaagttaatgaaaagctacgtgaaaaattagaagcggcatttgatacgatttacgaattgtctcaaaaccgaaaaatagatatgagacttgcagcatatatcataggtattaaacgtacagcagaagcagctagatatcgtggttgggcataa

SEQ ID NO: 405428 - DNA, 1191 bp, Staphylococcus aureus
atgactaaatctgaaaaaattattgagttaacaaatcattacggagcacataattatttaccattgccaattgtcatttcagaagctgaaggggtatgggttaaagatcctgaaggcaataaatatatggatatgttatctgcatattccgctgttaaccaaggtcatagacatccgaaaattattcaagcattaaaagatcaagctgataaagtgactttagtttcacgtgcttttcatagtgataacttaggtgaatggtacgaaaaaatttgtaaactggcaggtaaagataaagctttaccaatgaatacaggtgctgaagcagtagaaacagctttgaaagcagcacgacgctgggcatacgatgttaaaggaattgagccaaataaagcagaaatcattgcatttaatggtaacttccatggtcgaacaatggcgccagtttcattatcttcagaagcagaataccaacgtggttatggtccgttattagatggatttagaaaagttgattttggagatgtagatgcattgaaagctgcaattaatgaaaatactgcagcagttttagtagaaccaattcaaggtgaagcgggtataaatataccgccagaaggatatttgaaagcaattagagaattatgtgatgaacataatgtcttatttattgctgacgaaatccaagcaggattaggtcgttcgggtaaattatttgctacggattgggataatgtaaaacctgatgtctatattttaggtaaagcactaggtggtggagtcttcccaatttctgttgtattagcagataaagaagtattagatgtctttacacctggctcacatggttcaacatttggtggtaatccacttgcttgtgctgcatcaattgctgcattagatgttatcgttgatgaggatttaccaggccgctctttagaattaggagattattttaaagaacaattaaagcaaattgatcatccatcaattaaagaagtccgtggacgtggtttgtttataggtgtggaacttaatgaaagtgctagaccatattgtgaagctttgaaagaagaaggcttattatgtaaagaaacgcatgatactgtcattcgttttgcaccaccattaattattactaaagaagaattggaccttgcacttgaaaaaataagacatgtatttcaataa

SEQ ID NO: 405429 - DNA, 1128 bp, Staphylococcus aureus
atgaaaagtaaatacgaaccattgtttgataaagtagaattaccaaatggagtagagttgagaaatcgatttgtgttagcccctttaacacatatttcttcaaatgatgatggtactatttcagatgtagaacttccttatattgaaaagcgttcacaagatgttggtattacaattaatgctgcgagtaatgtgagtgatgtcggaaaagcatttccaggacagccatcaatcgcgcatgacagtaatattgaaggactaaaacgattagctacagcaatgaagaaaaacggtgccaaagcactcgtacaaatacatcatggcggtgcacaagcattgcctgaattaacacctgatggagacgtcgtagcaccaagtccaatttctttaaaaagttttggtcagaaacaagaacatagtgctagagaaatgacgaatgaagagattgaacaagcaatcaaggattttggtgaagcaacgcgacgtgcaattgaagcagggtttgatggtgttgaaatacatggcgcgaatcattacttaattcatcaatttgtatcaccatactataatagaagaaatgatgtatgggcaaatcaatataaattcccggtcgctgtgattgaagaagtacttaaagcgaaagaagcgtatggcaataaagactttatagttggatacagattatctccagaggaagcggagtctccaggaatcacaatggaaattacagaggaactcgttaataaaattagccatatgccaatcgactatattcatgtttcaatgatggatacgcatgcaacgacacgtgaaggtaaatacgctggacaagaaagactgcctttaattcacaaatggataaatggtcgtatgccacttatcggtattggttcaattttcacagctgacgaagctttagatgcagttgaaaatgttggtgttgacttagtagccattggtagagagctactactggattatcaatttgttgaaaaaattaaagatggacgggaagatgaaattattaattactttgatccagagagagaagataatcatcacttaactcctaatttatggcatcaatttaatgaagggttttatccattaccacgtaaagataaataa

SEQ ID NO: 405430 - DNA, 378 bp, Staphylococcus aureus
ttgaataactacaaaattggccaacatatcaaggtgcgtgtaactggtattcaaccatacggtgcgtttgttgagacccctaatcatactgaaggactgattcatatatcagaaattatggatgactacgttcataatttgaagaaatttctatcagaaggccaaattgttaaagctaaaattttgtctatagatgatgaaggaaagcttaatctatcattaaaggataatgattacttcaaaaattatgagcgtaagaaggaaaaacaatcagtattagatgaaatcagagaaacagaaaaatatgggtttcaaacacttaaagaacgcttaccaatctggataaaacagtcaaagcgagcaattcgaaacgactaa

SEQ ID NO: 405431 - DNA, 594 bp, Staphylococcus aureus
atggctaactatccacagttaaacaaagaagtacaacaaggtgaaatcaaagtggttatgcacacaaataaaggtgacatgacattcaaattatttccaaatattgcaccaaaaacagttgaaaattttgtgacacatgcaaaaaatggttattatgatggaatcacattccaccgtgtcattaatgacttcatgattcaaggtggcgatccaacagctactggtatgggtggcgaaagtatttatggcggtgcttttgaagatgaattttcattaaatgcatttaacttatatggcgcattatcaatggctaactcaggacctaatactaatggttcacaatttttcattgttcaaatgaaagaagtacctcaaaatatgttaagtcaacttgcagatggtggctggcctcaaccaatcgttgatgcatatggcgaaaagggtggtacaccatggttagatcaaaaacatacagtattcggtcaaatcattgatggtgaaactacattagaagatattgcaaatacaaaagtgggaccacaagataaaccacttcatgatgttgtaattgaatctattgatgttgaagaataa

SEQ ID NO: 405432 - DNA, 384 bp, Staphylococcus aureus
atgaagctatatcgattttcacacaaaacaggtagctatggtgtcacgattgttgaagaaaatggagacgatgtccttgttaaagttgaacaagttatcaaacacccgaaacaaggtgatttacataaccctactgaaactgaaggtgtatttttccatgatcgcaaagcattaagccattttgaaaaacgctatacgaaacgttcacaattacgcgacttcaatgttgatgtattgcgctatgaagattcacttcaacaagcaattacagatttagaaactaaacttaaagctcagcaaacaaaacatgctgaaatgtctttagctagtttagcacgcttaaaagaagattattcacttcaatacaaagaaaattttaaataa

SEQ ID NO: 405433 - DNA, 2406 bp, Staphylococcus aureus
gtgagtttgttacatattgcggtgatattaccgttaatattcgcactcattattcctatcctgtatagattttttaaacgtatacatttaggatggttcgtattacctgtccctatcgtcatatttatttatatgcttacattaattaaaacgacgatgtcaggtaatactgtaatgaaaaccttaaattggatgcctcattttggtatgaactttgatttatatcttgatggcttaggtttactctttagtttgcttatttcaggaatcggcagtttagtagtattatattcaatcggctacttaagtaagtcagaacaactagggaatttttattgttatttattactatttatgggtgcaatgttaggtgtcgtactttcagataatgttattattctatatttattctgggagctaacgtcattttctagttttttacttatttcattctggcgcgaacgacaagcatctatatatggtgctcaaaaatcgctcataatcacagtatttggtggtctatcattattaggtggtatcatcttactcgctataccaacacaatcatttagcattcagtacatgattcaacatgcttctgaaattcaaaatagcccattcttcatttttgcgatgattttaatcatgattggtgcttttacaaaatctgctcagtttccattttatatttggctaccagatgcaatggaagcacctacaccagtcagtgcttatcttcattcagcaacaatggttaaagcagggttatatttaatcgctcgaatgacaccaatcttcgcagcatcgcaaggttgggtatggactgtcacactcgttggtttaattacattattctgggcttcgctaaacgcaacaaaacaacaagacttgaaaggtatactggcattttcaacagtatcccaattaggtatgattatggcgatgcttggaatcggtgccattagttatcactatcaaggcgatgatagcaaaatatatgctgctgcatttacggctgcaatattccatttaatcaaccatgcaacatttaaaggtgccctatttatgattacaggtgcagtggatcattctactggtacacgtgatgttaagaaattaggtggcttactaacaattatgcctatttcatttacaatcactgttattacagcattaagtatggctggtgtaccaccgttcaatggtttcttatcaaaagaatcatttttagaaacaacatttacagcaagccaagcaaatttattcagtgttgatacattaggctacctattcccaatcattggtatagtgggcagtgtcttcacatttgtatattcaattaaatttataatgcatatatttttcggacaatataaacctgaacaattacctaaaaaagcacacgaagtatcaatattaatgcttttatcaccagctattttagctacattagtaattgtatttggtttattccctggcattttaactaattcgattattgaaccagctacatcttcgattaatcatacggtaattgatgatgttgaattccatatgttccatggattaacgcctgcctttttatcaacattagtgatttatattttaggtatcttactaattgtgacatttagttattgggtgaaattgttgcaacgacaacctggtaaactaacattcaattattggtacaacagaagtgcaaatgttattccaaactactctgaaaagatgacgaatagctatgttaccgattattcacgtaataatttagttatcatttttggtgcattaattttattaacatttgtcactatattctcagtacctttcaacattaattttaaagacgttagtccgattagaattttcgaagtttgtatcgtaattttattattaagtgctgcctttttaattcttttcgctaaatcaagattatttagcatcattatgttaagtgcagttggatatgctgtgtctgtattgtttatattctttaaagcacccgacttagcattgacacagtttgtcgttgaatctatttcaacagcattgttcttattatgcttctaccacttaccaaatttaaatcgttataatgaaaagcgctcattccagcttactaatgctttaattgctggtggtgttggtttgtccgtcattattatcggtttaattgcatacggaaatagacattttgaatcgatatctaagttttatcaagagcacgtttatgatttagctcacggtaaaaacatggtaaacgtcatacttgttgatttccgtggtatggatactttattcgagtcatctgtgcttggtatcgcaggattagctgtatatacaatgattaaattacgtaaaaagcgtcaaacgcaaggtaacgaggtgaaaaatcatgaatag

SEQ ID NO: 405434 - DNA, 429 bp, Staphylococcus aureus
atgaatagacaacaaaatgatctaattttgcaatttgctgcagttattatctttttcatggtaatggtctttggtttttcacttttcttagcaggacattatacacctggtggcggtttcgtcggcggattattattcgcaagttcacttgttatcattacgattgcatttgatatagaaacaatgcgtaaaattttcccattagattttaaaatcttgataggtatcggattagttttttgtattgcgacgcctatcgcaagttggtttttaggcaaaaatttctttacgcatgtcacatttgatataccgttatttatattagaacctgttcatatgacaacagcagtattctttgatttcggtgttttatgtgcagtagttggtactgtcatgacaattattatttcgattggagagaacgaatag

SEQ ID NO: 405435 - DNA, 342 bp, Staphylococcus aureus
gtggaaattattatgatttttgttagtggtattctcacagcaattagtgtctatctcgttttgtctaaaagtctgatacgaattgttatgggaactacactattaacacatgcagcaaatttatttttaataactatgggcggacttaaacatggtactgttccaatttatgaagcgaacgtaaaaagctatgttgatcctatcccgcaagcacttattttaacagcaatcgttatcgcctttgcgacaacagcctttttcttagtattagcatttagaacatataaagaattaggcacagataacgttgagagtatgaaaggagttccagaagatgattga

SEQ ID NO: 405436 - DNA, 1497 bp, Staphylococcus aureus
atgattgaaagtaatatgcttgtgttaacgctagttattccagtaattacagccatattacttgtctttattggaaagcgtcctattataaagcgttatgtcgcactaggcggtacattattaaccttggtcgcggcaattatcaatttagcaaatgttgttaaacatggaccaatacgcgtagagctaggttcatggaaagcaccatacagtattgtctttgtattagacatattcagtgccctactaataattactagtattattattacagctattgtgattttatattcataccaaacaattggtattgaacgtgaaagatattattattatttttcagtactatttatgttaataggtatcattggtgcattcacaactggtgacattttcaacctattcgtatttttcgaagtatttttaatgtcatcttatttcttattagtaattggttctacaaaaattcaactacaagaaacaataaaatatgttcttgttaacgttgtatcgtcatccttcttcgtaatgggtgtagcgattttatattcagtagtaggaacattgaatctagcagatataagcaataaattagctaacctttcagcgcatgacagtggcttagtcaatatcgttttcatactatttatctttgtttttgctacaaaagctggcgtattcccaatgtttgtttggttacctagtgcatactatgcaccaccaattccaatcattgcattctttggtgctttgttaacaaaagttggtgtttatgcaatcgctagaacattgagcctattctttagtgataatgtaagcttttcacattatgtcattttattcttagcactattaacgatcatctttggttgtgtcggtgctgttgcatatgccaacattaaaaaaatcatcctatacaatgtcatgattgctgtaggtgtgatcttagtcggcgttgcaatgatgacagagtcaggtatgattggggctatttactatacattgcacgacatgttagtaaaacttgcattattcttgcttatcggaattatgattaaaattacaggcactgctgatttaagacaatttggtggcttaattaaacgatatcctgtacttggttggtcattctttatcgcagcattaagtttagctggcattcccccactcagtggcttttatggaaaattttttattgtccaatcaacatttgaaagaggattttatttaagtggtgtcatcgtcttattatcaagtttagtcgtattatattctgtcattcgcatattcctacaaggctttttcggtcaaccaaaaggatatgatcttaataacaaagtcgacgtcaaatatttaactacgattgcaatcgttgcagttgtgataactgttttatatggattgtcagcagattacttatatccaatggtaaaagctggtgcagaaacattctacaatccatcaacctacgttaaagctgtattaggaggtaaataa

SEQ ID NO: 405437 - DNA, 480 bp, Staphylococcus aureus
atggctgtacaattagtattaaactttattatcgcagtgttttggttgtttgtgacaaatagttacacaacaaataactttgtgttaggtttcatctttggcctagttcttgtttacctcttacacagagtgttaccaggtagattttatgtcatcacgctatatcgtattattaaattagttattattttcttaatcgaactgattaaagctaattttgatgttttgaaaattattattaaaccttcgattaaaaatgaaccaggattctttgtttatcacacagatttaaaaaaagattggcaaattgtcttgctgtctaatttaattacattaacacctggtactgtagtgcttggtgtaagtgacgatcgtacaaaaatttatattcatgccatagatttttcaactaaagagcaagaagtagaaagtattaaaacatcattagagaaaattgtaagagaggtgggcgaaatataa

SEQ ID NO: 405438 - DNA, 294 bp, Staphylococcus aureus
atgaatcataatgttattatcgttattgcattaatcatagttgtcatttctatgttagctatgctcattcgcgttgtgctaggcccatcacttgccgatcgtgttgtcgcattagatgcgattggtcttcaattaatggcagttatagcattattcagtattttattaaatattaaatacatgattgtcgttattatgatgattggtatattagcttttttaggtactgcagtattctctaaatttatggacaaaggtaaggtgattgaacatgatcaaaatcatactgattag

SEQ ID NO: 405439 - DNA, 357 bp, Staphylococcus aureus
atgatcaaaatcatactgattagtcttgcacttatctttgttatcatcggtgctttaattagcgccctagcagctataggattattgagacttgaagatgtatattcacgtgcacatgctgccggaaaagcatcaacattaggtgcaatgtcattactatttggtacgtttttatattttattgctactcaaggttttgtaaatatgcaattaatcgttgcgattatctttgtattaattacaggtcctctttcaagtcatatgattatgaaagcagcatataatattaaaacgccttatactaaaaagactaaagtcgatgaaatttcggaagacttaaaagacacaaaattgtag

SEQ ID NO: 405440 - DNA, 1155 bp, Staphylococcus aureus
atgcattggacaattatcggcggtggcatacagggaactgcaatcgcacaaaaactattatcaagcggattaacaacagaccgattaacaatcattgacccacacgaaactttttgccaaaggtttaactcatatacaaatcgaatagaaatgccttatttaagatcaccgattgtacatcacgtacatccacaaccgttccatctaaaacaattcgctaaacagcaccaatatacaaatgctttttatggtccttatcaacgacctgaattgacaatgtttatggatcatattgcacatgcttctaaacaatatcaattagaggattgcttggttcaaggtttagttcaaactttagataaacaagaagacaaatggcatatcaagttagaagatggacaaattatcactacagattgcgtcgttattgcaataggcagtacaaatattccgtttatgcctgacattttaaaagacaaacagaatgtaaatcatatcttcgagaaagaacttgatcaagtagtatatgataagaccgatcatatcgttggtagcggcattactgctgcacatcttgcacttaaattgttaaatcatgataacgataaaaagattcatttatggctaaataaagatattgaaatacatgactttgatgctgatcctggttggttaggtccgaaaaatatgtcttcatttttaagtactaaaagcatgcctgaaagaaatgccattgtacaacgcgaacgtcataaaggatcaatgcctcacgaactgtacttacgccttaaaaaacatattaaaaatggtcgtataaatgtgcataaaacacctatcactcaaattagtggtggtgtaattaacactgaaaatgattctgttccatatcaacagattatggttgcaactggttttgaacaagattttatgtcacaaccacttattaagcaattaatacaaaattatgatgcacctatcaacgaatgtaattaccctgttatttccgaaaaattagaatggataccaaatctatttgtcgcaggatgctttgcagacttagaattaggaccatttggtagaaatgttatgggtggccgtaaagctgccgaacgcattgaacaagcatttctaaaactacaacaatatagcgcataa

SEQ ID NO: 405441 - DNA, 375 bp, Staphylococcus aureus
atgactcatttattagagacatttgagatgtcaatagatcaccaggaagatggtttagttgttatttctatgcctgttactgataaagtaaaacaaccatttggatatttacatggtggggcttcgattgctttaggtgaaacagcatgttcattaggatctgctaatttaattgatacaaccaaatttattccattaggtttagagatgaatgctaaccatattcattctgctaaagatggtcgtgttactgcgacagctgaaattattcatcgaggtaagtcgacacatgtatgggatataaaaattaagaatgacaaagaacaattaattacagttatgcgtggtacagttgctattaaacctttaaaataa

SEQ ID NO: 405442 - DNA, 1317 bp, Staphylococcus aureus
atgataaatgcagtagtaatagcagtaattttaatgattgtgctatgtttatgtcgattaaacgtagttataagcttatttatcagtgcgctagttggtggcttaatttcaggcatgagcattgaaaaagttataaatgtatttgggaaaaatatagtcgatggtgctgaggtagcattaagctatgctttattaggtggatttgcagcattaatttcatacagtggtatcacagactatttagtaggaaaaattataaatgcaattcacgctgaaaatagtcgatggtcaagagttaaagtcaaagtgacaataatcattgcattattagctatgagtatcatgagtcaaaacttaattcctgtacatattgcattcattccaattgtcatcccaccattgttaagtctgtttaatgacttaaaaatagatagacgtttaatcggtttgattatcggttttggtttatgtttcccgtatgtgttattaccatatggattcggtcaaattttccagcaaattattcaaagtggctttgcaaaggcaaatcacccaattgagtttaatatgatttggaaagcaatgcttattccttcaatggggtatattgttggcttacttatcggtttatatgtatatcgtaaaccacgtgaatatgaaacacgtaaaatttcagatagtgacaatgttacagagttaaaaccatatatcttaatagtaacaattgtagcaatactagctacatttttagtacaaacatttacagattcaatgatttttggtgcactggcaggggtactcgtattctttatttcacgtgcatataattggtatgaattagatgctaagtttgttgaaggtattaaaattatggcttatattggtgtagttattttaacagcaaatggatttgctggtgtaatgaatgctactggtgatatagatgaattagttaaaactttaacaagtattactggtgataataaattatttagcattatcatgatgtatgtgataggtttaattgtcactttaggtattggatcatcatttgcaacaattcctattatcgcatcattattcattccttttggagcgtcaattggactagatacaatggcattaatcgcattgattggaacagcgagtgcattaggtgactcaggttcgcctgcaagtgattcaacattaggaccaactgcgggattaaatgttgatggccaacatgatcatatacgtgatacatgtgtaccaaacttcttgttttataatattcctttaatgattttcggtactattgctgctatggtactataa

SEQ ID NO: 405443 - DNA, 1476 bp, Staphylococcus aureus
atgaattttaaattaaataacacactaagcaacgaaataaatacattgattattggtataccagaacatttaaatcagttagagcgcattagttttaatcatatcgatattacagaatcacttgaaagactaaaacatcaacatattattggtagtaaagttgggaagatttatacaactgcatttgatgtacaagatcaaacatatcgtttaattacagttggtttaggaaacttaaagacacgtagttatcaagatatgttgaaaatatggggacatcttttccaatacataaagtcagaacacattgaagatacgtatttacttatggattcatttatttcaaaatatgatcagttatcagatgtattaatggcatgcggtattcaaagtgagcgtgcaacatatgaattcgatcattataaatcaagtaagaaggcaccgtttaagacgaatttaaaccttattagtgaatcattaattgaattagattttattcatgagggtatcagtattggccaatccattaatttggcaagagactttagtaatatgccaccgaatgtattaacaccacaaacatttgcagaagatattgttaatcattttaaaaatacaaaggtcaaagtagatgttaaagattatgacactttagtttctgaaggattcggacttttacaagcagtaggtaaaggtagtaagcataaaccgagattagtaaccatcacatataatggcaaagacaaagatgaagcaccaattgccttagttggtaaaggtataacgtatgattctggtggttatagtattaaaacgaagaatggcatggctacaatgaagtttgacatgtgtggcgctgcgaatgtcgttggtatcattgaagcggctagtcgtttacaactgcctgtaaatattgtcggagtgcttgcgtgtgctgaaaatatgataaatgaagcatcaatgaagccagatgatgtatttacagcattaagtggtgaaactgtagaagtaatgaatacagacgctgaaggtagattagtccttgcagatgctgtgttttatgcaaatcaatatcagcctagtgtgattatggactttgctacattaacgggtgcagcaattgttgcactaggcgatgataaagctgctgcatttgaatcgaatagtaaagtgatattaaacgatatattacaaataagttctgaagtcgatgaaatggtatttgaattaccgattactgcaaccgaacgtgcaagtattaaacacagtgatatcgctgatttagttaaccatacgaatggacaaggtaaagcgctatttgcggcaagttttgtaacacattttagtggtcaaacacctcacattcatttcgatattgcaggtccagcaacgactaataaagcttcatataatggtccaaaagggccaacaggatttatgattccgacgatagtacaatggttaaaacaacaataa

SEQ ID NO: 405444 - DNA, 1209 bp, Staphylococcus aureus
atggctcaagatcgtaaaaaagtacttgtacttggtgctggttatgcaggtttacaaactgtaactaaattgcaaaaagcgatatcaacagaagaagcagaaattacgcttattaataaaaatgaatatcactatgaagcaacatggttacatgaagcatcagcaggtacactaaactatgaagatgtattatatcctgtggaaagtgtcttgaagaaagacaaagtgaactttgttcaagcagaagtaacaaaaattgaccgtgatgctaaaaaggtagaaacaaatcaaggtatttatgactttgatattttagtagtagcattaggtttcgttagtgaaacattcggcatcgaaggtatgaaagatcatgctttccaaattgaaaatgttatcacagcacgtgaattatcacgtcatatcgaagacaaatttgctaactatgcagcatcaaaagaaaaagatgataacgatttatctatcttagttggtggtgctggattcactggtgttgaattcttaggtgaattaacagacagaattcctgaattatgtagcaaatatggtgtggatcaaaataaagttaaaatcacttgtgttgaagcagcacctaaaatgttaccaatgttctcagaagaattagttaaccacgcagttagctacttagaagaccgcggtgttgaatttaaaattgctacaccaatcgttgcttgtaacgaaaaaggttttgtagttgaagtagatggtgaaaaacaacaattaaatgcaggtacttcagtatgggcagctggtgtacgtggtagtaaattaatggaagaatcatttgaaggcgttaaacgtggacgtatcgttacaaagcaagatttaacaatcaatggttacgacaacatttttgttattggtgactgttcagcgtttatcccagctggagaagaacgtccattaccaactacagcacaaattgcaatgcaacaaggtgaaagtgttgctaaaaacattaaacgcatcttaaacggtgaatcaactgaagaattcgaatacgttgatcgtggaactgtttgttctttaggttcacatgacggtgtaggtatggtatttggtaaacctatcgctggtaaaaaagcagcattcatgaaaaaagtgattgatacacgtgcggtattcaaaatcggtggtatcggtttagcattcaaaaaaggtaaattctag

SEQ ID NO: 405445 - DNA, 360 bp, Staphylococcus aureus
atgccaacagttatattaacagaagcagctgcttacgaagtaaaagatatgcttaaagcaaatgaaatgccagatggctatttaaaaattaaagtgaatggtggcgggtgcactggtttaacatacggtatgggtgcagaagaagcgcctggtgaaaatgatgaagtcttagaatactttggattaaaagtattagtagacaaaaaagatgcacccgtattaaatggtacgactattgattttaagcaatcattaatgggtggcggtttccaaatcgacaatcctaatgcaattgcttcatgtggctgtggtagttcatttagaactgcaaaagttgcaggtaatcctgaaaattgctaa

SEQ ID NO: 405446 - DNA, 237 bp, Staphylococcus aureus
atgaatccgatcgtagaattttgtctctctaacatggcaaaaggtggagattatgtttttaatcaactggaaaatgacccagatgtcgatgtgttagagtatggttgcctgacacattgtggtatatgttcagccgggttgtatgctttagtaaatggtgatattgttgaaggtgattcgccggaagaattattacaaaatatatatgcacatataaaagaaacttggattttttaa

SEQ ID NO: 405447 - DNA, 1065 bp, Staphylococcus aureus
atgaaaaacttagttttgttaggcggcggatatggtaatatgcgtatcatgtcacgcattttaactacttctttaccacaagattatacagtcacattagttgatcgtatgccatttcatggattgaaaccagaattttatgctttagctgcgggcacgaaatcagataaagatgttcgtatgaaattccctaatcatccacaagtgaatacagtttatggtgaaattaacgacatagatttagatgctcaaattgtctcagtcggtaattctaaaattgattatgatgagctaatcattggtttaggatgtgaagataaatatcataacgttccaggagccgaagaatatacacatagtattcaaacactctcaaaggctcgggatactttccatagtattagtgaactaccagaaggtgctaaagtcggtatcgttggtgctggattaagcggcatagaacttgccagcgaattaagagaaagtagatcagacttggaaatatatctttatgaccgtgggccgcgaattttaagaaattttccagaaaaattaagtaagtatgttgcgaaatggttcgccaaaaataatgttaccgttgttccaaattcaaatattaataaagttgaacctggtaaaatatataactgtgatgaacctaaagatattgatttagttgtatggacagcaggaattcaacctgttgaagttgttcgtaacttgccgattgatataaatagtaatggacgcgtgatagttaaccagtatcatcaagtaccaacatatcgtaacgtctatgtagttggtgattgtgctgatttaccacatgcgccaagtgctcagttagccgaagttcaaggtgatcaaattgccgatgtgcttaaaaagcaatggctaaatgaaccattacctgacaaaatgccggaactaaaggtacaaggtatcgttgggtcattaggagataagcaaggttttgcatatatcatggaccgcactgtaacaggacgactcgcttctattttaaaatccggcgtactttggttatataaatatcacaatggttaa

SEQ ID NO: 405448 - DNA, 324 bp, Staphylococcus aureus
atggagcacgtgagtgtggtagtttatggggcagatgttatatgtgcaagttgcgttaatgcgccaacatcgaaagatatttatgactggctacagccgctattaaaaagaaaatacccaaatatatcatttaaatatacgtatatagatattacaaaagataatgacaacttaacagatcatgatttacaatttattgaaagaatagaacaagatgaactattttatccattaattacaatgaacgatgaatatgtagcagatggttatatacaaacaaagcaaatcactcgatttatagaccaaaagcttgtgaatgaataa

SEQ ID NO: 405449 - DNA, 243 bp, Staphylococcus aureus
atgcctactgaagatacaacgatgtttgatcaagtagcagaagttattgaacgtcttcgtccatttttattacgtgatggtggcgactgctcattgattgacgtggaagacggtattgttaaattacaattacatggtgcatgtggtacatgcccaagttctacaatcactcttaaagctggtattgagcgtgcattacacgaagaagtgcctggtgtaatagaagtagaacaagtattctaa

SEQ ID NO: 405450 - DNA, 1176 bp, Staphylococcus aureus
atgaaattaaaaccttttttacccattttaattagtggagcggtattcattgtctttctattattacctgctagttggtttacaggattagtaaatgaaaagactgtagaagataatagaacttcattgacagatcaagtactaaaaggcacactcattcaagataagttatacgaatcaaacaagtattatcctatatacggctctagtgaattaggtaaagatgacccatttaatcctgcaattgcattaaataagcataacgccaacaaaaaagcattcttattaggtgctggtggttctacagacttaattaacgcagttgaacttgcatcacagtatgataaattaaaaggtaagaaattaacatttattatttcaccacaatggtttacaaaccatggtttaacgaatcaaaactttgatgctcgtatgtctcaaactcaaattaatcaaatgttccagcagaaaaacatgtctactgaattaaaacgtcgttatgcacaacgtttattacagtttccacatgtacacaataaagaatacttgaaatcttatgctaaaaaccctaaagaaactaaagatagttatatttctggttttaaagagaatcaattgattaaaatagaagcgattaaatcattgtttgcaatggataaatctccattagaacatgttaaacctgctacaaaaccagacgcttcttgggatgagatgaaacaaaaagcagttgaaattggtaaagctgatactacatcgaataaatttggtattagagatcaatactggaaattaattcaagaaagtaagcgtaaagttagacgtgactacgaattcaatgttaattctccagaattccaagatttagaattacttgtaaaaacaatgcgtgctgctggtgcagatgttcaatatgtaagtattccatcaaacggtgtatggtatgaccacattggtatcgataaagaacgtcgtcaagcagtttataaaaaaatccattctactgttgtagataatggtggtaaaatttacgatatgactgataaagattatgaaaaatatgttatcagtgatgccgtacacatcggttggaaaggttgggtttatatggatgagcaaattgcgaaacatatgaaaggtgaaccacaacctgaagtagataaacctaaaaattaa

SEQ ID NO: 405451 - DNA, 237 bp, Staphylococcus aureus
atggaatttagagaacaagtattaaatttattagcagaagtagcagaaaatgatattgtaaaagaaaatccagacgtagaaatttttgaagaaggtattattgattctttccaaacagttggattattattagagattcaaaataaacttgatatcgaagtatctattatggactttgatagagatgagtgggcaacaccaaataaaatcgttgaagcattagaagagttacgatga

SEQ ID NO: 405452 - DNA, 1215 bp, Staphylococcus aureus
atgattccatatggtgattttacattcttcttaattgctttaattgcattattaccagtcattatacttggatttttaggtaagcgaagttacatttataatggcgtagttacagcatttatgattgtgttaatcttttcttctgataaacataatctgtttgaccaaaagtatttaagtgttcaattaattagttttattatttacgtcgtatggcaagttttattgataatgttttattatcattcaaaaccaaaaaataattcattttcaaaatttgtaactgtaatggttttatcaatattgccattagcacttgtgaaagtgttacaaagtacatggttaggtggacatcagattcacttccatgaaagtaaattaattgaatttgttggtttcttaggaatttcttatgttacattcaaaagtgtgcagttaattatggaaattcgtgatggttctatcaaagaaattaaagtatggaaattaattcaatttatttcattcttcccaacgatttcatctggaccaatcgatcgttacaaacgtttcgttaaagacgataaaaaagtaccaacaggcaatgaatatcgtgaattagtattaaaagcaattcacatgattatgcttggtttcttgtataaatatattgttgcttactttattaacacatatgcaatcatgccgttacaattagacttacatggctttgtcaatttgtggttatatatgtacgcatacagcttatatttattctttgactttgcaggttatagtttatttgcgatagcatttagttatttattcggtattaaaacaccaccaaacttcgataaacctttcaaagcgaaaaatattaaagatttctggaatagatggcatatgacattatcattctggttcagagattgtatttacatgagatctttattctacatgtctcgtaaaaaattattgaagagtcaatttgcaatgtctaacgtggcattcttaatcaacttcttcataatgggaatttggcatggtatcgaagtgtattacattgtttatggtttataccatgcagcattgtttataggttatggctattatgaacgttggcgtaagaaacatccgccacgttggcaaaatggtttcacaacagcacttagcattgtgattacattccactttgtaacatttggctttttaatcttctcaggtaaacttatataa

SEQ ID NO: 405453 - DNA, 1458 bp, Staphylococcus aureus
atgacagatattattaacaagctgcaagcgtttgcggatgcaaatccacaaagcattgctgttagacacacaactgatgaattaacttatcaacagttaatggatgagtctagtaaattagcacatcgattacaaggtagtaagaaaccgatgattttattcggtcacatgtcaccatatatgattgttgggatgattggtgccattaaagcaggatgtggatatgtacctgtagacacttcaattcctgaagaccgtattaaaatgattattaacaaggttcaaccagagtttgtatttaatacgactgatgaatcatttgaaagtttagaaggcgaagtatttacaatagaagatattaaaacatctcaagatccagtaatttttgatagtcagattaaagataacgacacagtatacacaatctttacatctggttctactggggaacctaaaggtgttcaaattgaatatgcaagtttagttcaatttactgagtggatgttagaacttaataaatcaggaaatgaacaacaatggcttaaccaagcgccattttcatttgatttatctgtaatggctatttatccatgtttagcatcaggcggtacattaaatcttgtagataaaaacatgattaataaacctaaattattaaatgaaatgctaacagcaacaccgattaacatttgggtatcaacaccatcatttatggaaatgtgtttattattaccaacgcttaatgaagaacaatatggtagtcttaacgaattcttcttctgtggtgaaattctacctcacagagcagcaaaagcgttagtaaaccgtttcccaagtgcgacgatttacaacacatatggtccaactgaagctacggtagcagttacaagtattcaaattacacaagaaatcttagatcaatatccgacattacctgttggcgttgaaagaccaggcgcaagattatctactacagatgaaggtgaacttgttatcgaaggtcaaagtgtaagtttaggatacttaaaaaatgaccaaaaaacagctgaagtatttaatttcgatgacggtattcgtacatatcacactggtgataaagcgaagtttgaaaatggtcaatggttcattcaaggtcgtattgatttccaaatcaaattgaatggctacagaatggaattagaagaaattgaaacacaattacgccagtctgagttcgtaaaagaagcgattgttgtacctgtatataaaaatgataaagttattcatttaattggtgcaattgtgccaacgactgaagttacggacaatgcagaaatgactaaaaatattaaaaatgacttgaaatcacgcttaccagagtatatgattcctagaaagtttgaatggatggaacaattgccattgacttcaaatggtaaaattgacagaaagaaaattgcagaggtaattaacggatga

SEQ ID NO: 405454 - DNA, 153 bp, Staphylococcus aureus
atgaaatctaaaagtaaacagccacctaataaatatgttgaagcattcaaaccatatttattaacactattgtatttggcaatatatattactttatatttaatttatggcagtggcgacacacacaataacttcatttataatgagttctaa

SEQ ID NO: 405455 - DNA, 960 bp, Staphylococcus aureus
ttggtaaaaatagttgtttcgaggaaaattccagataaattttatcaacaattaagtaaacttggtgacgttgttatgtggcaaaaatcattagtgcctatgcctaaagatcaatttgtgacagcacttcgtgacgcagatgcttgttttattacattaagtgaacagatcgatgcagaaattttagcgcaatcaccaaatttaaaagtaattgcgaatatggctgtaggatatgacaacatcgatgttgaaagtgcaacagcgaataacgtggttgtcacgaatacaccaaatgtacttactgaaacaactgcagaattaggatttacattaatgcttgctatagcacgccgtattgtagaagctgaaaaatatgtagaagcagatgcatggcaaagctggggtccttatttattgtcaggtaaagatgtcttcaattcaactattggaatatatggtatgggagatattggtaaagcttttgcaagaaggttgcaagggtttaatactaatattctttatcataatcgatcaagacataaagatgcagaggcggactttaatgcaacatatgtttcttttgaaacgttgttagcagaaagtgattttatcatctgtacagcgccacttacaaaagaaacacatcataaatttaatgctgaagcatttgaacaaatgaaaaatgatgcaatttttattaatatcggtagaggacaaattgtagatgaaacagcattaatcgatgcactagacaataaagaaattttagcatgtggtttagatgtattagcaaatgaaccgattgatcatacacatccattaatgggacgtgataatgttctgattacaccacacattggtagcgcatcagtaacaacacgggacaatatgattcaattatgtattaataatatagaagcggttatgacaaatcaggtaccacatactccagtaaattga

SEQ ID NO: 405456 - DNA, 780 bp, Staphylococcus aureus
atgaaacagtataaagcgtatttaatcgatttagatggcacaatgtatatgggaacagatgagattgatggagcaaaacaattcatcgattatttaaatgtaaaaggcattcctcatttatacgtaactaataattcaacaaaaacacctgagcaagtaactgaaaaattacgtgaaatgcacattgatgctaaaccagaagaggttgtaacgtcagcgttagccactgctgattatatttcagaacaatcaccaggagcatcagtatatatgttaggtgggagtggtttaaatactgcgttaaccgaagcgggacttgtcattaaaaatgacgagcatgttgattatgtagttattggacttgacgaacaagttacatatgaaaagcttgcgattgcaacgttaggtgtaagaaatggtgcaacatttatttctacaaatcctgatgtatcaattcctaaagagcgtggtttattacctggtaatggtgctattacaagtgttgtaagtgtatcgacaggtgtatcgccacaatttattggtaaaccagaaccgattattatggttaaagcattagaaattttaggattagataaatccgaagttgctatggtaggcgatttgtacgataccgatattatgtctggtattaacgtaggtatggatacgattcatgtacaaacaggtgtatctacgttagaagatgtgcaaaataaaaatgtgccaccaacgtattcttttaaagatttaaatgaagcaatagctgaattagaaaaatag

SEQ ID NO: 405457 - DNA, 435 bp, Staphylococcus aureus
atgtattttgtagacaaagataaactaactcagaaattagcctatttacaagcattaactgatgattatcatgagagcaagcacaatcattatgcatttgaacgcattgctcaaatgttgatagaatcatcggtagatatagggaatatgattatcgatgcatttattttaagggatcctggtaattataaagatgtgattgatatattagaactagaaaatgttattactaaagaaacacagcaggcgattaataaaactgtcggtattcgtaaacaatttacatatgattacacagccttagatattaagattatcatgccaatgtttgatgacgcattaccttattacaaacaatttattacagaagtaacgacatttttacatcaagaaaatgtaccagtaacagcttttggtaaaggagaaaatcaataa

SEQ ID NO: 405458 - DNA, 267 bp, Staphylococcus aureus
atgattgatatgtatttatatgatgacaacgaagagagtcaagttcagtttgttggttttgttggcgagcatagtcgatatgatttgatgttagtccatacaaatagacattatggtaagacactcgtacttaatatgcaaacaaataaattcggtattatcggtactgatgatttaaaagaagaaggctatatcgctcatattttaggtgtaaattctgaagaaggcgatgaaattactgagtatttaaatgaagtcattcattaa

SEQ ID NO: 405459 - DNA, 384 bp, Staphylococcus aureus
ttgataaaagtagatcaacattactttgaattaatagaaaattatcgcgaatgttttaatgaagaacaatttattgctaggtattcagatattttagataaatatgattacatagttggtgactatggttacgatcaattacgattaaaaggtttttacaaagattctaataaaaaagcagagatgagtaaacgtttttcaaatattcaagattacatatttgaatattgtaactttggttgtccttactttgtattaagacatttgtctaaacaagaggttaaaaagttaatcgaagaagttcatccgtctgatgtgatagatgacgacaataaacttcaagatgtgaagattaagccaaccattcaagatactgaacattaa

SEQ ID NO: 405460 - DNA, 918 bp, Staphylococcus aureus
atggcgacaaaaaacgaggaaatattacgtaaaccggattggttgaaaataaaattaaataccaacgaaaactatacaggacttaagaagatgatgagggaaaaaaatcttaatactgtatgtgaagaagctaaatgtcctaatatacatgaatgttggggtgcacgtcgtacagcgacatttatgattttaggtgccgtatgtacaagagcttgtcgtttttgtgcggttaagacaggtttacctaatgaacttgatttaaatgagcctgaacgtgtagctgaatcagttgaattaatgaatttgaaacacgttgttatcactgctgttgcgcgtgatgatttaagagatgctggttcaaatgtttatgctgagacagtacgtaaagttagagaaagaaatccatttacaacgattgaaattttaccatcagatatgggcggggactatgatgcgttagaaacattaatggcgtcaagacctgacattttaaaccataatattgaaactgttcgtcgcttaacaccgagagttcgtgcgcgtgcgacttacgacagaacattagagtttttacgtcgttcaaaagaattacaaccggatatcccaactaaatcaagtattatggttggattaggtgaaactatagaagaaatttatgaaacgatggatgatttacgtgcgaatgatgtagatattttaacgattggtcaatatttacaaccttcacgtaaacatttaaaggttcaaaaatattacacgcctttagagtttggtaaattaagaaaagtggcaatggataaagggtttaaacattgccaagctggacctttagtacgtagttcttatcatgcggatgagcaagtaaatgaagctgctaaagaaaagcaacgccaaggtgaggcacagttaaatagttaa

SEQ ID NO: 405461 - DNA, 1320 bp, Staphylococcus aureus
ttgaggcttacaatttatcatacgaacgatattcatagtcatttacatgaatacgaacgcattaaagcatatatggcagaacatcggccacgacttaatcatccttctttatatgttgatctaggtgatcatgtagatttatccgcacctataactgaagcaactttaggtaaaaagaatgtggcattactaaatgaagcaaaatgtgatgttgcaacaatcggtaataatgaagggatgaccatttcacacgaagctttaaatcacctttacgacgaagcaaaatttatagtgacatgtagcaatgttatagatgaatcaggtcatttaccaaataatatcgtttcttcttatattaaggacatagacggtgtgaaaatactattcgttgcagcgacagcaccttttaccccattttatcgtgcactaaattggattgttaccgatccacttgaatctataaaagaagaaattgaacttcaacgaggtaaatttgatgtattaatcgtgctaagtcattgtggcattttcttcgatgaaacattatgccaagaattgcctgaaattgatgtcatttttggtagtcatacgcatcattattttgaacatggtgaaatcaataatggtgtactgatggcggcagctggaaagtatggtaattatcttggagaggttaatttaacttttgaggcacataaagtagtacataaaactgcaaagattattcctttagaaacattacctgaagttgaaacttcatttgaagaagaaggaaaaacgttaatgtccaattcagtaattcaacatccagtagtgcttaagcgtagtatgaatcacataactgaagctgcatacttattagctcaaagtgtttgtgagtatacacatgcacaatgtgccatcatcaatgctggcttactcgttaaagatattgtaaaagatgaagtgacagaatatgacattcatcaaatgttaccgcatccgattaatatggtaagggttagactttttggtgtgaaattaaaagagattatagctaaaagtaataaacaagaatatatgtatgaacatgcacaaggtttgggtttcagagggaatatatttggaggatatattctttataatttagggtacattcattctacagggcgttactatctgaatggagaagaaatcgaagacgacaaagaatatgtactaggtacgatagatatgtatacgttcggtcgttatttcccaacattgaaagaattaccaaaagagtatttaatgccagagtttttaagagatatatttaaagaaaaattattggaatattaa

SEQ ID NO: 405462 - DNA, 828 bp, Staphylococcus aureus
atgttattaacaattacattattagttttaatcggaggtttgtcagcgattatagggtctatcgtaggcattggaggcggtattattatcgttccaacaatggtttacctcggtgttgaacatggattactacataatattacaacacaagtagcgatagggacgtcttcagtcattctaattgtgacaggactttcttcatcacttggatatttaaaaacaaaacaagttgatattaaaaatggttccatctttttatttggactattaccaggttcattgcttgggtccttcattagtagatatttaacatttgagtcatttaatttatattttggtatctttttaattttcgtagccattttattaatggtaagaaataagattaaaccgtttaaaattttcgataaacccaagtatgaaaagacttatgtagacgctaaaggtaaaacatatcattatagtgttccaccattgtttgcttttattacaacgtttttaattggtatattgacaggtttatttggtattggaggtggcgcactaatgacgccactaatgcttattgtatttagatttccacctcatgtagctgttggaacaagtatgatgatgattttcttttcaagtgtcatgagttctatagggcacattgctcaaggtcacgtagcttggggttatgcaatcattttaattatttctagttattttggtgcgaaaatcggtgtcaaagtgaatcaatcaattaagtcagatacggtagtaacattattgagaacagtaatgttgttaatgggtatatatttaattattcgtgcgttgatttaa

SEQ ID NO: 405463 - DNA, 849 bp, Staphylococcus aureus
atgataaacatcggattaacaggttggggtgatcactattcattatatgaagatttagaacgccaaaccgataaacttaaaacatatgctggacattttccggttgtcgaattagatgcgacatactatgcgatacaaccggaaagaaatatattgaaatggataaaagaaacgcctgatacatttgaatttgtggtcaaaattcatcaagcactcacattgcatgcagactacaaaacatttgcagatacaaggcaagaactatttgatcaatttaagaatatgttagagcccttacatacacagaaaaaattagcaatggtattggttcaatttccgccatggtttgactgcaatgcacaaaatatcaaatatattttgtatgtaagacagcaattacaagcatttccaatgtgtgtagaatttaggcatcaatcatggtttagtgatgcatttaaagaacaaacattggcatttttaacagaacatcaaatcattcatgcagtagttgatgaaccacaagtgaaagatggcagtgtacctttagtcaatcgaatcacaaatgaaattgcgtttgtacgttatcatggacgtaatcattacggttggactaagaaagatatgtcagatcaagaatggcgcgatgtacgctatttatatgattataatgagcaagaattaatagacttggcacaaaaggcacaaatattagcacaaaaagctaagaaagtttacgtcatatttaacaataattctggtggtcatgcagcaaataatgccaaaacatatcagcgattattgaatatagaatatgaagggttagcaccacaacaattaaaattattttaa

SEQ ID NO: 405464 - DNA, 1068 bp, Staphylococcus aureus
atgtggaataagaatcgacttactcaaatgttaagtattgaatatccaattatacaagcaggtatggcaggaagtacgacaccgaaattagttgcatcagtaagtaacagtggtgggttaggcacaataggcgcaggttactttaatacgcagcaattggaagatgaaatagattatgtacgccaattaacgtcaaattcttttggcgtaaatgtctttgtaccaagtcaacaatcatataccagtagtcaaattgaaaatatgaatgcatggttaaaaccttatcgacgcgcattacatttagaagagccggttgtaaaaattaccgaagaacaacaatttaagtgtcatattgatacgataattaaaaagcaagtgcctgtatgttgttttacttttggaattccaagcgaacagattataagcaggttgaaagcagcgaatgtcaaacttataggtacagcaacaagtgttgatgaagctattgcgaatgaaaaagcgggtatggatgctatcgttgctcaaggtagtgaagcaggtggacatcgtggttcatttttaaaacctaaaaatcaattacctatggttggaacaatatctttagtgccacaaattgtagatgtcgtttcaattccggtcattgccgctggtggaattatggatggtagaggagttttggcaagtattgtcttaggtgcagaaggggtacaaatgggcaccgcatttttaacatcacaagacagtaatgcatcagaactactgcgagatgcaattataaatagtaaagaaacagatacagtcattacaaaagcgtttagtggaaagcttgcacgcggtatcaacaataggtttatcgaagaaatgtcccaatacgaaggcgatatcccagattatccaatacaaaatgagctaacaagtagcataagaaaagccgcagcaaacatcggcgacaaagagttaatacatatgtggagtggacaaagcccgcgactagcaacaacgcatcccgccaacaccatcatgtccaatataatcaatcaaattaatcaaatcatgcaatataaataa

SEQ ID NO: 405465 - DNA, 1041 bp, Staphylococcus aureus
gtgatcattgccataattatattgatatttatttcgtttttcttttcaggaagcgagacggcattaacggctgccaataaaacaaaatttaaaactgaagctgacaaaggtgataaaaaagcaaaaggcattgtaaagttacttgaaaaaccaagtgagtttattacaacgattctaattgggaataatgtcgcgaatattttattaccaacacttgttacaattatggctttacgttgggggattagcgttggtattgcatcagctgttttaacagttgttatcattttgatctccgaagtgattcccaagtctgtcgctgcaacatttccagataaaataacaaggcttgtatatccaattattaatatttgtgtcattgtgttccgtcctatcacattacttttaaataagttgacggacagtattaatcgaagtttatctaagggccaacctcaagaacatcaattttcaaaagaagaatttaaaacaatgttagcaattgctggacatgaaggtgctttaaatgaaattgagacgagtaggttggaaggtgtcattaattttgaaaatttaaaagtaaaagatgtagatacaacacctagaattaatgtgacggcatttgcttcaaatgcgacatacgaagaagtttatgaaacggttatgaataagccatacactagatatccagtgtacgagggagatattgataacattattggggtgtttcattctaaatatctgttggcttggagtaataaaaaagaaaatcaaattacaaactattcagctaagccattatttgtgaatgaacacaataaagctgaatgggtattacgtaagatgactatttctagaaaacatttagcaattgtgttggacgaatttggtggtactgaagcgatagtgtcacatgaagacttaattgaagaattattaggtatggaaattgaagatgagatggataaaaaggaaaaagaaaaactttctcaacagcaaattcaatttcaacaacggaaaaatcgcaacgtatctatataa

SEQ ID NO: 405466 - DNA, 315 bp, Staphylococcus aureus
atgtattttgttttagcaatatttacaataatcagtgccagtgtaagtttaggttattcaattcaagcatgtgcatctagccataatataaatgcatattatgcacttagtcgaagcttacctttatttttattagctattttttctttagtcattcatagtgctatatttttgataactatatccattgcaatgatcttagttcaatttttagatgcgattgttggttataaaagtgaagatgtctttaaaacttatggtccattagcaacatctgtagtgaacttaatattattaatagttttcttattttaa

SEQ ID NO: 405467 - DNA, 1398 bp, Staphylococcus aureus
atggctaaaaaagcacctgatgttggggattataaatatggattccacgacgatgatgtgtccattttcagatcagaacgtggtttaactgagaatatcgttagagaaatttctaacatgaaaaatgagccggaatggatgttagatttccgtcttaaatcattaaaattgttttataaaatgccaatgcctcaatggggtggcgacttatcagaattgaatttcgatgacattacttactatgtaaagccttcagaacaagctgaacgttcatgggatgaagtgccagaagaaattaaaagaactttcgataaattaggaattcctgaagctgaacaaaaatatttagctggtgtttctgctcaatatgaatctgaagttgtttaccataatatggaaaaagaacttgaagaaaaaggtattatctttaaagatacagatagtgctttacaagaaaatgaagaattattcaaaaaatactttgcttctgtagtacctgcagcagataacaaatttgcggcgttaaactcagcagtatggtcaggtggttcgttcatttatgtacctaaaaatatcaaactagatacgccactacaagcttatttccgtattaactctgagaacatgggtcaatttgaacgtacattaatcattgctgatgaaggtgcttctgtacattacgtagaaggttgtactgcaccagtttatacaactagttctttacactctgctgttgtggaaatcattgtgcataaagatgcgcacgttcgttatactacgattcaaaactgggcgaacaatgtatacaatttagttacaaaacgtacttttgtttatgaaaacggaaatatggaatgggtagatggtaacttaggttctaagttaacgatgaaatatccaaactgtgttcttttaggtgaaggtgcaaaaggtagtacattatctattgcatttgctggtaaaggacaagttcaagatgccggtgctaaaatgattcataaagcacctaatacatcttctacaattgtttctaaatctatttctaaaaatggtggtaaagttatttatcgcggtattgttcattttggacgtaaagcaaaaggtgctcgttcaaatattgaatgtgatacattaatcttagataacgaatcaacatcagatacaattccatataacgaagtattcaacgatcaaatatcattagaacatgaagccaaggtttcaaaagtttctgaagaacaattattctatctaatgagtcgtggtatttctgaagaagaagcgacagaaatgattgttatgggattcatcgaaccatttacaaaagaacttccaatggaatacgcggtcgaaatgaaccgtttaatcaagttcgaaatggaaggtagtattggatag

SEQ ID NO: 405468 - DNA, 465 bp, Staphylococcus aureus
atgaattttaataatctagatcaattatatagatctgtcattatggatcattataaaaatcctagaaataaaggtgtattagataacgggtctatgacagtagatatgaataacccgacatgcggtgaccgtatacgactaacatttgatatagaagacggcattataaaagatgctaagtttgaaggtgaaggttgttcgatttcaatggcaagtgcatcgatgatgacacaagctgttaaaggtcattcacttggagaagcaatgcaaatgagccaagaatttacgaaaatgatgcttggtgaagactatgtgattacagaagaaatgggagatattgaagcattgcaaggtgtatctcaattcccagctcgtattaaatgtgccacattagcttggaaagcattggaaaaaggtactgttgctaaagaaggtaaagcagaaggtacgactgaagaagaatag

SEQ ID NO: 405469 - DNA, 1242 bp, Staphylococcus aureus
gtggccgaacactcatttgacgttaatgaagtaatcaaggattttccgatattagatcaaaaagtcaatggcaaacgtttagcatatcttgattcaacagcgacaagtcaaacgcctgtgcaagtgttaaatgttttagaagattactacaagcgttataattcaaacgttcatcgtggtgttcatacattaggatcattggcaactgatggttatgaaaatgcccgtgaaaccgttcgtcgttttattaatgcgaagtattttgaagaaatcatttttacacgcggaacaactgcgtcgattaaccttgtagcacatagctatggtgatgcaaatgttgaagagggcgatgaaattgttgtcactgaaatggaacatcatgccaatattgttccttggcaacagttagcaaagcgtaaaaatgcgacattgaaatttataccaatgacagctgacggtgaattaaacatcgaggatattaagcaaacgattaatgataaaacaaagatcgttgctattgcacatatatctaatgtgctcggtacaattaatgatgttaaaaccattgcagaaatagctcatcaacatggtgcaattatcagtgttgatggggcgcaagcagcaccacatatgaaacttgatatgcaagaaatgaatgctgatttttatagttttagtggtcataaaatgcttggaccaacaggtattggcgtattatttggtaaacgtgagttactacaaaaaatggaaccgattgagttcggtggcgacatgattgattttgtaagtaagtatgatgcaacatgggctgatttacctactaaatttgaggcgggtactccattaattgctcaagcaattgggcttgcagaagctattcgctatttagaacgcataggttttgatgcaattcataaatatgaacaagaattaacgatatatgcttatgagcaaatgtctgcaattgaaggaattgaaatttatggcccgccaaaggatcgtcgtgcaggtgtaataacgtttaatttacaagatgtacatccacacgatgttgctacagccgtagatacagaaggtgtagcggttagagctgggcatcattgtgcgcaaccgttaatgaaatggttaaatgtgtcttcaacagctagagcgagtttttatatatacaacacgaaagaagacgttgatcagttaataaatgccttgaaacaaacgaaggagtttttctcttatgaattttaa

SEQ ID NO: 405470 - DNA, 1308 bp, Staphylococcus aureus
atgacaactgatattttgaacatttctgaagaacaacttgttgattattctaaagcccacaatgaaccttcttggatgacagaattacgtaaaaaagctttgaaattaacagaaactttagaaatgccaaaacctgataaaacaaaattaagaaaatgggattttgattcttttaaacaacacgatgtaaaaggtgatgtttatcaatctttatcacaattacctgagtcagtaagagaaattattgacgtagatcattctaaaaacttagtaattcaacataataatacgattgcgtacacacaagttgatgataatgcatcgaaagatggcgttatcgttgaaggtttagcagacgctcttatgaaccatagtgatttagtacaaaagtactttatgaaagatgcagtaacagtagatgaacatcgtatcacagcgctacacacggcattagttaatggtggcgtatttgtttatgttcctaaaaatgtagttgtagaacatccagtacaatacgttgtgttgcacgacgacgaaaatgcaagcttttataaccatgttatcatcgttactgaagaaagcgccgaagtcacatatgttgaaaattacttatcaaatgcatctggtgaaggaaatcaattaaatattatttctgaagtgattgctggtgcaaattcaaatatcacatatggctcagtggactatatggataaaggctttacaggtcatatcattcgacgtggtattactgaagcggatgcctcaattaattgggcactaggtttaatgaatgagggtagccaaattattgataatacaacaaatttatttggtgatcgttcaacaagttcacttaaatcagtagttgtaggtacaggcgaacaaaaaattaatctaacatctaaaatcgtacaatatggtaaagaaacagatggttatatccttaaacatggtgttatgaaagaacatgcatcgtctgtatttaatggtatcggctacattaagcatggtggaactaaatcaattgctaatcaggaatcacgtgtattaatgttatctgaacatgctcgtggtgacgcgaatcctattttattaattgatgaagatgatgtacaagctggtcatgctgcatcagtaggtcgtgttgatccagatcaactttactatttaatgagtcgtggtatttctcaaagagaagcggaacgtcttgttatacatggtttcttagatccagtagtacgtgaattacctatcgaagacgttaaacgtcaattgagagaagtaattgaacgcaaagtttctaaataa

SEQ ID NO: 405471 - DNA, 762 bp, Staphylococcus aureus
atggcatcaacattagaaatcaaagacctacatgtgtctattgaggataaagaaatcttaaaaggtgttaacttgacaattaacactgatgaaatacatgcgattatgggaccaaacgggacaggtaaatcaactttatcatctgcaattatgggacacccaagctatgaagtaactaaaggagaagtacttttagacggtgtaaatattttagaattagaagttgatgaaagagcaaaagcaggattattcttggcaatgcaatatccatcagaaattacaggtgttacaaatgctgatttcatgcgttcagcaatcaatgcgaaacgtgaagaaggacaagaaatcaacttaatgcaatttattaagaaattagataaaaacatggattttctagacatagataaagacatggcacaacgttatttaaatgaaggtttctcaggtggagagaagaaacgtaacgaaatcttacaattaatgatgttagaacctaagtttgcaatcttagatgaaatcgattcagggttagacatcgatgcattaaaagttgtatctaaaggtattaaccaaatgcgtggggaaaactttggtgcattaatgattacacactatcaacgattattaaattacattactcctgataaagtacatgtaatgtatgctggtaaagtcgttaaatctggtggtccagaattagcaaaacgtcttgaagaagaaggatatgaatgggttaaagaagagttcggttcagctgaataa

SEQ ID NO: 405472 - DNA, 852 bp, Staphylococcus aureus
atgcaacaatttaaatggattaatattctaaaaggttttgctatgggaacgagtgacttggtacctggtgttagcggtgggactatcgcattattgttaggtatttacaatcaatttatcgcttcaattagcggcatattctcacgacgtttttggccaagttttacatttttaatccccattataattggaatgttactggcaatgggatcactaagtaatctttttaattatttattaagccaacaccatattccaactatgtttttctttggtggattaatcattggtatcgttccatatttattgaaaatttctaactataaaacgtcatttacaactaaacattacatgatggttatagctggtatcgctatcttaattgttattacattaatgaataatggtgataaacatgctggagaaacacttactctatcaactagtcttattattaaatattttattgcaggtatgtgtgcatctagtgctatgttactcccaggtatttcagggtcatttatgttattagtatttggcgtctatggtacggtcatgctagcaatatctgaagttgttaaacttaactttgcaggtcttcctatattacttgcagtcggatttggcgtgcttgctggattcattatttcaagcaaaattatccagtatttcctaacacatcataaactaatgacttttgcattaatcattggttttgttgttggctccctctttgcagtatttccaggtttaccaactaatatcgtgatgtggttcgtttcattagtagtatttatcatcggttttattgtaagtttgactttaggtcgaattaccgctgaaaatgaataa

SEQ ID NO: 405473 - DNA, 195 bp, Staphylococcus aureus
atggcagacgaaagtaaatttgaacaagcaaaaggtaatgttaaagaaacagtaggtaatgttactgataataaaaatttagaaaacgaaggtaaagaagataaagcttctggtaaagcgaaagaattcgttgaaaatgcaaaagaaaaagcaactgattttattgataaagtaaaaggtaacaaaggcgagtaa

SEQ ID NO: 405474 - DNA, 291 bp, Staphylococcus aureus
gtggaaattgaattaaaacgagatatggttgattgttggaaagattgttttgatgatttgcatattttaaaaccgaatttaaaaatgattgaaaatatacaagaacgagcaatgcttcatttattaactcacgaagaagaggaatggggaaatttagaaagacgtactaaaaataaatatagagataagttgaaaaatatagcgtctattgatttgacagatttaatgaaaatatctttaagaggaaatgaaaaccaattgcaaaaacaaatcgacttttggttgaattaa

SEQ ID NO: 405475 - DNA, 486 bp, Staphylococcus aureus
atgtctaacgcagagagactttcacattttatgagtactaatcctgaaattcggctttgggatattttacaaacaaactttaaagctaaagctcttaaagaaaaagtttatattgaatatgacaaaataaaagcaactctttggaatagacgtagtatgcgcgttgaatttaatcctaataagctttcgcatgatgaagtgctttggttaaaacaaaatatcatcagttatttggacgatgttagttttacgagattagatttggcttttgattttgaatttgatttaaatgactattatgcattgtcagataagtcggtaaagaaaactatattttatggacgtaatgtaaaaccagaaacaaaatattttggtgtgcgtaatagtgataggtttattcggatttataataaaaacaagaacgtaaagataatgcagatgttgaaattgattcaacatttctatggcgtgtggaaattgaattaa

SEQ ID NO: 405476 - DNA, 1536 bp, Staphylococcus aureus
atgtcaaacatagcattttatgtcgtgagtgacgtacatggttatattttcccaacagattttacgagtagaaatcaatatcaacctatgggattgttactagcgaatcatgttatagaacaagacagaaggcagtatgaccaaagttttaaaatagataatggtgattttttgcaagggtcaccattttgtaattacttaatcgcgcatagcggcagtagccagcctttagttgatttttataatcgaatggcattcgactttggtacgcttggtaatcatgaatttaattatggattaccatacttaaaagacactttacgcagactcaattatccagttttgtgcgctaatatatatgaaaatgatagtacattgactgataacggtgtgaagtattttcaggttggagatcaaactgttggtgtgataggtttaacgacacaatttattccccattgggaacaaccagagcatattcagtcacttacgtttcatagtgcttttgaaatacttcaacaatacttacctgaaatgaagcgacatgcagatatcattgtggtttgttaccatggtggatttgaaaaggatttagaaagtggtacgccgaccgaagtattaacgggtgaaaatgaaggatatgccatgttagaagcgttttctaaagatatagatatctttattacgggtcaccaacatcgacaaattgctgaaaggtttaagcaaacggctgtgattcaacctggtacgagaggtacaactgtaggcagagtagtcttgagtactgatgaatatgaaaatctatccgttgaatcatgtgaattacttcctgttatagatgattccacatttactattgatgaagatgaccaacatttacgaaagcagttagaggactggttagattacgaaattactacattgccatatgatatgacgattaatcatgcatttgaggcacgtgtggcaccgcatccttttacaaattttatgaattacgctttattagaaaaaagtgacgcagatgttgcctgtacagctttgtttgattctgctagtggtttcaagcaagtcgtgacgatgcgagatgttattaacaattacccatttccaaatacatttaaagttttagctgtaagtggtgccaaacttaaagaagccattgaacgatcagcagaatattttgacgtgaaaaatgatgaagttagtgtgagcgcagacttccttgaacccaaaccacaacactttaattatgatatatatggtggcgtaagttataccattcatgttggaagaccaaagggacaacgtgtgagcaatatgatgattcaaggtcacgcagttgatttaaagcagacatatacaatttgtgtaaataattatcgtgcagtaggcggtggtcagtatgatatgtatatcgacgcgccagttgtaaaagatattcaagttgaaggcgcacaattacttattgattttttatcaaataataatttgatgcgcatcccgcaagttgttgattttaaagttgaaaagtga

SEQ ID NO: 405477 - DNA, 1545 bp, Staphylococcus aureus
atgaaaaaaatatataagtcattaactgtctctgcaattgttgcaacggtatcattaagtgctttaccgcaatctttagctataacgcatgaatcgcaacctacaaagcaacagcgaacggtattattcgatcgttctcatggtcaaacagctggtgctgcagattgggttagtgatggtgcattttcagattatgcggattcaatacaaaaacaaggttatgacgttaaagctattgatggtcattcgaacataacagaagcaagtttgaaaagttccaaaatatttgtaattcctgaggctaacattcctttcaaagaatcagaacaggcagcaattgttaaatatgtgaaacaaggtggcaatgttgtctttatttcagatcattacaatgctgaccgaaatttaaatcgtattgattcatcggaggcaatgaatggttatcgacgtggagcatatgaagatatgtcgaaaggtatgaatgcagaagaaaaaagttctactgcaatgcaaggtgtgaaaagttcagattggttatctacaaactttggcgtacgttttcgatataatgcactaggtgatttaaatacgagcaatattgtttcttcaaaagaaagtttcggtattactgaaggtgtgaaatctgtctctatgcatgccggatcgacattagcaattactaatccagagaaagcaaaaggtattgtgtatacaccagaacaattgccagcgaaaagtaaatggtcacatgctgtagatcaaggtatttataatgggggcggtaaagcagaaggcccctatgtagcaatttctaaagttggaaaaggtaaagcagcatttatcggtgattcatcacttgtggaagatagttcgcccaaatatgtaagagaagataatggagaaaagaagaaaacatatgatggttttaaagaacaagacaacggtaagctattaaataatataacggcttggatgtctaaagataatgatgggaaatcacttaaggcgagtagcctaacattagatacaaagactaagttgcttgattttgaacgaccagagcgttcaactgagcctgaaaaagagccatggtcacaaccgccgagtggttataaatggtatgatccaacaacatttaaagcaggtagttatggcagcgaaaaaggcgcagatcctcagccaaacacaccagatgatcatacaccaccaaatcagaacgaaaaagtaacatttgatatcccgcaaaatgtttctgtaaatgagccatttgaaatgacaatacatttaaaaggatttgaagcaaatcaaacacttgaaaatcttagagttggtatttacaaagaaggcggacgtcaaatcggacaattttcaagtaaagataacgattataacccaccaggttacagtactttgccaacagttaaagcagatgaaaacggaaatgtcacaattaaggtcaatgctaaagtacttgaaagtatggaaggttcaaagattcgtttaaaactcggtgacaaaaccttgattacaacagacttcaaataa

SEQ ID NO: 405478 - DNA, 957 bp, Staphylococcus aureus
atgaaaaattttaagtgtttatttgtattaatgttagcagtcattgtttttgcagcagcatgtggaaactcaagttctttagataatcaaaagaacgctagtaatgattcggattctaaatcaggaggatacaaacctaaagaattaaccgttcaatttgtaccttcgcaaaatgctggaacattagaagctaaagcaaaaccattagaaaaattactatctaaagaattagggattccagttaaagtgtctgtatcaactaactacaatacaattgttgaagctatgaagtctaaaaaagttgatgttggtttcttaccaccaacggcatacacattagcacatgatcaaaaagcagctgatttattattacaagcacaacgtttcggtgtaaaagaagatggttcagcaagtaaagaacttgtagatagttataaatcagaaattcttgttaaaaaagactcaaaaattaaaagcttgaaagatttaaaaggtaagaaaattgccttacaagatgtaacatcaactgctggatatacattcccacttgcgatgttaaaaaacgaagcaggtattaatgcaactaaagatatgaaaattgtgaatgttaaaggtcatgaccaagcagttatctcattattaaatggagatgtagatgctgcggctgtatttaacgatgcacgtaatactgtgaaaaaagaccaaccaaatgtatttaaagacacacgaattttaaaattaacacaagctattccgaatgacacaatttctgtaagaccagatatggataaagattttcaagaaaaattgaaaaaagcttttatagacattgctaaatcaaaagaaggtcacaaaattattagcgaagtttattcacatgaaggatacacagaaacgaaagattcaaatttcgacattgtaagagagtacgaaaaattagttaaagatatgaaataa

SEQ ID NO: 405479 - DNA, 774 bp, Staphylococcus aureus
atgagtcaaatcgaatttaaaaacgtcagtaaagtctatcctaacggtcatgtaggcttgaaaaatattaacttaaatattgaaaaaggtgaatttgcagttattgtcggactatctggtgctgggaaatccacgttattaagatctgtaaatcgtttgcatgatatcacgtcaggtgaaattttcatccaaggtaaatcaatcactaaagcccatggtaaagcattattagaaatgcgccgaaatataggtatgattttccaacattttaatttagttaaacggtcaagtgtattacgaaatgtactaagtggacgtgtaggttatcaccctacttggaaaatggtattaggtttattcccaaaagaagacaaaattaaggcaatggatgcactagaacgcgtcaatatcttagataaatataatcaacgctctgatgaattatcaggtggccaacaacaacgtatatctattgcacgtgcgctatgccaagaatctgaaattattcttgcagatgaaccagttgcttcattagacccattaactacgaaacaggttatggatgatttaagaaaaatcaaccaagaattaggcatcacaattttaattaatttacattttgttgacttggcaaaagaatatggcacacgcatcattggtttacgtgatggtgaagttgtctatgatggtcctgcatctgaagcaacagatgacgtatttagtgaaatatatggacgtacaattaaagaagatgaaaagctaggagtgaactaa

SEQ ID NO: 405480 - DNA, 801 bp, Staphylococcus aureus
atgcctttagaaatacctacaaagtatgactcccttttaaagaaaaaggtttctttaaaaacgagttttaccttcatgttaatcattgtgcttatcatttggagcttcatttatacgggatttaattttggagatttaatgataggaatacctcaaataggtgatctattcaaacaaatgattccacctgatttcgagtatttacaacaaattacaacgccaatgttagataccattcgaatggctatcgtaagtacagtattaggtagcatcgtttcaataccaattgcgttattatgtgctagcaatatcgttcatcaaaagtggatttcaataccctcgcgctttattttaaatatagttcgtactattccagatttgttattagcagcaatctttgtggctgtatttggaatcggtcaaattccagggatattagcactgtttattttaactatctgtattattggaaaattattatatgaatcattggaaacgatagatccaggtccaatggaagcaatgacggctgttggcgctaataaaataaaatggattgttttcggtgttgtaccacaagccatatcgtcatttatgtcatacgtattatatgcatttgaagtaaatatacgtgcttcagctgtgcttggattagtcggcgctggcggtattggattgttttatgatcaaacacttggtttatttcaatatccaaaaacagcaacgattattttatttactttagttatcgtcgtcgtcattgattacatcagtacgaaagtgagggcacatctcgcatga

SEQ ID NO: 405481 - DNA, 816 bp, Staphylococcus aureus
atgacacaggaaatagcaaaatataatgttcacacaaaagcacacaaacgaaaattgattaaaagatggcttattgcaattgtcgtcttagctattatcatctgggcatttgcaggtgtaccaagtttagaacttaaaagtaaatcattagaaatcttaaaatccatattcagcggattattccatcctgatatcagctatatctatataccagatggcgaagacttattacgtggtttacttgaaacctttgcgatagccgttgtaggtactttcatcgccgcaattatctgtattccattagcatttctaggtgcaaataatatggtaaagctacgcccagtttcaggtgttagcaaatttattttaagtgttatacgtgtcttcccagaaattgtaatggcacttatatttatcaaagctgttggcccaggttcattttcaggtgtattagctttaggtatccattccgtaggtatgcttgggaaacttttagctgaagatattgaaggtctagatttcagtgctgtagaatcattaaaggccagtggtgcgaataagattaaaacactcgtatttgcagtcataccacaaattatgcctgcctttctatcactcatactttatcgctttgaactaaacttacgttcagcttctatactggggctaattggggctggtggtatcgggacaccactcatatttgccattcaaacacgttcttgggaccgtgtaggtattatattaatcggtttagtactaatggtcgcaattgtcgatttaatttccggttcaatccgaaaacgtattgtttaa

SEQ ID NO: 405482 - DNA, 1179 bp, Staphylococcus aureus
atgacaagaccatttaatcgtgtacatttaatcgtaatggattcagtaggtattggtgaagcgccagacgcagctgattttaaagatgaaggttcacatactttaagacataccttagaaggtttcgatcaaactttaccaaaccttgaaaagttaggtctagggaacatcgataaattaccagtagtaaatgcagttgaacaaccagaagcatactatactaaattgagtgaagcttcagttggtaaagatacaatgactggtcactgggaaattatgggattaaatattatgcaaccttttaaagtataccctaatggattccctgaagagttaattcaacaaattgaagaaatgacaggtcgtaaagttgttgctaacaaaccggcatcgggtacgcaaattatcgatgagtggggcgagcaccaaatgaaaactggtgacttaattgtttatacaagtgcagacccagtattgcaaattgctgcacatgaagacattatcccattagaagagttatatgatatttgtgaaaaggttcgtgagttgacaaaagaccctaaatatttaattggtcgtattatcgcacgtccatatgttggtgaaccaggaaactttacacgtacatctaatcgacatgactatgcgttaaaaccttttggtaaaactgtcttagatcatttgaaagacggtggttatgatgttattgccatcggtaaaattaatgacatttatgatggtgaaggtgtaacagaagcggttcgtacgaagagtaacatggacggtatggatcaattgatgaaaattgttaagaaagatttcacaggtattagcttcttaaacttagtagactttgatgcattatacggtcatcgtcgtgataaaccaggttatgcacaagcaattaaagatttcgatgatcgcttgccagaactgtttagcaacttaaaagaagacgatttagtaattattacagcagaccatggtaatgacccgacagcgccaggtacggaccatacgagagaatatatcccagtaattatgtacagtccgaaatttaaaggtggtcatgcactagaaagtgatactacattcagttctatcggtgcaactatagcagataatttcaacgtaacattaccagagttcggtaaaagttatttaaaggaattgaaatag

SEQ ID NO: 405483 - DNA, 663 bp, Staphylococcus aureus
atgaaatttgagaaatatatagatcacactttattgaagcctgagtcaacacgtacgcaaatcgatcaaatcatcgatgaagcgaaagcatacaattttaaatctgtatgtgtgaatccaacacatgttaaatatgcagcagagcgactagctgattcagaggtgctcgtttgtacggtaataggattcccattaggtgcgtcgacaactgcaacgaaagcatttgaaacagaagatgcaattcaaaatggtgcagatgaaattgacatggtcatcaacatcggcgcattaaaagatggacgttttgatgatgtacaacaagacattgaagcagtggttaaagctgcgaaaggtcacacagtaaaagtgattattgagacggtattgttggaccatgacgaaattgtaaaagcgagtgaattaacaaaaacggctggtgcggacttcgttaaaacttcaacaggttttgcaggtggcggtgcgactgcagaagacgttaaattaatgaaagatacagtaggtgctgatgtagaagtaaaagcatcaggtggcgtacgtaatttagaagatttcaataaaatggttgaagcaggtgcgacacgtattggtgcgagcgcaggtgttcaaattatgcaaggtttagaagcagattcagattactaa

SEQ ID NO: 405484 - DNA, 1359 bp, Staphylococcus aureus
atgattatgaatgttgaatattctaaaataaagaaagcagtacctattttattattcttatttgtattcagtttggttatagacaactcatttaaattgatttctgtagccattgctgatgacttaaacatatctgtaacgacagtaagttggcaagcgacattagccggtttagtaattggtattggcgctgtagtatacgcttcattatctgatgccattagtatacgcacactatttatttatggcgtgatattaatcattatcggatcaattattggttacattttccaacatcaattcccattacttttagttggacgtattattcaaactgccggtttagctgctgcagagacattatatgtgatatatgttgcaaagtatctttctaaagaggaccagaagacttaccttggcttaagtacgagcagttattccttgtcattagttatcggtacattatcaggtggatttatttctacgtatttacactggacaaatatgtttttaattgcattaatcgtagtatttacgttgccattcctatttaaattattaccaaaagaaaataatacgaataaagctcatttagattttgttggcttaattctagtggcaactattgctacaacagtcatgctgtttattacgaactttaattggttatatatgattggtgccttaattgcgattatcgtttttgcgctatatattaaaaatgcgcaacgtccattagtaaataaatcatttttccaaaataaacgttatgcttcatttttatttatagtatttgtaatgtatgctatccaattgggttatatttttacgttcccattcataatggagcaaatttatcatctgcaactagacacaacatcactgttattagtaccgggttatatagtagcagtcattgttggtgcactaagtggtaaaatcggcgaatatctgaattcaaaacaagcgattatcacagcaattattttaatagcactgagcttgattttacctgcatttgcagtaggtaatcacatttcaatcttcgtcatttctatgatattctttgcaggtagctttgctttaatgtatgcacctttacttaacgaagccattaaaacaatagatcttaatatgacaggtgtggctattggtttttataatttaattattaatgtggcggtatctgtaggtattgcgattgctgcggctctaatcgattttaaagcattaaatttcccaggcaatgatgcattaagttcacatttcggtattattttaattattttaggtttaatgagtattgtcggattagttttattcgtcagcttaaatcgttggacacaatctgaaaaataa

SEQ ID NO: 405485 - DNA, 708 bp, Staphylococcus aureus
atgaaatcaacaccacacattaaaccaatgaatgacgtcgaaattgcagaaacggttctattgccaggagatccgttaagagctaagttcattgcagaaacttatttggatgatgtggaacagttcaatacagtgcgaaacatgtttggttttaccggaacatataaaggtaaaaaagtttctgtcatgggttcaggtatgggtatgccatctattggcatttactcttatgaattaattcatacatttggttgtaaaaaattaattcgcgttggctcttgtggcgcgatgcaagaaaacattgatttatatgatgtgattattgcacaaggtgcctctactgattcaaattacgttcaacaatatcaattaccaggtcattttgcgccaattgcttcttatcaattattagaaaaagcagttgaaacagcacgtgacaaaggtgtacgtcatcatgtaggtaatgtgttatcaagtgatattttctataacgcggatacaacagcgagtgaacgttggatgcgtatgggtattttaggtgtagaaatggaatcagctgcattatacatgaatgcaatttacgctggtgtcgaagcattaggtgtgttcacagtgagcgatcatttaattcatgaaacgtcaacaacacctgaggaaagggaacgtgcatttacagatatgattgaaattgcactgtcattggtgtag

SEQ ID NO: 405486 - DNA, 741 bp, Staphylococcus aureus
gtgacgcaaacacaaccaaaatttttaacgatttataatacgttatataaagaaattcaaataggaaaatatccgagtggccatgcattacctactgaaaaggaactttgtgcgcgctttgatgtcagtcgtatgactttgcgccaagctataaaattgttagccgaagatggcatcgtagagagtacaagagggaagggacactttgttattccacaaacaaatgcccaacacgcttcaagtatggatcaatttaagcatccacttgatcaaatattgctagctcgcgtatctatgtcatcaattaattatcgtgttgatttagaaagtgaatatacaaatcatttgtttgcaaaccatccttctgccgtcattgcaatggaacgctattatcaaaaaaaggacaatcattctaagcaagctgatgcattttgctttacctttataccgttaaatgtcattgacacatttaaagtgaatacacaaaacgaagacgacatgaagacattcgttgagcaaacgatttatagcaatgcatatcaatcagatttaaaaatgtctattaccaaagcgccccacttcaaaaatcatagtcacgtgtttgatggtgatacacattgttggctgattattgaaacactgtacgcacaaacaccttatccaattatgattaataagtggtatattccacaggaaatatctgaattaacactgacacgtataagacaatcggattattaa

SEQ ID NO: 405487 - DNA, 678 bp, Staphylococcus aureus
atgaaaaaattagcaacagtaggttctttaattgtaacaagcactttagtattctcaagtatgccttttcaaaatgcgcatgccgacacaacttcaatgaatgtgtcgaataaacaaagccaaaatgtacaaaatcatcgtccttatggcggagtagtaccacaaggaatgacgcaagcacaatatactgaattagagaaagctttaccccaattaagcgctggcagtaatatgcaagactataatatgaaattgtatgatgcgacgcaaaatattgctgataaatacaatgtgataattacaactaatgtaggggtatttaaaccacatgctgttagagatatgaatggccatgcgttacctttaacaaaagatggcaatttttatcaaacgaatgtagatgcaaatggtgttaatcatggtggtagtgaaatggtgcaaaataaaacaggtcatatgagtcaacaaggccatatgaatcagaacacacacatgaaccaacagccacacatgcaacaaggtcatatgcaatcatcaaaccatcaaatgatgagtccaaaagcaaatatgcattcatcaaatcatcaaatgaaccaaagtaacaaaaaagttttaccagctgctggtgaaagtatgacatcaagtattctactgcaagtattgccgcactactattag

SEQ ID NO: 405488 - DNA, 600 bp, Staphylococcus aureus
atggcatttaaattaccaaatttaccatatgcatatgatgcattggaaccatatatagatcaaagaacaatggagtttcatcacgacaaacatcacaatacgtacgtgacgaaattaaacgcaacagttgaaggaacagagttagagcatcaatcactagcggatatgattgctaacttagacaaggtaccggaagcgatgaggatgtcagtccgtaataatggcggtggtcattttaaccattcattattctgggaaatactatcacctaattctgaagaaaaaggtggcgtaatagatgacatcaaagcgcagtggggcactttagatgaatttaaaaatgaatttgcaaataaagcaacaacattatttggatcaggttggacttggttagttgttaatgatggcaaattagaaattgtgacaacgccaaaccaagataatccattaacagaaggcaaaacaccaatcttactatttgatgtttgggagcatgcctactatctgaaatatcaaaataaacgtccagactatatgactgcattttggaacattgttaactggaaaaaagttgatgaattataccaagcagcaaaataa

SEQ ID NO: 405489 - DNA, 1431 bp, Staphylococcus aureus
atgaagagtgattcactaaaagaaaatattatttatcaagggctataccaattgattagaacgatgacaccactgattacaatacccattatttcacgtgcatttggtcccagtggtgtgggtattgtttcattttctttcaatatcgtgcaatactttttgatgattgcaagtgttggcgttcagttatattttaatagagttatcgcgaagtccgttaacgacaaacggcaattgtcacagcagttttgggatatctttgtcagtaaattatttttagcgttaacagtttttgcgatgtatatggtcgtaattactatatttattgatgattactatcttattttcctactacaaggaatctatattataggtgcagcactcgatatttcatggttttatgctggaactgaaaagtttaaaattcctagcctcagtaatattgttgcgtctggtattgtattaagtgtagttgttatttttgtcaaagatcaatcagatttatcattgtatgtatttactattgctattgtgacggtattaaaccaattacctttgtttatctatttaaaacgatacattagctttgtttcggttaattggatacacgtctggcaattgtttcgttcgtcattagcatacttattaccaaatggacagctcaacttatatactagtatttcttgcgttgttcttggtttagtaggtacataccaacaagttggtatcttttctaacgcatttaatattttaacggtcgcaatcataatgattaatacatttgatcttgtaatgattccgcgtattaccaaaatgtctatccagcaatcacatagtttaactaaaacgttagctaataatatgaatattcaattgatattaacaatacctatggtctttggtttaattgcaattatgccatcattttatttatggttctttggtgaggaattcgcatcaactgtcccattgatgaccattttagcgatacttgtattaatcattcctttaaatatgttgataagcaggcaatatttattaatagtgaataaaataagattatataatgcgtcaattactattggtgcagtgataaacctagtattatgtattattttgatatatttttatggaatttacggtgctgctattgcgcgtttaattacagagtttttcttgctcatttggcgatttattgatattactaaaatcaatgtgaagttgaatattgtaagtacgattcaatgtgtcattgctgctgttatgatgtttattgtgcttggtgtggtcaatcattatttgccccctacaatgtacgctacgctgctattaattgcgattggtatagtagtttatcttttattaatgatgactatgaaaaatcaatacgtatggcaaatattgaggcatcttcgacataaaacaatttaa

SEQ ID NO: 405490 - DNA, 1239 bp, Staphylococcus aureus
atggaaaatcaacacaatagtaaattactaacattgttacttatcggtttagcggtttttattcagcaatcttcggttattgccggtgtgaatgtttctatagctgactttatcacattactaatattagtttatttactgtttttcgctaaccatttattaaaggcaaatcattttttacagtttttcattattttgtatacatatcgtatgattattacgctttgtttgctattttttgatgatttgatatttattacggttaaggaagttcttgcatctacagttaaatatgcatttgtagtcatttatttctatttagggatgatcatctttaagttaggtaatagcaaaaaagtgatcgttacctcttatattataagcagtgtgactataggtctattttgtattatagctggtttgaacaagtcccctttactaatgaaattgttatattttgatgaaatacgttcaaaaggattaatgaatgaccctaactatttcgcgatgacacagattattacattggtacttgcttacaagtatattcataattacatattcaaggtccttgcatgtggtattttgctatggtctttaactacaacggggtctaagactgcgtttatcatattaatcgtcttagccatttatttctttattaaaaagttatttagtagaaatgcggtaagtgttgtgagtatgtcagtgattatgctgatattactttgttttaccttttataatatcaactactatttattccaattaagcgaccttgatgccttaccgtcattagatcgaatggcgtctatttttgaagagggctttgcatcattaaatgatagtgggtctgagcgaagtgttgtatggataaatgccatttcagtaattaaatatacactaggttttggtgtcggattagtggattatgtacatattggctcgcaaattaatggtattttacttgttgcccataatacatatttgcagatctttgcggaatggggcattttattcggtgcattatttatcatatttatgctttatttactgtttgaattatttagatttaacatttctgggaaaaatgtaacagcaattgttgtaatgttgacgatgctgatttactttttaacagtatcatttaataactcaagatatgtcgcttttattttaggaattatcgtctttattgttcaatatgaaaagatggaaagggatcgtaatgaagagtga

SEQ ID NO: 405491 - DNA, 1167 bp, Staphylococcus aureus
ttgaaaattatatattgtattactaaagcagacaatggtggtgcacaaacacatctcattcaactcgccaaccatttttgcgtacacaatgatgtttatgtcattgtaggcaatcatggaccaatgattgaacaactagatgcaagagttaatgtaattattatcgaacatttagtaggtccaattgactttaaacaagatattttagctgtcaaagtgttagcacagttattctcgaaaattaaacctgatgttatccatttacattcttccaaagctggaacggtcggacgaattgcgaagttcatttcgaaatcgaaagacacacgtatagtttttactgcacatggatgggcttttacagagggtgttaaaccagctaaaaaatttctatatttagttatcgaaaaattaatgtcacttattacagatagcattatttgtgtttcagatttcgataaacagttagcgttaaaatatcgatttaatcgattgaaattaaccacaatacataatggtattgcagatgttcccgctgttaagcaaacgctaaaaagccaatcacataacaatattggcgaagtagttggaatgttgcctaataaacaagatttacagattaatgccccgacaaagcatcaatttgttatgattgcaagatttgcttatccaaaattgccacaaaatctaatcgcggcaatagagatattgaaattacataacagtaatcatgcgcattttacatttataggcgatggacctacattaaatgattgtcagcaacaagttgtacaagctgggttagaaaatgatgtcacatttttgggcaatgtcattaatgcgagtcatttattatcacaatacgatacgtttattttaataagtaagcatgaaggtttgccaattagcattatagaagctatggctacaggtttgcctgttatagccagtcatgttggcggtatttcagaattagtagctgataatggtatatgtatgatgaacaaccaacccgaaactattgctaaagtcctggaaaaatatttaatagacagtgattacatcaaaatgagtaatcaatctagaaaacgttatttagaatgttttactgaggagaaaatgattaaagaagtggaagacgtttataatggaaaatcaacacaatag

SEQ ID NO: 405492 - DNA, 693 bp, Staphylococcus aureus
ttgaagaagttacagctaaagaagtggaaatgtcgtgaaaatgacattgaagctgtccataataataagggttatgcctatcaaagaaaattagacaaactagaagaagtgagaaaaagctattacccaattaaacgtgcgattgacttaattttaagcattgttttattatttttaactttaccgattatggttatattcgccattgctatcgtcatagattcgccaggaaaccctatttatagtcaggttagagttgggaagatgggtaaattaattaaaatatacaaattacgttcgatgtgcaaaaacgcagagaaaaacggtgcgcaatgggctgataaagatgatgatcgtataacaaatgtcgggaagtttattcgtaaaacacgcattgatgaattaccacaactaattaatgttgttaaaggggaaatgagttttattggaccacgcccggaacgtccggaatttgtagaattatttagttcagaagtgataggtttcgagcaaagatgtcttgttacaccagggttaacaggacttgcgcaaattcaaggtggatatgacttaacaccgcaacaaaaactgaaatatgacatgaaatatatacataaaggtagtttaatgatggaactatatatatcaattagaacattgatggttgttattacaggggaaggctcaaggtag

SEQ ID NO: 405493 - DNA, 972 bp, Staphylococcus aureus
ttggaaagagttttgataactggtggggctggttttattgggtcgcatttagtagatgatttacaacaagattatgatgtttatgttctagataactatagaacaggtaaacgagaaaatattaaaagtttggctgacgatcatgtgtttgaattagatattcgtgaatatgatgcagttgaacaaatcatgaagacatatcaatttgattatgttattcatttagcagcattagttagtgttgctgagtcggttgagaaacctatcttatctcaagaaataaacgtcgtagcaacattaagattgttagaaatcattaaaaaatataataatcatataaaacgttttatctttgcttcgtcagcagctgtttatggtgatcttcctgatttgcctaaaagtgatcaatcattaatcttaccattatcaccatatgcaatagataaatattacggcgaacggacgacattaaattattgttcgttatataacataccaacagcggttgttaaattttttaatgtatttgggccaagacaggatcctaagtcacaatattcaggtgtgatttcaaagatgttcgattcatttgagcataacaagccatttacattttttggtgacggactgcaaactagagattttgtatatgtatatgatgttgttcaatctgtacgcttaattatggaacacaaagatgcaattggacacggttataacattggtacaggcacttttactaatttattagaggtttatcgtattattggtgaattatatggaaaatcagtcgagcatgaatttaaagaagcacgaaaaggagatattaagcattcttatgcagatatttctaacttaaaggcattaggatttgttcctaaatatacagtagaaacaggtttaaaggattactttaattttgaggtagataatattgaagaagttacagctaaagaagtggaaatgtcgtga

SEQ ID NO: 405494 - DNA, 777 bp, Staphylococcus aureus
atgacaaacaacaaagtagcattagtaactggcggagcacaagggattggttttaaaattgcagaacgtttagtggaagatggtttcaaagtagcagttgttgatttcaatgaagaaggggcaaaagcagctgcacttaaattatcaagtgatggtacaaaagctattgctatcaaagcagatgtatcaaaccgtgatgatgtatttaacgcagtaagacaaactgccgcgcaatttggcgatttccatgtcatggttaacaatgccggccttggaccaacaacaccaatcgatacaattactgaagaacagtttaaaacagtatatggcgtgaacgttgcaggtgtgctatggggtattcaagccgcacatgaacaatttaaaaaattcaatcatggcggtaaaattatcaatgcaacatctcaagcaggcgttgagggtaacccaggcttgtctttatattgcagtacaaaattcgcagtgcgaggtttaacacaagtagccgcacaagatttagcgtctgaaggtattactgtgaatgcattcgcacctggtatcgttcaaacaccaatgatggaaagtatcgcagtggcaacagccgaagaagcaggtaaacctgaagcatggggttgggaacaatttacaagtcagattgctttgggcagagtttctcaaccagaagatgtttcaaatgtagtgagcttcttagctggtaaagactctgattacattactggacaaacaattattgtagatggtggtatgagattccgttaa

SEQ ID NO: 405495 - DNA, 627 bp, Staphylococcus aureus
atggaaaaaaatgtagaaaaatcattcataaagataggtttatattttcaaatagcttatatagtactcatggctataactttatgtgggtttgtaatttgctatggactaattttcggccttttctatttattatcaggtagcagagctgattatttaatagtaacaatagttatatcggcaataatttctatatttgtaattatactttcaatcgtacctgtcatcgtattggcatctgacttatttaaagaaaggatttcaaaaggtgtcatattaattgtattggctattatcgctttagtattatgcaactttgtatctgcaatactctggtttgtttcagccatatctattttaggtagaaaaaaattagtagctgcagcagatactaccactattcaaaaaagtaaagggaacgcaaatcaagcatcacataaagacacgtgtaaaaaggaacttgatagtcaagacatgatggaacatcctgaggttaaaaatcccacgactaaaaaccttgaaggatttaacgaagaaatacataaagatgaagctacaactaaagttgtcagtgataacacggaaccgcctattgaatcaaaagaccatgtctcgaaaaaagattga

SEQ ID NO: 405496 - DNA, 408 bp, Staphylococcus aureus
atgagctcaattataggaaaaatagcaatttggataggcatcgtagctcaaatatattttagtgtcgtttttgttaggatgatatctattaatattgctggaggatctgattacgaaacaatttttttattaggattaatattggctcttttcactgttttaccaaccatctttactgcgatttatatggaaagttactctgtaatcggaggtgcactttttattgtttatgctattattgcactgtgtttatataatttcctttcgtcaattttatggctgattggtggtattttgctgatttggaataaatactcaaaagatgaatcgacagacgaaaatgaaaaagttgatattgaaagtacagagaatcaatttgaatctaaagataaaatcactaaagaataa

SEQ ID NO: 405497 - DNA, 765 bp, Staphylococcus aureus
ttgaatcatattcatgaacatttaaaattggtaccagtagataagattgatcttcacgaaacattcgaacctttaagattggaaaaaacgaaaagtagtattgaagcagatgattttatacgtcatcctattttagtgacagcgatgcaacatggtagatatatggttatagatggtgtgcatcggtatacaagtttgaaagcgttaggatgtaagaaagttccagtgcaagaaatccatgaaacacaatattcaattagtacatggcaacataaagttccatttggtgtgtggtgggaaacgttacaacaagaacatcgcttgccatggactactgagacaagacaagaagcgccatttattacaatgtgtcatggtgatacagaacaatatttgtatacaaaagatttaggcgaagcacattttcaagtatgggaaaaggttgtcgcaagttatagtggttgttgttctgtagagagaattgcacaaggtacatatccttgtctttctcaacaagatgtactcatgaagtatcagccattgagttataaggaaattgaagcggttgttcataaaggggaaactgtgccagcaggtgtgacacgctttaatatttcaggacgatgtcttaatcttcaagtaccactggcattacttaaacaagatgatgatgttgaacaactgcgcaattggaagcagtttttagcagataagtttgccaatatgagatgctatactgaaaaagtatacttggtggagcaatag

SEQ ID NO: 405498 - DNA, 1203 bp, Staphylococcus aureus
atgcgtatagttcaacctgttattgaacaattaaaagcacaatctcatccagtttgtcattatatctatgatttagtcggactggaacatcatttgcaacatattacatcgtcattgccgagtaattgtcaaatgtactatgcaatgaaagcaaatagtgaacgaaaaatcctagatacaattagtcagtatgttgaaggattcgaagttgcatctcaaggtgaaatagcaaaaggtcttgcttttaaaccagcaaatcatattatttttggtggccctggtaagacagacgaggaactaagatatgcagtaagtgaaggtgttcagcgtattcatgttgaaagtatgcatgaattacaacggctaaatgccatcttagaagatgaagataagacacaacacattttattgcgtgttaatttagcaggaccatttcccaatgcaacgttgcatatggcaggacgcccaacacaatttggtatttctgaagacgaagttgatgatgtcattgaagctgcgctcgcaatgccaaagattcatctagatggatttcattttcattctatttctaacaatttagactcgaatttacatgtcgatgtagtgaaactttattttaaaaaagcaaaggcatggtctgaaaaacatcgatttccactcaaacatatcaatcttggtggtggcataggcgttaactatgcagatttaactaaccaatttgaatgggataattttgtagaacgttttaaaacacttatcgttgagcaagaaatggaagatgtgacattgaactttgaatgtgggcgctttattgtggcacatattggttactatgtgacagaagtgctagacattaagaaagtacatggtgcttggtatgccatattaagaggaggtacgcaacaatttagactgccggtatcttggcaacataaccatccttttgacatttatcgctataaggacaatccatattcatttgaaaaagtttcaatttcgagacaggacacaacgttagtcggtcaattatgtacaccgaaagatgtctttgctagagaagtacagatagacgcaatcagtacaggcgacgttattgttttcaaatatgcaggtgcatacggatggtctatttcacatcacgatttcttaagccatccacatcctgaatttatttatttaacgcaaacaaaggaggatgaataa

SEQ ID NO: 405499 - DNA, 780 bp, Staphylococcus aureus
atgatgcaacaactatctctgaaacatagattaaacaatggtgattcagtttatggcatttttaattctataccggacccattgatgatcgaggttatcgcagcaagcgggtatgactttgttgtgattgatacagaacacgtggcgattaatgatgagacactagcgcatttaattcgtgcagctgaagcagcgcatattataccaattgtacgtgtcactgcagtgatagatagagatatcattaaagtgttggatatgggtgcgagaggtattattgtgccacacgttaaagatcgtgagacagttgagcatattgtgaaattaagtcgttattacccgcaaggattaagaagtttgaatggtggtcgcatggcaagatttggacgtacaccattacttgatgcaatggagatggctaatgagcatattatggtgattgccatgatagaagatgttgaaggggttatggccattgacgatatagcacaagtcgaaggtttagacatgatagtcgaaggtgccgcagatttatcgcagtcacttggcataccatggcaaacgcgtgatgatcaagtaacatcacatgttcaacatatttttgaagttgtgaatgcacatggtaaacatttttgtgcattaccacgtgaagatgaagatattgcaaaatggcaggcacaaggtgtacaaacatttattttaggtgatgatcgcggaaaaatatatcgccatttaagtgcatctctagcgacgtctaaacagaaaggggatgaaggctaa

SEQ ID NO: 405500 - DNA, 1779 bp, Staphylococcus aureus
gtgaatcaaacaattcttaatcgtgtaaagactagagtgatgcaccaactggtatcatcacttatttatgagaatattgttgtgtataaagcgtcatatcaagacggtgtcggtcattttacaatagaaggacatgattcagagtatcgttttactgctgaaaagacacatagctttgatcgtatacgtatcacatcaccaattgagcgtgtcgtaggagatgaggcagatacaacaacagactatacacaattattgagagaggttgtatttacatttcctaaaaatgatgaaaagctagaacaatttattgtcgagttattacagacagaattaaaagatacgcaaagtatgcagtatcgagaatcaaacccaccagcaacacctgagacatttaacgactatgaattttatgcgatggaagggcatcagtatcatccaagttacaaatcacgtttaggatttacgttgagtgataatttgaaatttggtcctgattttgtaccaaacgttaaactgcagtggttagctatcgacaaagataaagtagaaacgacggtatcaagaaatgttgtagttaacgaaatgttacgtcaacaagttggcgataagacttatgaacattttgtacagcagattgaagcatctggcaaacatgtaaatgatgttgagatgatacctgtacacccatggcagtttgaacatgtcatccaagttgatttggctgaagaaaggcttaatggcacagtactatggttaggggaaagtgatgagctatatcaccctcaacaatcgattcgtacgatgtcgccaatagacacgacaaaatattatttaaaggtaccaataagtataacgaacacttcaacgaaacgagtgttggcgcctcatacaattgaaaatgcagcgcaaattacggattggttaaagcagatacagcaacaagatatgtatttaaaagatgaattaaagacagtttttctaggggaagtcttaggacagtcttatttaaatacacaactttcgccttataaacaaactcaagtttatggtgcgttaggtgttatatggcgtgaaaatatatatcatatgttaatcgatgaagaggatgcgataccatttaatgcactttatgcaagtgataaggatggtgtaccattcattgaaaattggattaaacaatatggttctgaagcttggacaaagcaatttttagctgtagcgattcgtccaatgattcatatgctttattatcacggtattgcctttgaatcgcatgcacaaaatatgatgctcattcatgaaaatggttggcctacacgtattgccttaaaagatttccatgatggtgttcgttttaagcgtgagcatttaagtgaagctgcttcacacctgacattaaagccaatgccagaagcacataaaaaagtgaatagtaattcatttattgaaacagatgacgaacgtttagtacgcgactttttacatgatgcatttttctttattaatatcgccgaaatcatcttatttattgaaaagcaatatggtatcgatgaggagctgcaatggcaatgggttaaaggcatcatcgaggcgtatcaagaagcatttccagagttgaataactatcaacatttcgatttgtttgaacctacgattcaagttgaaaagttaacgacacgtcgattattaagtgactccgagttaagaattcatcatgttacaaatccattaggtgtaggaggtatcaatgatgcaacaactatctctgaaacatag

SEQ ID NO: 405501 - DNA, 1737 bp, Staphylococcus aureus
gtgcaaaataaagaattaatacaacatgcagcgtatgcggctatcgaacgcattttaaatgaatattttagagaagaaaatttatatcaagtaccacctcaaaatcatcaatggtctatacaattatcagagctcgaaactttaacgggtgaatttcgctattggtctgcgatggggcatcatatgtatcatccagaggtatggcttatcgatggaaaaagtaaaaaaataacaacttataaagaagcaattgcgcgtattttgcaacatatggctcaaagtgcagataatcaaacggcagtgcaacaacatatggcgcaaattatgtctgacatcgataatagcattcatcgcacggcacgttatttgcaaagtaacacaatagactacgtagaggatcgttatatcgtttcagaacaatctttatacttaggtcatccatttcatccgactcctaagagtgcaagtgggttttcagaagcagatttagagaaatatgcacccgaatgtcatacatcattccaattgcattatttagctgtgcatcaagatgttctgctcacgcgctatgtagaaggtaaagaagatcaggttgagaaagtgttgtatcaattagcagacatagatatatcagagatacccaaagattttattttattaccaacacatccttatcaaatcaatgtgttgcgacagcatccacagtatatgcaatatagtgaacaaggtttaataaaagaccttggcgtttccggtgattcagtgtacccgacgtcttcggttagaactgtattttcaaaagcattaaacatttatttaaaattaccgatacacgttaaaatcactaattttatacgtacgaatgaccttgaacagattgaacggacaattgatgccgcgcaagttatcgcatcagtcaaagatgaggttgaaacaccccattttaaattgatgtttgaagaaggatatcgtgcattgttaccgaatccattagggcaaacagttgaacctgaaatggatttattaacaaatagtgccatgattgttcgtgaagggataccgaattaccatgctgataaagatattcatgtattggcgtcattatttgaaacgatgcctgattcaccgatgtctaagttatcacaagtgattgagcaaagtggtttagcaccagaagcatggcttgaatgttatttgaatcgtacattattgccgatattaaagctgtttagtaacacaggcattagtctagaagcacatgtacaaaatacattaattgaattaaaagatggcatacccgacgtatgctttgtcagagatcttgaaggcatttgtctatctagaacgattgctactgaaaaacagcttgtgccaaatgttgtggcagcatcaagccctgttgtatatgcacatgatgaagcatggcatcgtcttaaatattacgttgtagtaaatcacttaggacatttagtatcaactattggtaaagcgactagaaatgaagttgtgttatggcaacttgtagcgcatcgtcttatgacttggaaaaaagaatacgcgaataacgcagtatttgttgactgtgtagaagatttatatcaaacgccgaccattgcggctaaagcgaatttgatgagtaaattgaatgattgtggtgcaaaccctatttatacacatataccaaatccaatttgtcataacaaggaggtatcgtattgtgaatcaaacaattcttaa

SEQ ID NO: 405502 - DNA, 1173 bp, Staphylococcus aureus
gtgccattattgccaatttatatggcatcactacaaaatctatcagtcgtagaaatacagttgtggagtggtatagcgattgctgctccagctgtaacgacgatgatagcttcgccgatatgggggaagctaggtgataagatcagccgaaaatggatggtgttaagagcgttacttggtttggcggtatgcttatttttaatggcattgtgtacgacaccattacagtttgtacttgtgaggttattgcagggactatttggtggtgttgttgatgcatcaagtgcgtttgcgagtgcagaggcgccagctgaagatcgtggaaaggtattaggaagactgcaaagttcagtcagcgcagggtctcttgtggggccattaattggcggtgttacagcttcgatattaggttttagtgcgttactgatgagtattgccgttattacttttattgtctgtattttcggtgcattaaaattgattgaaacgacacatatgccaaaatcacaaacaccaaatattaataaaggtattcgccgttcatttcaatgtctattatgcacacaacaaacatgtcgatttattatcgttggcgttttagcaaactttgctatgtatggcatgctaactgcattatcaccacttgcttcatcagtgaatcatacagcgatagatgaccgtagtgtgattggatttttacagtccgcattttggacggcttcgatattaagcgcgcctttatggggacgctttaatgataaatcatatgttaaatcagtatatatatttgccacgattgcatgtggttgtagtgcgatactgcaaggtttagcgacgaatatagagtttttaatggctgcaagaatacttcaaggattaacatatagtgcattgattcaaagtgtcatgtttgttgtcgtgaatgcgtgtcatcaacaacttaaaggcacatttgttggaacgacgaacagtatgttagttgttggtcaaattattggcagtcttagtggcgctgccattacaagttatactacaccagctactacgtttatcgttatgggcgtagtatttgcagtaagtagtttatttttaatttgttcaaccatcactaatcaaatcaacgatcacacattaatgaaattatgggagttgaaacaaaaaagtgcaaaataa

SEQ ID NO: 405503 - DNA, 1755 bp, Staphylococcus aureus
ttgcagaatcatacagcagtcaatacagcacaagcgataatattaagagatttagttgatgcattattatttgaagatatagccggaattgtatcgaatagtgagattactaaagaaaacggacaaacgcttttgatatacgaacgtgaaacacaacaaataaagatacctgtttattttagtgctttaaatatgtttcgttacgaaagttcacaaccaattacgatagagggaagggtgtctaagcaacctttaacggcagctgaattttggcaaacaattgctaatatgaattgtgatctaagtcatgaatgggaagtggctcgcgttgaagaaggactgactactgctgccacacagcttgctaaacaattatcagaattagatttagcgtcacatccttttgtgatgtcagagcagtttgcaagtttaaaagatcgtccatttcatccattagctaaagaaaaaagaggattaagagaagcggattatcaagtgtatcaagctgaattaaatcaatcatttcctttaatggttgcagcagttaaaaagacacatatgattcatggcgatactgcaaatatcgatgaattagaaaatttgacagtacctataaaagaacaagcgacagacatgttaaatgatcaagggttatcaatagatgactatgtactatttccggtacatccttggcaatatcagcatattctgccgaacgtctttgcgaaagagattagtgaaaagttggttgtactattaccgttaaaatttggagattatctgtcgtcttcaagtatgcgttcattaattgatattggcgcaccgtataaccatgtcaaagtaccatttgcaatgcagtcattaggcgcattaaggctaacgcctacgcgttacatgaaaaacggagaacaagcagaacaattattacgtcagcttatagaaaaagatgaagcactagctaagtatgtcatggtttgtgatgaaacagcttggtggtcatatatgggtcaagataatgatattttcaaagatcaattaggtcatctaactgttcagctaagaaagtatcccgaagtgctagccaaaaatgatacgcaacagctagtgtcaatggcagcactcgcggcaaatgatcgcactttatatcaaatgatttgtggaaaagataatatttctaaaaatgatgtcatgacgttatttgaagatatcgcgcaagtctttttaaaggtaacactatcatttatgcaatacggcgcattaccagagttgcatggtcaaaatatattgttgtcatttgaagatggacgtgtacaaaaatgcgtgttacgtgatcatgatactgtcagaatttataaaccatggctaacagcacatcagctttcattgccgaagtatgtcgtcagagaagatacacctaatacgctaattaatgaggatttggaaacattctttgcttattttcaaacattagctgtatcggtaaatctatatgccattattgatgcaattcaagatttatttggtgtaagtgagcatgaacttatgtcgttgttaaaacaaattttaaaaaatgaagtggcaactatttcctgggttacaactgatcagctagctgtcagacacattttatttgataaacagacgtggccattcaaacaaattttattaccattgctatatcaacgtgatagtggtggaggtagtatgccttcaggtttaactaccgtaccaaatccaatggtgacatatgattaa

SEQ ID NO: 405504 - DNA, 1011 bp, Staphylococcus aureus
atgaatagagagatgttgtatttaaatagatcagatattgaacaagcgggaggtaatcattcacaagtttatgtggacgcattaacagaagcattaacagcccatgcgcacaatgattttgtacaaccgcttaagccgtatttaagacaggatcctgaaaatggacacatcgcagatcgaattattgcaatgccaagtcatatcggtggtgaacacgcaatttcaggtattaagtggataggtagtaagcacgacaatccatcgaaacgtaatatggagcgtgcaagtggcgtcattattttgaatgatccagaaacgaattatccaattgcagttatggaagcaagtttaattagtagtatgcgtactgcagcagtttcagtgattgcagcaaagcatttggctaaaaaaggatttaaagacttaacaatcattggatgcgggctaatcggagacaagcaattacaaagtatgttagagcaattcgatcatattgaacgcgtgtttgtttacgatcaattctctgaagcatgtgcacgctttgttgatagatggcaacaacagcgtccggaaattaattttattgcgacagaaaatgctaaagaagcagtatcaaatggtgaagtagtcattacatgtaccgtaacggatcaaccatacattgaatatgattggttacaaaagggtgcatttattagcaacatttctatcatggatgtgcataaagaagtctttattaaagctgacaaagtcgtagtagatgactggtcacaatgtaatcgagaaaagaaaactattaaccaattggtgttagaaggtaaattcagcaaagaagctcttcatgctgaactaggacaacttgtgacaggtgacataccaggacgtgaagacgatgatgagatcatattacttaatccgatgggtatggctatcgaagatatttcaagtgcttattttatttatcaacaggcacaacaacaaaatattgggacaacattgaacctatattaa

SEQ ID NO: 405505 - DNA, 981 bp, Staphylococcus aureus
ttgattgaaaaaagtcaagcatgtcacgattcattgttagattctgtagggcaaacacctatggttcaacttcatcaactatttccgaaacatgaagtgtttgcaaagttagagtatatgaatcctggaggcagcatgaaagatcgacctgccaagtacatcattgaacatggtattaaacatggtttaatcactgagaatacacatttaattgaaagtacttctggtaatttaggcattgcgttggcaatgatagctaaaatcaagggattaaaactcacgtgtgttgttgatcctaaaatatcaccaacaaatttgaaaattattaaaagttatggtgccaatgtagaaatggttgaagaacctgatgcacatgggggttatttaatgactcgtattgcaaaggtgcaagaactgttagccactattgacgatgcatattggattaatcaatatgcgaatgagttaaattggcaatcccattatcatggtgcaggcacagagattgttgaaacaattaagcaacctatagattattttgtcgcgccagtcagcacgacaggtagcattatgggtatgagtagaaaaataaaagaagtgcatccaaacgcacaaattgttgctgttgatgcgaaagggtcagtcatttttggtgacaaacctattaatagagaattacctggtatcggtgctagtcgtgtacccgaaatattgaatagatcagaaattaatcaagtgatccatgtagatgattatcaatctgctttgggctgtcgaaaactgattgattatgaaggcatatttgccggaggttcaacaggttcgattattgcagcgattgagcagttgataacgtcaattgaagaaggtgcaacaattgtcacgattttaccagatcgaggcgatcgttacttagatttagtttattcagatacatggttagaaaaaatgaaatcaagacaaggagttaaatcagaatga

SEQ ID NO: 405506 - DNA, 993 bp, Staphylococcus aureus
atgaataaagtaattaaaatgcttgttgttacgcttgctttcctacttgttttagcaggatgtagtgggaattcaaataaacaatcatctgataacaaagataaggaaacaacttcaattaaacatgcaatgggtacaactgaaattaaagggaaaccaaagcgtgttgttacgctatatcaaggtgccactgacgtcgctgtatctttaggtgttaaacctgtaggtgctgtagaatcatggacacaaaaaccgaaattcgaatacataaaaaatgatttaaaagatactaagattgtaggtcaagaacctgcacctaacttagaggaaatctctaaattaaaaccggacttaattgtcgcgtcaaaagttagaaatgaaaaagtttacgatcaattatctaaaatcgcaccaacagtttctactgatacagttttcaaattcaaagatacaactaagttaatggggaaagctttagggaaagaaaaagaagctgaagatttacttaaaaagtacgatgataaagtagctgcattccaaaaagatgcaaaagcaaagtataaagatgcatggccattgaaagcttcagttgttaacttccgtgctgatcatacaagaatttatgctggtggatatgctggtgaaatcttaaatgatttaggattcaaacgtaataaagacttacaaaaacaagttgataatggtaaagatattatccaacttacatctaaagaaagcattccattaatgaacgctgatcatatttttgtagtaaaatcagatccaaatgcgaaagatgctgcattagttaaaaagactgaaagcgaatggacttcaagtaaagagtggaaaaatttagacgcagttaaaaacaaccaagtatctgatgatttagatgaaatcacttggaacttagctggcggatataaatcttcattaaaacttattgacgatttatatgaaaagttaaatattgaaaaacaatcaaaataa

SEQ ID NO: 405507 - DNA, 996 bp, Staphylococcus aureus
atgctacttaaaccaaaataccaaatcgttattgctggtttatgtcttgcaatagtagctatcttaagtttaatgattggaaatacgcttgtgtcaccaggtacggtgatacaggcgttattcaactttgatagtgaaaacgatttacatgatgttgtcactggtgcacgggcgtcgagaacaatcattgcgttattgactggtgctgcccttgctgtctcaggtttgttgatgcaagcacttacacgaaacccaatagcctcaccagggcttttcggtgtcaatgcaggcgcagtattttttgtcatttttagtattacatttatccaaattcaatcttttaaaatgattgtagttattgcatttttgggggctattgttgttactgtattagttgttgcactaggtatgtttagacaaacactattctcacctcaccgtgtcattttggcaggtgctgcgattgcgatgctatttacagcctttactcaaggcatacttattatgaacgaaacagacttacaaggcctattattttggttaagtggctccgtttcattacgtaatatttgggatatcccatggattattccgcttgtattgatacttattttaattgcatttagcatggctgcacacatcaacatcttgatgacaagtgacgacattgcaaccggcctcggtcaaaacataaaattaatcaaatggatgattattatgctcatcagtatgttagccggtatttcggtagccgtagctggatcaatcgtctttgtgggtcttatcgtaccgaatattagcaaacgattattaccaccaaactataagtatttaattccttttactgcattagctggagcaatcctaatgatcatttcagacattgttgctcgtataataattaagccactagagttgcctatcggtgtcgttaccgctgtcattggcgctattgtcttaatctatattatgaagaaaggacgtcaacgcttatga

SEQ ID NO: 405508 - DNA, 999 bp, Staphylococcus aureus
atgaccgaaaagattaataaaaaagacaattaccatctcatcttcgcgttaatctttttagccatcgtttcagtggtaagtatgatgattggttcaagctttataccattacaacgcgtactgatgtactttataaatccaaatgacagtatggatcaattcactttagaagtattacgcttacctcgcattacacttgcgattttagcaggtgccgcactaggaatgagtggtttaatgttgcaaaatgtattaaaaaatccaattgcctcacctgatattatcggtatcacaggtggtgctagcttaagtgctgttgtctttattgcatttttcagccatttaacaatacatttacttccactatttgcagtattaggtggcgcagttgcaatgatgatactattagtgtttcaaacgaaaggacaaatacgcccgacaacactcataatcatcggtatttcgatgcaaacgttgtttattgcgcttgtccaaggattactcattacaacgaagcaattatctgctgccaaagcttatacatggctagtcggaagtctttacggtgctacgtttaaagatacaatcattttgggtatggttattttagctgttgtgccgttgttatttcttgttataccaaaaatgaaaatatctatacttgatgaccctgtagcgattggcttaggcttacatgtacaacgtatgaaactaatccaattaatcacttctactatactcgtatctatggcaatcagtttagtaggtaacattgggtttgtcggtttaatcgcaccacatatcgcgaaaacaatcgttcgcggaagttatgctaaaaagttactaatgtcagcaatgattggtgccatatcaattgttattgcagacttaattgggcgtaccttattcttgcctaaagaagtgccagcaggtgtatttattgctgcttttggtgccccattcttcatatacttattattaaccgtgaaaaagttataa

SEQ ID NO: 405509 - DNA, 753 bp, Staphylococcus aureus
atgaaatataataaccatgacaaaattagagattttataatcattgaagcatatatgtttcgttttaagaaaaaagtcaagcctgaagtcgatatgactataaaagaatttatattactgacttatttatttcatcaacaagaaaacacacttccatttaagaagattgtttcagatttatgttataaacaatcggatttagtacagcatataaaagtacttgtgaaacattcatatattagtaaagttcgaagtaaaattgatgagcgtaatacttacatttcaatatctgaagaacaacgagagaaaattgcagaacgtgttacattgtttgatcaaatcattaaacaatttaaccttgcagatcaaagtgaatcacagatgataccaaaagatagtaaagaatttctaaacttgatgatgtatacaatgtatttcaagaatattatcaaaaaacatctaacattaagttttgtagaattcacaattctagctattatcacttctcaaaataaaaacatcgttcttcttaaagatttaattgaaacaatccaccataaataccctcaaactgttagagctctcaataatttaaaaaagcaaggctatctaataaaagaacgctcaactgaagatgaaagaaaaattttaattcatatggatgacgcgcagcaagaccatgctgaacaattattagctcaagtgaatcaattattagcagataaagatcatttacatcttgtttttgaataa

SEQ ID NO: 405510 - DNA, 1527 bp, Staphylococcus aureus
ttgaaaaagaaaaacatttattcaattcgtaaactaggtgtaggtattgcatctgtaactttaggtacattacttatatctggtggcgtaacacctgctgcaaatgctgcgcaacacgatgaagctcaacaaaatgctttttatcaagtcttaaatatgcctaacttaaatgctgatcaacgcaatggttttatccaaagccttaaagatgatccaagccaaagtgctaacgttttaggtgaagctcaaaaacttaatgactctcaagctccaaaagctgatgcgcaacaaaataacttcaacaaagatcaacaaagcgccttctatgaaatcttgaacatgcctaacttaaacgaagcgcaacgtaacggcttcattcaaagtcttaaagacgacccaagccaaagcactaacgttttaggtgaagctaaaaaattaaacgaatctcaagcaccgaaagctgataacaatttcaacaaagaacaacaaaatgctttctatgaaatcttgaatatgcctaacttaaacgaagaacaacgcaatggtttcatccaaagcttaaaagatgacccaagccaaagtgctaacctattgtcagaagctaaaaagttaaatgaatctcaagcaccgaaagcggataacaaattcaacaaagaacaacaaaatgctttctatgaaatcttacatttacctaacttaaacgaagaacaacgcaatggtttcatccaaagcctaaaagatgacccaagccaaagcgctaaccttttagcagaagctaaaaagctaaatgatgctcaagcaccaaaagctgacaacaaattcaacaaagaacaacaaaatgctttctatgaaattttacatttacctaacttaactgaagaacaacgtaacggcttcatccaaagccttaaagacgatccttcagtgagcaaagaaattttagcagaagctaaaaagctaaacgatgctcaagcaccaaaagaggaagacaataacaagcctggcaaagaagacaataacaagcctggcaaagaagacaacaacaagcctggtaaagaagacaacaacaagcctggcaaagaagacggcaacaagcctggtaaagaagacaacaaaaaacctggtaaagaagatggcaacaagcctggtaaagaagacaacaaaaaacctggtaaagaagacggcaacaagcctggcaaagaagatggcaacaaacctggtaaagaagatggtaacggagtacatgtcgttaaacctggtgatacagtaaatgacattgcaaaagcaaacggcactactgctgacaaaattgctgcagataacaaattagctgataaaaacatgatcaaacctggtcaagaacttgttgttgataagaagcaaccagcaaaccatgcagatgctaacaaagctcaagcattaccagaaactggtgaagaaaatccattcatcggtacaactgtatttggtggattatcattagccttaggtgcagcgttattagctggacgtcgtcgcgaactataa

SEQ ID NO: 405511 - DNA, 1593 bp, Staphylococcus aureus
atgacactacttactgtagatccattcgataatgtcggattatcagccttagttgcagcagtacctattattttatttttattatgcttaaccgtttttaaaatgaaaggcatttatgcagcattgacaactttggttgttacattgattgtggctttatttgtatttgaattaccagcgcgtgtatcagcaggtgcgattacagaaggcgttgttgccggtattttcccaataggatatatcgttttaatggcagtttggttatataaagtttctattaaaacaggacaattttctattattcaagatagtattgcaagtatttcagtggaccaaagaatccaactattattaattggattttgtttcaacgcatttttagaaggtgcagcaggatttggtgtgccaattgcgatttgtgcagtattattaattcaacttggatttgaaccattaaaagcagcgatgttatgtttaattgctaatggtgcggcgggtgcctttggtgcaattggtttaccagttagtattattgatacgtttaacttaagtggaggcgttacaacattagatgttgcgagatactcagcattaacacttccaattttaaactttattattccatttgttttagtattcattgtagatggtatgaaaggtattaaagaaattttacctgtcattttaacagtgagtggtacatatactggattacaattattattaacaatattccatggtccagaactagcagacattattccatcactagcaacaatggtggtgttagcatttgtttgtcgtaaatttaaaccgaaaaacattttcagattggaagcgtctgaacataaaattcaaaaacgaacgcctaaagaaattgtctttgcttggagtccgttcgtaattttaactgcctttgtattagtatggagtgcaccattcttcaaaaaattattccaacctggaggtgcacttgaaagtttagtaataaaattgccaattccaaatactgtgagtgatttatcgcctaaaggaattgcgttgcgtctcgatttaattggtgcaactgggacagcgattttattaacagtaattattacaattttaattacgaagttaaaatggaaaagtgcaggtgctttattggtcgaagcaattaaagaattatggttaccgatccttacaatttcagctatcctagctattgctaaagttatgacatacggtggtttgactgtagcaattggacaaggtattgctaaagcgggagcaattttcccattattctctccagtattaggttggattggtgtgtttatgactggttcagttgtaaataacaatactttattcgcacctattcaagcgacagtggcacaacaaatttcaacaagcggttcattacttgtggcagctaacactgcaggtggtgtagcagcgaaacttatttcaccacaatcaattgccattgcgactgcagctgttaaaaaagttggtgaagaatctgcattattaaaaatgacgttaaaatacagtattatatttgttgcttttatttgtgtttggacgtttatactaacgttaatattctaa

SEQ ID NO: 405512 - DNA, 474 bp, Staphylococcus aureus
atgtctaaaatcaggtcttttacaatattaagtctacttatttacttagctatgatgtgctatacagtagtgacctatccaaaattaccaaccaaagtgcctattcattataatttagcaggggatgctgataattttgctgataaatgggtgctgcttttgattaatagcgcatttatagtgatttggcttatatttttcattgcaggtagatactatgaacgatttgccaaatggtcacattataatcatacaccacgtgaaattcgagcgattaaattatttttaagtacgttaaatttagagattatgagctatatgtctatcttcacagtattagaaatttggcaaatacaacaccatcatcaattcaatttactatggtttaatatgatatttatcattatcattggtttgacgcttgtcatattttgtttacttcctacaattcataaaatgagagattctcaataa

SEQ ID NO: 405513 - DNA, 1398 bp, Staphylococcus aureus
atggctaaatataaagatattgctagtgacataagagataaaataatcacaggggattggttttatggaatgaaaataccttcacataggcagttggcgatacagtacaacgtaaatagagtaacgattattaaaagtattgagttattagaagctgaaggatttatctatactaaagtaggtagtggaacatatgttaatgactatttgaatgaagcacatattacaaataagtggtctgaaatgatgttatggtcctctcaacaaagaagtcagtatacggtgcaattaattaataaaattgagacagatgattcgtatatacatataagtaaaggtgaattgggtatatcgttaatgccacatattcaattgaaaaaagccatgtctaatacagccagtcatattgaagacttatcttttggttataataatggctatggttatatcaagttaagagatattatcgttgaacgaatgtcaaagcaaggtataaatgtaggtagagaaaatgtaatgatcacttcaggcgctttacatgccattcaacttttatctattgggtttttaggtcaagatgccataataatttcgaatacaccatcatatattcactctacaaatgtttttgagcaattgaattttagacatattgatgttccttataatcaaattaatgaaattgataccatcattgatagatttattaattttaaaaataaagcgatttatatagaacctaggtttaataacccgacaggtcgttctttaacgaatgagcaaaagaaaaatataattacttatagcgaaagacataatattcctatcattgaagatgatatctttagagatattttctttagcgatccaactccttctatcaaaacttatgataaattgggaaaagttatacatataagcagtttttcaaaaacgattgcaccagcaataagaataggttggattgttgcttctgaaaaaataatagagcaattggcagatgtaagaatgcaaattgactatggatccagtattttgtcacaaatggttgtatatgagatgttgaaaaataagtcttatgataaacacttagtaaagttaaggtatgttttaaaagataaacgagactttatgttaaacatcctcaataatttatttaaggatatagcacattgggaggttccaagtggaggttattttgtatggttagtctttaaaatagatatagatattaaatatttattttacgaattgttaagtaaagaaaaaatattaatcaatccgggttacatttatggcagtaaagaaaagagtataaggctatcttttgcctttgaatcaaatgaaaatattaagcatgcgctctataaaatttatacatatgtgaaaaaggtttaa

SEQ ID NO: 405514 - DNA, 873 bp, Staphylococcus aureus
atgaataaacttcgagacactacttttctatcatatttatttactatcatattgtggggatctgcatttccaatgataaagattgcgttaaatgattttagtgcagaatcattgtcggcatttcgtttaattttagcaacaataattctcttgccgttcgtaattataaagaaattgcctacccctgaactaagagatatccctgttatttttattttaggattttgtggatttgtgatatatcacacagctttaaattttggtgaaactttgattagtgcaggtatatctggaattctagtctctacaacgcctattttttctagtgctttagcttatatatttttaaaagagcatttttcaaaatggaattggttaagttcactcgtcgcatttataggaatatccattatttcaataagtaaagatgattacacaactattaatgtattaggtgtttttattattttacttgcatcttttagtgaaagtttgtattttactttccagaaaaaatacatagaaaaatacggcttcatcgctttcacactatatacaataatggcaagctcaccatttatgcttatttttattcctgaaatcatcaacgatatacacggcgccacttttacatcaatagtatcggtactttatttagctatattccctactataattccatacgttttgcttgcttatattgtgaagtcagttggtgtctctgatgcaacaatgtctctttatttaacacctatcgtttctttattattatcttatctgttattagacgagctaccaacaacccttgctattataggcggaattatcactctactaggcgttagtttaagtaacttctttcaaaatacataa

SEQ ID NO: 405515 - DNA, 1776 bp, Staphylococcus aureus
atgtattacagttatggaaattatgaagcatttgcgcgccctaaaaaacctgaaaatgtagaaaacaaatccgcttacttaatcggatctggtctagcttcacttgctgcagcttgttttttaataagggatggtcaaatggaaggttcgaagattcatattttagaagagttacctaaagcaggtggtagtcttgatggtgaaaatatgcctttaaaaggctatgttgtccgcggtggtcgtgaaatggagaaccactttgaatgtttgtgggacttattcagatctatcccttcattagaaatcgataacgcgtctgtattagatgagttctattggctaaacaaagaagaccctaactattctcgctgtcgtgttattgagaaacagggtcaacgtttagtcacagacggagacttcactttgactaaaacggcgattaaagaaattttagatttatgcttaacgaatgaagaagatttagatgatgtcaaaataacagatgtattttccgatgacttctttaattcaaacttttggatttactggaaaacgatgtttgcatttgaaccgtggcattctgcaatggaaatgcgtcgctatctaatgcgattcgttcatcatattagtggtctcgcagacttttcagctttaaaattcactaaatataatcaatatgaatctttagtattacctatggttgaatatttaaaatcgcatggggttcaatttgaatacgatgtaaaagtcgaagatattaaaatagatgttacgacaagtcaaaaaattgcccgagaaatattaattgaccgtaatggtaatgcagaatctattaaactgactataaacgatcttgtctttgtgacaaacggtagtattacagaaagctctacttatggtgataatgatacaccagcgccaccaactgacgaattaggtggtagttggacactatggaaaaatttagcgcgacaaagtcctgaatttggtaatcctgataagttttgccaaaatattcctaaaaaaagttggtttgtttcagcaacttctacaacaaacaataaagagattatcgatacaatagaaagtatttgtaaacgtgacccacttgcaggcaaaacagttacaggcggtattattacaatcaatgattctgcatggcaaatgagttttacaatcaatcgtcagcaacagtttaaagaccaacctgaaaatgaaatatctacatggatttatgccttatattcagatgtaaacggcgattatattaaaaagccaattacagaatgtagtggtaatgaaatatgccaagaatggctgtatcacttaggtgtatcaactgacaaaattgaagacttagcaaaacatgcatctaatacgattcctgtttatatgccatatatcacatcttatttcatgacgcgtgctatcggcgacagacctttagtcgtcccgcatcaatctcagaacttagcatttattggtaactttgcagaaacagagcgagacactgtatttacaacagaatattcggttcgtactgccatggaagctgtttatcaattactaaatatagatcgtggtattccagaagtcatcaatagtccatttgatcttcgcgtcttaatggatgccatatacgaactgaatgaccaccaagatttgcgtgagattactaaagattcgaaaatgcaaaaactcgcattagcaggattccttaaaaagataaaaggtacgtacattgagtcattattaaaagaacacaaattgttataa

SEQ ID NO: 405516 - DNA, 1668 bp, Staphylococcus aureus
atggaaatgtcggttacagaagtcattttctcctttttaggtggtttaggcattttcctttacggcttaaaaatcatgggagacgggcttcaagcatcagcaggagacaggctacgagatattttaaacaaatttacatcaaatccagtattaggtgttattgcaggtatcgttgtaactattttaatacaaagtagttcaggtacgacagttatcacaatcggactggtaacagctggatttatgacattgaaacaagccattggagtgataatgggtgctaatatcggaacaacggtaactgcatttattatcggtatagatttaggcgaatatgcaatgccaattttagcattaggtgcattcttaatctttttctttaaacgctctaaaatcaataacattggccgcatactattcggtttcggttcactattcttcggtctagaatttatgggtgatgccgttaaacctttagcatcattagatggatttaagcaattaatgcttgatatgtctacaaatccaatactcgctgtcattgtcggcgcagggttaacagcactagttcaaagttcaagtgcgacgattggtattttacaagaattttatcaacaagatttaattagcttaaacgcagcaatccctgtgttactaggcgataacattggtaccacgattacagctatcttagctagtttagccggctcaatcgctgcaaaacgtgcggcgcttgtacacgtcatctttaacttaatcggggtaattatcttcacaattttcttgccagttgtgattcatttgattagtttgttacaagatttatggcacttaaaaccagcgatgacgattgcagtatcacatggtatcttcaacataacaaatactttgattcaattaccatttgtagcaggtttagcatggattgttacaaagcttgtcccaggtaaagatattgctgatgactataaacctcagcacttaaacaaagatcttgtttatcacgcacctggtgttgcattacaagaaactcaaaaagaattacaaaatgtgggtcagattgtcttatcaatgtttgaagacattcgcgaaattacaaaagacgataaaaaattgatcaaaaagcttgaacaaaagcatcaagctgttgaaacaatcaatgatagcattcgaaattatttagttagaatttctacaaaagccattacgaaggcagacgttgagcgtttagcagttatgtttgatgtcaatcgctctattttaaaagtagcagagctaacagaagagtatgtcgctcaattaaaacgccaacatgatgaagatattcgcattacagaagatgcacaacgcggtatggataaattattcaaccatgttgctgagtcatttgataaagccatcgacatgttagatgtttatgacaaaacgaaaaaagatgaaattgtagaacgtagtagagaatcatttaatattgaacataaactacgcaaaggtcatattaaacgccttaatcgtggtgaatgtacaacaaaaggcggattactatatatcgatatgattggtgttcttgaacgtatcggttatcattcacgaaatgtttctgaagcacttgttggccttaacgatgatgtacctacagatgaagaaattgcaacaactgaaatttaa

SEQ ID NO: 405517 - DNA, 1389 bp, Staphylococcus aureus
atgaatgaaacgtatcgcgggggcaacaagttaatcttaggtattgtattaggtgttattacattttggttgtttgcacaatcacttgtaaatgttgtaccgaatttacaacaaagttttggtacagacatggggacaattagtattgcggtcagtctaactgcactattttcaggcatgtttgttgttggagcaggtggtctggcagataaaattgggcgcgtgaaaatgacgaatatcggtttattattaagtattattggttcagcattaattattattacgaatttaccggcattattaattttaggtcgtgttatacaaggtgtatcagcagcgtgtattatgccttctacattggccattatgaaaacttattatcagggtgctgaacgtcagcgtgccttaagttattggtctatcggttcttggggtggcagtggtatctgttcactcttcggtggtgcagttgcgacaactatgggttggagatggattttcatcttctcaattatcgttgccgtactttcaatgttactcatcaaagggacgcctgaaacgaaatcagaaattaccaatacacataaatttgacgttgcagggctaattgttctagtagttatgttgctaagtttaaacgttgtcattactaaaggtgcagcacttggttacacatcattatggttctttggtttgattgcaatcgtaattgtagcattctttattttcttaaatgttgagaaaaaagtagataatccacttattgattttaaattatttgaaaataaaccatatacaggtgcaacgatttcgaacttcttattaaacggtgttgcaggtacattaattgtagcgaatacattcgtgcaacaaggtttaggttatacagcattgcaggcaggatacttatcaattacttatttaatcatggtgttattgatgattcgagttggtgaaaaattattacaaaaaatgggttctaagcgaccaatgttattaggtacattcattgtggtcattggtattgcacttatttcattagtattcttaccaggcatattttatgttatcagttgtgtcgtaggatatttatgtttcggactaggcttaggtatttatgcaacaccttctacagatacagctatttcgaatgcaccgttagataaagttggcgttgcttcaggtatttataaaatggcttcatcacttggtggcgcattcggtgtcgcaattagtggtgctgtatatgctggtgcagttgctgcaacgagcattcatacaggtgcgatgattgcactttgggttaacgtattaatgggaatcatggcatttatcgcaattttattcgcgattcctaatgatgataaacgtgtcaaagatgcgaaataa

SEQ ID NO: 405518 - DNA, 1179 bp, Staphylococcus aureus
atgaatcaacaattaattgaaactttaaaatctaaagaaggcaaaatgattgagatcagacgttatttacatcagcatccagaattatcttttcatgaagatgaaacggcgaaatacatcgctgaattttacaaaggtaaagatgtggaagtagaaacgaatgtcggaccacgtggaattaaagtaacgattgattcagggaaacctggtaaaacattagcaatccgtgcagactttgacgcattacccattactgaagatacaggattatcttttgcatcacaaaataaaggtgttatgcacgcatgtggtcacgatgcacatacagcatacatgcttgtattagcagagacgcttgctgaaatgaaagatagttttacaggaaaagtcgttgtgatacatcaaccagctgaagaagtaccaccaggtggtgctaaaacaatgattgaaaatggtgtattagacggtgttgatcatgtattaggtgtacacgtcatgagcacaatgaaaacaggtaaagtgtattacagacctggttatgttcaaacaggacgcgcattcttcaaattgaaagttcaaggtaaaggtggtcatggttcatcaccacatatggccaatgatgccattgttgcaggtagctacttcgtcacagcgttacaaacagttgtatctagacgactaagtccatttgaaaccggtgttgtcacaatcggttcatttgacggtaaaggtcaattcaatgtcattaaagatgttgttgaaattgaaggtgatgtacgtggattaacagatgctacaaaagcaacaattgaaaaagaaattaaacgtttatcaaaaggattagaggatatgtatggtgtaacttgcaccttagaatataacgatgattatccagcattatataatgatccagagtttactgagtacgtggctaagacgttgaaagaagcaaaccttgattttggtgttgaaatgtgtgaaccacaaccaccttcagaagactttgcatattatgctaaagaacgcccaagtgcctttatttatacaggtgcagcggtggaaaatggtgaaatttacccacatcatcatcctaaatttaacatttcagaaaaatcattacttatttctgcagaagcagtagggacagttgttttagattaccttaaaggagataactaa

SEQ ID NO: 405519 - DNA, 2238 bp, Staphylococcus aureus
atgcaacgtgattatttaattcgagtagaaactgagagtatgtcagatttcaaaaggctcaatagtttaatgattggttttgttattaaaggtgaggcacacatttatgatgaaaataatatgacgcaatgcaacagtggcgacattttcatcattaaccaccgcgacttgtatcgatttcaacttcaacaagatggcatcatatgttatatccaattccaaatgaaatatttagcagacaagtttgatgatgtgcattgtctatattttcacttaacagatgcgaccacaacaaagaatatacatcaactgagaaatataatggcaagactggtttcaacacatatccgacataatgagttgtctaaattgactgagcaacaacttgtgattcagttgcttatgcatatgattcattatgtcccgcgtacatatcattcgaaccaaagtatcttaaatgatgataaagtgaatcaagtatgcgactatatcgagttacattttcatgaagatttaagcctttcagaattaagcgaatacgttgggtggtcagagagccatctgtctaaaaagtttacagaatcgctaggtgtaggattccatcatttcttaaatacgacgcgaattgagcatgcgaaactcgatttgacatacacagatgaaaccattactgatattgcattgcaaaatggcttttcaagtgcagcgagctttgcgagaacatttaaacactttacgcatcaaacacctaaacaatatcgaggtgatcgtccagcaatcactgaaaaccagcaatcggcacaacatgattatcacgaccgtgaattgatattacttttaaatgactacattgaagaaatgaatcattttattgaagatattgaaaagatgaactataaagagattgcctttcaaccaaccaatcaccaactaaatcaatttaatcatattattcaagtgggctatttgaggaatttgctcaatacacagtatcaatcacagttgcttacatgtcatcatgattttcaagtcaatgaagtattagcatatgatgtgattccatatatcatgaaaaagctcaatgcgccattcacgtatgatgcagaaatttcgaatatattttatgatattgatttgtgtttagactttttattagatcataactttagtttgaccatgcatttggatcagtatgactcacgtgattatatcgatgcatttaaaatttttatccatcacgttgccctgcatgtcagtcatagaaaagatttgaagttcaacttgtatgtgacgacattgcacacgtctttgattgaaatgattgattattttaaagcattattccctaatggtggcttgtacattcacttagatcaagctacggaaagacatctaccattattgaaacgacttgagccacacatcgaccattttgtatttgatgccaattcaaatgacgctgttgattttaataaaatgaatgatgatgaatttaaaaccgcgagtcaaatgattattaataaaacgaattaccttatcgacttaatgcatcgtcatcgcctaaagcgtccactcattttactcaattggaatacattgacgggtgatacatttattacaaacggcgaatattttagaggtggtatcatcattgagcaattattaaaattaagttctaaagtagagggtatcgggtattggttgaattatgatttgcacgtcagtcattgtaaaaatgaacgggattatatgaattctattgaactatttcatcaatataatggaaaacgtccggtctatttcacggcattgctatttaataaattaacaagcaatattttgtattctgatgatacatgtattgtcacggggactgattcaaattttcaaatattgttatatgatgcaaagcattttaatccgtacttagcgttggacaatcaaatgaatatgcgtgcgacggaaatgattcatttgaacattaatgccctggaagaaggtatgtataagattaaacattttaccttagataaagaaaatggtgcgttatttaatctttggcgcaaacatcatacgatacatggcatggacaaggactctatagattacgttaatcgaatgagttttccgaaattagaagtatatgatatagatatcacggacacactggcattaaacattaaaatgattacgaatgggattcacttaattgaagtaaaacgttacccaagttcataa

SEQ ID NO: 405520 - DNA, 768 bp, Staphylococcus aureus
atgaaacgattaaacaaattggtattgtatattagttttttgatattagtcattagtttcactgctggttgtggcataggtaaagaagcggaagttaagaaaagctttgaaaaaacattgagtatgtatccgattaaaaatctagaggatttatacgataaagaaggttatcgtgatgacgaatttgataaaaatgataaaggtacatggattattggttctgaaatggttgttcaacctaaaggggaacgtatgaaatcaaaaggtatggttctatatatgaatagaaacactaagactacaaccgggaagtatatagtgagtgaaacacttcatgatgaagatggtagacctaagagtaaagataaagaatatcccgttaaaatggtagacaataaaatcattccaactaaaggtatcaaagacgaaaatataaaaaaagaaatcgagaattttaagttcttcgcgcaatatggcagctttaaagatttgtcgaagtacaaagacggcgatatatcatataatccagaggtaccgagttattcagcaaaatatcaattaactaatgatgactataatgtaaaacaattacgaaaaagatataaaataccaacgaataaagcaccaaagttattgttgaaaggttcgggagacttaaaaggttcatcagttggatataaagacattgaatttacttttgtggagaaaaaaggtgaaaatactttttttactgatagtctacatcttgaaccgagtgaggataaataa

SEQ ID NO: 405521 - DNA, 771 bp, Staphylococcus aureus
atgatgaaacgattaaacaaattagtgttaggcattatttttctgtttttagtcattagtatcactgctggttgtggcataggtaaagaagcgaaaataaagaaaagttttgagaagacattgagtatgtatccgattaaaaatctagaggatttatacgataaagaaggttatcgtgatgacgaatttgataaaaatgataaaggtacatggattattggttctgaaatggcaactcaaaataagggggaagctctgaaagttaaaggtatggtcttgtatatgaatagaaataccaaaacaacaaaaggatattattatgtaaatgcaataaagaatgataaagacggaagaccccaagagaatgaaaaaaggtacccagttaaaatggtcgataataaaatcattccaacaaaagaaattaaagataaaaacataaaaaaagaaatcgaaaactttaagttctttgttcaatatggaaactttaaagatttgtcgaagtataaagacggagatatttcatataatccagaggtgccgagttattcggctaaatatcaattaactaatgatgattacaatgtaaagcaattacgtaaaagatatgacataccaacaaataaagcaccgaagttgttgttgaagggtacagggaatttaaaaggttcatcagttggatataaagacattgaatttacgtttgtagagaaaaaagaagagaacatttactttagtgatgggttaatttttaaaccaagtgaggataaataa

SEQ ID NO: 405522 - DNA, 987 bp, Staphylococcus aureus
atgaaaaagtgtattaagactttgtttttaagtatcattttagtagtgatgagtggttggtatcattcagcacatgcgtcagattcgttgagtaaaagtccagaaaattggatgagtaaacttgatgatggaaaacatttaactgagattaatataccgggttcacatgatagtggctcattcactttaaaggatccagtaaaatcagtttgggcaaagactcaagataaagattaccttacccaaatgaagtcgggagtcaggttttttgatattagaggtagagcaagtgctgataatatgatttcagttcatcacggcatggtttatttgcatcatgaattaggaaaatttctcgatgatgctaaatattacttgagtgcttatccaaacgaaacaattgtgatgtctatgaaaaaggactacgatagcgattctaaagttacgaagacatttgaagaaatttttagagaatattattataataacccgcaatatcagaatcttttttacacaggaagtaatgcgaatcctactttaaaagaaacgaaaggtaaaattgtcctattcaatagaatggggggtacgtacataaaaagtggttatggtgctgacacgtcaggtattcaatgggcagacaatgcgacatttgaaacgaaaattaataatggtagcttaaatttaaaagtacaagatgagtataaagattactatgataaaaaagttgaagctgttaaaaatttattggctaaagctaaaacggatagtaacaaagacaatgtatatgtgaatttcttgagtgtagcgtctggaggcagcgcatttaatagtacttataactatgcatcacatataaatcctgaaattgcaaaaacgattaaagcaaatgggaaagctagaacgggttggctgattgttgactatgcaggatatacgtggcctggatatgatgatatcgtaagtgaaattatagatagtaataaataa

SEQ ID NO: 405523 - DNA, 483 bp, Staphylococcus aureus
atggagaaatttaacaactggatattaaatgcaataagtggatctcaaacagacaagaatgaaacaactgaagaattaaaaggggcaaaatttatcattttatatgcatattcaatgctcgttttgcttgcgttagtaatttctaacatattcattcacattttggagcctaaactatcaatcaccactcaaatcatcatcgttttgattttaattgaagcactaattggactgcgtttcttgaaagcgtacgatgttaagcgtggcaaagataaagaaaataagaaaaatagtaaggatttcgttaaactaaaatcaattttagtagcaattttatttacatcattggcgctgacagcaggtactgtagctgatatatacggtttcactgacttaggaaatactagaagtgatttaatcgtttggagcataggtggtattatatttggcctcgtatgttacacaatggaagataaaagataa

SEQ ID NO: 405524 - DNA, 3153 bp, Staphylococcus aureus
atgagtcaattgctaaatgatacgttatcggcttggttgttaattgaatctttaagtccaggagaagtaaattttacagcggaagatatactctcagctgaacattttaaaaatggtgcaaagcaagcacaacttcaaagttttgatgaatattttgaaatatggaatgctgaacgctttattatatcagaagaaaaatcagagactggggaacttatatttaaattttatagacattgcttccgctataatgaaattaatttgaaaattcaggatatttttgatgattattctgagattcataatccaaatgggacacactgttatggttacacatttaacacagataaacacggcaaagtgatagttgattctatacatattccgatgattatgagtgcattaaaagaaattgaaaagaacaaaaatgccaatatagaagaaaaatttaatgattctgttgaaaaatttgttcaaaaagtaaaagaaattttagcagatgaaccaattaatgaatttaaattgaagaagatggacaaagcttatgatgagtacttttctgtattaaattcaaagaaagatggattatttggacattatgtagcaatagaatatgtgaaagatagtgatttaccacagccggaatttaacagcttcttcataagtgatattgagaaagcaagaaaatctcccaaccaaactttaattgattacattgaaggtgtagaagaaagtcagcgcatagaagtagatgaaaataaagaaatgtttgacaaatttttacatccttcacgtttgcctgatggacgatggccatcacagactgagtttagattgtctttaatgcaacaacttgctgtaaaccaaattacgagtggtaatgaaagaataagttcagttaatgggccaccaggtacaggtaagactactttattaaaagatatatttgctcatctagtagttgaaagaggtaaagagttagctaaactaaataatcctaaagatgcatttgtcaaaacaaaaattcatgaaacggatgataaatacgtatacttactaaaggaatctattgccaaatataagatggtagtcgcatctagtaataatggagctgttgaaaatatatctaaagatttaccgaaaattgaagaaattataagaaatcccgaaaaatgtaaattccctaaatatgaacagaattatgcaaatttagcacatgaattaaaagattttgctgaaatagctgaagatttgattggtgaaagtgcctggggcttattttctggagtttttggtaaaagtactaatattaaccaagtattgagtcatatgttaaaacaagatgcgaatgatattggctttgctaaattactacaaaatgagaataatcgtatgagttataacgagttaatgagtgaatggcaatcacatcaacgtgcatttttagaagagttgaggcatgttgaaatgttaaaagaagaatctattagagcatatgatgtttataaaaattgtgagtctttctctaagattgaacaggttattaatagtgaaaaaacaagtattgaagaacaggtatatcatttagataatgaaacgttacgagacaataaagaaatagaagatttggataatcgaattaattatattgttaagcaaatagaaactttaaatgagttaattaaatccatcaaagaaagcaacaaaggttttattaacaaactgaaagcgatgtttaattcagaagaagatgaaagctataaagatcataataaagagaagcaacaattattaacacaacagttagagttagagaaatgtaaaaaaaacaaacatgaagaccttgttagcaaactaaaagaaaaagagaaattaattaaacaattaactaaagtacagttgcaattagacgagttaaattcacagttacaagagttagaagcatatcgtattgagtcaaaaattacaattccagaaaaagatttttggagtgacaacaattatgatgagcgccaagttactaatctgtggacgagtgacgaacttcaatacagacgtgccatgctctttttaagagcaatgatattgcataaattattattgattgctaataatacaactatttattatgcgattaatgattttaaagatagaaggaaattaattgatgcaaatccagataaagtacacaacgcatggaatgtgatgcatttaatatttccagtagttagtacgacgtttgcaagctttaaatctatgtatgggggcataccaaaagatttcatagactacttatttattgatgaagcaggacaagcaatacctcaagcagctgtgggagcattatatcgttcaaaaaaagttgtagctgtaggtgatccgattcaaatagaaccggttgtgactttagaaagtcatttaattgataacattcgtaaaaattatcatgttccggaatatctagtttctaaagaagcttctgtgcagtctgttgcagacaacgccaatcaatatggtttttggaaatctgatgctactgatagtaatcaaaaaacctggataggcatacctttatgggtgcacagacgatgtttaaaacctatgttcacgatagctaaccaaatcgcttataataataaaatggtgttgccaagtaatattacaaaagtaggtaaaacaggttggtatgacgttaaaggaaacgcagttcaaaaacaatttgtgaaagagcatggtgaaaaagtagtgggattattagctgatgattggattgaagcaattaaggaaggtaaaaatgaaccgagctcatttgtaatatcgcctttttcagcagtacagcaacagattaaacgtatgttaaagcaacaactaccgactagaattgatattgaacgtacaaaaattaatcaatgggtcgataaatccattggtactgttcatacttttcaaggtaaagaggctcagaaggtgtattttgtaataggtactgataatacccaagatggtgctgtgaactggtcatgcgaaaaaccaaacttgttaaacgttgcagtgacaagagctaagaaagagttttatgtaattggcgacatgcaaagaatgcagatgaaaccattttatgagacgatttttaaagaaagaaatgtaaaataa

SEQ ID NO: 405525 - DNA, 603 bp, Staphylococcus aureus
atgttaattagtcttgtaatcccagtttttgctttgttagttattggtggtattatttggatgattatagaaggtatagtacatatttcaaaaaagaataaagcaattgataacttttttaaccaagttaataaagtaagtgagacatataaattcgctactacttttttatttctaatcttggctacggctggtatttctcaattttatctatattatatagtatcagcgtttcttttttggcttgtcatacttacctttggcattgcaggtatcatttttttaatgccatatggattatgttttctaccgttttataagcaaaaaaagaaaaaacagacatttaaaaaatacatggtttacactacgattggtttgtcaatttgtctaggcttatctctagttttggttcacactacgaaaatttatatggacgaaggtggcgtaagatactattacggtagttttgtaatgaaacaagcgggcggttatgcttatttagctttagcggtactttcaacgttgttaattgttgcgaaaaaagctacaaataaaaataaagaaatcgaaaccgtcgacaatacaaatataacggaaagataa

SEQ ID NO: 405526 - DNA, 735 bp, Staphylococcus aureus
ttgaactttaatgatttggaaatttttataactgtatgtgaagaagcatctatcaataaagctgcaattaaacttagatatgcacaatctaatatatctcaaagaattagcaagcttgaaaatgaattaggtgtagttttgctttttagaaatcaaaaaggtgctaaggcaactaaagcaggcgaagaattcttagcgtatagcaaaaaagtattaagagatacagagactataaaaaataaaatgaaaaataatactatgtctattttatgctcagaactgttatttaattatttatctgagagcgaagaaattatgatgtcgaataactcaattaattttatttctagtggaaatattagaaaagctatagaaaaaaataattatgataaggttatttcattcataaaaattaacgactcaaattatagacttagtaatgttgatactatgaaagtaacgctttacagtaatggaagtaattatgataaagaggctttactaataaataaagatgagttttgtcctttaaggaaaataactttagataataagcttgattcacaacgggtaatggaaattgattcattggcagcaataataaacttagttaaacaaggaaaaggaaaggctttattacctatgacttttgagaataaaagagatatagtacaggacatttctaagatatttgaagttaactactatacttataatcatattatgcatcattaa

SEQ ID NO: 405527 - DNA, 534 bp, Staphylococcus aureus
atgcatgcaatgcaatatcatgttaagttgcctagtgattacaatatggaaataattagagatagagttcgattaaatggttataagactgatggatttaaaaatttaattataaaagcttatttaataagtcaaacaactactaattgcattacaaatacttattcaccattatatttatggagaagttcagaggggatgactgaatttatattcaatggattttatgataatgttatttcttcttttggatggcaaaatataaatattggtgtgatatattcaatgaacataaccgattctgttaaacatagtctttatgcgcttgaagaatatatcgacattttccctactttatctctaaaagaaatagaaatcaaaaaattgtttagaatcttcgataatgcagttgcagaaattataatttataatcctgataagtggaagtttgtgaaatattcatttattgaaaatcttccaaagagtctcaatccaaatataaaaatttatgatgtactatatatctcacaatga

SEQ ID NO: 405528 - DNA, 861 bp, Staphylococcus aureus
ttgaacttaaacattttaaaatcatttttagtaactagtgaaacaaagaaccttactaaagcatcagagttacttaactattcacagtcaactgtatctacacatattgaaaaattagaaaggcaattagatgttaaattattttatagaaaaaaatatggtatggaactaacggaagaaggcttagcatacgttaaatacgctaaagtgattttagatagtaatagcgaatacgagagagaaataaaaggactttacaataagaaggtaaatataagtattaacatgcaagaaagtcagtatttgtatcgctactataataagattagtgaatggttagctgaacacccatatgtaaacttgaagtttaaatccgcacattctaatttctatattaaagaagaaattgctaatttcaaatcggatattagccttatcacagacgaaaagattattaatagtaacttaactgctattcctataactgaagaacgtttaatatttgttactaacaaagagatgaaagatttcaaattaaacgatattcaaaaccatacattacttgttactgaaaaagggtgtagttacagagaacagttagaaatgattttatataaatatagcttttcaacaaaacaaatgattgaatttctaggaattgagtcattaaaaaaacacttgaaaaattcaggtgggattgcgctattgccggaatttattgttgcagatgaattagaaaataaaagtttgtttcaaatagacgtagatgtcgatattccgaatttagaaacaacattgataattaatcctgaatcgaataagcaagtacttgaatcttttgtaaaagatgtttttttataa

SEQ ID NO: 405529 - DNA, 486 bp, Staphylococcus aureus
ttgaagaatttaaaagtcaactttgtgaatttatatcaaagcaacattgaaaaggttacagataatcgtcatagcaaaggtgccaactttcataatgatgattacgaacaaattttaatcaaagttttagaatcagatattattattttttcaacaccactctattggtactccatgagtgcgtctttaaaactcttcattgatagatggaccgagtcattgcgagatacgcaaatagacaacttcaaagaaatcatgtcacaaaaaaagtatttgattttaatcataggtggcgacaatccgcataccaaagcacaacctttagtcaaccaattcaaattaatatttgagtttatgaatattactaactatagatttttgatcggcgaaggcaataaaccattcgatattttaaacgactctcaatttatagaagagctcgcaaatataaatcttgcattgaaaaaaggtgatatttatgactga

SEQ ID NO: 405530 - DNA, 1221 bp, Staphylococcus aureus
atgactgatttgttgaaaattaaaaacttcagattgttctttttagcagaaataatttcagcattcggagttggaattagtacagttggggctaattggtatttaatcgacaaaactaacgactcccaactattaggtattatgttagctttaaatgtattatccggtttcttagcttctcctataataggtggactagccgataaatataatagacgaaatattattttaatcacctatcttcttcaggtaatattatatttactcattgtcatagcactcgtaatgataggatttgagacctatttagtgattggatttgcgattgttaatgggataggttggactacgtatatggcaacatctagaagtttagttaaacagatattaaaaccagatcaatatacagatgcaaattctctattagagattagtttgcaaacaggtatgtttattgcaggtggattatcaggaatattatataaaataaatggattcactctaattatagcgatgactataatgatgtttctaatcagcatttttatgttatttagattgcatgtagataaaccaactcattcagaggaagaatcaacaaatagcttattgcaagaatatttattaggatggaaatttttaaaagacaacatgatgatatttatttttggagttatttcaatcataccaatggtgtttacaatgatctttaacatatcattaccaggatatgtttataatgttttaaaactttcgtctgtacaatttggtttttcagatatgttatatggcattggaggattatgtgcaggtttaatttcagctattctttcgaagaaaatctcaactaaagtattgatatttttgttatatttcatattagtcataaattcagcactatttatttggataaactcagcattttacttattcataggatcatttatactaggctactcaatttcatcaatcagaatttatatgaatacagctataatgaacactgtttcagataaatatgtcggtcgctcatttacgatatggacgtcaatttcattgttactgcaaagtttaattgctccatttttaggaagatggattaatgaaattaatgataaattcggtttctatattatactcattttatccttactcatatttgttacactgctgcttgttaacaaaacaggcaaaataaaatatgcacataaagaagagtga

SEQ ID NO: 405531 - DNA, 297 bp, Staphylococcus aureus
atggcgactaagaaagatgtacatgatttatttttaaatcatgtgaattcaaacgcggttaagacaagaaagatgatgggagaatatattatttattatgatggcgtggttataggtggtttgtatgataatagattattggtcaaggcgactaaaagtgcccagcagaaattgcaagataatacattagtttcgccatatccaggttctaaagaaatgatattaattctagactttaccgaagcaacaaatctcactgatttatttaagaccataaaaaatgatttgaaaaagtga

SEQ ID NO: 405532 - DNA, 987 bp, Staphylococcus aureus
atgaaagaaaatttttggagtgaattaccacgtccattttttattttggcgccaatggaagacgttacagatatcgtctttcgacacgttgtaagtgaagcagctagaccggatgtgtttttcactgaatttacaaatactgaaagcttttgccaccctgaaggcatacatagtgtgcgcggacgcttaacttttagtgaagatgaacagccgatggtcgctcatatatggggagataagccagaacagttccgtgaaacgagtattcaattagctaaaatgggctttaaaggcatagacttaaatatgggatgtcctgtagcaaatgttgctaaaaagggtaagggttccggcttaatcttaagacctgacgttgctgccgaaattattcaagcgactaaagcaggtgggcttccggtaagtgttaaaacacgccttggctactatgaaatcgatgaatggaaagattggttgaagcacgtcttcgaacaagacattgccaatttatctattcatcttcgtacacgtaaagaaatgagtaaagtagatgcacattgggaattaatcgaagctattaaaaatttacgtgacgaaattgcaccaaatacattgttaacaattaacggtgatattcccgatagaaaaacaggacttgaactggcagaaaaatatggcattgatggcgtcatgattggtagaggcattttccacaatccattcgcttttgaaaaagaaccacgcgaacacacaagcaaggaactattagatctattgagattgcatttatcattgtttaacaaatatgaaaaagatgaaatacgacaattcaagagcttgcgtagattctttaaaatctatgtgcgtggcataagaggcgctagcgaacttcgacatcaattgatgaacacacaatcaattgcagaagcacgagcactactcgatgaatttgaagcccaaatggacgaagacgttaaaattgaattatag

SEQ ID NO: 405533 - DNA, 1194 bp, Staphylococcus aureus
atgaataagcattatcaaattgttattattggtggcggtacagcaggtgttaccgtagcatcaagactattaagaaaaaatcaaaacttaaaagagaaaatagcaattatagatccagcagaccatcattactatcaaccattatggacgttggttggtgcaggggtatctagtttgaaaagttctcgtaaagatatggaaagtgttatacctgaaggtgctaactggataaaacaggctgtttcaagttttcaacctgaaaataatagcgttattttaggagataatacagtcgtttattatgattttttagtagtagctccaggattacagattaattggtcttcaattaaaggactaaaagaaaatataggtaaaaatggtgtttgctctaactattcacctgactatgttaacgaaacttggaaccaaatttctaattttaaacaaggaaatgccatttttacgcatccaaacactcctataaagtgtggaggtgcgcctatgaaaattatgtatttagctgaagattattttaggaaacataaaatccgttctaacgctaatgtgatatatgcaacgccaaaagatgctttatttgacgtaggaaaatataataaagaattagaaaggattgttgaagaaagaaatataacagtcaattataattataaccttgttgaaatcgacggtgacaaaaaagtggctacattcgaacatatcaaagcatacgatagaaaaacaataagttatgatatgttacatgtaacaccacctatgggtcccttagatgtagtaaaagaaagtacactttcagatagtgagggttgggtagatgttaacccaaccacattacagcataaaagctactctaatgtatttgcacttggtgatgcttcaaatgtacctacttcaaaaacaggcgcagctattcgtaagcaagcacctatcgtcgctaataatttattgcaagtgatgaataatcaaatgttaacgcatcattatgatggttatacttcatgccctattgttactggatataataggttaatacttgcagagtttgattataataaaaatactaaagaaacaatgccgtttaatcaggccaaagaacgtagaagtatgtatatatttaagaaagatttattacctaaaatgtattggtacggcatgctaaaaggattaatataa

SEQ ID NO: 405534 - DNA, 1335 bp, Staphylococcus aureus
atgttttttaaacagttttacgataatcatttatctcaagcatcatatttagtgggttgtcaacgtacaggagaggcaataataatagaccctgttcgtgatttatcgaaatatatagaagttgcagattctgaaggtttaacaattacacaagctacagaaacacatattcatgctgattttgcttcaggaattcgtgatgtggctaaacgcttaaatgcaaatatatatgtgtctggcgaaggtgaagatgcattagggtataaaaatatgccatcaaaaacacaatttgttaaacatggagatatcattcaagtaggcaatgttaaattagaagttctgcatactccaggacacacgcctgaaagtattagctttttactcactgatttaggtggtggttcaagtgttccgatgggattatttagtggtgactttatttttgttggtgatataggtagacctgatttattagaaaaatctgttcaaataaagggttctacagaaattagcgcgaaacaaatgtatgagtccgttcaaaatattaaaaatttaccagactatgttcaaatctggccgggtcatggtgctggaagcccttgtggtaaagcattaggtgccatacctatatctacaataggttatgagaaaattaataactgggcatttaatgaaattgatgagactaaatttattgaatcattaacatcaaatcaaccagcaccaccgcatcattttgcacaaatgaaacaagttaatcagtttggtatgaatttatatcaatcatatgatgtttatcctagtttagataataagagagtagcatttgatcttcgtagcaaagaggcctttcacggtggccacacaaaaggaacaatcaatataccatacaacaaaaactttattaatcaaattggttggtacttagattttgaaaaagatatagatttaattggagataaatctactgttgagaaagcgaaacacactttacaattaattgggtttgataaggtagcaggctatcgtttgccaaaatcaggcatttcaacccagtccgttcatagcgctgatatgacaggtaaagaagaacatgtattagacgtacgtaatgatgaagagtggaataatggacacttagatcaagcagttaatattccgcatggtaaattattaaatgaaaatattccttttaataaagaggataaaatatatgtacattgtcagtcaggtgttagaagttcaattgcagtgggtatattggaaagcaaaggttttgaaaatgtggtgaatattagagaaggctatcaagattttccagaatcattaaaataa

SEQ ID NO: 405535 - DNA, 1068 bp, Staphylococcus aureus
atgaaacaatacggagaaaagtttatcgatgaatttagtaaagcagaattggaaaaactagccaagcaagggcaattaattgacgttagaacagaagaggagtatgcattaggacatatcaatggttccatacttcatcctgttgatgagattgagtcattcaataaagaaaaaaataaaacctattatgtaatctgtagaagtggtaacagaagtgctaatgctagtaaatatttagctaaacaaggttataacgttataaatcttgatggtggttataaagcttatgaagaagaaaacgatagttatgatacacaagaagaatataaaagtatagaaattaaagcagatcgtaaacaatttaactatcgtggtcttcaatgtccagggccaattgtaaaaattagtcaagaaatgaagaatattgaagtaggtgaccaaattgaagtcaaagtcacagaccctggattccctagtgacattaaaagttgggtgaaacaaacaaggcatactttagttaagcttgatgaaaataacaatggaattaatgcgattattcaaaaagaaaaagcaaaagatttagatataaattattctgctaaaggtactacaattgtattatttagtggagaattagacaaagctgtagcagcgttgattattgcaaatggtgctagagctgctggaaaagatgtaactatcttctttactttttgggggcttaatgcattaaaaaaagtgcaaacagttaatgttaaaaagcaaggtattgcaaaaatgtttgatttaatgttgcccaaaaagaatatacgaatgcctctttccaaaatgaatatgtttggtttaggaaatatgatgatgcgctacgtaatgaaaaagaaaaatgttgattcattaccaacacttatcaatcaagctattgagcaaaatatcaaattaatcgcttgtacgatgagtatggatgtcatgggtattcagaaagaagaacttagagatgaagttgagtacggtggtgtaggcacttatattggtgctactgaaaatgcgaatcataatttatttatctaa

SEQ ID NO: 405536 - DNA, 261 bp, Staphylococcus aureus
atgaattatgataaaaaaatgattaatcgtattaatagaatacaagggcaactaaatggaattattaaaatgatggaggaaggaaaagactgtaaagatgtcattacacaaataagtgcatcaaagagttcactccaacgcttgatgggtatcattattagtgagaatttaatagaatgtgtaaaagcagctgcggatgatgaagaaagctcccaagagttaattaatgaagctgtaaacttattggtgaaaagtaagtaa

SEQ ID NO: 405537 - DNA, 756 bp, Staphylococcus aureus
atggatattgttaatatagttatcatgttactcattggggtattcggtgggttcatatctggtctagtaggcgtaggtggtgctatcattatttatccagctattttattattaccaccattattcggagcccctgcatatagcgcatatatcgcatcaggtcttacttctagccaagtctttttcagtacattaagtggctcattaaaagctcgaaaaaaaacagagttctcgccacaattagttctttatatgggtggcggcatgattatagggagtatgttaggtgcatttctagcaaatttatttgatgctacatttgtaaatacggtatatatcattattgctttacttgcattaacattaatgtttattaaagtgaaacctagttccgaaaagtcttcatttaataaatatttattagttatcattggccttttcattggtattatttcaggtatagtaggtgcaggtggtgccttcattattattcctatattattggttttattcaaattaccaatgaatactgtagtcgctaatagtatagtaattgcttttatatcttcaattggtgcttttgtcatcaaacttattcaaggttatatccctttatatgacgccttattccttataatagggagtattatatttgctccaatagggttaaaattaagtaaaaaagtccctaacataatacaaaaatggattatcagtattttaatcgtttttgctatagttcaactcattttataa

SEQ ID NO: 405538 - DNA, 453 bp, Staphylococcus aureus
atgagtaaagtagatgcacattgggaattaatcgaagctattaaaaatttacgtgacgaaattgcaccaaacacattgttaacaattaacgatgatattcccgatagaaaaacaggacttgaacttgcagaaaaatatggtattgatggcatcatgattggtagaggcattttccacaatccattcacttttgaaaaagaaccacgcgaacacacaagcaaagaactattagatttgttgagattgcatctatcattgtttaacaaatatgagaaagatgaaatacgacaattcaagagtttgcgtagattctttaaaatctatgtgcgtggcataagaggcgctagcgaacttcgccatcaattgatgaacacacaatcaattgcagaagtacgagcactactagatgaatttgaagcccaaatggacgaagacgttaaaattgaattatag

SEQ ID NO: 405539 - DNA, 723 bp, Staphylococcus aureus
atgctactaaaaacgatactacatgcagaagttgaaatggaagatggaaagaaatatttattacaaaatgggaaatggggttattttaatagagaattttttgaccttttgaatgatcatttgaatgagatagaaattaggtataacacactaactcccacaggtttagtatttaaagaaggagaagaaggatatataaaagaaatagtaggaagattgccagaagaatatttaatgttacataaaaaattcataaaaccaataaataagaattttatagtaaaaggaaatggaatagagttggcagacttatacaatattaaaaacaaagagcttttcacgattaaaagaggaattaatacatctttatctctttatagtctagaacagaatataatagcaattaacgccttaaaatatccagaatcatataattttgaagaattaatagaagctattcctgataactcggaaaatatatttaatgatatacaacggagtacaaattttagtatagtatggattttaccgatatcatctattgataatatgcccataaaagatatggttcatactagtaacgtaataaataaaaactttcaattaactaatttaggttcagtattacttaaaaataaattagtagagtggtctctctatttaaaagatcaaagaattaatccaattatttatatggaaacgccaactgaagatagaaattaa

SEQ ID NO: 405540 - DNA, 870 bp, Staphylococcus aureus
atgaagattaatatttataaatctatttataattttcaggaaacaaatacaaattttttagagaatctagaatctttaaatgatgacaattatgaactgcttaatgataaagaacttgttagtgattcaaatgaattaaaattaattagtaaagtttatatacgtaaaaaagacaaaaaactattagattggcaattattaataaagaatgtatacctagatactgaagaagatgacaatttattttcagaatccggtcatcattttgatgcaatattatttctcaaagaagatacaacattacaaaataatgtatatattataccttttggacaagcatatcatgatataaataatttgattgattatgacttcggaattgattttgcagaaagagcaatcaaaaatgaagacatagttaataaaaatgttaatttttttcaacaaaacaggcttaaagagattgttaattatagaaggaatagtgtagattacgttagaccttcagaatcttatatatcagtccaaggacatccacagaatcctcaaatttttggaaaaacaatgacttgtggtacaagtatttcattgcgtgtaccgaatagaaagcagcaattcatagataaaattagtgtgataatcaaagaaataaacgctattattaatcttcctcaaaaaattagtgaatttcctagaatagtaactttaaaagacttgaataaaatagaagtattagatactttattgctaaaaaaactatcgaattcttcaactacagaaaatatatctatagatatatcaagatttttagaactaagtaatatgatactcttgttagatgatatgctcgacgtcaatatatatatataa

SEQ ID NO: 405541 - DNA, 480 bp, Staphylococcus aureus
atgaaaatcaccattttagctgtagggaaactaaaagagaaatattggaagcaagccatagcagaatatgaaaaacgtttaggcccatacaccaagatagacatcatagaagttccagacgaaaaagcaccagaaaatatgagtgacaaagaaattgagcaagtaaaagaaaaagaaggccaacgaatactagccaaaatcaaaccacaatccacagtcattacattagaaatacaaggaaagatgctatcttccgaaggattggcccaagaattgaaccaacgcatgacccaagggcaaagcgactttgttttcgtcattggcggatcaaacggcctgcacaaggacgtcttacaacgcagtaactacgcactatcattcagcaaaatgacattcccacatcaaatgatgcgggttgtgttaattgaacaagtgtacagagcatttaagattatgcgaggagaggcgtatcataagtaa

SEQ ID NO: 405542 - DNA, 2319 bp, Staphylococcus aureus
atgaaagctttattacttaaaacaagtgtatggctcgttttgctttttagtgtaatgggattatggcaagtctcgaacgcggctgagcagcatacaccaatgaaagcacatgcagtaacaacgatagacaaagcaacaacagataagcaacaagtaccgccaacaaaggaagcggctcatcattctggcaaagaagcggcaaccaacgtatcagcatcagcgcagggaacagctgatgatacaaacagcaaagtaacatccaacgcaccatctaacaaaccatctacagtagtttcaacaaaagtaaacgaaacacgcgacgtagatacacaacaagcctcaacacaaaaaccaactcacacagcaacgttcaaattatcaaatgctaaaacagcatcactttcaccacgaatgtttgctgctaatgcaccacaaacaacaacacataaaatattacatacaaatgatatccatggccgactagccgaagaaaaagggcgtgtcatcggtatggctaaattaaaaacagtaaaagaacaagaaaagcctgatttaatgttagacgcaggagacgccttccaaggtttaccactttcaaaccagtctaaaggtgaagaaatggctaaagcaatgaatgcagtaggttatgatgctatggcagtcggtaaccatgaatttgactttggatacgatcagttgaaaaagttagagggtatgttagacttcccgatgctaagtactaacgtttataaagatggaaaacgcgcgtttaagccttcaacgattgtaacaaaaaatggtattcgttatggaattattggtgtaacgacaccagaaacaaagacgaaaacaagacctgaaggcattaaaggcgttgaatttagagatccattacaaagtgtgacagcggaaatgatgcgtatttataaagacgtagatacatttgttgttatatcacatttaggaattgatccttcaacacaagaaacatggcgtggtgattacttagtgaaacaattaagtcaaaatccacaattgaagaaacgtattacagttattgatggtcattcacatacagtacttcaaaatggtcaaatttataacaatgatgcattggcacaaacaggtacagcacttgcgaatatcggtaagattacatttaattatcgcaatggagaggtatcgaatattaaaccgtcattgattaatgttaaagacgttgaaaatgtaacaccgaacaaagcattagctgaacaaattaatcaagctgatcaaacatttagagcacaaactgcagaggtaattattccaaacaataccattgatttcaaaggagaaagagatgacgttagaacgcgtgaaacaaatttaggaaacgcgattgcagatgctatggaagcgtatggcgttaagaatttctctaaaaagactgactttgccgtgacaaatggtggaggtattcgtgcctctatcgcaaaaggtaaggtgacacgctatgatttaatctcagtattaccatttggaaatacgattgcgcaaattgatgtaaaaggttcagacgtctggacggctttcgaacatagtttaggcgcaccaacaacacaaaaggacggtaagacagtgttaacagcgaatggcggtttactacatatctctgattcaatccgtgtttactatgatataaataaaccgtctggcaaacgaattaatgctattcaaattttaaataaagagacaggtaagtttgaaaatattgatttaaaacgtgtatatcacgtaacgatgaatgacttcacagcatcaggtggcgacggatatagtatgttcggtggtcctagagaagaaggtatttcattagatcaagtactagcaagttatttaaaaacagctaacttagctaagtatgatacgacagaaccacaacgtatgttattaggtaaaccagcagtaagtgaacaaccagctaaaggacaacaaggtagcaaaggtagtaagtctggtaaagatacacaaccaattggtgacgacaaagtgatggatccagcgaaaaaaccagctccaggtaaagttgtattgttgctagcgcatagaggaactgttagtagcggtacagaaggttctggtcgcacaatagaaggagctactgtatcaagcaagagtgggaaacaattggctagaatgtcagtgcctaaaggtagcgcgcatgagaaacagttaccaaaaactggaactaatcaaagttcaagcccagaagcgatgtttgtattattagcaggtataggtttaatcgcgactgtacgacgtagaaaagctagctaa

SEQ ID NO: 405543 - DNA, 801 bp, Staphylococcus aureus
atgagccgcttgatacgcatgagtgtattagcaagtggtagtacaggtaacgccacttttgtagaaaatgaaaaaggtagtctattagttgatgttggtttgactggaaagaaaatggaagaattgtttagtcaaattgaccgtaatattcaagatttaaatggtattttagtaacccatgaacatattgatcatattaaaggattaggtgttttggcgcgtaaatatcaattgccaatttatgcgaatgaaaagacttggcaggcaattgaaaagaaagatagtcgcatccctatggatcagaaattcatttttaatccttatgaaacaaaatctattgcaggtttcgatgttgaatcgtttaacgtgtcacatgatgcaatagatccgcaattttatattttccataataactataagaagtttacgattttaacggatacgggttacgtgtctgatcgtatgaaaggtatgatacgtggcagcgatgcgtttatttttgagagtaatcatgacgtcgatatgttgagaatgtgtcgttatccatggaagacgaaacaacgtattttaggcgatatgggtcatgtatctaatgaggatgcggctcatgcaatgacagacgtgattacaggtaacacgaaacgtatttacctatcgcatttatcacaagacaataacatgaaagatttggcgcgtatgagtgttggccaagtattgaacgaacacgatattgatacggaaaaagaagtattgctatgtgatacggataaagctattccaacgccaatatatacaatataa

SEQ ID NO: 405544 - DNA, 789 bp, Staphylococcus aureus
atgaactggaaactgacaaagacacttttcattttcgtgtttattcttgtcaacatcgtgttagtatcgatttatgttaataaagtcaatcgctcacacattaatgaagtcgagagtaacaatgaagttaattttcagcaagaagaaattaaagtaccgactagtatattgaataaatcagttaaaggtataaaattagagcaaattacagggcgatcaaaagactttagttctaaagctaaaggcgattcggatttgaccacatcagatggtggaaaattattgaatgcgaacattagtcaatcggtaaaggtcagtgacaataacttaaaagatttgaaagattatgttaacaagcgcgtatttaaaggtgctgaatatcaattaagcgagattagttcagattctgtaaaatatgaacaaacgtatgatgattttccgattttaaataacagtaaagcgatgttgaactttaatatagaagataacaaagcgactagttataaacaatcaatgatggatgacattaagcccacagatggtgcagataagaagcatcaagtgattggtgtgagaaaagcaatcgaggcattatattataatcgttacttgaaaaaaggtgatgaagtcattaatgctagactcggttactactcagtcgtgaatgaaacgaatgttcaattgttacaaccaaactgggaaattaaagtgaagcatgacggtaaggataaaacgaatacttactatgtcgaagcgacaaataataaccctaaaattattaatcattaa

SEQ ID NO: 405545 - DNA, 1335 bp, Staphylococcus aureus
atgaataataaggagcatattaaatctgtcattttagcactactcgtcttgatgagtgtcgtattgacatatatggtatggaacttttctcctgatattgcaaatgtcgacaatacagatagtaagaagagtgaaacgaaacctttaacgacacctatgacagccaaaatggatacaactattacgccatttcagattattcattcgaaaaatgatcatccagaaggaacgattgcgacggtatctaatgtgaataaactgacgaaacctttgaaaaataaagaagtgaagtccgtggaacatgttcgtcgtgatcataacttgatgattcctgatttgaacagtgattttatattattcgattttacgtatgatttaccgttatcaacatatcttggtcaagtactgaacatgaatgcgaaagtaccaaatcatttcaatttcaatcgtttggtcatagatcatgatgctgatgataatatcgtgctttatgctataagcaaagatcgccacgattacgtaaaattaacaactacaacgaaaaatgatcattttttagatgcattagcagcagtgaaaaaagatatgcaaccatacacagatatcatcacaaacaaagatacaattgatcgtacgacgcatgtttttgcaccaagtaaacctgaaaagttaaaaacatatcgcatggtatttaacacgattagtgttgagaaaatgaatgctatactatttgacgattcaaccatcgttcgtagttcaaagagtggtgttacaacctacaacaataatacaggtgtcgcaaactataacgataaaaatgaaaaatatcattataaaaacctgtccgaagatgaagcgagttccagcaaaatggaagaaacgattccaggaacctttgattttattaatggtcatggtggtttcttaaacgaagactttagattgtttagtacgaataatcagtcaggcgagttaacatatcaacgtttccttaatggttatccaacgtttaataaagaaggttctaatcaaattcaagtcacttggggtgaaaaaggcgtctttgactatcgtcgttcgttattacgcaccgacgttgttttaaatagtgaggataataaatcgttgccgaaattagagtctgtacgttcaagcttagcgaacaatagtgatattaattttgaaaaagtaacaaacatcgctatcggttacgaaatgcaggataattcagatcataatcacattgaagtgcagattaacagtgaactcgtaccgcgttggtatgtagaatatgatggcgaatggtatgtttataacgatgggaggcttgaataa

SEQ ID NO: 405546 - DNA, 1827 bp, Staphylococcus aureus
atgaagtggctaaaacaactacaatcccttcatactaaacttgtaattgtttatgtattactgattatcattggtatgcaaattatcgggttatattttacaaataaccttgaaaaagagctgcttgataattttaagaagaatattacgcagtacgcgaaacaattagaaattagtattgaaaaagtatatgacgaaaagggctccgtaaatgcacaaaaagatattcaaaatttattaagtgagtatgccaaccgtcaagaaattggagaaattcgttttatagataaagaccaaattattattgcgacgacgaagcagtctaaccgtagtctaatcaatcaaaaagcgaatgatagttctgtccaaaaagcactatcactaggacaatcaaacgatcatttaattttaaaagattatggcggtggtaaggaccgtgtctgggtatataatatcccagttaaagtcgataaaaaggtaattggtaatatttatatcgaatcaaaaattaatgacgtttataaccaattaaataatataaatcaaatattcattgttggtacagctatttcattattaatcacagtcatcctaggattctttatagcgcgaacgattaccaaaccaatcaccgatatgcgtaaccagacggtcgaaatgtccagaggtaactatacgcaacgtgtgaagatttatggtaatgatgaaattggcgaattagctttagcatttaataacttgtctaaacgtgtacaagaagcgcaggctaatactgaaagtgagaaacgtagactggactcagttatcacccatatgagtgatggtattattgcaacagaccgccgtggacgtattcgtatcgtcaatgatatggcactcaagatgcttggtatggcgaaagaagacatcatcggatattacatgttaagtgtattaagtcttgaagatgaatttaaactggaagaaattcaagagaataatgatagtttcttattagatttaaatgaagaagaaggtctaatcgcacgtgttaactttagtacgattgtgcaggaaacaggatttgtaactggttatatcgctgtgttacatgacgtaactgaacaacaacaagttgaacgtgagcgtcgtgaatttgttgccaatgtatcacatgagttacgtacacctttaacttctatgaatagttacattgaagcacttgaagaaggtgcatggaaagatgaggaacttgcgccacaatttttatctgttacccgtgaagaaacagaacgaatgattcgactggtcaatgacttgctacagttatctaaaatggataatgagtctgatcaaatcaacaaagaaattatcgactttaacatgttcattaataaaattattaatcgacatgaaatgtctgcgaaagatacaacatttattcgagatattccgaaaaagacgattttcacagaatttgatcctgataaaatgacgcaagtatttgataatgtcattacaaatgcgatgaaatattctagaggcgataaacgtgtcgagttccacgtgaaacaaaatccactttataatcgaatgacgattcgtattaaagataatggcattggtattcctatcaataaagtcgataagatattcgaccgattctatcgtgtagataaggcacgtacgcgtaaaatgggtggtactggattaggactagccatttcgaaagagattgtggaagcgcacaatggtcgtatttgggcaaacagtgtagaaggtcaaggtacatctatctttatcacacttccatgtgaagtcattgaagacggtgattgggatgaataa

SEQ ID NO: 405547 - DNA, 702 bp, Staphylococcus aureus
atggctagaaaagttgttgtagttgatgatgaaaaaccgattgctgatattttagaatttaacttaaaaaaagaaggatacgatgtgtactgtgcatacgatggtaatgatgcagtcgacttaatttatgaagaagaaccagacatcgtattactagatatcatgttacctggtcgtgatggtatggaagtatgtcgtgaagtgcgcaaaaaatacgaaatgccaataataatgcttactgctaaagattcagaaattgataaagtgcttggtttagaactaggtgcagatgactatgtaacgaaaccgtttagtacgcgtgaattaatcgcacgtgtgaaagcgaacttacgtcgtcattactcacaaccagcacaagacactggaaatgtaacgaatgaaatcacaattaaagatattgtgatttatccagacgcatattctattaaaaaacgtggcgaagatattgaattaacacatcgtgaatttgaattgttccattatttatcaaaacatatgggacaagtaatgacacgtgaacatttattacaaacagtatggggctatgattactttggcgatgtacgtacggtcgatgtaacgattcgtcgtttacgtgaaaagattgaagatgatccgtcacatcctgaatatattgtgacgcgtagaggcgttggatatttcctccaacaacatgagtag

SEQ ID NO: 405548 - DNA, 1284 bp, Staphylococcus aureus
atgtcatcaatcgtagtagttgggacacaatggggagacgaaggaaaaggaaaaataacggatttcttggcagaacagtcagatgttatcgcgcgtttttcaggtggtaataatgcaggccataccattcaatttggcggagaaacatataaattacatttagtaccatctggtatcttttacaaagacaaattagcggtaatcggtaacggagtcgttgttgatccagttgcactattgaaagaattagacggattaaatgaacgtggcattcctacaagtaatttacgtatatctaatcgtgcgcaagtgattttaccatatcacttagcacaagatgaatatgaagaacgtttacgtggtgacaataagattggtacaactaaaaaaggtatcggtccagcatatgtagacaaagttcaacgtatcggtattcgtatggcagatttacttgaaaaagaaacattcgaaagattattaaaatcaaacattgaatataaacaagcatatttcaaaggtatgtttaacgaaacatgtccatcatttgatgatatctttgaagaatattatgcagcaggtcaacgtctaaaagaatttgtaacagacacatcaaaaatcttagacgatgcatttgtagcagatgaaaaggtacttttcgaaggtgcgcaaggtgtaatgttagatatcgaccatggtacatatccattcgttacatcaagtaatccaattgcaggtaacgttactgttggtacaggtgtaggtcctacattcgtttcaaaggtaattggtgtatgtaaagcttatacatcacgtgttggtgatggtccattccctactgaattattcgatgaagatggacatcatattagagaggttggtcgtgaatacggtacaacaacaggacgtccacgtcgtgtaggttggtttgattcagttgtattacgtcactctcgtcgtgtaagtggtattacagatttatctattaactcaatcgatgttttaacaggcctagacacagtgaaaatctgtacagcttatgaattagacggtaaagaaattactgagtacccagcaaacttagatcaattaaaacgttgtaaaccaatctttgaagagttaccaggttggacagaagacgtaacaaatgtgcgtactttagaagaattacctgaaaatgcacgtaaatatttagagcgtatttcagaattatgtaatgtacaaatttctatcttctcagttggtccagatagagaacaaacaaacctattaaaagaattgtggtag

SEQ ID NO: 405549 - DNA, 1401 bp, Staphylococcus aureus
atggatagaatgtatgagcaaaatcaaatgccgcataacaatgaagctgaacagtctgtcttaggttcaattattatagatccagaattgattaatactactcaggaagttttgcttcctgagtcgttttataggggtgcccatcaacatattttccgtgcaatgatgcacttaaatgaagataataaagaaattgatgttgtaacattgatggatcaattatcgacggaaggtacgttgaatgaagcgggtggcccgcaatatcttgcagagttatctacaaatgtaccaacgacgcgaaatgttcagtattatactgatatcgtttctaagcatgcattaaaacgtagattgattcaaactgcagatagtattgccaatgatggatataatgatgaacttgaactagatgcgattttaagtgatgcagaacgtcgaattttagagctatcatcttctcgtgaaagcgatggctttaaagacattcgagacgtcttaggacaagtgtatgaaacagctgaagagcttgatcaaaatagtggtcaaacaccaggtatacctacaggatatcgagatttagaccaaatgacagcagggttcaaccgaaatgatttaattatccttgcagcgcgtccatctgtaggtaagactgcgttcgcacttaatattgcacaaaaagttgcaacgcatgaagatatgtatacagttggtattttctcgctagagatgggtgctgatcagttagccacacgtatgatttgtagttctggaaatgttgactcaaaccgcttaagaacgggtactatgactgaggaagattggagtcgttttactatagcggtaggtaaattatcacgtacgaagatttttattgatgatacaccgggtattcgaattaatgatttacgttctaaatgtcgtcgattaaagcaagaacatggcttagacatgattgtgattgactacttacagttgattcaaggtagtggttcacgtgcgtccgataacagacaacaggaagtttctgaaatctctcgtacattaaaagcattagcccgtgaattagaatgtccagttatcgcattaagtcagttatctcgtggtgttgaacaacgacaagataaacgtccaatgatgagtgatattcgtgaatctggttcgattgagcaagatgccgatatcgttgcattcttataccgtgatgattactataaccgtggcggcgatgaagatgatgacgatgatggtggtttcgagccacaaacgaatgatgaaaacggtgaaattgaaattatcattgctaagcaacgtaacggtccaacaggcacagttaagttacattttatgaaacaatataataaatttaccgatatcgattatgcacatgcagatatgatgtaa

SEQ ID NO: 405550 - DNA, 447 bp, Staphylococcus aureus
atgaaagtaatttttacacaagatgttaaaggtaaaggtaaaaaaggtgaagttaaagaagtaccagtaggttatgcaaataacttcttattgaaaaagaattatgctgtagaagcaacaccaggtaaccttaaacaattagagttacagaaaaaacgtgcaaaacaagaacgccaacaagaaattgaagatgctaaagcattaaaagaaacgttatcaaacattgaagttgaagtatcagcaaaaactggtgaaggtggtaaattgtttgggtcagtaagtacaaaacaaattgccgaagcactaaaagcacaacatgatattaaaattgataaacgtaaaatggatttaccaaatggaattcattccctaggatatacgaatgtacctgttaaattagataaagaagttgaaggtacaattcgcgtacacacagttgaacaataa

SEQ ID NO: 405551 - DNA, 1968 bp, Staphylococcus aureus
atgaatcggcagtccactaagaaagctttactaataccatttgtcatcatgatcatcacagcaattgttttaatgggtgtatggtttatctttaatagtcttatagcactaattgcatctatcgttcttgtcgtgatgattattgttagcatcattttattcagacaagctttaatgaaaatggatagttatgtagatggtttgagtgctcaaatttcaacaacaaataataaagcaatcaaacatttaccaattggtatcattgttttagatgaaaatgatcacatcgaatgggttaaccaatttatgacagatcatatggaagcgaatgtcatttctgaatctgtaaatgaagtatttccaaacattttaaagcaattagatagagtgaaatccgttgaaatagaatataatcagtatcatttccaagtacgttattctgagaatgatcactgcctctatttctttgatataactgaacaagtacaaacaaatgaactatatgaaaattctaaaccaatcattgcgacattatttttagataactacgatgagattacgcaaaatatgaatgatacgcagcgttcggaaatcaactcaatggtaacgcgtgtcattagtcgatgggcaactgagtataatatatttttcaaaagatacagttccgatcaattcgtagcctatttaaatcaaaaaatattagctgacttagaagaatctaaatttgatatcttgagtcaattacgtgaaaaaagtgttggttatcgtgcccaattaacattaagtatcggtgttggtgaaggtactgaaaatttaatcgacttaggtgaattatcacaatcaggcctagacttagcattaggacgcggtggcgaccaagttgcaattaaaagtattaatggtaatgtgcgtttctatggcggtaagactgacccgatggagaaacgtactcgtgtaagagcacgtgtgatctcacatgcgttaaaagatatccttgcagagggtgacaaagtcattatcatgggacataaacgtcctgacttagatgcaattggtgcagcaatcggtgtgtctagatttgcaatgatgaataatttagaagcatacatcgtattaaatgagactgacattgatccaacattacgacgcgtgatgaacgaaatagataaaaagccagagttaagagagcgatttattacatcagatgatgcttgggatatgatgacatctaagacaaccgtagtgattgttgatacgcataaaccggaactggttttagatgaaaatgtcttaaataaagcaaaccgtaaagttgttatcgatcatcatagacgtggtgaaagcttcatctctaatccattgttgatatatatggaaccatacgcaagttcgacagctgaattggtaacagagttactggaatatcaaccaacagaacaacgtttaacacgtcttgaatcaacagtgatgtatgcaggtattattgtagatacaagaaactttacattacgaacaggatcaagaacattcgatgcagcgagttatttacgtgcacatggtgcagatacgattttaacgcaacatttcttaaaagatgatgtggatacttacattaatcgatctgaattaattcgaactgtaaaagttgaagataatggcatagccattgcgcatggttcagacgataaaatttatcatccagtaacagttgcacaagcagcagatgaactgttaagtttagaaggtattgaagcatcatatgttgttgcgagacgtgaagataatctgattggtatatctgcgcgttcactcggttcagtaaatgtccagttaacaatggaagcacttggtggcggtggacatttaaccaatgcggcaacacaacttaaaggtgtgacagtcgaagaggcgatagcacaattacaacaagcaattacagaacaattaagtaggagtgaagatgcatga

SEQ ID NO: 405552 - DNA, 924 bp, Staphylococcus aureus
gtgttttcaaaaatacaacctaaagcaacaataattgcaacgattgcgttggtatttgtcgctttagctttatatctagtgcctggtttaggactaatatttgcattatttgcaaccataccaggtatcgttttatggaataaatcaatacaatctttcgggattagtgcacttattacagtaattataacaactgttttaggtaatactttcgttttaagtgccatcatattagtcttaattgcaagtttaattattggtcaattgctcaaagaaagaacgtctaaagaaagaatattatacgtaacaacagtagcgatgagcttaatttcattaatcgcttttatgttactacaaacattcggaaggattccaccatcagcgagcatagtaaaacctttcaagcaaacattacatgaagcgattacgatgagcggtgccgatgcgaatatgacccaaatattagaagaagggtttagacaagcgaccgttcaattaccaggtttcatcattatcattacatttttaatcgtcttaattaacttaatcgttacatttccgattttacgaaaatttaaaatcgctacacctgtatttaagccacttttcgcgtggcaaatgagcggtattttattatggatatacattattgttatcatatgtttattatttacaggtcaaccgagtgtgttccagagcattcttttaaacttccaacttgtgttatcattagtaatgtatattcaaggtttaagtgttattcatttctttggtaaagcgaaaggtttgccgaatgcagtaacgattttactattggttatcggtacaatactgacacctacgacacatattgtaggactacttggtgttatcgatttaagtttgaatttgaagcgaatcatgaaaaataattctaaaaagtga

SEQ ID NO: 405553 - DNA, 969 bp, Staphylococcus aureus
atgacaaattacacagtagatactttaaatttaggggaatttattacagaatctggggaagtcatagataacttgcgtttgagatatgagcatgtcggttatcatggacaaccattagttgtagtttgtcatgcattaactggcaatcatttaacatatggaacagatgattatccgggttggtggcgagaaattattgatgggggatatatacccattcacgattatcaatttttaacatttgatgttattggtagtcctttcggttcaagttcacctttaaacgaccctcattttcctaaaaaattaacattaagagatatagtcagagcgaatgaacgaggtatacaagcccttggttatgataagattaatattttaatagggggaagtcttggaggtatgcaagcaatggaactactctacaatcaacagtttgaagtagataaagccattatccttgctgcaacaagtcgaacatcatcttatagtagagctttcaatgaaattgcaaggcaagccattcatcttggtggtaaggaaggtctaagtattgcacgccaattaggttttttgacatatcgatcatcaaaaagttatgatgaacgtttcacgccggatgaagtagtcgcataccaacaacatcaaggtaataaatttaaagaacattttgatttgaattgttatctgacactgctagatgtattggatagtcacaacattgaccgaggtcgcacagacgtaacgcatgtttttaaaaatttagaaacaaaagtgttaacgatggggttcatagatgatttgctatatccggatgatcaagttcgtgcattaggtgaacgttttaaatatcatcgtcatttcttcgtgcctgataatgttgggcatgatggattcctactaaactttagtacctgggcacctaacttatatcatttcttaaatttaaagcattttaagcgtaagtaa

SEQ ID NO: 405554 - DNA, 330 bp, Staphylococcus aureus
atgataactcatatgaacatgttaatacttattttattgtgtggtatcgtaacgctattaattcgaattataccttttatcatgatttcaaaagtgcaattgcctgatgtcgtggttcgatggctatcatttatcccaatcacactatttacggcacttgtcattgacagcattattcaacagacgcctcatggtgaggggtatacattaaacatcccttacattatcgcgctcattccgacggttattttatctataatcacgcgtagtttaactattacaattattagtgggattgttatcatggcagcattacgatttttcttttaa

SEQ ID NO: 405555 - DNA, 696 bp, Staphylococcus aureus
atgacaacacatttaagttttagacaaggcgtgcaagagtgtatcccaacattattgggttatgccggtgttggtatttcatttggtattgtggcttcgtctcaaaactttagtattttagaaattgtcttgttatgtcttgttatatatgccggtgctgcgcaatttattatgtgcgcgttgtttatagcaggtacacctatatcagcgattgtactaactgtatttatcgtaaattcaagaatgttccttttaagtatgtcgcttgcaccaaacttcaagacatatgggttttggaaccgtgttggattaggttcattagtaactgacgaaacgtttggcgtcgccattacaccttatttaaaaggagaagctatcaatgatcgttggatgcatggtcttaacatcacagcatatttattttgggcaatttcatgtgtagctggggctttatttggcgaatatatctcaaatccgcaaacgctagggttagattttgctatcacggctatgtttatctttttggccattgcgcaatttgaatcaattactaaatcgcgattaagaatttacatagtactcattattgccgtcatagtaatgatgttatcgctaagtatgtttatgccttcatatctagcaatattaattgcagccacaatttcagcagcgttaggagtgatgatggaacaatga

SEQ ID NO: 405556 - DNA, 1287 bp, Staphylococcus aureus
atgttagacattagattattcagaaatgagcctgacacagttaagagcaaaattgaattacgtggagatgatccaaaagttgtagatgaaattttagaattggatgagcaacgacgtaaattaattagtgcaacagaagaaatgaaagcacgtcgtaataaagtaagcgaagaaatcgcattaaaaaaacgtaataaagaaaatgctgatgatgtgattgctgaaatgcgcacattaggtgacgatattaaagaaaaagatagtcaattaaatgaaattgataataaaatgacaggtatcctttgtcgtattccaaatttaataagtgatgatgtacctcaaggtgaatctgatgaagataacgttgaagttaaaaagtggggtacaccacgtgagttttcatttgaacccaaagcacattgggatattgtagaagaattgaaaatggctgattttgatcgtgcagcaaaagtttcaggtgcgcgttttgtatatttaacaaatgaaggtgcgcaattagagcgtgctttaatgaactatatgattacaaaacatacaacacaacatggttatacagaaatgatggtaccacagcttgtgaacgcagatacaatgtatggtacaggtcaattacctaaatttgaagaagatttatttaaagtagaaaaagaaggattatatacaattccaactgctgaagtaccattaacgaatttctaccgtaatgaaattattcaaccaggtgtacttcctgaaaaattcactggtcaatctgcatgtttccgtagtgaagcaggatcagcaggtagagatacaagaggattaattcgtttacatcaattcgataaagtggaaatggtacgttttgaacaacctgaagattcatggaatgctttagaagaaatgacaacaaacgcagaagcaattctagaagagttaggtttaccataccgtcgtgttattttatgtacaggtgatattggatttagtgcaagcaaaacatatgatttagaagtttggttaccaagctacaatgattataaagaaattagttcatgctcaaactgtacggatttccaagcgcgtcgtgctaacatccgcttcaagcgtgacaaagcagctaaaccagaattagcacatacattaaatggtagtggtttagcagttggacgtacatttgctgctattgttgaaaattaccaaaatgaagatggaacagtaacaattccagaagcattagtaccatttatgggtggtaaaacacaaatttcaaaaccagttaaataa

SEQ ID NO: 405557 - DNA, 1515 bp, Staphylococcus aureus
atgactttatatttagatggtgaaacactaacaattgaggatattaaatcatttttacaacaacaatcaaagattgaaattattgatgatgcgttagaacgtgtcaaaaaaagtagagcggtagttgaacgtattattgaaaatgaggaaacggtttacggtattactacaggttttgggttatttagtgatgtacgtatagacccgacgcaatataatgaattacaagtgaatctgatacgctcacatgcctgtggactaggtgagccattttcaaaagaagtagcattagtcatgatgattttacgattgaatacattattaaaaggtcattcaggtgccactttagaattagtgagacaattacaattttttataaatgaacgtattataccgataatcccacagcaaggctctctcggtgcatcaggagatttagcgccattatcacatttagcattagcattaattggtgaagggaaagtattgtacagaggggaagaaaaggatagtgacgatgtattaagagaattaaatagacaacctttgaaccttcaggctaaagaaggtttagcattgattaatggtacgcaagctatgacagctcaaggtgtcattagttatatagaagcagaagatttaggttaccaatctgaatggattgctgcattaacgcatcagtctcttaatggcattatagatgcatatcgacatgatgtgcacgcagttcgtaattttcaagaacagattaatgtggcagcgcgtatgcgtgattggttagaaggatcaacattaacgacgcgacaatcagaaatacgtgtacaagatgcatatacgttgcgttgtataccacaaatccatggcgcgagttttcaagtattcaattatgttaaacagcaattagaatttgaaatgaatgcggctaatgataatccacttatatttgaggaagcaaatgaaacgtttgttatttcaggtggtaacttccatggacaacctattgcttttgcattagatcatcttaaattaggtgtaagtgaattagcaaacgtatcggaacgtcgtctagagcgactagtaaatcctcaattaaatggtgatttaccagcatttcttagtccagagccaggattgcaaagtggcgcgatgattatgcaatatgctgctgcaagtctcgtttctgaaaataaaactttagcgcatccagcgagtgttgattctatcacttcatctgcgaaccaagaagatcacgtatctatgggaactacagctgctagacatggttatcaaattattgaaaatgcaagacgtgtgctggcaatcgaatgtgttattgcattacaagcagcagagttaaaaggtgttgaaggattatcaccaaaaacacgtcgcaagtatgatgagtttcgaagtatcgtgccatccattacacatgatcgtcaatttcataaagatattgaagcggttgcacagtatttaaagcaatcaatttatcaaacgactgcatgtcactaa

SEQ ID NO: 405558 - DNA, 813 bp, Staphylococcus aureus
atggaaacgttaaattctattaacattcctaagcgtaaagaagattcacataaaggtgattatggcaaaattttattaattggtggatctgctaacttaggtggtgccattatgttagcggctcgtgcatgtgtatttagcggtagtggtttaatcactgtagctacacatccaacaaatcattcagcattacattctcgttgcccagaagcgatggttattgatattaatgatacgaaaatgttgacgaaaatgattgaaatgactgacagtatactaattggtccaggtcttggcgttgatttcaaaggaaataatgccattacattcctactacaaaatatacaaccgcatcaaaatttaatcgtagacggcgatgcgattacaatctttagtaaactgaaaccgcaattacctacatgtcgtgtgatctttacaccacacctcaaagaatgggaacgattaagtggtattcctattgaggaacagacatatgagcgtaatcgtgaagcagttgatcgtttaggtgcaactgttgtacttaaaaaacatggtactgaaattttctttaaagatgaagactttaaattgacaatcggtagcccagcaatggcgactggtggtatgggcgatacacttgctggtatgattacaagctttgtcggtcaatttgataacttaaaagaagcggttatgagtgccacatatacacatagttttattggcgaaaaccttgcaaaagatatgtatgtggtgccaccatcaagacttatcaatgaaataccttacgcaatgaaacaattagaaagttag

SEQ ID NO: 405559 - DNA, 2664 bp, Staphylococcus aureus
atggctgaattacctcaatcaagaataaatgaacgaaatattaccagtgaaatgcgtgaatcatttttagattatgcgatgagtgttatcgttgctcgtgcattgccagatgttcgtgacggtttaaaaccagtacatcgtcgtatactatatggattaaatgaacaaggtatgacaccggataaatcatataaaaaatcagcacgtatcgttggtgacgtaatgggtaaatatcaccctcatggtgacgtatctatttatgaagcaatggtacgtatggctcaagatttcagttatcgttatccgcttgttgatggccaaggtaactttggttcaatggatggagatggcgcagcagcaatgcgttatactgaagcgcgtatgactaaaatcacacttgaactgttacgtgatattaataaagatacaatagattttatcgataactatgatggtaatgaaagagagccgtcagtcttacctgctcgattccctaacttattagccaatggtgcatcaggtatcgcggtaggtatggcaacgaatattccaccacataacttaacagaattaatcaatggtgtacttagcttaagtaagaaccctgatatttcaattgctgagttaatggaggatattgaaggtcctgatttcccaactgctggacttattttaggtaagagtggtattagacgtgcatatgaaacaggtcgtggttcaattcaaatgcgttctcgtgcagttattgaagaacgtggaggcggacgtcaacgtattgttgtcactgaaattcctttccaagtgaataaggctcgtatgattgaaaaaattgcagagctcgttcgtgacaagaaaattgacggtatcactgatttacgtgatgaaacaagtttacgtactggtgtgcgtgtcgttattgatgtgcgtaaggatgcaaatgctagtgtcattttaaataacttatacaaacaaacacctcttcaaacatcatttggtgtgaatatgattgcacttgtaaatggtagaccgaagcttattaatttaaaagaagcgttggtacattatttagagcatcaaaagacagttgttagaagacgtacgcaatacaacttacgtaaagctaaagatcgtgcccacattttagaaggattacgtatcgcacttgaccatatcgatgaaattatttcaacgattcgtgagtcagatacagataaagttgcaatggaaagcttgcaacaacgcttcaaactttctgaaaaacaagctcaagctattttagacatgcgtttaagacgtctaacaggtttagagagagacaaaattgaagctgaatataatgagttattaaattatattagtgaattagaagcaatcttagctgatgaagaagtgttattacagttagttagagatgaattgactgaaattagagatcgtttcggtgatgatcgtcgtacagaaattcaattaggtggatttgaaaacttagaggacgaagacttaattccagaagaacaaatagtaattacactaagccataataactacattaaacgtttgccggtatctacatatcgtgctcaaaaccgtggtggtcgtggtgttcaaggtatgaatacattggaagaagattttgtcagtcaattggtaactttaagtacacatgaccatgtattgttctttactaacaaaggtcgtgtatacaaacttaaaggttacgaagtgcctgagttatcaagacagtctaaaggtattcctgtagtgaatgctattgaacttgaaaatgatgaagtcattagtacaatgattgctgttaaagaccttgaaagtgaagacaacttcttagtgtttgcaactaaacgtggtgtcgttaaacgttcagcattaagtaacttctcaagaataaatagaaatggtaagattgcgatttcgttcagagaagatgatgagttaattgcagttcgcttaacaagtggtcaagaagatatcttgattggtacatcacatgcatcattaattcgattccctgaatcaacattacgtcctttaggccgtacagcaacgggtgtgaaaggtattacacttcgtgaaggtgacgaagttgtagggcttgatgtagctcatgcaaacagtgttgatgaagtattagtagttactgaaaatggttatggtaaacgtacgccagttaatgactatcgcttatcaaatcgtggtggtaaaggtattaaaacagctacgattactgagcgtaatggtaatgttgtatgtatcactacagtaactggtgaagaagatttaatgattgttactaatgcaggtgtcattattcgactagatgttgcagatatttctcaaaatggtcgtgcagcacaaggtgttcgcttaattcgcttaggtgatgatcaatttgtttcaacggttgctaaagtaaaagaagatgcagaagatgaaacgaatgaagatgagcaatctacttcaactgtatctgaagatggtactgaacaacaacgtgaagcggttgtaaatgatgaaacaccaggaaatgcaattcatactgaagtgattgattcagaagaaaatgatgaagatggacgtattgaagtaagacaagatttcatggatcgtgttgaagaagatatacaacaatcatcagatgaagaataa

SEQ ID NO: 405560 - DNA, 1935 bp, Staphylococcus aureus
atggtgactgcattgtcagatgtaaacaacacggataattatggtgctgggcaaatacaagtattagaaggtttagaagcagtacgtaaaagaccaggtatgtatataggatcgacttcagagagaggtttgcaccatttagtgtgggaaattgtcgataatagtatcgatgaagcattagctggttatgcaaatcaaattgaagttgttattgaaaaagataactggattaaagtaacggataacggacgtggtatcccagttgatattcaagaaaaaatgggacgtccagctgtcgaagttattttaactgttttacatgctggtggtaaatttggcggtggcggatacaaagtatctggtggtttacatggtgttggttcatcagttgtaaacgcattgtcacaagacttagaagtatatgtacacagaaatgagactatatatcatcaagcatataaaaaaggtgtacctcaatttgacttaaaagaagttggcacaactgataagacaggtactgtcattcgttttaaagcagatggagaaatcttcacagagacaactgtatacaactatgaaacattacagcagcgtattagagagcttgctttcttaaacaaaggaattcaaatcacattaagagatgaacgtgatgaagaaaacgttagagaagactcctatcactatgagggcggtattaaatcgtacgttgagttattgaacgaaaataaagaacctattcatgatgagccaatttatattcatcaatctaaagatgatattgaagtagaaattgcgattcaatataactcaggatatgccacaaatcttttaacttacgcaaataacattcatacgtatgaaggtggtacgcatgaagacggattcaaacgtgcattaacgcgtgtcttaaatagttatggtttaagtagcaagattatgaaagaagaaaaagatagactttctggtgaagatacacgtgaaggtatgacagcaattatatctatcaaacatggtgatcctcaattcgaaggtcaaacgaagacaaaattaggtaattctgaagtgcgtcaagttgtagataaattattctcagagcactttgaacgatttttatatgaaaatccacaagtcgcacgtacagtggttgaaaaaggtattatggcggcacgtgcacgtgttgctgcgaaaaaagcgcgtgaagtaacacgtcgtaaatcagcgttagatgtagcaagccttccaggtaaattagccgattgctctagtaaaagtcctgaagaatgtgagattttcttagtcgaaggggactctgccggggggtctacaaaatctggtcgtgactctagaacgcaggcgattttaccattacgaggtaagatattaaatgttgaaaaagcacgattagatagaattttgaataacaatgaaattcgtcaaatgatcacagcatttggtacaggaatcggtggcgactttgatctagcgaaagcaagatatcacaaaatcgtcattatgactgatgccgatgtggatggagcgcatattagaacattgttattaacattcttctatcgatttatgagaccgttaattgaagcaggctatgtgtatattgcacagccaccgttgtataaactgacacaaggtaaacaaaagtattatgtatacaatgatagggaacttgataaacttaaatctgaattgaatccaacaccaaaatggtctattgcacgatacaaaggtcttggagaaatgaatgcagatcaattatgggaaacaacaatgaaccctgagcaccgcgctcttttacaagtaaaacttgaagatgcgattgaagcggaccaaacatttgaaatgttaatgggtgacgttgtagaaaaccgtagacaatttatagaagataatgcagtttatgcaaacttagacttctaa

SEQ ID NO: 405561 - DNA, 1113 bp, Staphylococcus aureus
atgaagttaaatacactccaattagaaaattatcgtaactatgatgaggttacgttgaaatgtcatcctgacgtgaatatcctcattggagaaaatgcacaaggaaagacaaatttacttgaatcaatttataccttagctttagcaaaaagtcatagaacgagtaatgataaggaactcatacgttttaatgctgattatgctaaaatagaaggtgagcttagttatagacacggcacgatgccattaacaatgtttataactaaaaaaggtaaacaagtcaaagtgaatcacttagagcaaagtcgtctaactcaatatattggacacctcaatgtggttctatttgcgccagaagatttgaatattgtaaaaggctctcctcaaataagacgacgctttatagatatggagttgggccaaatttctgctgtttacttaaatgatttagctcaataccaacgtattttaaagcaaaagaataattacttaaagcagttacaattaggccaaaaaaaggacttaacaatgttggaagtattaaatcagcagtttgctgaatatgcaatgaaagtaactgataaacgtgcacattttattcaagagctagagtcgttagctaaaccgattcatgctggtatcacaaatgataaagaagcgttgtcgctgaattatttacctagtcttaaatttgattatgctcaaaatgaagcggcacgacttgaagaaattatgtctattcttagcgataatatgcaaagagaaaaagaacgaggcattagcttattcggaccacatcgagatgatataagttttgatgtgaatggcatggatgctcaaacatatggttctcaaggacagcaacgtacaacggctttgtccattaaattagctgaaattgagttaatgaatatcgaagttggggaatatcccatcttattattagacgatgtactcagtgaattagatgattcgcgtcaaacgcatttattaagtacgattcagcataaagtacaaacatttgtcactacgacatctgtagatggtattgatcatgaaatcatgaataacgctaaattgtatcgtattaatcaaggtgaaattataaagtaa

SEQ ID NO: 405562 - DNA, 237 bp, Staphylococcus aureus
ttggttcaagaagttgtagtagaaggagacattaatttaggtcaatttctaaaaacagaagggattattgaatctggtggtcaagcaaaatggttcttgcaagacgttgaagtattaattaatggagtgcgtgaaacacgtcgcggtaaaaagttagaacatcaagatcgtatagatatcccagaattacctgaagatgctggttctttcttaatcattcatcaaggtgaacaatga

SEQ ID NO: 405563 - DNA, 1134 bp, Staphylococcus aureus
atgatggaattcactattaaaagagattattttattacacaattaaatgacacattaaaagctatttcaccaagaacaacattacctatattaactggtatcaaaatcgatgcgaaagaacatgaagttatattaactggttcagactctgaaatttcaatagaaatcactattcctaaaactgtagatggcgaagatattgtcaatatttcagaaacaggctcagtagtacttcctggacgattctttgttgatattataaaaaaattacctggtaaagatgttaaattatctacaaatgaacaattccagacattaattacatcaggtcattctgaatttaatttaagtggcttagatccagatcaatatcctttattacctcaagtttctagagatgacgcaattcaattgtcggtaaaagtgcttaaaaacgtgattgcacaaacaaattttgcagtgtccacctcagaaacacgcccagtactaactggtgtgaactggcttatacaagaaaatgaattaatatgcacagcgactgactcacaccgcttggctgtaagaaagttgcagttagaagatgtttctgaaaacaaaaatgtcatcattccaggtaaggctttagctgaattaaataaaattatgtctgacaatgaagaagacattgatatcttctttgcttcaaaccaagttttatttaaagttggaaatgtgaactttatttctcgattattagaaggacattatcctgatacaacacgtttattccctgaaaactatgaaattaaattaagtatagacaatggggagttttatcatgcgattgatcgtgcctctttattagcgcgtgaaggtggtaataacgttattaaattaagtacaggtgatgacgttgttgaattgtcttctacatcaccagaaattggtactgtaaaagaagaagttgatgcaaacgatgttgaaggtggtagcctgaaaatttcattcaactctaaatatatgatggatgctttaaaagcaatcgataatgatgaggttgaagttgaattcttcggtacaatgaaaccatttattctaaaaccaaaaggtgacgactcggtaacgcaattaattttaccaatcagaacttactaa

SEQ ID NO: 405564 - DNA, 1362 bp, Staphylococcus aureus
atgtcggaaaaagaaatttgggaaaaagtgcttgaaattgctcaagaaaaattatcagctgtaagttactcaactttcctaaaagatactgagctttacacgattaaagatggtgaagctatcgtattatcgagtattccttttaatgcaaattggttaaatcaacaatatgctgaaattatccaagcaatcttatttgatgttgtaggctatgaagttaaacctcactttattactactgaagaattagcaaattatagtaataatgaaactgctactccaaaagaaacaacaaaaccttctactgaaacaactgaggataatcatgtgcttggtagagagcaattcaatgcccataacacatttgacacttttgtaatcggacccggtaaccgctttccacatgcagcgagtttagctgtggccgaagcaccagccaaagcgtacaatccattatttatctatggaggtgttggtttaggaaaaacccatttaatgcatgccattggtcatcatgttttagataataatccagatgccaaagtgatttacacatcaagtgaaaaattcacaaatgaatttattaaatcaattcgtgataacgaaggtgaagctttcagagaaagatatcgtaatatcgacgtcttattaatcgatgatattcagttcatacaaaacaaggtacaaacacaagaagaatttttctatacttttaatgaattgcatcagaataacaagcaaatagttatttcgagtgatcgaccaccaaaggaaattgcacaattagaagaccgattacgttcacgctttgaatgggggctaattgttgatattacgccaccagattatgaaactcgaatggcaattttgcagaagaaaattgaagaagaaaaattagatattccaccagaagctttaaattatatagcaaatcaaattcaatctaatattcgtgaattagaaggtgcattaacacgtttacttgcatattcacaattattaggaaaaccaattacaactgaattaactgctgaagctttaaaagatatcattcaagcaccaaaatctaaaaagattaccatccaagatattcaaaaaattgtaggccagtactataatgttagaattgaagatttcagtgcaaaaaaacgtacaaagtcaattgcatatccgcgtcaaatagctatgtacttgtctagagagcttacagatttctcattacctaaaattggtgaagaatttggtgggcgtgatcatacgaccgtcattcatgctcatgaaaaaatatctaaagatttaaaagaagatcctatttttaaacaagaagtagagaatcttgaaaaagaaataagaaatgtataa

SEQ ID NO: 405565 - DNA, 138 bp, Staphylococcus aureus
atggtaaaacgtacttatcaaccaaataaacgtaaacatagtaaagttcatggtttcagaaaacgcatgagcacaaaaaatggccgtaaagttttagcgcgccgtcgtcgtaaaggccgtaaagttttatctgcataa

SEQ ID NO: 405566 - DNA, 348 bp, Staphylococcus aureus
ttggaaaaagcttaccgaattaaaaagaatgcagattttcagagaatatataaaaaaggtcattctgtagccaacagacaatttgttgtatacacttgtaataataaagaaatagaccattttcgcttaggtattagtgtttctaaaaaactaggtaatgcagtgttaagaaacaagattaaaagagcaatacgtgaaaatttcaaagtacataagtcgcatatattggccaaagatattattgtaatagcaagacagccagctaaagatatgacgactttacaaatacagaatagtcttgagcacgtacttaaaattgccaaagtttttaataaaaagattaagtaa

SEQ ID NO: 405567 - DNA, 1380 bp, Staphylococcus aureus
atggatttagatacaattacgagtatttcaacaccaatgggtgaaggggcaattggaattgttcgattgtctggaccgcaagccgttgaaattgctgacaaattatataaaggaaaacatcttttaaatgatgttccatcacatacgattaattacggtcatattattgatccagagtctaaagaagtgattgaagaagttatggtgtctgtgttaagagcgccaaaaacatttacacgcgaagatattatagaaattaattgtcatggtggtattttaacgattaatagagtgctggaacttactatgacatatggcgctagaatggctgagccaggtgaatttacaaaacgtgcctttttaaatggtcgtattgatttatctcaagctgaagcagttatggactttattcgctcgaagacagatagagcttctaaagttgcgatgaatcaaattgaaggtcgtctaagtgacttaatcaaaaaacaacgtcaatctatattagagatactcgctcaagtggaagtgaatattgattatcctgaatacgatgatgttgaagatgcgactactgaatttcttttagagcagtctaaagaaatcaaacaggaaattaatcgtttattagataccggtgcgcagggtaaaattatgcgtgaaggtttatctacagttattgttggtaaaccaaacgtaggtaaatcatcgatgttaaataatttaatacaagataataaagcgattgtaactgaggtagcaggtactactagagatgtcttagaagagtacgtcaatgttcgtggcgtgccattaagattagttgatactgctggtatacgtgagacagaagatatagtagagaagattggtgttgaacgctctagaaaggctcttagccaagcagacttaattttatttgtattaaacaataacgaagcattgactcaagaagattacacattatatgaagtggttaaaaatgaagatgtaatcgtaattgttaataaaatggatttagagcaaaacatagatattaatgaagttaaagatatgataggtgatacgccattaattcaaacttcaatgttaaaacaagaaggtattgatgaattagaaatacaaattcgagatttgttctttggtggagaagtacaaaatcaagatatgacttatgtttctaattcaagacatatttcattattaaaacaagcaagacaaacgatacaagatgcgattgatgcagcagaatctggtgtgcctatggatatggtacaaattgatttaactagaacttgggaaatattaggagaaattattggtgagactgcaagtgatgaactcatcgatcagttattcagtcaattctgcttaggtaaatag

SEQ ID NO: 405568 - DNA, 1878 bp, Staphylococcus aureus
gtggttcaagaatatgatgtaatcgttataggtgcgggacatgcaggtgtagaagcaggtttagcatctgcaagacgtggtgctaaaacattaatgctaacaataaatttagataatattgcatttatgccatgtaacccatctgtaggtggaccagctaaaggtatcgttgttcgtgaaattgatgctttaggtggacaaatggcaaaaacaatcgataaaacacacattcaaatgagaatgttaaatacaggtaaaggacctgctgtaagagcactaagagcgcaagcagataaagtactttatcaacaagaaatgaaacgcgtgattgaagatgaagaaaatttgcatataatgcaaggtatggtagacgaacttattatagaagataatgaagttaaaggtgtacgtacaaatattggtacagagtatttatctaaagcagtaattattacaacgggaacatttttacgtggtgaaatcattttaggtaatatgaagtattcaagtggaccaaatcaccaattaccatcaatcacattatcagacaatttaagagaacttggttttgatattgttcgttttaaaacaggtacaccaccgcgtgtaaattcaaaaacaattgactattcgaagactgaaatacaaccaggtgacgatgtaggtcgtgcattcagctttgaaacaacagaatatatattagatcaattgccatgttggctaacgtatactaatgctgaaacacacaaagttatcgatgataatttacatctatctgcaatgtattcagggatgattaaaggaaccgggccacgttattgcccttcaattgaagataaatttgttcgatttaatgataagccgcgacatcaacttttcttagagcctgaaggtcgtaatacaaatgaagtatatgtgcaaggattgtctacaagtcttcctgaacatgtgcaacgtcaaatgttagagacgataccaggtcttgaaaaagcagatatgatgcgtgccggctacgcaattgaatatgatgcgattgtgccaacgcagttatggcctacacttgaaacgaaaatgattaaaaacttatatactgcaggtcaaattaatggtacatctggttatgaagaagcagcaggacaaggattgatggcaggtattaacgctgcaggtaaagtgttaaacacaggcgaaaagatattaagtcgttcagatgcatatattggtgtcttaatcgatgatcttgtaactaaaggtactaatgaaccttatcgtttactaacatcacgtgcagaatatcgtttgttactacgtcatgataatgctgatttgagattgacggatatgggatatgaacttggtatgatttctgaagaaagatatgcacgttttaatgaaaaacgtcagcaaattgatgcggaaattaagcgtttatcagatattcgtattaaaccaaacgaacatacgcaagcgattattgaacaacatggtggttctcgcttaaaagatggtattttagctatcgatttattacgcagacctgaaatgacttacgatataattttagaacttttagaagaagaacatcaattgaatgcagatgttgaagaacaagtagaaatacaaacaaaatatgaaggttatatcaataaatcactacaacaagttgagaaagttaagcgtatggaagagaagaaaattccagaagacttagattatagtaagattgatagtttggcgactgaagcgcgagaaaaattatcagaagtaaaacctttaaatattgcacaagcttctagaatatcaggggtaaatccagcagacatatctatattattgatttacttagaacaaggtaaactccaaagggtgagtgactaa

SEQ ID NO: 405569 - DNA, 720 bp, Staphylococcus aureus
atgactgtagaatggttagcagaacaattaaaagaacataatattcaattaactgagactcaaaaacaacagtttcaaacatattatcgtttacttgttgaatggaatgaaaagatgaatttgacaagtattacagatgaacacgatgtatatttgaaacatttttatgattccattgcacctagtttttattttgattttaatcagcctataagtatatgtgatgtaggcgctggagctggttttccaagtattccgttaaaaataatgtttccgcagttaaaagtgacgattgttgattcattaaataagcgtattcaatttttaaaccatttagcgtcagaattacaattacaggatgtcagctttatacacgatagagcagaaacatttggtaagggtgtctacagggagtcttatgatgttgttactgcaagagcagtagctagattatccgtgttaagtgaattgtgtttaccgctagttaaaaaaggtggacagtttgttgcattaaaatcttcaaaaggtgaagaagaattagaagaagcaaaatttgcaattagtgtgttaggtggtaatgttacagaaacacatacctttgaattgccagaagatgctggagagcgccagatgttcattattgataaaaaaagacagacgccgaaaaagtatccaagaaaaccagggacgcctaataagactcctttacttgaaaaataa

SEQ ID NO: 405570 - DNA, 840 bp, Staphylococcus aureus
atgaaaaaacctttttcaaaattatttggtttgaaaaacaaagatgacatcattggacatattgaagaagatcgcaatagtaatgttgaatccattcaaattgaacgtatcgttcccaaccgttatcaaccaagacaggtgtttgaaccaaataaaattaaagaacttgctgaatcaatacatgaacatggtttactacaacctattgttgtaagaccgattgaagaagatatgtttgaaattattgctggagagcgccgatttagagcaatacaatcactaaatttacctcaagcagacgttattattcgtgatatggatgatgaagagacggctgttgttgcattaattgagaatattcaaagagaaaatttgtctgttgttgaagaagcggaagcctataagaaattattggaaattggtgatacaacgcaaagtgaattggcaaaaagtttaggtaaaagtcaaagctttattgcaaataagttgcgtttattgaagttggcgccgaaagtactacttcgcttaagagaaggtaaaattactgaacgtcatgcgagagcggtattatcattgtctgatagcgaacaagaagcgttgattgagcaagtcattgcacaaaagctaaatgtgaaacagactgaagatagagtacgccaaaaaacggggcccgaaaaagtcaaagcacaaaaccttcgctttgcacaagatgtcactcaagcacgagatgaggtaggcaaaagtatccaagcgattcaacaaacaggattacatgttgagcataaagacaaagatcatgaagattattatgaaataaaaattcgaatatataaacgttag

SEQ ID NO: 405571 - DNA, 354 bp, Staphylococcus aureus
atgttttcaattggaagtgcaattcttcattttgtcattggtggtatcgctgttgcattagcttcaattattgctgataaggtaggtggtaagttaggaggtattatagctactatgccggcagtctttcttgcggctattatcgcattagctttagatcatcgtggtacgcaattagtggagatgtcgatgaatcttagtactggagcaattgtcggtattctgtcttgtatattaactgtatttttgacatctctctacattaagcataaaggttatcggaaaggcgcaatattcacagttgtttgttggtttgtcatttccctcgcaatattcagtattagacatttatag

SEQ ID NO: 405572 - DNA, 396 bp, Staphylococcus aureus
atgaaattaacattaatgaaattttttgtggggggatttgcagtattattaagttatattgtatctgtaacactaccttggaaagaatttggcggtatatttgcaacgtttccggcagtatttttagtgtctatgtttattacaggtatgcaatatggtgataaagtcgctgtgcatgtaagtcgtggcgcagtgtttggtatgacaggggtattagtttgtattttagttacatggatgatgttacatatgacgcacatgtggttgattagcattgttgttggtttcctaagctggttcatcagtgcagtatgtatttttgaagcggtagaatttatagcacaaaaaagattagaaaagcatagttggaaagctggaaaatcgaatagtaaatag

SEQ ID NO: 405573 - DNA, 570 bp, Staphylococcus aureus
ttgaatctgagtaaacaaattaaaaagtatagggaacgagatggttattcacaagaatatcttgctgaaaagttatatgtatctaggcagagtatttctaattgggaaaatgacaaaagcttaccagacatacataacttattaatgatgtgtgaattgttcaatgtaactttagatgatttagtaaaagggaccattccatttgtacctgatattaaagcgcaacgaagtcttaacttatggacatatgtgatgcttattttcatgacattagctgcaattttaatgggacctttagttgtttattggaattggacttggggtgtaacggtggcaatcattttgggaataggtttttatgcatctatgaaaatagaagatttaaaaaaagtgcataaaatggacaactacgatcgaattgttgcttttatgaatggaaaagatcctagtgaagtacaaacgactaaagctagaaatacgatgacaaatgcgctttctattatatcagtaattggtatactcagcctcataattttccttagtgtgtatttggcaaataagtttttataa

SEQ ID NO: 405574 - DNA, 201 bp, Staphylococcus aureus
atgaataacggtacagtaaaatggtttaacgcagaaaaaggttttggtttcatcgaacaagaaaatggcggagacgtattcgtacatttctcaggtatcgctagcgatggctacaaaactttagaagaaggtcaaaaagttactttcgaaatcactgaaggtcaacgtggagaccaagcagttaacgtacaaactgtttaa

SEQ ID NO: 405575 - DNA, 192 bp, Staphylococcus aureus
atgaaatttagagaattagtaaaacaatcatatgaggatttgaaaaatttgactgtaacttggtataacgtcattgctttaacaatacttgttattgtattaagctcattcacaacaccaatgataggcattccagctggtttattaggtggctcttattatttaaaacgtcgtgaagaaaaaggcaagtaa

SEQ ID NO: 405576 - DNA, 498 bp, Staphylococcus aureus
atgattattaaccttgaaacacaacaaatacattttgatttagaacatgaaattccctattttcaagcacctgagaaaaataggatacgcttagatattgatgttctcaataaaaagcaaatttctaatattattaatgttatatttaataaccaatcaaagacgaaatgtacatttttgtctgaatacttatatcctgttaaatttagagaaaaaacaagaattggtcgtttttttaatattactaactggtacgaagaaatccattctaccgatgagaagtatgttattgcaactattaaaaatataaaaaacaaagacttaattgattattctttatatattaaaaaaggtttagtggagccatttattgtattctataatcaagaaaatatattctacattagcaatgctgttatagatatcatcagtgtatccaaagatactcttgattatataaagtcagaattcaatgatcactgtgcttcgccatactga

SEQ ID NO: 405577 - DNA, 537 bp, Staphylococcus aureus
gtgctaaactcaatatgtatttcctaccaaataaaacataaggagtttggacatcttgaaggagatactattgttggtcgtcgtcatggtagtgcaatcattactttggtagaaagagtatccaagatgattatcaccttacgacccttaggtcgtaaggcaactgatatagaaaacgctctacactcaatgttttcatctttaccttctcatatatttaaatcaattacttttgattgtggtaaggagttctcaaactggaaaacattatgtaactgtcacgatatatctatattttttgctgatccaggcacgccatcacagcgaggtttaaatgaacattctaacggaatacttagacgcagtggattagataaagaactagatttcaatttagtaacagacgatcatatcatcagtgttgctcaaaaaatcaatcatcgtcctagaaaatctttaggttatagaacaccattggaagtatttatgagtttcatcgaagatgataaacttgtccagcttaatttgacaatctaa

SEQ ID NO: 405578 - DNA, 192 bp, Staphylococcus aureus
atgaaatttagagaattagtaaaacaatcatatgaggatttgaaaaatttgactgtaacttggtataacgtcattgctttaacaatacttgttattgtattaagctcattcacaacaccaatgataggcattccagctggtttattaggtggcgcctattatttaaaacgtcgtgaagaaaaaggtaaataa

SEQ ID NO: 405579 - DNA, 1881 bp, Staphylococcus aureus
atgacatttaaccatatcgttttcaaaaacttacgacaaaacttaaaacattatgcaatgtatttattttcattattttttagcatcgtcttatatttcagttttacaaccttacagtttactaaaggtgtaaataatgacgactcgatggccatcattaagaaaggtgctttagtcggatcaatatttttatttatcattattgtcatctttttaatgtatgccaatcatttattcgtaaaacgccgtacacgtgaatttgcgctatttcagttgattggtttaacacgacaaaacattttgaaaatgttagcacttgaacaaatgatcgtatttttaatcacaggtgttgtcggtgtattatgtggcattgcaggtgcacaattattgctttccatagtatctaaattgatgtcgttatcgattaacttatcgatacatttcgaacctatggcccttgttttaactattttcatgctaattattgcgtatgtactgattttatttaaaagtgctttatttctaaaaagacgtagtatcttatcaatgatgaaagattcaattaaaactgatgccacaactgctaaagtaacgactgcagaggttatttcaggcgtattaggtattgctatgattgcactaggctattatatggcgacagaaatgtttggtacgttcaaagcactaactatggctatgacatcaccgtttatcattttatttttaacggttgtaggcgcctatttattcttcagaagttccgtgtcacttatttttaaaacattgaaaaaatcaaaaaatggacgcgtatctattaccgatgttgtattcacatcgtctattatgtacagaatgaagaaaaatgccatgtctttaactatcattgcaattatttctgcagttacagtaactgtattgtgttttgcggcattatctaaatcaaatacagatcaaacccttacatctatggcaccaaatgaatttaacgtggtcgctactcaagatgctaaacaatttgaaactaaactaagccaacaacaaattacattttctaaaaatgcttacgaaactattactgtagataatgttaatgatcaggttattactttggaaaatggtagtgattcaggtcgcacgaattctattttaagtgcaaataacaagttaacaggcaacaatgccatcattacaaatacaaaatcgctgcctaacattattaatatccatttaaacaaagatttagtagtaaaaggtactaagaatgaaactttccgtgttacacaagaagacaaaggtaaggtttatcctttaaatctaagcttcaactcacctgtcatcgaagtaagtcctgaaaagtatcagcagttgaaaacacaaaataacgttcatactttttatggatatgatattaaacaaacatcacaaaaggaaaaagctcaagcaattgcaaaacagtttggagacaaagtcatcacgtatgatgaaatgaaaaaagaggtcgatgctactaacggtattctaatatttgttacatcatttttaggattagcatttttagtagcagctggatgtattatttatattaaacaaatggatgaaactgaggatgaactaagtaacttcagaatattaaaacgcataggctttacgcatacagatatgcttaagggattattattaaaaattactttcaacttcggtttaccattattgattgctatattacatgcagtattcgccgcaatagcatttatgaaattgatgggtaatatttccttcatgccggttattgtagtaattgttgtatacaccctcatttacattacttttgctttaattgcttttgtacattcaaacaaattgattaagaaaaccatttaa

SEQ ID NO: 405580 - DNA, 759 bp, Staphylococcus aureus
atgacgatattatcagtgcaacatgtttcaaaaacatacggtaaaaagcacacatttcaagcacttaaagatattaactttgacatacaaaaaggcgaattcgttgcgattatggggccttctggatcaggtaagacaaccttattaaatgtactaagttcaattgaccaaatttctagcggtagcgtgattgctaacggacaagagcttaataaacttaatcaaaaagcacttgccaaattccgcaaagaatcattaggtttcatcttccaagattacagtattctgccgacattaaccgttaaagaaaacattatgttacctttatctgttcaaaaaatgtcgaaggcaacaatggaagaaaattataaagcgatcacgacagcattaggtatttatgacctaggaaataaataccctagcgaattatctggtggtcaacaacaaagaactgcagcagcgagagcatttgttcacaaaccacaaatcatatttgcagatgagccaacaggcgcactcgactcgaaaagtgcaaatgacctattacaacgtttggaagaaatgaataaatcgtttgatacaactattgtcatggttacacatgatccggttgcagcaagttttgcagaacgtgtcatcatgctaaaagatggccaaattcatacacaactttatcaggaaggacgttctaaacaggccttttatgaagacattgtacatcttcaatcagtattaggtggtgtctcaaatgacatttaa

SEQ ID NO: 405581 - DNA, 513 bp, Staphylococcus aureus
atggaaaaaggaaatcaaggtattaaatggtctagtttaataatgggtgtattattattaatgttggcagtcgttatttttacatttccaattgaaaatttttatgctattacctggttgattggactgtttgtattaattaacggtgtgattcaaatcgtttaccgtagaaaagcaaaagctttagtaggtggtaaccaaaattggattctgtttatggggattgtagatattctatttggtctattagttatttttaatgttggcgcaagttcagcattctttatttatatgtttgctttttggtttatttttagttctatctctggattatttacgttttcgggtagtggtagcttaaaactaatttcagtgatttttaatttattaggtattgttttcggtgtcattttattatttaatccattaatgggtatcgtctttatttcgacgatgattgctattgcatttgtattcgtaggtgtcatttatgttgtagatgcacttgcttaa

SEQ ID NO: 405582 - DNA, 795 bp, Staphylococcus aureus
atgaatattgcgaagttagagaattatttacaaattgattcatctcgttataatcgaccgagtattgaagcattaaattattatgcaacacgttttatgttaactgtaccttttgaaaatattgatgttcaaaatagtaagccgatatctataaatatcgatgcactttttaataaaattgttcatgataaacgtggtggtttttgttatgaattaaatacatttttcaaagcctatttacaacaaaaaggatttaatcctgaattaatgtcagctactattcacacacccggtggcggtcgtagtctgaacggttcacatgcttcacttgttgtttctataaatgatgtattctatgtaactgatgttggctttggagacttacctctacatgccattcctattacttcatctgagcatacacaaccaattactgatatcagtggtacattccgcgctatttttaacaacgaagacaaggatattttctatgttcaaaaattcgaaaatgatcattggcatacaaaatatgaagctgaattcaaacctaaacaaatagaagattttaatagcaacatcgaatataatcaaacgcatccagattcaatatttgtacagcatttattaattacaatgccacaatcatttggccgtgctacaatgtctgaaaatcatttaactttaacaaggaatggtagctcagaaaaatttgatgtcactaaagataactataaacattttttagaaaaatattttggactaaatgtaactattaatcgtattgaaaaacaataa

SEQ ID NO: 405583 - DNA, 1017 bp, Staphylococcus aureus
ttgactgtttttaaaaatgagcgcttaagctggttaccatacatagctattgtcattttgttacacgttattgggtttagttttttatggattgctggaaaagaccatcatatcttatttggtatggggattcttgcatatacattaggtttgcgtcatgcatttgatgcagatcacattgctgcaatagataatacggttcgcaaattattacagcaacgcaaagatccatctggtgtgggtttctatttttcaattggacattcatctgtcgtatttttaatggctgtttttttagggatatctgtaaaatgggctaaagatgaattaccgcatttccaagatattggtggaacgattggtacactagtttcaggtttctttttagtgcttatcggtgtgttgaatctaattattttaatctctttaattaacttgttcgctaaattacgtcgtgaacacattgaagaagctgaagtcgatgcattacttgaatctagaggattggtttctcgatttgtaggaccttatttcaaattaatcacgcgtagttggcacgtattgccacttggctttttatttggacttggttttgatacagctagtgaaattgcgttactcgctctttcttcaggcgcatcacaacaagccatttcatttatcggaatcttatctttaccaattttattcgcatcaggtatgagtttattggatacattagatggtgttgtaatgaagtatgcctataattgggcattcttcaatcctattcgcaaaatctattacaatataacgattactgcgatatcagtcatggcagcattagtgattgggatgattgaattgctacaaattcttgctgataagttagatttacatggtgcgttttgggcattcattggttcgatcgaatttgattatttaggctatattttagttgcattatttttaattacttggcttatttcaagtttaatttggaagtttggtcgcatagaacacaaatggtctagataa

SEQ ID NO: 405584 - DNA, 576 bp, Staphylococcus aureus
atgactttacctaaaattggaaagcctgcaacacgcgcgctaaattcacaaggtatatacacattagaagcagtatcacaatatacgaagtcatctctaatggagatgcatggcgttggtcctaaagctatatcaatattggaacaagctttatttcagcaccaactacattttaaaacggaagttcagtcatcattaccttttaagttaacaggagatgtgtcatgcaatcatgcgcctaaacgtcaacaaatgatagattttatagttgttacagcagcattagatattgaattattacgttcactggttacaacagaatttatttggtctgtccctggccgctttgacatatacggacctcaaatattaattcaagaactatctaatcattacaatcaggttgctagtctcaatatccattccagcatcacacatgggtgcttaggttccatgcatggtattgaaatattaaaaactggtaaagagattcattttgctcatttttttgaatttgaaaatcataaaaaggatgccaagttaagcaaagtgacatcttacattgttgttggttaa

SEQ ID NO: 405585 - DNA, 909 bp, Staphylococcus aureus
gtgaattcagagtataaaaaaggcatatttttagcactcagtgcatacattctgtggggaatactacctatatattggcagttcgttgatgcaataggcgcatttgaaattttagcctttcgtattatattttcagcaatattcatgattttcatactcgcggttggacaaaaacaacgcaatgcatttcaacgagatatgaatcaattgttaggcaagcccattcagctattagcgattgtcgtagcaggctatgtcattacattaaattggggtacatttatttgggctgtaacgaacggtcacgtcctacaaacaagtttaggttattatataaatccacttgttagcattttgctcgcacttatctttttaaaagaaagattcaataaatttgaatggctagccattttattcgcattcatcggtgtattatatatgacgctcaagattggagaattcccaatcgtctctattatattagcgttatcctttggtacatacggattattgaaaaaagtagtacatattgatgccatcagcagtattacgattgaatgtattgttaccgcacctgctggactaatatacgttatttatttatggcagcaacatcagatgtcatttggattgaacatgtcatcattttggttgttattttctggtgctattacggcaataccactaatcctattctcagccggggcaaaacgtattccactttcgctaataggatttattcaatacgttggaccaacaataatgtttgtactcggcatatttgttttcaaagagccttttagtatagatcaattaattacgtttatatttatttggacaggtattgtgttatatagtctttctcaatacattaaattgaagaaacatccggtcgcaaaaaccctataa

SEQ ID NO: 405586 - DNA, 1419 bp, Staphylococcus aureus
atggaaaacacggttaaatatcgtaagtttatactccctatcgttgtaggtctccttatttgggcacttacaccttttaaaccggatgctgtggatccaacagcatggtatatgttcgcaatattcgtcgcgacaatcattgcttgtattacacaaccgatgccaattggggccgtctctataattggatttacaatcatggtactcgttggcattgttgacatgaaaacggctgtcgctggttttggtaataatagcatttggttaattgctatggcatttttcatttcgagaggatttgtgaaaacaggtcttggtagacgtatcgcacttcatttcgtcaaattatttggtaaaaaaacattaggattagcatattctatcgtcggtgtagatttaattctagcgcctgctacaccaagtaataccgcgcgtgctggtggaatcatgttcccaattatcaaatcactttctgaatcatttggttcgaaaccgaaagacggatcagcacgcaaaatgggtgcatttcttgttttcacagaattccaaggtaatttaattactgcggctatgtttttaactgcaatggccggtaacccccttgcacaaaatttagcatctagcacatctaatgttcacattacatggatgaattggtttctagctgctttagttcctggacttgtttccttaattgttgtaccttttattatttataaaatttatccaccaactgttaaagaaacaccaaatgctaagagttgggctgaaaatgaattagcgactatgggtaaaatcgctttagctgaaaaatttatgattggtatttttgtcgttgcgttaacactatggattgtcggaagtttcattcatattgatgcaactttaacggcctttattgcgctagcattgttattattgacaggcgtcttaacatggcaagacattttaaacgaaacaggtgcttggaacacattagtatggttctcagtattagtgttaatggccgaccaattaaacaagcttggatttattccttggttaagtaaatccattgctacaagtcttggtggcttaagctggcctatagtcctggtcattttaatattgttctacttctattcacattacttatttgcaagttctacagcacatatcagtgcgatgtatgcagcattactaggcgttgccatcgcagccggtgcaccaccattattcagtgcattaatgttaggtttcttcggtaacctattagcttcaacaacacactatagtagtggtccagcgccgattctattctcttcaggttacgtgactcaaaaacgttggtggacaatgaacttaatattaggtttcgtctactttattatctggattggtttaggatcactttggatgaaagtaattggtatattttaa

SEQ ID NO: 405587 - DNA, 465 bp, Staphylococcus aureus
atgactacaaaaacagtatttgatgtcattgatatggggttaggatatttagtaaatgtgtatgatgcttggaaagttgaaaaggtacttgatgattatcataagcctttttctaataccattcattggcaatttggtcatgtattaacaatttttgaatcggccttagctgttgctggtaaagagaatattgatttaaatatctatagacctttattcggaaatggttcgtctccagatgaatggaaggatgaagtaccgagtattgaaaggattttagaaggtctccaaactttacctgaacgtgcacgaaatctaactgaagatgatttagcaattgaattgaaacagccaattgtcggttgtaataacttagaagagttattagtattaaatgccattcacatcccacttcatgctggtaaaattgaagagatgtctcgtatattaaaaaatttaaaataa

SEQ ID NO: 405588 - DNA, 339 bp, Staphylococcus aureus
atgtcagtgtcagatcagattatgaaaggtctcttagatggggcgatattaggtctcattgcccaaggcgaaacgtatggatatgaaattatgacgaaacttaagaatcaagagtttccagagataagtgagggtagtatttatccagttttaatgcgtttaaacaaaaaaggatacgttgatacgacaataaaaaaatctagtaatggcggcccgaggcggaaatactatacgattaccgattcaggtttaaaggaactaaaagtatttaaatcgaaatggcaagttttgaataaagggatgattaacttgtttggaggggaaaacgatgttaagtaa

SEQ ID NO: 405589 - DNA, 768 bp, Staphylococcus aureus
atgttaagtaaacaatctcaagattttttagaaaaattacgtgttgaattgttatttagaggtaagactgaagcagaagtagaagagttattggaagagctcgaagatcatttaactatggctgaaaaaaataacgaagatacaagttcaattattaatacaccgattaagtcaatggctgatcaattatcacctgagataagtcttactaccggtttgtataaatatattactttgtacttcgcttttattttagcagtcattataattcctaggtttttagatttgggtacatttgatgtgacaattgcatttttactttatatagctagtatcgttattttaggtgttgtcattggtatgctgattctacgaaatacattagtccgatttggtgaccaaaaaataacgtatgttataaatgtgacttatggaattatcgtatttttatggatgattttaggtggcttgattattaaaaaatatcctatctatagtttctttgagttaagtgacaaacagagtttcatcgttgggttagtacttttaattgcgctcattggaacttgtattttaattaaacagaaaatttatgcgctcatcgtgttggtaatttcattgccaagtttgatagcaaggatagcagctatctttagtaaagaaccagacacttttaatttagtttcagtaagtatactcatcattctaaatatagcatttattatttatacatttgtaaattttaggaagttaaaaaaagaagactaa

SEQ ID NO: 405590 - DNA, 639 bp, Staphylococcus aureus
atgcacattttagtaacagggtttgcgccttttgacaatcaaaatatcaatccctcatgggaagctgtgactcaactagaagatattattggcacacatacaatcgataaattaaaactaccaacctcttttaagaaagtagataatattataaataaaacgttggcatctaatcattatgatgttgtactagctataggacaagctggtggtagaaatgccattaccccagaacgtgtcgccattaatattgatgatgcacgtattccagataatgatgattttcaacctattgatcaagccattcacttagacggtgcgccagcttatttttcaaatttaccagttaaagcaatgactcaaagtattattaatcaaggacttcctggagcactttcaaatagcgcaggtacatttgtttgtaatcacacactttatcacttaggttatttacaagataagcattaccctcacctacgattcggatttattcatgtgccatacataccagagcaggtcattggtaaacccgatacaccatctatgccattagaaaagatagttgcaggtttgactgcagccattgaagctatttctaatgatgaggatttacacctagccctgggcacaacggaatag

SEQ ID NO: 405591 - DNA, 957 bp, Staphylococcus aureus
atgaactatcaagttcttttatattataaatatatgacgattgatgaccctgaacagtttgctcaggatcacttagccttttgtaaagcacaccatttaaaaggtagaattcttgtttctacagaaggtattaacggcacattatctggtacaaaagaagaaaccgaacaatatatggcacatatgcatgccgatgaacgattcaaagatatggtgtttaaaattgatgaagctgaaggacatgcttttaagaaaatgcatgtacgtcctcgaaaagaaatcgttgctttagatttagaagatgacgtcgatccaagacacacaactggccaatatttatcacctgtagaatttagaaaagctcttgaagatgatgacacagtcattattgatgcacgtaatgattatgaatttgatttaggtcatttccgaggtgcaattcgtccaaatatcacacgttttagagatttgcctgactggattaaagagaataaagcgttatttgcagataaaaaagtggttacgtactgtactggtggcattcgatgcgaaaaattttctggatggcttttaaaagaaggtttcgaagatgtagctcaacttcatggcggtattgctacatatggtaaagatcctgaaacaaaaggtgaatattgggacggtaaaatgtacgtatttgatgaccgtatcagtgttgatatcaaccaagttgaaaaaacaattattggtaaggattggtttgatggcaaaccatgtgaacgttatattaattgcgctaacccagaatgtaataaacaaatattagtttctgaagaaaacgaaactaaatatttaggtgcatgctcttatgaatgtgctaaacatgagcgtaatcgttatgttcaagcaaataatattagtgataatgagtggcaacaacgtttaacaaactttgatgatttacatcaacatgcttag

SEQ ID NO: 405592 - DNA, 975 bp, Staphylococcus aureus
atgatgtcacaacaagatttacctacattattttatagcgggaagtccaatagtgctgttccaattatatctgaaagtgaattacaaacaattacagctgaaccatggcttgaaatttccaaaaaaggattgcaactagaaggattgaactttgatcggcagggacaactctttttattggatgtattcgaaggcaatattttcaaaatcaatcctgaaacgaaggaaatcaaacgaccttttgtaagtcacaaagcgaatcctgcagcaatcaaaatacataaagatggccgattattcgtttgttatttaggagattttaaatctacaggaggcatttttgcagctacagaaaatggtgacaacttacaagatattattgaagatctttcaacagcatattgtattgatgacatggtatttgattctaaaggtggattttattttacagattttagaggatactctaccaatccactaggaggcgtttattatgtttcgccggactttagaacagtgacgcctatcattcaaaatattagcgtagcaaatggtattgctttaagtacagatgaaaaagtactatgggtaacagaaacaacagccaatcgattacatcgcattgcacttgaagatgatggtgtgacgatacaaccatttggagctaccataccgtactattttacaggtcatgaaggaccagactcatgttgtattgatagtgacgataatttatacgtagcaatgtatggtcaaggtcgagtgttagtttttaataaaaggggttatccaataggacaaatattgataccaggccgagatgaagggcatatgttacgttctactcatccgcaatttatacctggaacaaatcaactcatcatttgttccaatgatatagaaatgggcggaggatctatgctttatacagttaatggctttgcaaaaggtcatcaaagttttcagtttcaataa

SEQ ID NO: 405593 - DNA, 516 bp, Staphylococcus aureus
atgactaactttacttttgatggtgcacacagtagtttagaattccaaattaaacatttaatggtttctaaagtgaaaggttcatttgatcaatttgatgtagctgttgaaggagatattaatgacttcagtactttgaaagctactgcaacaattattccaagctcaattaacactaaaaacgaagcacgtgataaccacttaaaatctggtgatttctttggtactgacgaatttgataaaattacatttgtgacaaaatcagtatctgaaagcaaagttgttggtgatttaacaattaaaggcatcactaacgaagaaacattcgatgttgaattcaacggagtaagtaagaatcctatggatggttctcaagtaacaggtattattgttactggtacaatcaatagagaaaaatatggcattaactttaaccaagcacttgaaactggtggcgtaatgctaggcaaagatgttaaattcgaagcatcagctgaattctcaatctcagaataa

SEQ ID NO: 405594 - DNA, 849 bp, Staphylococcus aureus
atgggaaattatttggtattgcaatcagattttggacttagtgatggcgctgtaagtgcaatgtatggagttgcatatactgtaagtgatgatatacgtgttgaaaacttaacgcatgatataccaccgtatgacatttgggtagcgtcatatcgtttatatcaaactgtaaaatactggcctaaaggcacagtttttgtatcagtggtagacccgggtgtaggtagtgataggcggagcattgcttgcttaacatattcaggtcattacattattacacctgataatggttctttaagtcatattaaacattacgaaggtattaaaaaagttatcgaaattgatgaagtgaaaagccgattgcctcattcggaagaaagtcatacttttcatggtagagatgtttatgcatacaatggtgcgagattagctgcaaataagatagcgtttgaacgtctcggtcaggcaattaatgttgatagtattgaggcattagaaataagagaagtgacaaaaaatgaggattctgttacaggaagcattgatattttagatatcagatttgggtcattatggacaaatattccattggcattcttaaaatccttggaaattgttcatggtaataatttggtggtaacaatttatcatcaagataagaaagtctatcaaaatattattaaatttgcgcgatcgtttgcagatgttaatgtgggtgaacctcttgtgtatgttaactcgctagtaaatattggtgtagcagtcaatcaagactcattttcagatttatatcatattggtactggaaatgattggacgattcatttatctaaagcaccatcaatataa

SEQ ID NO: 405595 - DNA, 555 bp, Staphylococcus aureus
atgaaaaaacaagatatttcagttaaaactgttgttgcaattggtataggagcagcggtatttgtaattttagggcgttttgttgtaataccaacaggttttcctaatacgaatatagaaacatcatatgcatttttagcattaatatctgcaatatttggaccttttgctggtttaatgactggattagttggacatgctattaaagattttacgacatacggtagtgcctggtggagttgggttatttgctcgggaattataggctgtttatatggctggattggactaaaattaaatctttcttcaggccgattttctaggaaatcgatggtttattttaatatcggtcaaattattgcgaatattatttgctgggcacttattgcaccaacattagatattttgatttataacgaaccagctaacaaggtttatacacaaggtgttatctctgcagtattaaatattatttcagttggcattattgggacaatattattaaaagcatatgcttcatctcaaattaaaaaaggtagtttacgtaaggaatag

SEQ ID NO: 405596 - DNA, 1713 bp, Staphylococcus aureus
atgactgaaccaattatctcgttcaaagactttagttttcaatatcatagtcaagcaacacctacattacagaatataaatgttgatatttatccaggagaaaaagtattagtagttggtgcttcgggtagtggtaaatcgacttttgcaaattgcataaacggattaattccatttaaaactaaaggtaacataactggggaactatatataaataatcaagatgcaaccgttagttgtttacatgatagatctaatgttgttggtacagttttaaaagatacagatggacagttcataggcttaacagcagctgaagatatggcctttttattagaaaataattgtgttgaacaagatgatatgaagaaaaatgtaagttattgggctgaaaaagttggcatgatagaacatttaaatcaccgaccgcaagatttatctggaggtcaaaaacaacgcgtttcattaggtggtatattaatccatcgtacgcctattttaatattggatgagccactggccaatttagatcctgcgacaggacatgaaacgctgagattgttaaacaatattcatgaagaaacaaagtcaacgatgattattgtcgaacatcgattagaagaatcattagatgatacgtttgatagagttcttctttttaaagatggaaaaatcatcgctaatacaacgcctagtgatttgctaaaatcatctaagcttaaagaagcaggcatacgtgaaccattatactgtacagcgcttaaatatgcagaagtagatgtcgaatccattgataacttagcgaatttacgtgacgtttgtatgagtgaacatgttaaatttaaagtgaaaaaatggatagatgaaacatctgcaaataatgataataagtacaaatctgaaccgctattagaattaaatgaggtatgtgttcaatatagtgactatagtaatagtgtacttaataatgttcaattaaatgtttatagaagagaaatgcttagtatagttggtcacaatggtgccggcaaatcaacacttgctaaagcaatttgtggatttttagatataacaggtaatatccaattttgtaataggggatttaatcaattgtcaattagcgaacgatctgaattcgtaggttatgtgatgcaaaatccaaatcatatgatttctgaaaaaatgatttacgatgaagtagcattagggttaagagcacgaggtatgaaagaatcagatataaagatacgagtagagaatgtgctcaaaatatgcggactttatgcatttcggaattggccaattgcagctttaagctatggtcaaaaaaagagggtcactatagcatctgttttagtcttaaatccggaaataatcatattggatgaaccgactgctggtcaagatttctatcattataatgagataatgtcatttttaattgaactaaacagacaggggaagacgattattatgattacgcatgatatgcatttattgtctgagtatagttcaagaacagttgtattatcaaaaggtcaagtcgttgctgataccacgccagtattggttttaaatgataaaaaaatctgtgagattgcatcattgagacaaacatcgctatttgaaatggccgaatatatagggattagcgagccacagaaattagtacaattatttattaaccatgataggaaggtgagacgccaatga

SEQ ID NO: 405597 - DNA, 834 bp, Staphylococcus aureus
atgaatcaatataatactataggttttcacccgggaaatagtcgtattcatcaattaaatgcgactgttaaacttttattcttattagttgtttctatttctgcaatggtgacttatgacacaagatatttaattttaattagtgcttcatctattttattggtcaaatatgctcatattgaatggaaacaagttcgctttgttgttaaattcattctgtttttcacaatattaaatattattgccgtgtacatatttgaccctgaatatggtgtgaagatttataatcagcgtacagagttagtcaatggtattggtcgatttacgctaacatcacaggaattattctatctttttaatctaatattaaaatatattagtacagttcctttagcgttaatatttttattcacaacgaatccgagtcattttgctgcaagtttaaatcagctaggtgtgaattataaaatcagttacgcagtctcactagcattaaggtatattccagatattcaagaaacatattttaatatttcacaagcgcaacaagcaagaggatatgataattcgaaaaaagcaaaatttactagccgtgttaaaggtatcaaacgcattgtgttacctttaatattttctagtatcgaaagaattgacactattagtactgctatggagttaagacaattcggacagtataaaaggagaacctggtacgtcaaaaaacaattaaaaaaagatgattatgttgttttgtgtttgacgttaatacttctgatgttagtagttacattattctttttaaataatagtcgatatttcaacccgtggcattag

SEQ ID NO: 405598 - DNA, 498 bp, Staphylococcus aureus
atgataaatactgaaagattaaatttaatgattccaagttcctcgcatttaattgaactttataatatttgtagtcatccacaagcaaatatatacactcccaaaggtttacataattccaaattagacacacaacggtggattgaaaaatggcgaaaccattggcaacaatatcaatttggttactttgtattggtaaaaaaaatagattgtagtgttattggtatttgtggatatgaatatcgacaattaaagcaagaaacagtattaaatttattttataaattacatccaagttttgaaggacaagggtacgcatgtgaggctattacagcaatcacaaattttgtgaattatatcgatcaagaaacagtaaaagttatcaggacaaataagtgtaaccaacgttcaataaatttagcagaaaggcttaaattcaagcgagacgatactatggacgacattatcaatcaaggagatattgtgttttataaataa

SEQ ID NO: 405599 - DNA, 1125 bp, Staphylococcus aureus
atgcataaaaaatatttattgctattttttctgttattatcagttgcattgttatatagctgttccaagcaaaatgagaaagctcaaaataaatctgttaatccaaatgagtatgcaaagcataaatcgaaaatggatgaacattgggaaacatatcacggccaagtttatcatgtgttttatcacccattaattacagacccaaaagttgcgtttacaggagatacacaccaagctaagggcaacaatgattggatgattactgtaagtgaatttaaaaaatcattgaacgaattatataaaaataattacatcatcgttaatccacatgatgtatacgacttatcatctcatcatgtaaaagccaaaaaaataaaattgccgaaaggtaaaaagccactaatcatctcaattgatgatatgaattactatagttacatgagacaccatggttatgctgaccgtttagtactcgataaaaataaacatgttgtttctgaaactacagacaaaaaaggccatgctacttattctgatgacaatgatatcgtgccaattttaaataaatttgtaaaagagcatccagatttttctttaaatggtgaaaaaggtgttgttgctttaaccggttatgagggcgtattaggttatcgcacgaatgaattaacgagtaaagattatacaaagaataaaaaggcagctgaggaagttgttcgcgcaatgaaacgggatggatggtcatttgcgagtcattcatatggtcacattaattttgaaaaaacatctttagaaggtattaaacgtgatactaaaagatggaaagatgaagttgaaccaattgtaggtaaaacagatatgtttgtatttccacatggcgcacaggatagacatacacaagcgtatgattatttggtagatgaagcagagtttaagtttattgcaggtgtcggtccaaacaattttacagatatatcagcaacgaacgtttaccaagatagggttgcgattgatggtctaaacttatttgaatttaaatataaactcaaaccgttttttaatcctgaaaatgtatatagtaaacaagatagacgttactttaaagggaatcgggattatgaagaatag

SEQ ID NO: 405600 - DNA, 819 bp, Staphylococcus aureus
gtgaataattcagaacaattaattgcgttaaaagaatcggaaacagcatttttaaaatattttaataaagcggattatgagttagttgattttagtgtggttgaaaagttggactggaaacaattgaaccatgaggatttgcagcagatgggtgagcgaaatttttggcaacatgagcatcaaatttatgcacttcgaaatgattttacagatcaattattgcgttattactcaatgtatccaactgcagcaacaaaagtggcatacacaggtttaatcattcggaataatgaagcggctgtacaagttggtttggaaaactatgcaccatcattagcgaatgtgcaacagagcttaaagctctttattcagtttattcaacagcagttgagagacaacgtgcattttgttgtattgggacattatcaattgcttgatgccttactcgataaatcgttacaaacaccagacatactatcaatgattgaggaacgtaatttatcgggactggttacatatttgtcgactgaacatccaatcgtgcaaatcttgaaagagaatacgcaacaacaattaaatgtattggaacactatattccaaatgaccatccagcactcgttgaattaaaaatatgggaacgttggttacataaacaaggttacaaagacatccatttagatattactgcgcagccacctagatcctattacacaggtttatttattcaatgtcattttgctgaaaatgaatctcgagttttaacaggtggttattacaaaggaagcatcgaagggtttggattaggattaacactttaa

SEQ ID NO: 405601 - DNA, 615 bp, Staphylococcus aureus
atgttaagaatcgccatagccaaaggacgtctaatggatagtttaattaactatttagatgtaattgaatatacgacattatcagaaacattaaaaaatagagaacgccaattattattaagtgtagataatattgaatgcattttagtaaaaggaagtgacgtgccaatctatgtggaacaaggaatggcagacataggcattgttggtagcgacatattagatgagcgccaatataatgttaataatttgttgaatatgccttttggagcatgtcattttgcggttgcagcgaaacctgaaacgaccaattatcgtaaaatcgcaacgagttatgttcatactgctgaaacatattttaaatcaaaaggtattgatgtcgaattgattaaattgaatggctctgttgaattggcctgtgttgtagatatggtagacggaattgtcgacatcgttcaaacaggtactacgctaaaagcgaacggactggttgaaaagcaacatattagtgatatcaatgcaagattaataactaataaagcagcttattttaaaaaatcacaattaatagagcaatttattcgctctttggaggtgtctattgccaatgcttaa

SEQ ID NO: 405602 - DNA, 1251 bp, Staphylococcus aureus
atgcttaatgcacaacaatttttaaatcaattttcattagaagcaccattagatgagtcattgtatccaattattcgcgatatttgtcaggaagttaaagttcatggagataaggctttgaaaatgtataatctaacattcgatcatacgaaaacagatcatttagaaattagtcatgaacaaattaaagcagcatttgacacattagatgaaaaaacaaaacaagcattacaacaaagttatgaaagaattaaagcatatcaagaaagtattaaacagacgaatcaacagttagaagaatcagtggagtgttatgaaatataccatccactagaaagtgtcggtatttatgtgcctggtggtaaagcaagttatccttcaacggtattaatgacagcgacgttagcacaagtagcaggtgtggaaaatattgtcgttgtgacaccacctcaacctaatggtgtgtctcaagaagtattagcagcatgctatattacgcaagttgatcaagtatttcaagttggtggtgctcaaagtattgctgcgttaacttatggcacagaaacgatacctaaagttgataagattgtaggtccaggcaatcaatttgttgcatatgccaagaaatatttatttggacaagtaggtattgaccaaatagctggaccaacagaaatagcacttattattgatgaaacagcagatttagatgccatcgtatatgatgtttttgcacaagcagaacatgatgaattagcacgtacatatgccattagtgaagatgcgcaagtccttaaagatttagaatcacgtattgctaaagcattgcctaatgtggacagatacgacattgtttctaaaagtatcgctaatcaacactaccttatccatgctagtaattttgatgaagcatgccatgtcatgaatacaatcgcgcctgaacatgcgtcgattcaaacagtaaatcctcaaccatatattgaaaaagtgaaatatgtgggtgcattgtttattggacattattcgccagaggtcataggagattacgttgcaggtccaagtcatgtattacctacaaatagaacagctagatttaccaatgggttatcggtcaatgatttcttaacacggaacacggtcatccatttatcaaaagatacgtttgaacaaattgctgattcagcacaacatattgctcatgttgaagcattatacaatcaccagcagtctattttaatacgtcagtcttag

SEQ ID NO: 405603 - DNA, 1014 bp, Staphylococcus aureus
atgatttatattgataaaaatgaaagtccagttacgccgttggatgaaaaaacaatgacgtctattattagtgcaacgccatataatttatatcctgatgcagcatatgaacaattcaaggaagcttatgctaagttttacggattatcgcctgaacaaattattgcaggaaatggatctgatgaattgattcaaaagttaatgctgatcatgccagaaggtccggcattaacgctaaatcctgatttttttatgtatcaagcatatgcggcacaagtaaatcgtgaaattgcatttgtagatgcaggatcagatttaacgtttgatttggaaaccattttaacgaaaatcgatgaagtacaaccatcattttttattatgagtaatccacataacccttcaggcaagcaatttgatacggcatttttaacagctattgcagataagatgaaagcattaaacggatactttgtcattgatgaagcatatttagattatggtacggcatatgacgtggaactggcaccacacatcttaagaatgcgtacattatcaaaggcgtttggaattgccggcttaagattaggtgtcttaattagtactgctggaacgataaagcatattcaaaaaatagaacatccatatccattaaatgtatttacgctaaatattgcgacttatatttttagacatagagaagagacaagacaatttttaacgatgcaacgacagttagctgagcagttaaaacaaatatttgatacacatgttgcagataaaatgtcagtgttcccatcaaatgctaattttgtacttactaaaggctcagcagcgcaacaattaggacaatacgtatatgaacaaggatttaaacctcgcttttatgatgagccggtgatgaagggctatgtaagatactcaattgcaacagcatcacagttaaagcaattagaagaaattgttaaagaatggagtgcaaaatatgatttatcaaaaacaacgaaacacagctga

SEQ ID NO: 405604 - DNA, 579 bp, Staphylococcus aureus
atgatttatcaaaaacaacgaaacacagctgaaacgcaactaaatatttcaatatctgatgatcagtcaccatcgcatattaatacaggtgtgggctttttaaatcatatgttaaccttgtttacatttcatagcggtctgtcattaaacattgaggcacaaggtgatattgacgtagatgatcaccacgtaactgaagatatcggcattgtcattggccaattgttacttgaaatgattaaagataaaaagcatttcgttcgttatggaacgatgtacattccaatggatgaaacattagcacgtgtcgttgtggatataagtgggcgcccatacctatcattcaatgcatcattaagtaaagaaaaagttggtacgtttgatacggagttagtagaagaattttttagagcggtcgtaatcaatgcaagattaacaacgcatattgatttaattcgtggaggtaatacacaccatgaaattgaagctatattcaaagcgttttcccgtgcattaggcatagcgctaactgcaactgatgatcagcgtgtgccgtcatcgaaaggtgtgattgaatga

SEQ ID NO: 405605 - DNA, 579 bp, Staphylococcus aureus
atgattgtcatcgttgattatggattagggaatattagtaatgtaaaacgcgctattgaacatttagggtatgaggtggttgtctcaaatacctcaaaaataatcgatcaagcagaaacaatcatattgcccggtgtcggccattttaaagatgcgatgtcagagataaaacgattaaatctcaatgcaatattggctaagaatactgataagaagatgattggtatttgtttaggcatgcaattaatgtatgagcatagtgatgaaggcgatgcatctggattagggtttatcccaggaaatatttcgcgtatccaaacagaatacccagtgccacacttaggatggaataatttagtgagtaagcaccctatgttaaatcaagatgtttatttcgtacattcttatcaagcgccgatgtcagaaaatgtaattgcatatgcgcagtatggggctgatattccggcaattgttcaatttaacaattatattggtattcaattccatcctgaaaaaagcggtacatatgggttacaaattttgcgtcaggcaatacaagggggatttataaatgattga

SEQ ID NO: 405606 - DNA, 705 bp, Staphylococcus aureus
atgattgaattatggccagcgattgatttgattgggtcaacaagtgtgaggttaacagagggtaaatatgatagtgaagaaaaaatgtcacgctcggctgaagaaagtattgcttactatagtcaatttgaatgtgtgaatcgtattcatatcgtcgacttgataggtgctaaggcacagcatgcccgagagtttgattatattaagtcattgaggagattaacaaccaaagatattgaagtaggtggtggcattcgtacgaagtcacaaatcatggactactttgccgcagggattaattattgcatagttggaacgaaaggtattcaagatactgattggcttaaagagatggcacatacatttccaggtcgcatttatttatctgttgatgcctatggagaagatattaaagtgaacggatgggaagaggacacagagttaaatttatttagttttgtgagacggttatcggatatacctcttggcggcattatatatactgatattgctaaagatggcaaaatgtccggacctaactttgaattaactggtcaattagtaaaggcaacgacgattcctgtcattgcttccggtggtattagacatcagcaagatattcaacgattagcgtcgctaaatgttcacgctgctattataggaaaggctgcacatcaagcatctttttgggaggggctaaaatga

SEQ ID NO: 405607 - DNA, 759 bp, Staphylococcus aureus
atgattaaaaaacgtatcattccatgtttagatgtcaaagatggtcgtgtcgttaaagggattcaatttaaaggattaagggatattgggaatcctgttgatttagcaatgtattacaatgaagcgggtgctgatgaattagtatttttagacatctctaagacggaagagggtcatagcttaatgctagaagtgattgaacagacagcgtcacgcttgtttatccctcttactgtagggggtgggattcaaagtctcgatgatattacccaattgctaaatcatggtgcagataaagtatcattaaattcaagtgctttaaaaaatccacagctcattaaacaagcgagtgataaattcggtagacaatgcatctgcatagcaattgatagctattatgatcctgaaagaaaagcacattattgttgtacgactggtggtaaaaaaatgacaaatattaaagtatatgactgggtacagcaagtagaacagttaggtgcaggtgagctcctcgttacaagtatgggacatgatggtatgaaacaaggctttgatattgaacacctagcaaatattaagtctcttgtaaatattccaatcattgcttctggtggtggtggcaatgcacaacactttgtagaattatttgatcagacggatgtttctgcaggtttagctgcaagtatattacatgatcgagaaacgacggttcaatctattaaagaagtgatacggcaagggggtatagcagtaagatga

SEQ ID NO: 405608 - DNA, 633 bp, Staphylococcus aureus
atgaccaaatataaaattgattttagcaaaggtttagtgccagcaattttacaagataatcaaacaaaacaagtattgatgttgggttatatgaaccaagaagcttttgataaaacgatagaagatggtgtggtatgtttctattcgcggtcgaaacaacggctatggacaaaaggtgaaacatctggtcatacgcaacgtgttaaagatattcatgtagattgcgacaatgacactattttaattgatgtcataccaaatggaccaacatgtcatacaggcagtcaaagttgtttcaacacagaagttccattttcagtgcaaacattagcgcagacagttcaagatagtgcccaatccaataatgaaaagtcatatacaaaatatttattaacagaaggtatagaaaagattacaaaaaaatacggtgaagaagcttttgaagtcgtaattgaagcaattaaaggtgacaaaaaagcatttgtaagtgaagtagcagatgaactttatcatttatttgtcttgatgcatgcgcttggcgtcgatttttcagaaattgaggcggaattagcgcgtagacatcataagcgcaataactttaaaggtgaacgacaaaatatcgaacagtggtaa

SEQ ID NO: 405609 - DNA, 2046 bp, Staphylococcus aureus
atgatgaaaagtcaaaataagtatagtattcgtaaatttagtgtaggtgcatcttccattttaatagctacattactatttttaagtggtggacaagcacaagcagctgagaagcaagtgaatatgggaaattcacaggaggatacagttacagcacaatctattggggatcaacaaactagggaaaatgctaattatcaacgtgaaaacggtgttgacgaacagcaacatactgaaaatttaactaagaacttgcataatgataaaacaatatcagaagaaaatcatcgtaaaacagatgatttgaataaagatcaactaaaggatgataaaaaatcatcgcttaataataaaaatattcaacgtgatacaacaaaaaataacaatgctaatcctagcgatgtaaatcaagggttagaacaggctattaatgatggtaaacaaagtaaagtggcgtcacagcaacagtcaaaagaggcagataatagtcaagattcaaacgctaataacaatctaccttcacaaagtcgaataaaggaagcaccatcattaaataagttagatcaaacaagtcaacgagaaattgttaatgagacagaaatagagaaagtacaaccacaacaaaataatcaagcgaatgataaaattactaactacaattttaacaatgaacaagaagtgaaacctcaaaaagacgaaaaaacactatcagtttcagatttaaaaaacaatcaaaaatcaccagtagaaccaacaaaggacaatgacaagaaaaatggattaaatttattaaaaagtagtgcagtagcaacgttaccaaacaaagggacaaaggaacttactgcaaaagcgaaagatgatcaaacgaataaagttgccaaacaagggcagtataaaaatcaggatcctatcgttttagtgcatggtttcaatgggtttacagatgatattaatccttcagtgttagctcattattggggcggtaataaaatgaacattcgccaagatttagaagaaaatggttacaaagcttatgaagcaagtataagtgcttttggaagtaactatgaccgcgcagttgaactttattattatatcaaaggcggtcgtgtagattatggtgcagcacatgcagcaaaatatggacatgaacgttatggaaaaacatacgaaggaatttacaaagactggaaaccaggacagaaggtacacctagttggacatagtatgggcggtcaaacgatacgtcaactagaagaattactgcgtaatggtaatcgtgaagaaatagagtatcaaaagaaacatggtggcgaaatttctccactattcaaaggtaatcatgacaatatgatttcatcaattactactttaggaacaccacataatggtacacacgcatcagatttagctggtaatgaagctttagtgagacaaatcgtatttgatatcggtaaaatgtttggtaataaaaattcaagagtagacttcgggttggctcaatggggtctaaaacagaagccaaatgaatcatatattgattatgtcaaacgcgttaaacaatctaatttatggaaatcaaaagataatggattttacgatctgacgcgtgagggtgcaacagatttaaatcgtaaaacgtcgttgaaccctaacattgtgtataaaacatacactggtgaagcaacgcacaaagcattaaatagcgatagacaaaaagcagacttaaatatgtttttcccatttgtgattactggtaacttaatcggtaaagctactgaaaaagaatggcgagaaaacgatggtttagtatccgttatttcttctcaacatccatttaatcaagcttatacaaaagcgacagataaaattcaaaaaggcatttggcaagtgacgcctacaaaacatgattgggatcatgttgactttgtaggacaagacagttctgatacagtgcgcacaagagaagaattacaagatttttggcatcatttagcagacgatttagtgaaaactgaaaagctgactgatactaagcaagcataa

SEQ ID NO: 405610 - DNA, 1053 bp, Staphylococcus aureus
atgaaaaagattagacttgaactcgtatatttacgtgctattatatgtgcaattattattatcacacatttacttacacaaattactttaaaacatgaaaatatggagggtggatccttagtgttacaattttacattcgtaatattgtgatttttggtacaccttgctttattatcttgtcacagttactgacaaccttgaattaccaaaaagtcacctatagatacttaactacacgcgtaaaatatatacttattccttacatattaatgggattgttttacagttatagtgaatcattattaacagattcaagtttcaataaacaattcattgaaaatgtcctattaggtcaatggtatggctattttatcgttgttatcatgcaattctttattttgagttatatcatttttaaaattaactataacctattcaacagtaaaatattattattgttatcttttattttacagcaatcatttttatattactttacgaacaacacagcgtttcacgataccgtgctacactattatccattaagtgaaaatactataatattcggatggattttttatttcttcttaggtgcatatatgggttataactacgaacgtgtattaaatttcttagaacgttatttagttattatgattgtattagctgtagctacttattttgtgtttattgcgttagcaaatggagactattggaacgttaccagcttttcatattcattaacaccatataatagtattatgtttattgttatcttgggtatttgcacgcattttaaaacaatgttatttaatacgattcaaatgattagtgctttctcattctttatttatttattacatccaatcattctagactcattgtttgcatatacaaatatatttgaggataatacaatggtctttctagcgatatcactactattcattttaggattatgtataggtgtcggcatgatattgcgtgaattctatatctttaggtttattattggaaaacaaccatataaattgaacattaatgcttattaa

SEQ ID NO: 405611 - DNA, 873 bp, Staphylococcus aureus
gtgaagtatagaaaatttataattttagtgttgagtatcttgatcatattgcctgtaagcacactggatggtcatcatattgcaaatgcagatgacgattcacctaaaaaactgaaatataaagaaaatagtgctctggcattaaattatcaccgtgtaagaaaagcgaattttctgaataattttatttacttcttttctagtagtaaagaaattaaaaattatagtgttagtcaatcacaatttgaatctcaaataaaatggctaaaatcacatgatgctaaatttttaaccttgaaagaatttttatattacaagaaaaaaggtaagtttccaaaacgaagtgtatggattaactttgatgatatggatgaaactatttatgaaaatgcttatccaatcttaaaaaaatataaaataccggcaactgggtttattatcacaggtcatgttggggaagaaaactttcacaacctcgatatgattagtaaaaaagaactaaaagaaatgtataaaactgggttatgggaatttgaaacacatacccacgatttgcataacttatctaaaaataataagtcaaaattaatgaaagcttctgaagctacaatcataaaagatttaaacaaaagtgaaaaatatctaactaaaaactttaaaaagtcgcagaaaactatagcctatccttatggcttgatgaatgacgataaattaccggtaatcaaaaaagctgggttaaaatacggtttttcattagaggaaaaagcagtcactccgaactccaatgattattacatccctagaatattaattagtgatgatgcttttgagcatttaattaagagatgggacggattccatgaaaaagattag

SEQ ID NO: 405612 - DNA, 306 bp, Staphylococcus aureus
atggtcaagcccagacagagggaatacccaacgctaaaatcatcgctaaatattgtaagagaaacagcacttatcgctatatcttgtgtcttttggatatattgtttagttgttctactcgtttatattggtactatatttgaaattcatgacgaaagtatcaatacaatacgtgttgctttaaacattgaaaatactgaaattttagatatatttgaaactatgggcattttcgcgattatcatttttgtattttttacaattagcatattgattcaaaaatggcagagaggaagagaatcgtga

SEQ ID NO: 405613 - DNA, 1239 bp, Staphylococcus aureus
ttgcaattttttaactttttgcttttttatcctgtatttatgtctatttactggattgtcggttcaatttatttctattttaccagagaaattagatattcattgaacaagaagcctgacataaatgtggatgaattagaaggcattacatttttacttgcctgttataacgaaagtgaaacgattgaagatacgttgtctaatgttcttgcactcaaatacgagaagaaagaaattattatcattaatgatggaagttcagataatacagcagaactcatctataaaatcaaagaaaataatgactttattttcgtcgatttacaagaaaacagaggtaaagccaacgcactcaatcaaggcattaaacaggcttcatatgattatgtaatgtgcttggatgcagatactatcgttgatcaagatgcaccatattatatgattgagaatttcaaacatgatccaaaacttggtgcagttacaggtaatcctagaattcgaaataagagttctattttaggtaaaattcaaacgatagaatatgcaagtttaattggctgtattaagcgaagtcagacacttgctggcgcagtcaatactatttcgggtgtcttcactctatttaaaaaaagtgcagttgtcgacgttggctactgggatactgatatgattaccgaagatattgcagtttcttggaaattgcatttacgtggatatcgtattaagtatgaaccgcttgccatgtgttggatgttggttccagaaacattgggaggtctttggaagcaacgcgtgagatgggctcaagggggacacgaagtattactacgagacttttttagcacaatgaaaacgaaaaggtttcctttatatattttgatgtttgagcaaatcatctcgattttatgggtatatatagtgcttctatatttaggctatttgttcataacagcaaacttcttagactatacatttatgacatatagtttttcaatatttctactatcatcatttactatgacttttataaacgttattcaatttacagtcgcactctttattgatagtcgctacgagaaaaagaatatggctggactcatatttgtaagttggtatccgacagtatactggattattaacgcagcagtagttcttgtcgcatttccaaaagcattaaaacgtaagaaaggtggttacgcaacatggtcaagcccagacagagggaatacccaacgctaa

SEQ ID NO: 405614 - DNA, 561 bp, Staphylococcus aureus
ttgaaggataagattattgataacgcaataaccttattttcagagaaggggtatgacggtacaacacttgatgatatagctaaaagtgtaaatataaagaaagcgagtttatattaccattttgactcgaaaaaaagtatttacgaacaaagtgttaaatgttgttttgattaccttaataatattattatgatgaatcaaaataaatcgaactattcaattgatgctttatatcaattcttatttgagtttattttcgacatcgaagaaaggtatattagaatgtacgttcaattatctaatacgcctgaggaattttctggaaatatttacggacaaatacaagatttaaatcaatcattaagtaaagagatagcaaaattctatgatgaatcaaagataaagatgacaaaagaagactttcagaatttaatattgctgtttcttgaaagttggtatttgaaagcatccttttcgcaaaaatttggagcagtggaagaaagtaaaagtcaattcaaagatgaagtgtattcgctactaaatatatttttgaagaaataa

SEQ ID NO: 405615 - DNA, 663 bp, Staphylococcus aureus
atgaaagaaaagtttgatttagtaaaactattaaatattctaaagaagaatattaaattattgcttattttaccggcaatatgtcttgtagtaagtgcggcattaaccttttttgttatgcctgacaaatatactgcttctactcaaatattagtgaacatgaaaaagtcctcaagtgatttagctttccaaaatgttcaaagtagtttgcagtctgttaatacatatacggaaattatcaaaagtcctagaattctagataaagtatctagagaatttgatggtcagtattcaacagctgagttgaattcatttttaaaagtaaccaatcaaacaaactctcaaattattactgtatcagttaccactgggaataaatctgaatctgacaaaattgttaataaaatatctaaagtttttgctcatgacatgcctaaaattatgagtgttgataatgttacgatactttcctcagcacatgataatgctgtaaaagtatctccaatagtatctgtcaacttagttatcagcattattgttggtattgttttagcaatattgattattttcttaaaagaattattagataagcgtattaagacagaagaagatgttgaatcgcaactaggattacctattttaggttcaatacaaaaattttaa

SEQ ID NO: 405616 - DNA, 693 bp, Staphylococcus aureus
atgacgaatacacgaagaagtacatcaagtttaattgtccatgaacaaccaaagtcacctattagcgagaaatttcgaggcataagatcaaatattatgtttgcaaatcctgacagtgcagttcaaagcattgtaatcacttcagaggcaccaggcgcaggtaagtctacaattgcagcaaatttagcagttgcatatgcgcaagcaggttataaaacactaatcgtagacggggatatgcgtaaacctacgcagcattatatttttaatttgccaaacaatgaaggcctatcaagtttattgctaaattggtcaacttatcaagacagtattatctcaactgaaattcaagatttagacgtcttgacgtctgggccaatcccaccgaatccgtcagagttaattacatcaagggcatttgcaaatttgtatgacacattattgatgaattataactttgtaattatcgatacgccaccagtgaacacagttacagatgcgcaattattttcaaagtttaccggcaatgttgtctacgtagttaattcggaaaataataatagagatgaagttaaaaaaggaaaagaacttattgaagcaacaggtgctaaattattaggtgtagtcttaaatagaatgcctaaagataaaagtgctagttactatgcatattatgggactgatgaatcatga

SEQ ID NO: 405617 - DNA, 768 bp, Staphylococcus aureus
atgattgatattcataaccatatattagttgatatagatgatggtcctaaaacaattgaaaagagtattgcactattaaagcaagctaaggatgaaggtgtaacaagtattgtagcgacacctcatcatttgcatccgagatatgataatacatttcaacaagtgcttgtgaaattggcggagttaagaacgcatccagaagttcaagcattggatattaaattatttcccgggcaagaaattagaattacagattcgattctgaaaggcttagataatggtagtattcaaggtattaatcgttcgaaatatttattaattgaatttccaacgggcgaagtaccacattatacaaaacaattgttttttgaaatacaatcgagaggttacataccaatcattgcacatcctgaaagaaatagaagtatcgccaaaaatccggaaatattatatgaattggttgcaaatggggcactgagtcaattaacatcgagttctttagttggtggatttggtaaaaacattcaaaagttatcattacaatttatagaatgtaatttggctcattttgtagcttcagatgcacattcatgtgaccaaagaccatttttgatgcaagaattatttcacaatcataaattgaagaaatattcgaatgatattgaagcattacttcgaaatgccagttcagtaatcaatgataattttgtttatttagacagaccgactaagccaggaaaagtgaagtcgtttttgaaatggttttaa

SEQ ID NO: 405618 - DNA, 501 bp, Staphylococcus aureus
atggtattaagaaaagtaatcatgcaggacttagatcaaattattgcacttgaaaatattggtttttcaccggaagaagctgcaacacgagaggcattgaaattgagaattgaacaaattcaagaaacttttattgtagctgaaaagaatgatgaagtaattggatacatcaacggtccagtcataaaagagcgttacattagcgatgatttatttaaaaatgtctccacaaataatagtgaaggtggctatattagtgtgttaggtcttgttgtagcaccaaattatcaaggtcagggtattgcaggtcgcttactaaactattttgaaactcttgctaagaatcatcatcgacatggtgtaacgttaacatgtcgagaatcattaatttcattttatgaaaaatatgggtatcgtaatgaaggtgtatcagaatcatgtcatggcggtattaaatggtataaccttgttaaaaatataaaaaaggatgatgaggtgtaa

SEQ ID NO: 405619 - DNA, 477 bp, Staphylococcus aureus
atggcagttgtttatgtagcaggaggatgtttatggggtgttgaagcattttttgcaacaatacctggaattatacatacagaagcaggaagagcaaatggaagaagctctaaattagacggtccgtatgatggttatgctgaatgtgtcaaacttcatttcgatgatcgtatgttaacaattacagacattatgaattatttatttgaaatcattgatccttacagtgtgaatcaacaaggaaatgatattggacaaaagtatcgaacgggtttatatagttgtgtagatgaccacttaattgaagcgcgtcagttcattgaacgacgtaaagacagagatcaaattgcagtggaagtcttaccgctgtctaactacattaaaagtgctgaagaacatcagcaacatttagaaaaatatccagaagatatgcatatgtgtcatatttcaaaagatttgctaaataaatacaagtga

SEQ ID NO: 405620 - DNA, 612 bp, Staphylococcus aureus
atgtatacgtttgatgcacaatcattaactgctagagaaaactataaattattaattggttcaattattccacgacctatagcttttgttacaacattaaatcaagatgcatcagtaaatgcagcaccatttagcttttttaatattgttaataatcatccgccaatgattgctattgcagttcaacgtgcaggaggtaagagaaaagatactgcattaaatatagaacggactggagactttgttgtgcatattacagacgaagataatgttcaagatattaatgagactgcagcgccgttagcatatggtgacagtgagttgagtcgtacagaattatcacttttaacatctacaacgattaagacgccaggaattaaagatgcgaaaatgagattcgaatgtaaactatcgcaaatgatattgcttggagatgtattagatggggctgatttaataataggtgaaattgtaacttatcatattgatgacagtatttatgagggtgattttaaaatcaatccacacgcattacaggctgtttctcgtttagccggaaatgattatgctaaattagggggaatatttacgataaagagaccagaaaaataa

SEQ ID NO: 405621 - DNA, 360 bp, Staphylococcus aureus
atgattttgcgttacgcaacgaatttaaaacttgcgaaagagctataccaagccagtaaacctaaattgcaagaagataagggtatgattgaactgtttgaacatacttttggcttgcaaaaagaacttgtaaaatacgtcggcattgcagaagcaactactgctgctttatactcagctagctttatcaataaaaacatttctcgccttgcatcactatcaacgataggcattttaagtgtagctgcttacaaacatttcgaagctggccaaggtaaaaaaggtgcacaacatgcattaaatttattaggtcttgctactttaagtttactagatacattttcttgtaataaaaaatag

SEQ ID NO: 405622 - DNA, 303 bp, Staphylococcus aureus
atgagaacaaatgatcatataaccgatttagatgctattgagttaagtagcggttggaattacaattcgaaattggagactggcaaaaatgcactactatcagatagccttttaagagatattaaagtattaagttctaatgctaaaggcgacgctgacatactagaaacagaacttcgtgctgtaataaactcaatgtctcaaaacgaaggtaaatctgttgatgcacttaaaaatagtaccgcttctctaaaaaacaatctaaccaaattaaaagagcaactcgacaaaactacacattaa

SEQ ID NO: 405623 - DNA, 429 bp, Staphylococcus aureus
atgagcgaaaaacttcaagtaaaacaagaatttaacggcgttacaaggcaatacttgaatttcagaacagatagtatcgatgatctggataagttcaaaaaagaattcaaacctgttatgcacttaaaaggtgatgcattcaatcaacagttacaatctttgattaacaaatatccacaaatacaaaaaaatatgaaatcagagttcattgcttattatgataaagaaaaaaatagagaaacagtaaaaaactatgcttggaaccttcaaaaatctataaatgacattatgcaatcatatcctagcacaaaatttgtacagttttataaagatgatgtttccccgtcaatggtagatggaaatggccgtttaaaatcggatactaatgtaatttccatcgagggaggaaagtatgatgagaacaaatga

SEQ ID NO: 405624 - DNA, 693 bp, Staphylococcus aureus
atgaattattcgccaaaacaaggtgtaagaagtcatggtttaccgcacgacccatttaaaagtagtacagtaccacgtccaatagggtggatctctactgtatcgaaagatgggaaagataatttagcgccttatagtcagtatcaaaacttaacttgggatccgcctatggttatgttcgcagcaaatcaatccgttcttggtgatcacgaacgtaaagatacagtgaaaaatgctgaagagacaggttggtttgtgtggaatatggcaacgtatgatttaagagaagcagttaatttatcatcgaaagcattgccaccagaagaggatgaatttaattttgcaggtgtaacaaaggaaaaatgtatagaagctccaggatatcgtgtaaaagaatcgccagttcattttgaatgtgagtacgttcaaacgattcgtattccaactggagatccagtatctaccgtagatattgttataggaagagttgcccaagttcatattgacgataaggttattcttgataatggtaaattggacattaagtcgattaaacctattgccagattaggatattacgattacacagtagtgaatgagatatttgaaatgaaagcacctgcagcttctaaagaagagttagcaggtttagaaggaagaaatttcgataatcaatcagatgaaaagatataa

SEQ ID NO: 405625 - DNA, 6816 bp, Staphylococcus aureus
atgagtaaaagacagaaagcatttcatgacagcttagcaaacgaaaaaacaagagtaagactttataaatctggaaaaaattgggtaaaatccggaattaaagaaatagaaatgttcaaaattatggggctaccatttattagtcatagtttagtgagtcaagataatcaaagcattagtaaaaaaatgacgggatacggactgaaaactacggcggttattggtggtgcattcacggtaaatatgttgcatgaccagcaagcttttgcggcttctgatgcaccattaacttctgaattaaacacacaaagtgaaacagtaggtaatcaaaactcaacgacaatcgaagcatcaacatcaacagccgattccacaagtgtaacgaaaaatagtagttcggtacaaacatcaaatagtgacacagtctcaagtgaaaagtctgaaaaggtcacttcgacaactaatagtacaagcaatcaacaagagaaattgacatctacatcagaatcaacatcctcaaagaatactacatcaagttctgatactaaatctgtagcttcaacttcaagtacagaacaaccaattaatacatcaacaaatcaaagtactgcatcaaataacacttcacaaagcacaacgccatcttcggtcaacttaaacaaaactagcacaacgtcaactagcaccgcaccagtaaaacttcgaactttcagtcgcttagctatgtcaacatttgcgtcagcagcgacgacaaccgcagtaactgctaatacaattacagttaataaagataacttaaaacaatatatgacaacgtcaggtaatgctacctatgatcaaagtaccggtattgtgacgttaacacaggatgcatacagccaaaaaggtgctattacattaggaacacgtattgactctaataagagttttcatttttctggaaaagtaaatttaggtaacaaatatgaagggcatggaaatggtggagatggtatcggttttgccttttcaccaggtgtattaggtgaaacagggttaaacggtgccgcagtaggtattggtggcttaagtaacgcatttggcttcaaattggatacgtatcacaatacatctaaaccaaattcagctgcaaaggcgaatgctgacccatctaatgtagctggtggaggtgcgtttggtgcatttgtaacaacagatagttatggtgttgcgacaacgtatacatcaagttcaacagctgataatgctgcgaagttaaatgttcaacctacaaataacacgttccaagattttgatattaactataatggtgatacaaaggttatgactgtcaaatatgcaggtcaaacatggacacgtaatatttcagattggattgcgaaaagtggtacgaccaacttttcattatcaatgacagcctcaacaggtggcgcgacaaatttacaacaagtacaatttggaacattcgaatatacagagtctgctgttacacaagtgagatacgttgatgtaacaacaggtaaagatattattccaccaaaaacatattcaggaaatgttgatcaagtcgtgacaatcgataatcagcaatctgcattgactgctaaaggatataactacacgtccgtcgatagttcatatgcgtcaacttataatgatacaaataaaactgtaaaaatgacgaatgctggacaatcagtgacatattattttactgatgtaaaagcaccaactgtaactgtaggcaatcaaaccatagaagtgggtaaaacaatgaatcctattgtattgactacaacggataatggtactgggactgtgacaaatacagttacaggattaccaagcggattaagttacgatagtgcaacgaattcaatcattgggacaccaacaaaaattggtcaatcaacagtgacagttgtgtctactgaccaagcaaataacaaatcgacgacaacttttacaataaatgttgtggatacgacagcaccaacagtgacaccaataggagatcaatcatcagaagtgtattcaccaatatccccgattaaaattgctacgcaagataacagtggaaatgcggtgacgaatacagtgactggattgccatccggactaacatttgatagtacaaataatactattagtggtacaccaacaaacattggtacaagtactatatcaatcgtttctacagatgcgagcggtaacaaaacgacgacaacttttaaatatgaagtaacaagaaatagcatgagtgattccgtatcaacatcaggaagtacacaacaatctcaaagtgtgtcaacaagtaaagctgactcacaaagtgcatcaacgagtacatcaggatcgattgtggtatctacatcagctagtacctcgaaatcgacaagtgtaagcctatctgattctgtgagtgcatctaagtcattaagcacatctgaaagtaatagtgtatcaagctcaacaagcacaagtttagtgaattcacaaagtgtatcatcaagcatgtcggattcagctagtaaatcaacatcattaagcgattctatttcaaactctagcagtactgaaaaatccgaaagtctatcaacaagtacatctgattcattgcgtacatcaacatcactcagtgactcattaagtatgagtacatcaggaagcttgtctaagtcacaaagcttatcaacgagtatatcagggtcgtctagtacatcagcatcattaagtgacagtacatcgaatgcaattagtacatcaacatcattgagcaagtcagctagcacctcggactctatcagtatttcaaatagcatagccaactctcaaagtgcgtcaacaagcaaatcagattcacaaagtacatcaatatcattaagtacaagtgattcaaaatcgatgagtacatcagaatcattgagcgattcgacgagcacaagtggttctgtttctggatcactaagcatagcagcatcacaaagtgtctcaacaagtacatcagactcgatgagtacttcagagatagtaagtgactctatcagtacaagtgggtcattatctgcatcagacagtaaatcaatgtccgtaagtagttcaatgagcacgtctcagtcaggtagtacatcagaatcattaagtgattcacaaagtacatctgattctgatagtaagtcattatcacaaagtactagtcaatcaggttcaacaagtacatcaacgtcgacaagtgcttcagtacgtacttcggaatcacaaagtacgtctggttcaatgagtgcaagtcaatccgattcaatgagcatatcaacgtcgtttagtgattcaacgagtgatagcaaatcagcatcaactgcatcaagtgaatcaatatcacaaagtgcttctacgagcacatctggttcggtaagtacttcgacatcgttaagtacaagtaattcagaacgtacatcaacatctatgagtgattccacaagcttaagtacatcagagtctgattcaataagtgaatcaacgtcaacgagcgactctataagtgaagcaatatctgcttcagagagcacgtttatatcattaagtgaatcaaatagtactagcgattcagaatcacaaagtgcatctgcctttttaagtgaatcattaagtgaaagtacgtctgaatcaacatcagagtcagtgagtagttcgacaagtgagagtacgtcattatcagacagtacatcagaatctggtagcacatcaacatcattaagtaattcaacaagtggtagtacgtccatttcaacatcgacaagtatcagtgaatcaacgtcaacgtttaagagcgagagtgtttcaacatcactgagtatgtcaacgagtacaagtttgtctgactctacaagtttgtcaacatcattaagtgattccacaagtgatagtaagtctgattcattaagtacatcaatgtcgacaagtgattcaatcagtacaagtaaatctgattccattagtacatccacatcattaagtggttctacaagtgaaagtgaatccgactcaacatcatcaagtgaaagtaaatccgattcaacatcaatgagcataagtatgtctcaatcaacatcaggaagtacaagtacgtcaacgagtacaagtttgtctgactcaacgagtacatcattgtcactaagtgcctcaatgaatcaaagcggagtagactcaaactcagcaagccaaagtgcctcaaactcaacaagtacaagcacgagcgaatccgattcacaaagcacatcatcatatacaagtcagtcaacaagccaaagtgaatccacatcgacatcaacgtcactaagcgattcaacaagtatatctaaaagtacgagtcaatcaggttcggtaagcacatcagcgtcattaagtggttcagagagtgaatctgattcacaaagtatctcaacaagtgcaagtgagtcaacatcagaaagtgcgtcaacatcactcagtgactcaacaagtacaagtaactcaggatcagcaagtacgtcaacatcgctcagtaactcagcaagcgcaagtgaatccgatttgtcgtcaacatctttaagtgattcaacatctgcgtcaatgcaaagcagtgaatccgattcacaaagcacatcagcatcattaagtgattcgctaagtacatcaacttcaaaccgcatgtcgaccattgcaagtttatctacatcggtaagtacatcagagtctggctcaacatcagaaagtacaagtgaatccgattcaacatcaacatcattaagcgattcacaaagcacatcaagaagtacaagtgcatcaggatcagcaagtacatcaacatcaacaagtgactctcgtagtacatcagcttcaactagtacttcgatgcgtacaagtactagtgattcacaaagtatgtcgctttcgacaagtacatcaacaagtatgagtgattcaacgtcattatctgatagtgttagtgattcaacatcagactcaacaagtgcgagtacatctggttcgatgagtgtgtctatatcgttaagtgattcgacaagtacatcaacatcggctagtgaagtaatgagcgcaagcatatctgattcacaaagtatgtcagaatctgtaaatgattcagaaagtgtaagtgaatctaattctgaaagtgactctaaatcgatgagtggctcaacaagtgtcagtgattctggctcattgagcgtctcaacgtcattaagaaaatcagaaagtgtaagcgagtcaagttcattgagttgctcacaatcgatgagcgattcagtaagcacaagcgattcgtcatcattaagtgtatcgacgtcactaagaagttcagaaagcgtgagtgaatctgattcattaagtgattcaaaatcaacaagtggttcgacttcaacaagtacatctggttcattgagtacctcaacatcattaagtggttcagaaagcgtaagcgagtctacctcgctaagtgattcaatatcaatgagtgattctactagtacaagtgactccgactcattaagtggatcaatatctttaagtggttccacaagtcttagcacttcggattcattaagtgattcaaaatcattgagtagctcgcaaagtatgagtggatcagaatcaacgtcaacaagtgtgagcgattcgcagtcaagctcaacaagtaatagtcaatttgactctatgagcatcagtgcatcagaaagcgactcaatgtctacaagtgattcgtctagcatcagtggatcaaattcaacgagtacatcactttcaacatctgactcaatgagcggaagcgtatcagtttcaacatcgacaagtttaagtgactcaatatcaggttcaacaagtgtaagtgactcgagctcaacaagcacatctacatcattaagtgattcaatgtcacaaagccagtcaacaagtacaagtgcatctggttccttaagtacatcgatatcaacatcaatgtcaatgagtgctagtacatcgtcatcacaaagcacatcggtgtcgacatcattatcaacatcagacagtatcagtgattctacttcaataagtatcagtggttcacaaagtacagtagaatcagaatctacaagtgattcaacttctatcagtgactcagaatcattgagtacatcagattcagactcgacatcgacaagtacatcggactcaacaagtggttcaacttcaacaagcatatctgaatcattaagtacgtctggttcaggttcaacgagcgtatctgactcaacatcaatgagtgaatctaattcatcgagtgtttcaatgtcacaagacaaatccgactcaacatcaattagtgactcagaatcagtgtcaacaagcacatcaacgtcattgagcacatccgattcgacaagcacatccgaatcactgagtacatctatgtctggttcacaaagcatttctgactcaacatcaacaagtatgtccggctcaacaagtacatctgaatctaactcaatgcatccgtcagactcaatgagtatgcatcatactcacagcacgagcacatctcgcttatcaagtgaagcaacaacgagcacgagtgaatctcagtctacattaagtgcaacatctgaagtgactaaacataatggcacaccagcacaaagtgaaaaaagattgccagatacaggtgactcaataaaacaaaatggattactaggtggcgttatgacattattagttggtttaggtttaatgaagagaaagaaaaagaaagatgaaaatgatcaagatgattctcaagcataa

SEQ ID NO: 405626 - DNA, 1212 bp, Staphylococcus aureus
atgttaaaacttttacaacaatacgaatataaaattatatataaacgtatgctatacacatgttttatcttgtttatttatatattaggcacaaacatttccatcgtttcctataacgatatgcaagtaaaacatgagtcattttttaaaatagctatttctaatatgggtggagacgttaatactttaaacattttcactttaggattaggtccgtggttaacatcaatgattatcttgatgctgatttcttatcggaatatggataaatacatgaaacaaacaagtcttgagaagcattataaagagcgcatcttaacattaattttaagtgttattcaaagttattttgtgattcatgaatatgtttcgaaagaacgtgttcatcaagacaatatttacttaacaatattgattttggttactggaacgatgttattagtttggttagctgacaaaaatagtcgctacggcatcgcaggaccaatgccgattgtaatggttagtattattaaatcaatgatgcatcaaaaaatggaatatatagatgcaagtcatattgtgattgcgttgttaatcatccttgtgataatcacattgtttatcttattatttattgaattagtagaagtgagaataccatatatcgatttaatgaacgtttccgcaacaaatatgaaatcttatttatcttggaaagttaaccctgcaggcagtattactttaatgatgagtatttcagcttttgttttcttaaaaagtggcattcattttattttatctatgtttaataaaagcatatcagatgacatgccaatgctgacatttgatagtccagtaggtatttcagtatatttagtgattcaaatgttattgggttattttttatcgagatttttaatcaatactaaacaaaaatccaaagatttcttaaagagtggcaattatttttcaggagttaaacctggtaaggatacagaacgttatttaaattatcaagcacgacgcgtatgttggtttggattggcattagttacagtcattattggtataccgctttatttcacattgtttgtaccgcatttatctactgaaatttatttctcagtacaactgattgtattagtttacatcagtattaatattgcagaaacaattcgtacatatttatattttgataaatataagccatttttaaaccagtattggtaa

SEQ ID NO: 405627 - DNA, 1554 bp, Staphylococcus aureus
atgaaatactttattccagcttggtacgatgaccaacgatggtggcaagacacgactgtgccgtattatcaactacaaaataagacggaatttgacgatatgattagtttaatgggaatgcaccttgaaaatgacttagattatcaactgattgttctcaatcatgcaccaaatttaagaacatttttacatcgatatgacttatatgagacaaagtattcgtctgtgtttgatgaaattcaaggattcagtcaccatgcgccacaagcgattaattatcatcacttaaaatggccggatgatgttgagtttgtgtacacaccgtatttattaaaatgtgtgacgagtgaacagacctatacaaatatttattttagtcaagaagggtattcaatttggtttgaagaatttgaaagagatcagttacaacggcgttatatttttgatgacagaggttatttatcagcgatacgttattttgatgatcagggagaggcttcttaccaagaatatttaacgattaatggagattgtgtacttcatgaagatttgaaaaatggcagagtcactgtttcaaaaagatatcaacatcactatcaacaaacagaatataacaatatggctcaactaattgaagaaaaatttcaagcaatgattgcacaacaaatacatgaagatgatcatgtgattgtggcttcagatgctaggcacaatcgacaaatagccaatcatattccagcgaaatcattaagttattcattttttaaaaatagaaatgaaactgtgtcagatgaggaatatcaatctatcgtaaagaatgcccatttaattgttgatagtgtgcaactagaacgtgatttaattagtcatcaagagaagtatcagcgggagaatacaatgattcgaatcacaccatttgaaacgagacaatcacctaatataagtagtcaattgatggaaacatttataggtgtatggatagatggtatgagtgacgctgatttgcaacaaatgatgcaacgacttgtggattatatcgcacaggaagattattaccgtttaattttattatcgcgccatcaaaatgacataccgatgtggcttcgtgaatgtattacgtcggtaaatgaggaataccaagctaaacagaatgcggatgttaatgtttcagcattaatgacacctgaagatcaagatgacatcattgctgttaagacgatacatgctgaacatgatgttgtagaagcattgcggacgttgcgacttgtgatagatatgtcaaaagaacctgacttgtatttacaaattagtgcaattagcgctgggattccacaaattaatggtcaacaaacagattacgtctctgattatgacaatggccgtattataaatacagttgatgaattagatgatgcgttaaattattatttattttatttgaaaaattggaattatgcgtacgcctattctttaaaattaatagatgcatatgcttctaagaatattattaatcagctcgatgagttaatagaaggtgaaaatgatgccacgtaa

SEQ ID NO: 405628 - DNA, 1572 bp, Staphylococcus aureus
atgatgccacgtaaatttagagttttgcaaattggaggagacgatttagaacctatttttcaacacaaaaaaggtgtgagttgggattacttcgatattggattgtttgaatttgatagtggttatgtagaggctattgaagcgattgttgaagcagaagggcgctttgattttatctatattcaagcaccatactcggagacattaacgaatttattacaaatgataagcgaaccatacaatacgtatgttgatgaatcattttggtcagttgaatatgaacaagacgaaaatgtccaaaaatacgttgttcaaccattacattaccggaatattgaagaacgtaataataaattagaggcagttagcttctcaggacagtatggagataaggtttctcctaagttagcacttgtgcatccgaattttaaaggagatgtcgtttaccaaggtaattcagagctcacattgagtggagaatttgggaaagaatttaaacctatcgcatcttggcaaaataatctcgtttacgataaagataaagtcattcaaatatggccagaatttgatattgatggtgcggtcgagttgcaatatacatttagattgattcagactggcgctgatggtgcattaattgaacaaatcgtattgactgatgatatgttagacagtcctttagagatacctgcgaaaccatttgatgcttatataagtgtaactgttaaggcgcgtgggaacgggacggtacatttaggacctatacacaaacgatggtctagattagacatgggtcaatttttacttggtggtagtcgtttcgtagatagtcaacgacaggaatttatttattatttccaccctggtgatatgaaaccgccactaaacgtatattttagtggttatcgaacagcggaaggtttcgaaggatattatatgatgaaacgtatgaatgcaccgtttttacttatcggcgatcctcgtgttgaaggtggtagtttttatatcggttcatctgaatatgaacaagatattatcaatgttattgacgagacattagaaaagctgaattttaaatcacatgaattaatattatctggtttatctatgggttcatttggtgccttgtattatggtgctcagttaaatcctcaggcaattattgttggtaaaccacttgttaatattggaacgattgctgaacatatgcgattacttagaccagaagagttcggtacagcattagacgtcctggtgtctaatgaaggtgatacatctcaagcgtcgatacaggcattaaatcaaaaattttggcaaacatttcaaaagaaatcattgtcacaaactgtttttgccatagcatatatgcaacatgatgattatgatccacatgcatttcaagagctattacctgtattgacagcacaccaagcaagagtgatgaatcgcagtattcctgggcgacataatgatgattcacctaccattgcaagttggtttgttaatttttacaacattattttggaagacaagtttgggagagttcaacatgctgaaaaacaaaacatttaa

SEQ ID NO: 405629 - DNA, 960 bp, Staphylococcus aureus
atgctgaaaaacaaaacatttaaagttacttggaattatatttcacaaactacatttatgtatggctctaaagtatcattttcaaatggtgaagtgacttttataaatcctttgatgccctctggattaccgattcatgagtggttgatgttaaagcaattttcaaaatataaaagtgcgccaagtttaccaattttgcgtagaggacagcattataaattgcattttgattttgatgcaacgcctgctggttcagtgtattttatcatcattttttataataaaaatggcacaaaactaagtactgagattgtaaagtcaaatagtattacgattcaatatcctgatgaagcctatgcttataaaataaaaatgatgaatgcagcatcgacgagtcttatatttagatgtttaacaatcacagagatgacgcatcaatatgatttagagtataaaagcatgcgggtgacgaagataggcgatgaccaatatggaaatgatatgatcaatgtcattattgcagaaccatctgacacctatccaactatttcgaatgattttttgaaactgtttggtcatgtttggctcgttgaacgttggatggacgacaatatcgagggaaatattaagcaactaaagaatgatttgcaaagtcaagataccctaaaggctattaatttgattagttatgggtcaaagtcaaatgtttttgcaacttatgtcgctcagcatttgggttgcaaagtgtatcgtacaagccatgaagatgatgatttaaaaggatggcttacagaacatgtcccaggaaatcatgaactaaaagatacaaatgtcgaggtttattttaaagaagagcaagacaaacatctaaattatatgtcacgtttaatgaatccagtacgatttttagattacttagatgtatcgaaactgaatggtggggaagtaaatgaaacataa

SEQ ID NO: 405630 - DNA, 2391 bp, Staphylococcus aureus
atgaaacataaactagatgttacgataaacgaattaagactaaagtcgattagaaaaatagtgaaacgcatcaatacatggagcgatgaagttaaatcatattctgatgatgcgttaaaacaaaagacaatagaatttaaagaacgtttagcatcaggagttgatacactagatacattgttacctgaagcttatgcagtggcacgtgaagcgagctggagagtattaggtatgtatcctaaagaagttcagttaatcggagcgattgtattgcatgaaggtaacattgcggagatgcaaacaggcgaaggtaaaacattaacggcaacgatgcctttatatttaaatgctctttcgggaaaaggaacatatttaattacaacgaatgattatttagcgaagcgagattttgaagagatgcaaccattatatgaatggttaggtttaactgcttcattaggttttgttgatattgtggattatgagtatcaaaaaggggaaaaacgtaatatatatgaacatgatattatatatacaactaatggacgtctcggttttgattatttaattgataatttggctgatagtgcggaagggaaatttttaccacaattaaattacggtattattgatgaagtggattcaatcattttagatgctgctcaaacaccattagttatttcgggtgcaccaagattacaatcaaatctatttcatattgtgaaagagtttgtagatacattgattgaagacgtgcattttaaaatgaagaagaccaaaaaagaaatatggctgttaaatcaaggtattgaagcggcacaatcatactttaatgttgaagatttatatagcgaacaagcgatggtcctagtgcgtaatattaatttagcactgcgcgcacaatatttgtttgaatctaatgtcgattactttgtatataatggtgatattgttttaattgaccgtattacaggtcgtatgttaccgggaactaagttgcaagctggacttcaccaagctattgaagcgaaagaaggtatggaggtttcaacagataaaagtgttatggcaacaattaccttccagaatttatttaaactttttgaatcattttcaggtatgacagctacaggaaaattaggcgaatcagagttctttgatttgtattcaaaaatagtcgtacaagtaccaactgataaagcgattcaacgtatcgatgaaccagataaagtgtttcgttcagttgatgagaaaaacatcgcgatgattcatgatatagttgaacttcatgaaacggggcgaccggttttactcataacgagaactgctgaagcggctgaatacttttcgaaagtattattccaaatggatattcctaataatttactcattgcgcaaaatgttgcaaaagaagcgcagatgatagctgaagcagggcaaattggttccatgactgttgcgactagtatggcaggtcgaggcacagatattaaacttggtgaaggtgtcgaagcattaggtggattagctgttattattcatgaacatatggaaaatagccgtgtagacaggcaattacgtggtcgttctggtagacaaggggatccgggatcatcttgtatatatatttcactagatgattatttagttaagcgatggagcgatagtaatttagcggaaaataatcaattatattcattagatgcacaacgattatcgcaaagtaatttgtttaatcgcaaagttaagcaaattgtagttaaagcgcagcgtatctcggaagaacaaggggttaaagctcgtgaaatggctaatgaatttgaaaaaagcattagtatacagcgagatcttgtatacgaggaacgcaatcgagttttagaaatagatgatgctgagaatcaagattttaaagcgttagctaaagatgtatttgaaatgtttgtaaatgaggaaaaggtgctaacaaaatcgcgtgttgtcgagtatatttatcaaaatttaagtttccaatttaataaagatgtggcttgtgttaattttaaagataagcaagcagtagtgacatttttattagagcaatttgaaaagcaattagctttgaatcgtaaaaacatgcaaagtgcatattattataatattttcgttcaaaaagtctttttgaaagcaattgattcatgttggttagaacaagtcgactatttacaacaattaaaagcaagcgttaatcaacgacaaaatgggcaacgtaacgctatttttgaataccatagagttgccttagattcatttgaagttatgacacgaaatatcaaaaaaagaatggtgaaaaatatttgtcaaagcatgattacatttgataaagagggtatgccagttatacattttccataa

SEQ ID NO: 405631 - DNA, 1509 bp, Staphylococcus aureus
atgacaatatataatataaactttggtataggctgggcgagtagcggtgttgaatatgcacaagcttaccgtgctaaattattgagacgtacaaatcaagacactaaatttgtgtttttagattttatacagtcagagaacatacagacattaacgcaaaacattgggtttaaagatcaagaagttatttggttgtatcagtattttagtgatatttctttagcaccaacaacgtacacgttagatgacattgaacgtgagcttggtcatgacattagttttagagaaagaaatggtaagatagtccgcctatattttaatgggaaatcatcatttgtaacatgttatctgcaaaatgaacaaaaagatattgtggatcgtgcagaatttgtaattaatagtatgttagtacgtaaagatttttatagttatacgcgcatattttctgagtattatgcaccagctgataataaagcgaaattatatatgcgacaattttataatcaagatggttccatcgcttataacgaatatattgatggagacagctctatatatgtgtttgaagatgcggtgttgtataacaaaacggaatttattgcatactttttacaacgattgaatttaacccgagacgatattgtcatattagaccgcgcttctgatattggtcaggctgttttgcagcataaaggtgatagtaaagttggtgttgtgattcatgctgatcattatagtaataatatgatgagtgagcagcatatactatggaacaattattatgaatatcaattttcaaaagctaaatacattgatttctttattacagcaacagatattcaaaatcatatggtttgtcgacaatttgagcaatatcaaggttatcgcccacgtgtttatactattcctgtgggaagcattgatgcattatcatatccaacattatcaagaaagccatatgcgatgattagtgcatctcgtttagcgaatgagaaacatattgattggcttgtcaaagcggttatcgtggctaaacgacaagtgccagaattaacatttgatatttatggagaaggtagcgagaagacgcgactgcgtaaaattattgatacacaccgcgcacaagattatattcgtttactagggcatgttaaacttgatgaaatttataatgattatgagttatttctttctgcatcaactagcgaaggttttgggttaacactaatggaagcggtaggctcaggactaggtatgattggattaaatgtgaattatggtaacccaacctttattcgagatggggaaaatggctacttggtaccttttgataccgacgaagatagtgtggatgatgttatcgcaaaactagctcatgccattgtaatgtattttaacaatggtccccagacaccacatgacatctcttatgaagtggcacagcaatttatgactcaagatattattttaaaatgggaaacattagttcaagaggtgctacatgattaa

SEQ ID NO: 405632 - DNA, 1359 bp, Staphylococcus aureus
atgattaaattatttgattactttaacgatcattcacgaaagttatatgagtcttttaaagccagtaagttggaagaagatttaacaattgtactcaatgacaatggctttttaccggacgatgttatatcaccgtatcaattttttgcagataatcataatacagaaaatatgaaaccacgattttttaatcaggttactgtaccagctttttgggaaattaaaggtaacaacaattcggctacaattaatgatatgggacgtctacgaggtaaaatattttatcaaagtggagagcgccctagaattgttagtcgtgtcgaatggtttgatgaccaacaacgtgtccgatttgtcgattattattctaagaatggtattaaatttgcacaaactgtttacgatttaaatcgtaaagcgatcttgaagaaatatatgacagcagaaggtaaagaagtgatttatgaaaattttgtaacatctgatgtcatattggattggcaagggaagtcttactttttcccttcaaagctcgcattcgcattattttttatcaagcaacttgaaattacggaacatcatttcgttattaactcactagccctaccattttcagtgttatataatttgccatcaaaaggtagtgatgttttggtatggcaagaacactgtaatggtaatgtcccgggaaatatgcaattgatgtgtaaaggtgatatgaaacgacattgtaatattattattccagataaaaacgaatatgaaacgatgctcaatatagcagacgcaaaggttcaatctcgtattttacaaggcggatatctatataactatcgtagtcgtaatagatatactaaagaaattgtaatattaactaactcggatcaacttcgtaacatcaaggtattggttgaaactttaccagattttaagtttcacatcgctgctattacagagatgtctgataagctaatgcaacttgatcaatatgctaatgtgcatttatacccatctattaatattgacagggtaaatgaactataccagttatgtgatatttatcttgatatcaatgagggtaatgaaattttaaatgcggtggaacaagcgtttgactatgagttgttgattttaggttatcgtcaaaccgcacaccatgctaaagtaacattatcagagcacttatttgagcataatgatgagataacaatggaaagtaaagaccaattaatacaaatgttagaaagtttgaaagatcaacaacagtttcgagatgctttattagcacaaaaagcacatgcacacgaaatctcgcgtgaacaattcgagcaagtttttaaacaggcgctcgaaagctaa

SEQ ID NO: 405633 - DNA, 1908 bp, Staphylococcus aureus
atggctaaatatcgagggaaaccgtttcaattatatgtaaagttatcgtgttcgacaatgatggcgacaagtatcattttaacgaatatcttgccgtacgatgcccaagctgcatctgaaaaggatactgaaattacaaaagagatattatctaagcaagatttattagacaaagttgacaaggcaattcgtcaaattgagcaattaaaacagttatcggcttcatctaaagaacattataaagcacaactaaatgaagcgaaaacagcatcgcaaatagatgaaatcataaaacgagctaatgagttggatagcaaagacaataaaagttctcacactgaaatgaacggtcaaagtgatatagacagtaaattagatcaattgcttaaagatttaaatgaggtttcttcaaatgttgataggggtcaacaaagtggcgaggacgatcttaatgcaatgaaaaatgatatgtcacaaacggctacaacaaaacatggagaaaaagatgataaaaatgatgaagcaatggtaaataaggcgttagaagacctagaccatttgaatcagcaaatacacaaatcgaaagatgcatcgaaagatacatcggaagatccagcagtgtctacaacagataataatcatgaagtagctaaaacgccaaataatgatggttctggacatgttgtgttaaataaattcctttcaaatgaagagaatcaaagccatagtaatcgactcactgataaattacaaggaagcgataaaattaatcatgctatgattgaaaaattagctaaaagtaatgcctcaacgcaacattacacatatcataaactgaatacgttacaatctttagatcaacgtattgcaaatacgcaacttcctaaaaatcaaaaatcagacttaatgagcgaagtaaataagacgaaagagcgtataaaaagtcaacgaaatattattttggaagaacttgcacgtactgatgataaaaagtatgctacacaaagcattttagaaagtatatttaataaagacgaggcagttaaaattctaaaagatatacgtgttgatggtaaaacagatcaacaaattgcagatcaaattactcgtcatattgatcaattatctctgacaacgagtgatgatttattaacgtcattgattgatcaatcacaagataagtcgctattgatttctcaaattttacaaacgaaattaggaaaagctgaagcagataaattggctaaagattggacgaataaaggattatcaaatcgccaaatcgttgaccaattgaagaaacattttgcatcaactggcgacacgtcttcagatgatatattaaaagcaattttgaataatgccaaagataaaaaacaagcaattgaaacgattttagcaacacgtatagaaagacaaaaggcaaaattactggcagatttaattactaaaatagaaacagatcaaaataaaatttttaatttagttaaatcggcattgaatggtaaagcggatgatttattgaatttacaaaagagactcaatcaaacgaaaaaagatatagattatattttatcaccaatagtaaatcgtccaagtttactagatcgattgaataaaaatgggaaaacgacagatttaaataagttagcaaatttaatgaatcaaggatcagatttattagacagtattccagatatacccacaccaaagccagaaaagacgttaacacttggtaaaggtaatggattgttaagtggattattaaatgctgatggtaatgtatctttgcctaaagcgggggaaacgataaaagaacattggttgccgatatctgtaattgttggtgcaatgggtgtactaatgatttggttatcacgacgcaataagttgaaaaataaagcataa

SEQ ID NO: 405634 - DNA, 561 bp, Staphylococcus aureus
atgtctcgaaaaacggcgctattagttttggatatgcaagaaggtatagcgagtagtgtacctagaataaaaaatattattaaagcgaatcagagagcaattgaagcagcaagacaacatcgaataccagtcattttcatacgtttagtgttagataagcattttaatgatgtctcctcgagtaataaagtgttttcaacaattaaagctcaaggatatgcgattactgaagcagatgcatctacacgaatacttgaagatttagcaccactagaagatgagccgattatttctaagcgacgctttagcgcatttacaggtagttacttggaagtttatttacgtgcaaatgatattaatcatttagtattaacgggtgtctctacaagtggagctgtattgagcacggcattagaaagtgtagataaagactattatattactgttttagaagatgctgttggtgatagatcagatgataaacatgactttattattgaacaaattttatcacgctcatgtgacattgaatccgtagagtcatggaaaagtagtttatag

SEQ ID NO: 405635 - DNA, 1860 bp, Staphylococcus aureus
atgcctaaaaataaaattttaatttatttgctatcaactacgctcgtattacctactttagtttcacctaccgcttatgctgatacacctcaaaaagatactacagctaagacaacatctcatgattcaaaaaaatctaatgacgatgaaacttctaaggatactacaagtaaagatattgataaagcagacaaaaataatacaagtaaccaagacaataacgacaaaaaatttaaaactatagacgacagcacttcagactctaacaatatcattgattttatttataagaatttaccacaaaccaatataaaccaattgctaaccaaaaataaatacgatgataattactcattaacaactttaatccaaaacttattcaatttaaattcggatatttctgattacgaacaacctcgtaatggcgaaaagtcaacaaatgattcgaataaaaacagtgacaatagcatcaaaaatgacactgatacgcaatcatctaaacaagataaagcagacaatcaaaaagcacctaaatcaaacaatacaaaaccaagtacatctaataagcaaccaaattcgccaaagccaacacaacctaatcaatcaaatagtcaaccagcaagtgacgataaagcaaatcaaaaatcttcatcgaaagataatcaatcaatgtcagattcggctttagactctattttggatcaatacagtgaagatgcaaagaaagcacaaaaagattatgcatctcaatctaaaaaagacaaaaatgaaaaatctaatacaaagaatccacagttaccaacacaagatgaattgaaacataaatctaaacctgctcaatcattcaataacgatgttaatcaaaaggatacacgtgcaacatcattattcgaaacagatcctagtatatctaacaatgatgatagcggacaatttaacgttgttgactcaaaagatacacgtcaatttgtcaaatcaattgctaaagatgcacatcgcattggtcaagataacgatatttatgcgtctgtcatgattgcccaagcaatcttagaatctgactcaggtcgtagtgctttagctaagtcaccaaaccataatttattcggtatcaaaggtgcttttgaagggaattctgttccttttaacacattagaagctgatggtaatcaattgtatagtattaatgctggattccgaaaatatccaagcacgaaagaatcactaaaagattactctgaccttattaaaaatggtattgatggcaatcgaacaatttataaaccaacatggaaatcggaagccgattcttataaagatgcaacatcacacttatctaaaacatatgctacagatccaaactatgctaagaaattaaacagtattattaaacactatcaattaactcagtttgacgatgaacgcatgccagatttagataaatatgaacgttctatcaaggattatgatgattcatcagatgaattcaaacctttccgtgaggtatctgatagtatgccatatccacatggccaatgtacttggtacgtatataaccgtatgaaacaatttggtacatctatctcaggtgatttaggtgatgcacataattggaataatcgagctcaataccgtgattatcaagtaagtcatacaccaaaacgtcatgctgctgttgtatttgaggctggacaatttggtgcagatcaacattacggtcatgtagcatttgttgaaaaagttaacagtgatggttctatcgttatttcagaatccaatgttaaaggattaggtatcatttctcatagaactatcaacgcagctgccgctgaagaattatcatatattacaggtaaataa

SEQ ID NO: 405636 - DNA, 2982 bp, Staphylococcus aureus
atgaagaacgcatttaaattatttaaaatggatctgaagaaagtagctaagacgccagctgtgtggattatcttagcaggcttagctattttgccatcgttctacgcttggtttaacttatgggcaatgtgggatccatatggcaacacgggacacatcaaggtcgcagtcgttaatgaagataaaggcgacacaatcagagggaaaaaagttaatgtcggtaatacgatggttaatacactcaagaaaaataaaagttttgattggcagtttgtaagtagagagaaagctgatcatgagataaaaatgggtaaatattttgcaggtatttacatcccatctaagtttacacatgaaattacagggacactacgtaagcagcctcaaaaagcagatgtagaatttaaggtgaatcagaagattaacgctgttgcgtctaagctaacagatactggttcgtcagttgtcgttgaaaaagcgaatgaacaatttaataaaacagtaactcgagcattattagaagaagctaacaaagcaggtttaactattgaagaaaatgtgccgacaattaacaagataaaaaatgcggtatattcagcagataaagctttacctaagattaatgactttgcgaataaaattgtatatttgaataaccaccaagcggatttagataaatatgccaatgattttagaaaactaggaaattataaaggtgatattttagatgctcagaaaaaattaaacgaagtcaatggtgctattccgcaacttaatgaaaaggctaagttgatattagctttaaataattatatgccgaaaattgaaaaagcgttaaattttgcagctgatgacgtgccagcgcagttccctaaaattaatcaaggacttaacattgcgagtcaaggtattgatcaagctaatggacagttaaatgatgccaaaggcttcgtcacacaagttagaagtagagtcggtgattatcaagatgcaattcgacgcgcgcaagatttaaatcgaagaaaccagcaacagattcctcaaaatagcgcggcgaacaacgaaacatcaaatagtgcacctgcagctggtaatggtgtagcatcaacgccaccaagtgcaccaagtggcgatactgcaccaaataataatgttacgcaaaataccgcaccaaatagtaataatgcgcctgtatcgactacaccacaaagtacaagcgggaaaaaagatggtcaaagttttgtagatataacaacaacacaagtcagcacagctaacgagaacacacaaaacattacagataaagatgttaaatcaatggaagcggcattaacgggctctttattatcattatcaaataatttagatacccaagcgaaagccgcacaaaaagatagtcaggcattacgtaatatttcgtatgggattttagcatcggacaagccttctgattttagagagtctttagataatgttaagtccggtttagaatacacaacgcaatataatcaacaatttatcgatacattaaaagagattgagaagaatgaaaatgttgatttatcaaaagaaattgataaggtaaaagcagctaataatcgaattaatgaatcattaaggttagttaatcaattaagcaatgcattaaagaatggtagttcaggaactgctgaagctactaaattactagatcaactttcaaaactagattcatcattatcatcatttagagattatgttaaaaaagatcttaacagctctttagtatcaatatcacaacgtattatggatgaattgaacaaagggcaaactgcattatccaatgttcagtctaaattaaatacaattgatcaagtcattaacagtggacaagctattttaaaaaatggtaaaacacgtattgatcgcttacaaacagtattaccaagtattgaacaacaatacattagtgctgttaaaaatgctcaagcaaacttctcgaaagtgaaaagtgatgtagctaaagctgctaactttgtgcgcaatgacttaccacagttagaacagcgattaactaatgcgacagcaagtgtgaataaaaatttaccaacgttattaaatggttatgatcaagcggtaggattactaaataaaaatcagccacaagcgaaaaaggctttatcagatttagctgatttttctcaaaataaattgcctgatgttgaaaaagatttgaaaaaagcgaataaaattttcaagaaattagacaaagatgatgcagtcgacaaattaatcgacacacttaagaatgatttgaaaaagcaagcgggtattattgcaaatcctattaataagaagactgttgatgttttcccagttaaggattatggttcaggtatgacaccattctatactgcactgtcagtatgggtaggtgcactcttgatggtaagtttattaacggttgataataaacataagagtctagagtcagtcttaacgacaagacaagtgttcttaggtaaggcaggattctttataatgcttggtatgttgcaagcactcattgtatcggttggagatttgttaatcctaaaagcaggagttgagtcacctgtattatttgtacttataacgattttctgttcgattattttcaactcaatcgtatatacgtgcgtatcattacttggtaacccaggtaaagccattgcaatcgtattgcttgtattacaaattgcaggtggtgggggaacattcccaattcaaactacgccacaatttttccaaaacatttcgccatacttaccatttacgtatgcaattgattcattacgtgaaacagtaggcggtattgttccggaaatcctaattacaaaattaattatattaacgttatttggtataggattcttcgttgtaggtttaattttaaaacctgtaacagatccattgatgaagcgcgtatctgaaaaagttgaccaaagtaacgttacagaataa

SEQ ID NO: 405637 - DNA, 939 bp, Staphylococcus aureus
atggcattatttttacaacccgtttttaaagacagaatttggggcggtcatgcattaaaagcatttaactatgatatccctaatgaaacaactggtgaatgctgggcaatttctgcacatccaaatggtcctaatacaattatcaatggtccatacaaggatatgaccctagatcaactttggtcacaacatcgtgaattattcgataatgattcacgagatagtttccctctgctaactaaagtattagatgccaatgataaattatctgttcaagttcacccagatgatgactacgctttaaaacacgaaggcgaactaggtaaaacagaatgttggtatattttagatgcagccccaggtgctgaaattatatatggcgtacatgcacataataaacagacgttaatagacatgattgataatcatgaatttgacagtcttttcaaacgtatacctgttaagcccggtgacttttattatgttcctgctggcactgtccatgccattggttcgggtattttaattttagagacacaacaatcctccgatacgacataccgtatttatgactatgatagacgagatcaaaatggtcaattgcgtgatttgcacttagagcaaagtaaagatgtgattgaattaggcaatcatgaaccaaatactactcctataacaactcacatcgacacacacactgtaactcaatttgtagataatcaatattttgcagtatataaatgggatattcatggagatttaaaattcaataaaccacatgcttattgcttagttacaattatcgatggtactggtactttaacagtaaacgataagcactatgacatccaaaaaggttctagctttattttaactacggaagacgaggatattcactttgtcggtaatattagtgctatagtaagtcatcctggataa

SEQ ID NO: 405638 - DNA, 1953 bp, Staphylococcus aureus
atgaaaattgtagctattacctcatgcccaaatggcattgcacatacatatatggctcaagaaaagcttgagcaggtagcaaaagaaatgggtgtggatattaaagtagagacacagggcggtgttggtgctgaaaatgttttaactacgcaagacatcgaagaagctgacggtgtcataattgcagctgataaacaagttgatctgtcccgatttgttggtaaacggttgattaatgaaaatgttcgcgaagggattcataatccgagaggtctaattcaacgtatcattaatcaagatgcgcctatttatcaatctgaaacaaattatcattcgaaagatcgcggtaagtctaaaagtggtattcaaatggtgtatcaacatttaatgaacggtgtatcgtttatggttccttttatcgtagttggtggactccttatcgccatcgcgctgactctaggcggtgaaacgacatcaaaaggattagtcatcccagatgattcattttggaaatccattgaaaacattggtagtttagcctttaaatttatggttccaatactagctggatatatcgctgttagtatcgctgacaagcccggtcttgttcctggtatgattggcggcgctatcgctgctgacggtagtttttatggcagtgatgcaggcgcaggatttttaggtggtattgttgctggtttcttagcaggttatatcgcaaagtggattaaagatattaaagttccaaaagcaatggcaccaattatgcctatcattattattcccattatttcatcggtcgttgtaggattgatatttatatttttaatcggtgcaccaatttctaatatttttgaggcattaacaacctggttaaaaagtatgcaaggtgctaatattattatacttgcgatgattataggtgcgatgattgccttcgatatgggcggtccagtaaacaaggtagcatttttatttggctcagcacttattgctgaaggtaattacgccgttatgggtatggtcgcagttgctgtatgtacaccaccaatcggtttaggtttagcaacgtttgttcaaaagtataaattcaatcattccgaaagagaaatgggtaaggcttccttcactatgggactatttggtattactgaaggtgctattcctttcgcagcccaagatccattgcgcattatacctgcaaacatcattggtgcaatgattgcatcagtcattgcagccattggtggtgtcggcgatagagtcgcacatggaggtccaatcgtggctgtattaggtggtattgatcatgtattatggtttatctttgcagtgatagtaggtagtcttgtcacaatgactactgtactattattaaaacgcaatacaccagttatagcagtagatgcaccagcgcaacacacgcaacttcatgatacagatattacacaacatgatacagaggttgacaatgtagataacaccgcgaaacattcacatctcaataaaccttctcatgtttttgatcaacaaactatgataattactgatcacgacatgtctcgaaacgaagcaattgatatgttgattcataaacttaaaatttgccgttatgtagagcacacatcgcatttaaaaaatgcaatactagaacgtgaaatggagtctacgacagctattggcatgaacgtggccattccacatgcaaagtctgatgttgtaaaacaaccgattgtagctgttatgaaaaataatcatggtgttaaatgggacagtctagatggtagtctacctcaattgatattcttaattgccgtaccaaacaacagtcaggatacacatttaaaaatacttcagcgcttatctaaagcgttaatgaatgatgagacacgccaatcactaattaatgcaaacagtactacagaaatttataacttattaatgaaaatatag

SEQ ID NO: 405639 - DNA, 1875 bp, Staphylococcus aureus
atgcttgatagacacttaaaactactccagttttttattaaaaatccatcaaagcacattagttctaatgaaattgctaaacatgtcaatgtttcaaaccgcacagttcgcaatgatatccatgttatcaatagcaattttatggatgatatcatcgtaagtattaaatctaaaggatatcaattaaatacatctcagtataccttagaaacgataactgaacgttacacgcatattcaatcatataaagaaaaactattattatctatggcgtatcaactgctaatgcacaataaatcgcagacattgcaacaactagagcaagattatctattatctaaaactgtgctcaacgactatttcgttcgaattcaacaatggtgtcaaaaatttaatatcgctttaacaatcaagaaaaaacaaggtattgtggtcgatggaacagataatgatatcactaatgccatcatccatttaaatcaattatcatcagggcatgtacatgttgaagacctaattttaaatgaattacctgattcacaccaaaggatgatttcgcatattatacaagagacacttcaacaacatagtattgaaacaactgatattcaaatacaacagcttttaattcatctcattttaatcattaaacgtaagcaatctttaagtgagctagacacgttaaaccacgattcaaaattgatatctcaatcttgcattaagcaaatcaacgaaagattaggttatgacttgaacgaaaaagtaatcaatatgttttcattctttattgcttatcattttaataaactcgatattggcatagaacgtatatttatacaaagttatattgatcgcttaatcgaattgatgcagcaacgtattcatgtacctttcaatgaagattcgattttacaacaaaatttatataatcattttagtaaagcatatttacgtatcactcaaaacatttatttaaacaatcctttagttatagagattaaaaaactctatccctttgtgtttaacacactttttgaagcgattgataaattagcaattgatactgatatagagatgagcgaagatgaaattgcatttttaacaattcattttcaagctgccatcgagcgtcgtaccaaaacacaattaaatgtagtcattgcttgttattatggtctaggtgtgtcgaattttttagaaactaaaataaataacttatccgaagagttgtcagtgataaatacgattaaactagaaaatataacacactatcactttgacaatgtagatttattaataacgacccatgatattcctaaacaaacgctaaacatacttcctaagcacctgacgactatcaaggttgcaccattattttctgaagatgatcgtcacaaaatcagacacgttgtgaagcaaaagcaaaatccggttcaagcacatcatcatatggacactgtcaatttccttgtcgtaaatactgaacaaaaatcacggcatactgtgcaaatttttgaagaagctcaaaaaatattacaagcacatcatgcgattgtagaaggatatatcgaatcagctttagagcgtgagaaatcatcttctacatacataggtaattttatggcgattcctcatggagatcctgaaaaagttttacaatcacatgtgcttatttttcgcacaaaagatgtttttccttggcgacaacacgatgtcaaacttgtctttttcttagcgatttcgcataaagacaaagcttttacaaaacaaatgatgcaattaattgctaacttggatgatgattcagtgaaccatttatgtagtttagatgatcatagtttaaagcaacagttatttgaatacttacaagaataa

SEQ ID NO: 405640 - DNA, 459 bp, Staphylococcus aureus
ttgaaaaaacttcttattaccatcgtaattatcgtattaatcggagcacttgggttcgcaatttatgctgcaataaatcattctacatcatcaagtaataaccaagaacaagaaaataaatctacgcataaaaagacagaaaccgaagaaaatgatcaacaagatgatagtgcagacaaaacagataaaaatcaaaataatggcaataacgttactaatgacaatcaaccatcttcaccgtcaaatgttcctaacaaccattcaacagtaccatcgaatacgcaaccagctcagccaaaagactcaaattcaaataaaaataatactcacggtggtggcagtcaatcgtcaacaaacaaccaaaataatcaacaacagaacacaccacctgctaataaatcaaataataccaatacgccttctaaacaaacacctcaagcacaatcacctaaaaattaa

SEQ ID NO: 405641 - DNA, 528 bp, Staphylococcus aureus
atgaataaaaccagtaaagtttgtgtagcagcaacattagcattgggcacactgattggagtaacagttgttgaaaattcggcgccaacaagtaaacaggcacaggcagcaataaccccatattatacttataatggttatattggtaataatgctaattttattctggataagaattttattaacgcgattaagtatgataatgtgaaattcaatggtattaaattagctaaaacgaatacgataaaaaaagtagagaaatatgatcaaacttttaaaggtgtttctgcaaaaggaaacgaagcaagtcaattgcaatttgtagttaaaaataatatttcattaaaagatatccaaaaagcttatggcaaggacttgaaaaaagaaaatggtaaaacaaaggaagctgatagcggtattttttactatcaaaatgctaaaaagacattaggcatctggtttgtcgttgatcataatagagttgtcgaagtaacagttggacatacaccatacaaaacaagtaaataa

SEQ ID NO: 405642 - DNA, 1530 bp, Staphylococcus aureus
gtgaggaaattttcaagatatgcatttacaagtatggcagcattaaccttgttgagcactttatcaccagcagcattagcgattgattcaaaaaataaaccagctaattctgatattaaatttgaggtgactcaaaagagtgatgcggtcaaagcattaaaagaattgcctaaatccgaaaatgtaaaaaatatttatcaagattacgctgttactgatgtaaaaactgataaaaaaggatttacgcattatacattgcaaccgagtgttgatggtgttcatgcacctgacaaagaagtgaaagtacacgcagacaaatcaggaaaagtcgttttaatcaatggggatactgatgcgaagaaagtaaagccaacgaataaagtgacattaagtaaagatgacgcagccgacaaagcatttaaagcagttaagattgataagaataaagcgaaaaatcttaaagataaagtcattaaagaaaacaaagttgaaatcgatggtgacagtaataaatacgtttataatgttgagttaattacagtgacaccagaaatttcacattggaaagttaaaattgatgctcaaactggcgaaattttagaaaaaatgaacttagttaaagaagctgcagaaactggtaaaggaaaaggtgtacttggcgatacaaaagatatcaatatcaatagtattgacggtggatttagcctagaagatttaacgcatcaaggtaaattatcagcatttagctttaatgatcaaacaggtcaagcaacattgattactaatgaagatgaaaacttcgtaaaagatgagcaacgtgctggcgtagatgcaaattattacgctaaacaaacatatgattattacaaagacacatttggtcgtgaatcatatgacaaccaaggtagtccaattgtttcattaacgcatgttaataactacggtggtcaagataacagaaataatgccgcatggatcggtgacaaaatgatctatggtgatggtgatggtcgcacattcacaagtttatcgggtgcaaatgacgtagtagcacacgaattaacacacggtgtgacacaagagacagcgaacttagaatataaggaccagtcaggcgctctaaatgaaagcttttcagatgtttttggatactttgtagatgacgaggatttcttaatgggtgaagatgtctacacacctggaaaagagggagacgctttacgcagcatgtcaaacccagaacaatttggtcaaccagctcatatgaaagactatgtattcactgaaaaagataatggtggcgtacatacgaattctggaattccaaataaagcagcttataacgtgattcaagcaatagggaaatctaaatcagaacaaatttactaccgagcattaacggaatacttaacaagtaattcaaacttcaaagattgtaaagatgcattataccaagcggctaaagatttatatgacgagcaaacagctgaacaggtgtatgaagcatggaatgaagtaggcgtggagtaa

SEQ ID NO: 405643 - DNA, 450 bp, Staphylococcus aureus
atgaagaaaagtaaacgattagaaattgtttctacaatagttaaaaagcataagatttataaaaaagaacaaatcatttcatatattgaagaatattttggtgtaagatatagtgcaacaacaattgctaaagacttgaaggaactaaatatatatcgtgtccctatcgattgtgagacatggatttataaagctattaataatcaaacagaacaagagatgagagaaaagtttagacactattgtgaacatgaagttctaagttcaatcatcaatggttcatacattatcgtcaaaacctcacctggtttcgcccaaggcataaactattttatcgatcagctaaatatagaagagatattaggtacggtgagtggaaatgacactacattaatcttaactgcctcaaatgatatggcagaatacgtatatgcaaaattatttaaatag

SEQ ID NO: 405644 - DNA, 1236 bp, Staphylococcus aureus
atgacagatggtccaattaaagtaaatagcgaaattggagctttaaaaactgtgttacttaagcgtcctggaaaagaattagaaaatttagtacctgattatttagatggattactatttgatgatattccatatttagaagtagctcaaaaagagcatgaccattttgcgcaggtgctaagagaagagggtgttgaagtactttaccttgagaagttagcagctgaaagtattgaaaatcctcaagtaagaagtgaatttattgatgatgtattagcagagtctaaaaaaacaatattaggtcatgaagaagaaattaaggcattatttgcgacactttctaatcaagaacttgtagataaaataatgtcaggggtacgtaaggaagaaattaatccgaaatgtacacatctagtagagtatatggatgataagtatccattctatttagatccaatgccaaacctttattttactagagatccacaagcctcaataggacacggtataacaatcaatcggatgttctggagagcacgacgacgagaatcaatatttattcaatatattgtaaagcatcatcctagatttaaagatgcgaatattccaatctggttagatcgagattgcccattcaatattgaaggcggcgatgaacttgttttatctaaagatgtcttggctataggcgtttcagaacgtacatctgcacaagctattgaaaagttagcgcgacgtatttttgaaaatccgcaggcgacgtttaaaaaagtagtagcaattgaaattccaactagtcgaacttttatgcacttagatacagtatttacaatgatagattatgacaaatttacaatgcattcagccattttaaaggcagaaggcaatatgaatatatttattattgaatatgatgacataaataaagatattgccatcaaacaatctagtcatttaaaagatactttagaagacgtactaggtatagatgatatccaattcattccaacaggaaatggtgatgtcattgatggtgctagagagcaatggaatgatggctcaaatacattatgtataagaccaggcgttgtagtgacttacgatagaaactatgtatcgaatgatttattgagacaaaaaggcattaaagtcattgaaatatctggtagcgagttggtacgtggacgtgggggccctagatgtatgagtcaaccattattcagagaagacatttaa

SEQ ID NO: 405645 - DNA, 1011 bp, Staphylococcus aureus
atgacagaaattcaaaaaccgtatgatttaaaaggcagatcattattaaaagaaagtgattttaccaaagcagaattcgaaggacttattgattttgcaattacattaaaagagtataagaaaaacggtattaagcatcactacttatctggaaaaaatattgcactactattcgaaaagaattcgacgagaacgcgtgctgcgtttacagttgcgtctattgatttaggtgcgcatccagaatttttaggaaaaaatgatattcaattaggcaaaaaagaatctgtagaggatactgcgaaagtattaggtagaatgttcgatggtattgaattccgtggtttttcacaacaagctgttgaagatttagcgaagttctctggtgtaccggtgtggaatggattaacagacgattggcatcctacacaaatgttagctgattttatgacaataaaagagaattttggatatctagaaggaataaacttaacttacgttggagatggacgtaataatattgcgcattcattaatggtagcaggtgctatgttaggtgttaatgtaagaatttgtacacctaaatcattaaatccaaaagaggcatatgttgatattgcaaaagaaaaagcgagtcaatatggtggttcagtcatgattacggataatattgcagaagcagttgaaaatacagatgctatatatacagatgtttgggtatcgatgggtgaagaaagtgaatttgaacaacgtattaatttattaaaagactatcaagtgaatcaacagatgtttgatttaacaggtaaagattcaacgatattcttacattgtttaccagcattccatgatacaaatacactttatggacaagaaatttatgaaaaatatggattagctgaaatggaagttacagaccaaatctttagaagtgaacattcaaaagtgtttgatcaagctgaaaatagaatgcatacaattaaggcagtaatggcagcaacattggggagttaa

SEQ ID NO: 405646 - DNA, 1431 bp, Staphylococcus aureus
atgaacgaatcaggagataacaaactcagtaaatcttctttaattggactagttataggatccatgattggtggcggtgcgttcaatataatgtctgatatgggcggtaaagccggtggattagccattattattggttggattattacagctataggaatgatttcattagcgttcgtatttcaaaatttaaccaatgaacggccggagctagacggtggtatttatagttatgctcaagcaggatttggcgattttgtaggatttatcagtgcttggggatattggttctcagcgtttttaggcaatgttgcctatgcaacactattgatgtcagcagtaggtaactttttcccgatttttaaaggaggcaacacattaccaagtgttattgtcgcctcgttactactctggggtgtccatttcttgattttaaaaggcgttgaaacagcagcatttatcaatagtattgttactgttgcaaagttaataccgattttacttgtaatcatatgcatgataattgcattcaattttgacacttttaaaacaggctttttcagtatgacgtcagagggtgtattgccatttagttgggcgagcacaatgagccaagttaaaagtacgatgctagtgacagtttgggtgtttatcggtatcgaaggtgcagtaattttttctagtagagctaaaaataaaaaagatgtaggtagtgccacggttataggacttatatcagttttaattatctatttcttattaactgtattagctcaaggcgtgattttgcaaaatcatatttcgcaattagattcgccaagtatggcacaggtgcttgcaactattgtaggtggttggggatctacacttgtaaatattggtttaattatttcggtactaggtgcatggttaggatggacactgcttgctggtgaattacctttcattgttgcaaaagatggattatttccaaaatggtttgctaaagaaaataaaaatggagcacctgtaaatgcactgcttattaccaatatattagtacaattatttttaataagtatgctatttacacagagtgcgtatcaatttgcattttcactagcatcaagtgctattttatacccttacatgttcagtgcattttaccaagttaaatacactttagagcatcgacagcaagcaactactaaacaatggacgattggtatcatagcctcaatttatgctatatggcttatatatgcagcaggtatcaattacttattattgacgatgttactttatattccagctcttcttgtttatacaatcgttcaaaagaataatcagacacgtttgattaaatcagactatattctttttatgattattatcgtacttgcagttatcgggttaattaagttattgatgggaacgataaatgttttttaa

SEQ ID NO: 405647 - DNA, 942 bp, Staphylococcus aureus
atgaaagagaaaattgtcattgcattaggcggtaatgcgatacagacaacagaagcaacagctgaagcacaacaaacagctattagatgtgcgatgcaaaaccttaaacctttatttgattcaccagcgcgtattgtcatttcacatggtaatggtccacaaattggaagtttattaatccaacaagctaaatcgaacagtgacacaacgccggcaatgccattggatacttgtggtgcaatgtcacagggtatgataggctattggttggaaactgaaatcaatcgcattttaactgaaatgaatagtgatagaactgtaggcacaatcgttacacgtgtggaagtagataaagatgatccacgatttgataacccaactaaaccaattggtcctttttatacgaaagaagaagttgaagaattacaaaaagaacagccagactcagtctttaaagaagatgcaggacgtggttatagaaaagtagttgcgtcaccactacctcaatctatactagaacaccagttaattcgaactttagcagacggtaaaaatattgtcattgcatgcggtggtggcggtattccagttataaaaaaagaaaatacctatgaaggtgttgaagcggttatagataaagattttgctagtgagaaattagcaacgctgattgaagcagataccttaatgattcttacgaatgtagaaaatgtatttattaactttaatgaacctaatcaacaacaaatcgatgatattgatgtagcaacactgaaaaaatacgcggcacaaggtaagtttgtggaaggatcgatgttgccaaaaatagaagctgcgatacgatttgttgaaagtggggaaaacaaaaaagttatcattaccaatttagagcaggcatacgaagctttgattggtaataaaggtacacacattcacatgtag

SEQ ID NO: 405648 - DNA, 705 bp, Staphylococcus aureus
atgacagaaaactttattttgggtagaaataataaattagaacatgaactaaaggcattagcagattacattaatataccatatagtatattacaaccatatcaaagtgaatgttttgtcagacattatacgaaaggccaagttatttatttttcgccacaagaaagtagcaatatttactttttaattgaaggtaacattattagagaacattacaatcaaaatggagatgtatatcgttattttaataaagagcaagtattatttccaatcagtaacttatttcatccgaaagaggttaacgaattgtgtacagcattaaccgattgtacagttcttggattgcctagagaattgatggcctttttgtgcaaagctaatgatgatatatttttgacactttttgcattaataaatgataatgagcagcaacacatgaactataacatggcattaacaagtaaatttgctaaagatcgaattatcaaattgatatgccatctatgtcagacagtaggatacgatcaagatgaattttatgaaatcaaacagtttttaactattcaactcatgagtgatatggctgggatttcccgggaaacagctggtcatattattcatgaacttaaagatgaaaaacttgttgttaaagatcataaaaattggttagtaagcaaacatttattcaatgatgtatgtgtttaa

SEQ ID NO: 405649 - DNA, 1341 bp, Staphylococcus aureus
atgccaaaacgtactttcactaaagacgacattcgtaaatttgcagaagaggaaaatgtaagatatttaagattacaattcactgatattttaggaacaattaaaaatgttgaagtgcctgtaagccaattagaaaaagtacttgataacgaaatgatgtttgacggttcttctatcgaaggtttcgtacgtatcgaagaatcagatatgtacttacatccagatttagatacttgggtaatcttcccatggactgctggacaaggtaaagttgcacgtttaatttgtgatgtatataaaacagatggaacaccatttgaaggggatcctcgtgcaaacttaaaacgtgtattaaaagaaatggaagatttaggcttcacagactttaacctagggcctgaaccagaattcttcttgtttaagttggatgaaaaaggggaaccaactttagaacttaatgatgatggtggatatttcgatttagcacctacagatttaggtgaaaactgtcgtcgtgatattgttttagaattagaggatatgggcttcgatattgaagctagtcaccatgaagttgcccctggtcaacatgaaattgactttaaatatgcagatgctgttacagcatgtgataatatccaaacatttaaattggttgttaaaacaatcgcacgtaaacataatttacacgcaacatttatgcctaaaccattattcggtgtgaatggtagcggtatgcactttaacgtttcattattcaaaggtaaagaaaatgcattctttgatccaaatactgaaatgggcttaacggaaactgcatatcaatttacagcaggtgtgcttaaaaatgcacgcggatttactgctgtatgtaacccgttagtaaactcatataaacgtttagtacctggttatgaagcaccatgttatattgcatggagtggtaaaaaccgttcaccattaatccgtgtaccatcttcaagaggattatctactcgtatcgaagtacgttcagtagatccagctgcaaacccatacatggcgttagctgcaatcttagaagctggactagatggtattaaaaataaattaaaagttccagaaccagttaaccaaaatatttacgaaatgaaccgtgaagaacgtgaagcagtaggcattcaagacttaccttcaacactttatactgcattaaaagcaatgcgtgaaaatgaagttattaaaaaagctttaggaaatcatatctataatcaatttattaattcaaaatcaattgaatgggattactacagaactcaagtctctgaatgggaaagagatcagtacatgaagcaatattaa

SEQ ID NO: 405650 - DNA, 369 bp, Staphylococcus aureus
atgatatcgaatgatgcaatcagacgaaatatggctgtcttctctatgagtgtagtaagtaagttaacggatttaacgccaaggcaaatacgttactatgaaacacatgaactcatcaaacctgaaagaacagaaggtcaaaaacgtctgttctcactcaatgatttggaaagattactagaaattaaatcattattagaaaaaggatttaatatcaaagggattaaacaaatcatttatgactcacaagagcatttaacaacagatgaacaagagataagaaaaaagatgattgtagatgccacgcaaaagcctattggagaaactttgccaataaatcgtggtgatttatcccgatttattaaataa

SEQ ID NO: 405651 - DNA, 1239 bp, Staphylococcus aureus
atgaaagatataagtaagatagtagctgacgtcgaatcaacgttagcaccatattttaaagaaattgaagaaacagcatatattaatcaagaaaaagtattaaatgcatttcatcatgtcaaagcaaccgaaagtgatctacaaggatcaacaggatacgggtatgatgactttggacgtgatcatttagaagaaatatatgcgcaggcatttaaagcagaagatgcaattgttcgtccgcaaattatttcaggtacgcatgcgattactattgcattacaaagtttattaaaacatggtgatgaattaatttatataacgggtagtccatatgacactttacttgaagtcattggcgtaaacggaaatggtattgaaagtttaatggagcatggcgtatcgtataaagatattgcacttaaagaaggtaagatcgatattgaaagtgtgttagatggggtttctgagcgcaccaaagtaatagcgattcaacgttcgaaaggctatgatcaaagaccttcaattccgctagatgaaattgaaaaggtaattactaggttgaaaaacgtgcatcctaatattttaatatttgtggataactgttatggggaatttgttgaaagacgtgaacctatagaatgtggtgccgatttaatagcaggatcattaattaaaaaccctggcggtggtttagctaagattggtggatacattgctggtagaaaagatttaattgaacgatgtggttatagattgacagcacctggtattggtaaagaagcgggtgcatcattaaatgcattgcttgaaatgtatcaaggtttctttttagcaccacacgttgtcagtcagagtcttaaaggtgcattgtttactagtttatttttagaaaaaatgaatatgaacacaacgccgaagtactacgaaaaacgaactgatttaattcaaacagttaaatttgaaacgaaagaacaaatgatttcattttgtcaaagtattcaacacgcatccccaattaatgcacattttagtccagaacctagttatatgcctggttacgaagatgatgttattatggcagctggtacgtttattcaaggttcatcgattgaattatctgcagatggacctattcgtcctccttatgaagcatatgttcaaggaggattaacatatgaacacgttaaaattgctgtgacaagagctgttaatcagttgaaagaacaaggacttatataa

SEQ ID NO: 405652 - DNA, 1239 bp, Staphylococcus aureus
atggctcagcaacaaattcatgatactaaaaataaactagaaaaagctgtcttagtcggtgtacatgctcaagatgataagcaatttaattttgagtctacaatggaggaattatcatctttatcagagacttgccaacttgaagtgttgggtcaaattactcaaaacagagatcgtgtagatcgcaaatattatgttggtaaaggtaaaaatgaagaaattcaagcatttattgagttcaaagatattgatgtagtcatcacaaatgatgaattaacgactgcacaatccaaatcactaaatgaagctttaggtgtaaaaattattgatagaactcagttgattcttgaaatatttgcattaagagcaagaagtaaagaaggtaaattgcaagtagagctagcacaacttgattatttattacctagattgcaaggccatggtaaaagcctttctcgtttaggtggcggtattggaactagaggccctggtgaaacgaagttagagatggatcgcagacatattcgaactcgtatgaatgaaattaaacatcaattgcggacggtagaagaacatcgcgaaagatatcgaaataaaagaaatcaaaatcaggtgtttcaagtagctttagttggttatacaaatgctggtaaatcatcatggtttaatgttttagcaaatgaagagacgtatgaaaaagatcaattatttgcaacgttagatcctaaaacacgacaaattcaaataaatgatggatttaatttaattatttcagatactgttggttttatacagaaactacctacgacgttaattgcagcttttaaatcaactttagaagaggctaaaggtgcagatttattagtacatgtcgtagatagtagccatcctgaataccgtacgcagtatgacacagttaatgatttaatcaaacaattagatatgagtcatatttctcaaatagttatttttaataaaaaggacttatgtgatcatgcatcaaatcgtccagcaagtgatttgcctaatgtttttgtttcttctaaaaatgatggtgataaattacttgttaagacgttatttattgatgaaatcaaaaggcaattaacttattatgatgagacaattgcgacgaataatgcagatcgattatattttctaaaacaacatacattagtgactgaacttaaatatgatgaaattgaaaatgtttatcgtataaaaggatttaaaaaataa

SEQ ID NO: 405653 - DNA, 477 bp, Staphylococcus aureus
atggagacaatttatgattttgtagtagaaacaaataaaggtgttacttacaaattagatgcatataagggtgacgttatgctaattgttaatacagctagcgaatgtggctttacttcacaatttgaaggtttgcaatcattatacgagaaatacaaagatcaagggtttgtaattctaggtttcccttgtaatcaatttggtggccaagaacctggttcaggcgaagaagcagctcaaaactgtaaattaaactatggtgttaccttccctatgcatcaaaaaatagacgtaaaaggggaacatcaattacctttatttagatatttgactgcggcacaacacggattctttaatgagaaaatcaaatggaatttcactaagtttttagtggatcgcgaaggtaacgttgttaaacgatttgcacctcaaaaaaaacctgttcaaatcgaaagagaaatagaaaaattattataa

SEQ ID NO: 405654 - DNA, 234 bp, Staphylococcus aureus
atgattgcaaacgaaaacatccaagacaaagcactagagaattttaaagcaaaccaaactgaagtaactgtattctttctaaacggtttccaaatgaaaggtgttattgaagaatacgacaagtatgtcgtaagcttaaattctcaaggcaaacaacacttgatttacaaacatgcgatcagcacttatacagtagaaactgaaggtcaagcatctactgaaagtgaagaataa

SEQ ID NO: 405655 - DNA, 936 bp, Staphylococcus aureus
atgaataaaaataagccttttattgtagtaattgtggggccaactgcttcaggtaaaacagagcttagcatcgaactcgcgaagcgtatcaatggtgaaatcataagcggtgactctatgcaagtctacaaacatatgaatattggaactgcaaaagtaacacctgaagaaatggatggtattccacatcatttaattgatatcttgaatcctgatgatacattttcagcatatgaattcaagcgattagcagaagatttaattactgatataacgaatagaggtaaagttccaatcatagcaggtggaacaggcttatatattcaatcattaatatataattatgaattagaagatgaaacagttacacctgcacaattatccatagttaaacaaaagttatctgcattagaacatttagataatcagcaactacacgattatttagctcaatttgatgcggtttctgcagaaaatattcaccctaacaaccgccaaagagtgttgcgcgctattgaatattatttaaaaacaaaaaaacttttgagtaatcgcaagaaagtgcaacaatttactgaaaattatgatacattattattagggattgaaatgtcgcgtaaaacattatattcaagaataaataaacgtgttgatattatgttggatcacggattatttagagaagtgcaacaacttgttgaacaaggctatgaatcttgccaaagtatgcaagctattggatataaagaattaatacctgtgattaacggacaaatgatttatgaagatgctgtcaatgatttaaagcaacattcacgccaatatgcaaaacgacaaatgacatggttcaagaataaaatgagtgttcattggttagataaagaaaatatgtcacttcaaatgatgttagatgagattacaacccagattaagtaa

SEQ ID NO: 405656 - DNA, 918 bp, Staphylococcus aureus
atgatgactgaaaaacaatttaaattaactgtacaagataatacgaatattgaagttaaagtgaattttacagatgtagattcaaaaggaattattcatatatttcatggtatggctgaacatatggaacgttacgataaattagcacatgcactttcaaagcatggcttcgatgtgatacgtcataatcatcgaggacatggtattaatattgatgaatcaacaagagggcattacgatgatatgaaacgagttatcggtgatgcctttgaagtagcgcaaacagtgagaggcaatgttgataaaccatacattataatcggacattcaatgggatccgttatagctagattgtttgtagaaacatatccgcaatatgttgatggtctaattttaagtggtactggtatgtattcattatggaaaggtttaccaaccgttaaagtgttacaactgattacaaaaatttatggtgctgagaaacgagttgaatgggttaaccagttagtatcaaatagttttaataaaaaaatacgtccattacgtacacaaagtgattggatttctagtaatccaattgaagtagataactttattaaagatccatatagtggatttaatgtgtcaaatcaattattatatcaaacagcctattatatgctacatacatcacaattaaaaaatatgaaaatgttaaatcatgccatgcctatattattagtttcaggatatgacgatcctttaggtgattatggtaaagggattttaaaattggcgaatatatatagaaaagctggcattaaaaatgttaaagtgaatctttatcatcataaacgtcatgaagtgttatttgaaaaagatcatgacaaaatttgggaagacttgtttaaatggttgaatcaattttataaaaaataa

SEQ ID NO: 405657 - DNA, 1674 bp, Staphylococcus aureus
atggcattgtctacttttaagagagaacatattaaaaagaatttaagaaatgatgaatatgatttagtaattattggtggcggtattacaggtgcaggtattgcactagacgcgagtgaaagaggaatgaaagttgcattagttgaaatgcaagactttgcacaaggaacaagctcaagatctacaaaattagtccatggtggtttgcgttacttaaaacaattccaaattggagtagttgccgaaactggtaaagaacgtgcgattgtttatgaaaatgggcctcatgttacgactccagagtggatgcttttaccaatgcataaaggtggaacatttggtaaattctcaacatcaattggtttaggaatgtatgatcgtttagcaggtgttaagaagtctgaacgtaaaaaaatgttatctaaaaaagaaactttagctaaagaaccattagttaaaaaagaaggtctaaaaggcggcggttactatgttgaatatcgtactgacgatgcgcgtttaactattgaagttatgaagcgtgctgctgaaaaaggcgcagaaattatcaactatactaaatctgaacacttcacttatgataaaaatcaacaagtaaatggtgttaaagttatagataaattaactaatgaaaattatacaattaaggctaaaaaagtggttaatgcagcaggtccatgggttgatgatgttagaagtggtgattatgcacgcaataataaaaaattacgtttaactaaaggtgtacatgttgttattgatcaatcaaaattcccattaggtcaagcagtatactttgatactgaaaaagatggaagaatgatttttgcaattccacgtgaaggaaaagcgtatgtaggtactacagatacattctatgacaatatcaaatcttcaccattaactacacaagaagacagagactatttaatcgatgcgattaattacatgttccctagtgttaatgttacagatgaagatattgaatcaacatgggcaggaattagaccattaatttacgaagaaggcaaagacccttctgaaatctctcgtaaggatgaaatttgggaaggtaaatcaggtttattaactattgcaggtggtaaattaacaggctatcgtcacatggctcaagacattgttgatttagtatctaaacgcttgaaaaaagactacggtttaacatttagtccatgtaatacaaaaggtctggcaatttcaggtggcgatgtaggtggtagcaagaactttgatgcgtttgtagagcaaaaagtagatgtagctaaaggattcggcattgatgaagatgttgcaagacgtttagcatctaaatatggttcaaatgttgatgaattgttcaacattgcgcaaacatctcaataccatgatagcaagttaccattagaaatttatgtagaacttgtttatagtattcaacaagaaatggtatacaaacctaacgatttcttagttcgtcgttctggtaaaatgtatttcaatattaaagatgtattagattataaagatgctgtcatcgatattatggcagatatgcttgattactctccagctcaaattgaagcatatactgaagaagttgagcaagcaattaaagaagcgcaacatggaaataatcaaccagcagttaaagaataa

SEQ ID NO: 405658 - DNA, 1497 bp, Staphylococcus aureus
atggaaaaatatattttatctatagaccaaggaacaacaagctcaagagcgattttattcaatcaaaaaggggaaattgcaggggtagcacaacgtgagtttaagcaatattttccacaatcaggttgggttgaacatgatgcaaatgaaatttggacatctgtgttagctgtaatgacggaagtaattaatgaaaatgatgttagagctgatcaaattgcaggtatcggtattacaaaccaacgtgaaacaacggttgtttgggacaaacatactggccgcccaatttatcacgcaattgtttggcaatcacgtcaaacacaatcaatttgttcagaattaaaacaacaaggatatgaacaaacatttagagataagacaggattacttttagatccgtattttgcaggtacaaaagttaaatggattctagacagtgttgaaggtgcacgagaaaaagcagaaaatggcgatctattatttggaacgattgatacttggttagtatggaaattatcaggaaaagctgcgcatattactgattattcaaatgcgagtcgtacattaatgtttaatatccatgatttagaatgggacgatgagttattagaattacttacagtacctaaaaatatgttgccagaagttaaagcttcgagtgaagtatatggtaagacaattgattaccacttctatggtcaagaagtaccaatcgctggagtagctggtgatcaacaagcagcattatttggacaagcttgcttcgaacgtggtgacgtgaaaaacacatatggaactggtggcttcatgttaatgaatacaggtgacaaagcggttaaatctgaaagtggtttattaacaacaattgcttatggtattgatggaaaagtaaattatgcgcttgaaggttccatctttgtttcgggttcagcaatccaatggttacgtgatggattaagaatgattaattcagcaccacaatcagaaagttatgcgacacgagttgactctactgagggtgtttatgttgttccagcttttgtaggtttaggaacaccatattgggattctgaagcacgtggtgcgattttcggtttaacacgtggaactgaaaaagagcactttatccgtgcaactttagaatcactatgttaccaaactcgtgacgttatggaagcaatgtcaaaagactctggtattgatgtccaaagtttacgtgtcgatggtggtgcagttaaaaataactttattatgcagttccaagcagacattgttaatacttctgttgaaagacctgaaattcaagaaactacagctttaggtgctgcatttttagcaggtttagcagttggattctgggagagtaaagatgatatcgctaaaaactggaaattagaagaaaaattcgatccgaaaatggatgaaggcgaaagagaaaaattatatagaggttggaaaaaagctgttgaagcaacacaagtttttaaaacagaataa

SEQ ID NO: 405659 - DNA, 819 bp, Staphylococcus aureus
atgaatgtatatttagcagaattcctaggaactgcaatcttaatcctttttggtggtggcgtttgtgccaatgtcaatttaaagagaagtgctgcgaatggtgctgattggattgtcatcacagctggatggggattagcggttacaatgggtgtgtttgctgtcggtcaattctcaggtgcacatttaaacccagcggtgtctttagctcttgcattagacggaagttttgattggtcattagttcctggttatattgttgctcaaatgttaggtgcaattgtcggagcaacaattgtatggttaatgtacttgccacattggaaagcgacagaagaagctggcgcgaaattaggtgttttctctacagcaccggctattaagaattactttgccaactttttaagtgagattatcggaacaatggcattaactttaggtattttatttatcggtgtaaacaaaattgccgatggtttaaatcctttaattgtcggagcattaattgttgcaatcggattaagtttaggcggtgctactggttatgcaatcaacccagcacgtgatttaggtccgagaattgcacatgcgattttaccaatagctggtaaaggtggttcaaattggtcatatgcaatcgttcctatcttaggaccaattgccggtggtttattaggtgcagtggtatacgctgtattttataaacatacatttaatattggttgtgcaattgcaattgttgtagttattattactttgattttaggttacattttaaataaatcatcaaaaaaaggtgatatcgaatcaatttactaa

SEQ ID NO: 405660 - DNA, 534 bp, Staphylococcus aureus
gtgaataacaacatattgcctgctataagaaacattaaagatttagagaaactgattaaaacagactataaaatgtgtgtgcttctagatatgcatataggacatataaaaagtattatggaattgctgaagcaaaatcatatagagtgttttattcatatagatttgataaaaggtttaagccacgatgaatttgcaagtgaatttattattcagcaatacaagccaaaaggtatcgtatcgactaaatctaaagtaataaaaaaagctaaatcattaaatactttaacgatttttagagtatttattattgatagtcaagcattgaaacgcagtatagatttgataaaaaaagttgaacctgattttgttgaagtacttccaggtgttgcgagtaaagcgattcatcatattcagaaagaaacaaacacacaagtcattgcaggtggcctaattaatacaatagatgaagtcaatgaagctgttaaaaatggagcgaaatatgtaactactagttatgataaactttggtaa

SEQ ID NO: 405661 - DNA, 2010 bp, Staphylococcus aureus
atggggaaaattaaagaactccaaacctcattagcaaataaaatcgcagcaggtgaagtagttgaaagaccgagttctgttgtgaaagaactgttggaaaatgctatagatgcaggcgctacagaaataagcattgaagtagaggaatctggcgtccaatctattcgcgtagtcgataatggaagcggaattgaagcggaagacttaggattagtatttcatagacatgcgactagtaaattagatcaagatgaagatttatttcatattaggacattaggattccgtggtgaagcactagccagtatttcatcagttgctaaagtaacattgaagacttgcacggataatgctaatggaaatgaaatatatgtagaaaatggtgaaatattaaatcataagcctgcaaaagcgaaaaaaggaacagatatacttgtagaatcattattttataatacaccagcacgtttaaaatatattaaaagtttatacactgaactaggtaaaataacagatattgtcaacagaatggcaatgagccatccggacattcgaatagcactcatttcagatggcaaaacaatgttaagtacaaatggttcaggacgaactaatgaagtgatggcagagatttatgggatgaaagttgcacgagatttagtacatatatctggagatacaagtgattatcacattgaaggttttgttgcaaagcctgaacattctagaagtaataagcactatatttctatttttattaatggacgatacattaaaaactttatgctaaataaagcgattttagaaggctatcatacactcttaacaataggtaggttcccgatttgttatattaatattgaaatggatccaatcttagtagacgtaaatgttcatccaacaaaactagaagtgcgtttatcaaaagaagagcaactataccaattgattgtgagcaaaatacaagaagcatttaaagaccgtatattaattcctaaaaataacttggattatgtgccaaaaaaaaataaagtattacattcattcgaacaacaaaaaatcgaatttgaacaaagacaaaacacagagaataaccaagagaagacgttttcatctgaagaaagtaacagtaagccatttatggaagaaaatcaaaacgatgagatagttataaaagaagattcatataatccattcgtaacgaaaacatctgaaagtttaatagctgatgatgaatcttctggttataataatacacgtgaaaaagatgaagactacttcaaaaaacaacaagaaattttacaagaaatggatcaaacatttgattcaaatgatggtacaactgtgcaaaattatgagaataaagcgtctgatgattattatgatgtaaacgatattaaaggaacaaaaagtaaagaccctaaacgaagaattccatatatggaaattgttggacaagtacatggaacgtatattattgctcaaaatgaatttggcatgtacatgattgaccagcatgcagctcaagaaagaataaaatatgaatattttcgagataaaataggtgaggttaccaatgaagtacaagatttattaatcccgttaacatttcatttttcaaaagatgaacaattagtcattgatcaatataaaaatgagcttcaacaagtaggtatcatgttagaacattttggtggtcatgattatattgtaagtagctatccagtttggttccctaaagatgaagtagaagaaattattaaagatatgattgagctaattttggaagagaaaaaagtagatatcaaaaaattacgtgaagatgtagcaatcatgatgtcatgtaaaaaatccattaaagcgaatcattatttacaaaaacatgaaatgtctgatttaattgatcaattaagagaagcggaagatccatttacatgtccacatggtcgtccaataatcattaatttttcaaaatacgaattagaaaaattatttaagcgtgtgatgtag

SEQ ID NO: 405662 - DNA, 2619 bp, Staphylococcus aureus
atgtctaatgttacaccaatgatgcagcaatatttaaaaataaaatcagaataccaagattgcttattattttttagactaggtgatttctatgaaatgttttatgaagatgccaaggaggcatcacgtgtacttgaaattactttaactaaaagagatgctaaaaaagaaaatccaattccgatgtgtggtgttccgtatcattctgcagatagttatatagatacacttgttaataatggatataaagtagctatttgtgaacagatggaagatccgaaacaaacgaaaggtatggttagacgtgaggtagtaagaattgtgactccaggaactgtgatggagcaaggtggtgtagatgataaacaaaataactatattttaagttttgttatgaatcaacctgaaattgcgcttagttactgtgatgtttctactggcgaattaaaggttacacattttaatgatgaagcgactttattaaatgaaattacgacgataaaccctaacgaagttgttatcaatgacaatatttccgataatttaaaaagacaaattaatatggtgacagaaacaataacagtcagggaaacgttatcatcagaaatctatagtgtgaatcaaactgaacataaattaatgtatcaagcgacacaattattgctagattatattcatcatacacaaaaacgtgatttatcgcatatcgaggatgttgttcaatatgcagctatagattatatgaaaatggatttttatgctaagagaaaccttgagttaacggaaagcattcgattaaaatcaaaaaaaggaacgctactttggctaatggacgaaacgaaaacaccaatgggagcacgccgcttaaaacaatggatagatagaccactaataagtaaagaacaaattgaagcacgattagatatcgttgatgaatttagtgctcatttcatagaaagagacaccttaagaacatatcttaatcaagtgtatgatattgaacgtcttgttgggcgtgttagttacggaaatgttaatgcgagagatttaattcaacttaaacattccatttctgaaataccgaatattaaagcattactaaattctatgaatcagaatactcttgtacaagttaatcaactagaaccccttgatgatttacttgatatattagaacagagtttagtagaagaaccaccaatttcagttaaagatggcggactattcaaagttggttttaatacgcaattagatgaatatcttgaagcttcaaaaaacggaaaagcatggttagcagaattacaagccaaagaaagacaacgtacaggaataaaatcattgaaaataagctttaataaagtgtttggttattttatagaaataacacgtgccaacttgcaaaattttgaaccaagtgaatttggttatatgaggaagcaaacgttatcgaatgctgaacgttttataactgatgaacttaaagaaaaagaagatatcattttaggtgcggaagacaaagccatcgaattagaatatcaattatttgttcagctacgtgaagaagttaaaaaatatactgaacgtttacaacaacaagctaaaattatttcagagctagattgtttacagagctttgcagaaattgctcaaaaatataattacactaggccttcatttagtgaaaataaaacattagaattagtggaatctaggcacccagtagtggaaagagtaatggattataatgactatgtgcctaataattgtcgattagataatgaaacatttatatatttaattacaggtccgaatatgtctggtaaatcgacatatatgagacaagttgccataattagtataatggcccaaatgggagcttatgtcccttgtaaagaggcagtgttacctatatttgatcaaatattcactagaataggtgcggcagatgatttggtttcaggtaagagtacgtttatggtagaaatgctagaagcacaaaaggcattaacttatgcaacagaggatagtttgattattttcgatgaaattggacgtggtacttcaacgtatgacggtttagctttagcgcaggcaatgatagagtatgtagctgaaacatcacatgctaaaacgttattttcaacacattatcatgaattgacaacattagatcaagcattaccaagtctaaaaaatgttcacgtcgctgctaatgaatataaaggtgaacttatattcttgcataaagtcaaagatggtgcagttgacgatagttatggtattcaagttgcgaaattagctgatttacctgaaaaagttattagcagagcacaagtgattctaagcgagtttgaagcgtctgctggtaaaaaatcatcgatatcaaatttaaaaatggtcgaaaatgaacctgaaattaatcaagaaaatttaaacttaagtgttgaagaaacaactgatactttatctcaaaaagattttgaacaagcatcatttgatttgtttgaaaatgatcaagaaagcgagattgaactacaaattaaaaatttgaatttatctaatatgacaccaattgaggcattggtgaagttaagtgaattacaaaatcaattaaaatag

SEQ ID NO: 405663 - DNA, 492 bp, Staphylococcus aureus
atgaaatcaagaaaactggctataactgcacttttaattgcaataaatgttgtattaagcagtattatcatcattcctctaggaccagttaaggcagcaccagtacagcattttgtaaatgtattaagtgcggtcatagtaggtccttggtatggattagctcaagcgcttatatcatcaattttaagagttctttttggtactggtacagcttttgcatttccgggtagtatgattggagttttattggctagtatgttttacatatatcgtaaacatatatttatggccgcggtcggtgaagtacttggaactggtgtcatcggaagtttaatttgtataccattagcatatttccttgggcttcaagacttcttcattaaaccgttaatgattacgttcatagtctcaagtgctatcggatctattataagttatttcttattaattactctaaaaaaacgtggtattcttcaaaggtttataaaataa

SEQ ID NO: 405664 - DNA, 366 bp, Staphylococcus aureus
atgtataataaagatgacgtgttgaaccaagcggataatattgcaaataaaattaaaaatttggatactatcaaaacatatcaacaaattgaagcacagattcatcagaaccaaacgataaagactaaaatggatatgttaaaaaagcatcaaaaacaagcagtaaactttcaaaattacgggaaacaaaatgcgctagaacagtcggaacataccattcagagtatagaagcagaaataaatacattgcccatagttgaacagtttcaaacttcacaatatgaagcgaatcaattattgaaaatgtttgtatcaacaatggaaacacgtttaaatgaccataataaagccaagcatagtgattaa

SEQ ID NO: 405665 - DNA, 1545 bp, Staphylococcus aureus
gtgaacgaagaacaaagaaaagcaagttctgtagatgttttagctgagagagataagaaagcagaaaaagattatagtaaatattttgaacatgtttatcagccgcctaatttaaaagaagcgaaaaaaagaggtaaacaagaagttcgttataatagagatttccaaattgatgaaaaatatcgcggtatggggaacgagcgtacatttttaattaaaacatatggatgtcaaatgaatgcacatgacactgaggtcattgctggtatacttgaagcattaggctatcaagcaacgactgatattaacactgcagatgttattttaattaatacatgtgcgattagagaaaatgccgagaacaaagtgtttagtgaaataggtaatttgaagcatttgaaaaaagaacgacctgatattttaatcggtgtttgtggttgtatgtcacaagaagagtcagtagtgaataaaattttaaaatcgtatcaaaatgtagatatgatatttggtacacataatattcatcatttaccagaaattttagaagaagcatacttatctaaagcaatggttgttgaagtatggtctaaagaaggagacgttattgaaaatcttccaaaagtccgtgaaggcaacattaaagcatgggtcaatattatgtatggttgtgataagttttgtacatattgtattgttccatttacaagaggtaaagaacgaagccgtagacctgaagacattatagatgaagtacgtgaacttgctcgtgaaggttacaaagaaataacgcttttaggtcaaaatgtaaattcttatggtaaagatttacaggatatagaatatgacttaggagatcttttacaagcaatttctaaaatagcgattccaagagttcgtttcacaacaagtcatccttgggactttacagatcacatgattgatgttatttcagagggtggtaatatcgttccgcatatccacttgccagttcaatctggaaataatgcagtattaaaaataatgggtagaaaatatacacgagaaagttatttggatttagtaaaacgaatcaaagatagaattcctaatgtagcattaactacagatattattgtagggtatccaaatgaatcagaggaacaatttgaagaaactttaactctgtatgatgaagttggttttgaacatgcatatacgtacttgtattcacaacgtgatggtacgcctgctgctaaaatgaaagataatgtacctttaaatgtcaaaaaggaacgattgcaacgtttgaataaaaaagttggtcattattcacaaatagctatgagtaagtacgaaggacaaactgtaacagtactttgtgaaggaagtagtaaaaaagatgatcaggttcttgctggctacactgataaaaataagctagttaatttcaaagcgcctaaagaaatgattggtaaactagtggaagtacgaatagatgaagctaaacagtattcattaaatggcagttttataaaggaagtagagccggaaatggtgattcaataa

SEQ ID NO: 405666 - DNA, 294 bp, Staphylococcus aureus
atgaaagacacattaatgagtatacaaataattcctaaaacaccaaacaatgacaatgttataccttacgtagacgaggcgattaaaataattgacgaatctggtttgcattttagagtaggtccgttagaaacgacagtacaaggaaatatgaatgaatgtttaattttaatacaatcattaaatgaacgaatggtggaacttgaatgtccaagtattattagccaagttaagttttatcatgtgccagatggcatcactattgaaactttaactgaaaaatatgatgaataa

SEQ ID NO: 405667 - DNA, 867 bp, Staphylococcus aureus
atggcgacatttaaagattttagaaataatgttaagcctaactggtgccccggatgtggcgatttctcagtacaagctgcaattcaaaaagcagccgcaaatatagggttagaacctgaagaagtagctatcatcaccggtataggatgttctggccgtctttcaggatatattaattcttatggcgttcattctattcacggacgtgcattacctttagctcaaggtgtaaaaatggcgaataaagatttaactgttattgcatcgggaggagatggtgatggttatgctataggtatggggcatacaatccatgctttaagaagaaatatgaacatgacgtatatagtcatggataatcaaatttatggtttgacaaagggacaaacatcgccgtcatcagcagtaggatttgttactaaaacaacgccaaaaggtaatatagaaaaaaatgttgcgcctttagaattagcattatcatctggtgccacatttgtagcccaaggtttttcaagcgatattaaaggattaacaaaactaattgaagatgcaattaatcatgatggattttcattcgttaatgtcttttcaccatgtgtgacttataataaaattaacacatacgattggtttaaagaacatttaacaagtgttgatgacattgaaaattatgattctacagataaacaattagcgactaaaactgttattgaacatgaatctttagtaactggtattgtttatcaagataaagaaacaccatcatatgaatctcaaattaaagagttagatgatacaccacttgctaaaagagatatcaaaattactgaagacaccttcaatgcattaactgaacaatttatttaa

SEQ ID NO: 405668 - DNA, 1761 bp, Staphylococcus aureus
atgaaaccacaattatcgtggaaagttggcggtcaacaaggcgaaggtattgaatcaactggggaaatcttcgctacggctatgaatagaaaaggatattatttatatggatatagacatttttcaagtcgtatcaaaggtggacatacgaataataaaattagagtttctacgacgcctgttcatgcaattagtgatgatttagatattttgattgcatttgaccaagaaacaattgatgttaaccatcatgaaatgagagaagacagtattattttagctgatgccaaggctaaacctgtgaaaccagaaggatgtcatgcacagcttattgaattaccttttacagcaaccgctaaagaattaggtacagcattaatgaaaaacatggttgcaataggtgctactagcgcattgatgaatttgaatacaaatacatttgaagaacttattactaatatgttttctaaaaaaggtgacaaggtagttgaagtcaatatccaagcattaaacgaaggttatcaattaatgcaatctcgcttacctgaaatctacggggactttgaattagagtcaacagatgcactaccacatctatatatgattggtaacgatgccattggattaggtgcaattgctgcaggttcacaatttatggcggcatatcctattacacctgcgtctgaagttatggaatatatgattgccaatatatctaaagtaaacggagcggttattcaaacagaagatgaaattgctgctgtaactatggctattggtgcaaattatggtggagtcagagcgtttacggctagtgctggtccaggtttatctttaatgatggaagcaattggattatctggtatgactgaaacgccattagtcattattaatacccaacgaggtggaccttctactggattacctacgaaacaagaacagtcagatttaatgcaaatgatttatggtacacatggtgatattccaaaaattgttgtagcaccaacagatgcagaagatgcattttatttaactatggaagcatttaatttagcagaacaatatcaatgccctgttatagttctaagtgatttgcaattatctttaggtaaacaaactgttgaaaaattagattataatcgtattgaaattaaacgtggtgaaatcattcaatctgatattgaacgtgaagaagatgataaaggttatttcaagcgttatgcgttaacatccgatggtgtttctcctagacctatccccggtgttaaaggaggtattcatcatataactggtgtggaacacaatgaagaaggtaaacctagtgaatctgcgtcaaatagacaacaacaaatggaaaaacgaatgcgtaaaattgagcagttactaattgaatcgccagtagaagctaacttacaacatgaggatgcagatattctttatatcggttttatttctacaaaaggtgcaattcaagaaggtagtaaccgtttgaatcaacaaggcataaaagttaacactatacaaattagacaattgcatccattcccaacaagcgttattcaagatgcagttaataaagcgaagaaagtcgttgtagtggagcacaattatcaaggacaattggctagtattataaaaatgaatgtcaatattcatgataagattgaaaattatacaaagtatgatgggacacctttcctaccacatgaaatcgaagaaaaaggcaaaataattgctactgaaataaaggagatggtatag

SEQ ID NO: 405669 - DNA, 798 bp, Staphylococcus aureus
atgagaataatgtttataggggatatcgtaggtaaaattggacgagacgcaattgaaacgtacatacctcaactgaagcaaaagtataaaccaacagttacaattgtaaatgctgaaaatgcagcacatggtaaaggtttgactgaaaaaatatataaacaattactaagaaatggtgtagatttcatgactatgggtaatcacacatatggtcaacgtgaaatttatgattttatagatgaagcaaaacgactagtaagaccagcgaattttccggatgaagcgccgggaattggtatgagatttatacaaattaatgatattaaacttgcagttattaatctgcaaggaagagcgtttatgccagatattgatgatccttttaaaaaggcagatcaattagtcaaggaagcacaagaacaaactccgtttatatttgttgattttcatgcagaaacaacttctgaaaagtatgcaatgggatggcatttagatggtagagctagcgctgttgttggaacgcatacacacattcaaacagcagatgaacgtattttaccaaaggggacagggtatataacggatgttggtatgacaggtttttatgatggcattttaggaataaataaaacagaggtaattgagcgttttatcactagtttgccacaaagacatgttgttccaaatgaaggtagaagtgtattatctggtgttgttattgatttagacaaagaaggtaaaacaaagcacatcgaacgtatattgataaatgatgaccatccattttcaacattttaa

SEQ ID NO: 405670 - DNA, 216 bp, Staphylococcus aureus
atgtctattaatattgatccagaaaaatttgcagaattagtggttatgtctaacccatcaaaattcgaagatgcagaggatatagctaaagaaagtttaaagctttacattaatgcatatcgtttagcagagagatattcaacaattgcaacaaattgttatgatactgcagaagttataaaagaattaaagaaaacagatttacaattaaaataa

SEQ ID NO: 405671 - DNA, 1560 bp, Staphylococcus aureus
gtgaatttattaagcctcctactcattttgctggggatcattctaggagttgttggagggtatgttgttgcccgaaatttgttgcttcaaaagcaatcacaagctagacaaactgccgaagatattgtaaatcaagcacataaagaagctgacaatatcaaaaaagagaaattacttgaggcaaaagaagaaaaccaaatcctaagagaacaaactgaagcagaactacgagaaagacgtagcgaacttcaaagacaagaaacccgacttcttcaaaaagaagaaaacttagagcgcaaatctgatctattagataaaaaagatgagattttagagcaaaaagaatcaaaaattgaagaaaaacaacaacaagtagatgcaaaagagagtagtgttcaaacgttaataatgaagcatgaacaagaattagaacgcatctccggtctcactcaagaagaagctattaatgagcaacttcaaagagtagaggaagaactgtcacaagatattgcagtacttgttaaagaaaaagaaaaagaagctaaagaaaaagttgataaaacagcaaaagaattattagctacagcagtacaaagattagcagcagatcacacaagtgaatcaacggtatcagtagttaacttacctaatgatgagatgaaaggtcgaatcattggacgagaaggacgaaacatccgcacacttgaaactttaactggcattgatttaattattgatgacacaccagaagcggttatattatctggttttgatccaataagaagagaaattgctagaacagcacttgttaacttagtatctgatggacgtattcatccaggtagaattgaagatatggtcgaaaaagctagaaaagaagtagacgatattattagagaagcaggtgaacaagctacatttgaagtgaacgcacataatatgcatcctgacttagtaaaaattgtagggcgtttaaactatcgtacgagttacggtcaaaatgtacttaaacattcaattgaagttgcgcatcttgctagtatgttagctgctgagctaggcgaagatgagacattagcgaaacgagctggacttttacatgatgttggtaaagcaattgatcatgaagtagaaggtagtcatgttgaaatcggtgtagaattagcgaaaaaatatggtgaaaatgaaacagttattaatgcaatccattctcatcatggtgatgttgaacctacatctattatatctatccttgttgctgctgcagatgcattgtctgcggctcgtccaggtgcaagaaaagaaacattagagaattatattcgtcgattagaacgtttagaaacgttatcagaaagttatgatggtgtagaaaaagcatttgcgattcaggcaggtagagaaatccgagtgattgtatctcctgaagaaattgatgatttaaaatcttatcgattggctagagatattaaaaatcagattgaagatgaattacaatatcctggtcatatcaaggtgacagttgttcgagagactagagcagtagaatatgcgaaataa

SEQ ID NO: 405672 - DNA, 1044 bp, Staphylococcus aureus
ttggataacgatcgtcaaaaagctttagatacagtaattaaaaatatggagaaatctttcggtaaaggtgccgtaatgaagttgggtgacaatataggtcgccgagtttcaactacatcaactggttcagttacattagataatgcgctaggtgtaggtggctatcctaaaggacgaattattgaaatttatggtcctgaaagttctggtaagacaacagtagcgcttcacgctattgctgaagtacaaagtaatggcgggggggcagcatttatcgatgctgaacatgctttagatccagaatatgctcaagcattaggcgtagatatcgataatttatatttatcgcaaccggatcatggtgaacaaggtcttgaaatcgccgaagcatttgttagaagtggtgcagttgatattgtagttgtagactcagttgctgctttaacacctaaagctgaaattgaaggagaaatgggagacactcacgttggtttacaagctcgtttaatgtcacaagcgttacgtaaactttcaggtgctatttctaaatcaaatacaactgctattttcatcaaccaaattcgtgaaaaagttggtgttatgttcggtaatccagagactacaccaggtggacgtgcattaaaattctatagttcagtaagactagaagtacgtcgtgcagaacagcttaaacaaggacaagaaattgtaggtaatagaactaaaattaaagtcgttaaaaataaagtggcaccaccatttagagtagctgaagttgatattatgtatggacaaggtatttctaaagagggtgaacttattgatttaggtgttgaaaacgacatcgttgataaatcaggagcatggtattcttacaatggcgaacgaatgggtcaaggtaaggaaaatgttaaaatgtacttgaaagaaaatccacaaattaaagaagaaattgatcgtaaattgagagaaaaattaggtatatctgatggtgatgttgaagaaacagaagatgcaccaaagtcattatttgacgaagaatag

SEQ ID NO: 405673 - DNA, 1152 bp, Staphylococcus aureus
atgtcaattgccattattgctgtaggctcagaactattgctaggtcaaatcgctaataccaacggacaatttctatctaaagtatttaatgaaattggacaaaatgtattagaacataaagttattggagataataaaaaacgtttagaatcaagtgtacgtcatgcgctagaaaaatatgatactgttattttaacaggtggcttaggtcctacgaaagatgacttaacgaagcatacagtggcccagattgttggtaaagatttagttattgatgagccttctttaaaatatattgaaagctattttgaggaacaaggacaagaaatgacacctaataataaacaacaggctttagtaattgaaggttcaactgtattaacaaatcatcatggcatggctccaggaatgatggtgaattttgaaaacaaacaaattattttattaccaggtccaccgaaagaaatgcaaccaatggtgaaaaatgaattgttgtcacattttataaaccataatcgaattatacattctgaactattaagatttgcgggaataggtgaatctaaagtagaaacaatattaatagatcttatcgataaacagactaatcctacgattgcgcctttggcgggaagtcatgaagtatatattagattgactgcaaatgccgactcaaaagaacaagcacaatcattgattcaacctgttaaacaagaaattcttgatcgtattggagaatattattatggttcagatgacacattaattgagcaagctgtaataaagaaaattcatgaaccttttgtaatatatgatggtattactaatggtgctttatatcatcgattgaaagaagtggatttaaacgatgttctaaagggtatgattaatcacaatgaaaactttgttgatattaataaacctattgagcagcaattaaaagatgcagtgcaatttgttaataaattgtttaatgtgtcatcagcaattattctattagagtatgatggtgtagttcatataggctatgataataactttgaatttaaaactgagcaatttaaaatgtctaaatctagaaatttattaaagaacagaagtcaaaattatgcgctcataagattattaaattggcttagaacaacaaattaa

SEQ ID NO: 405674 - DNA, 579 bp, Staphylococcus aureus
atgaatattccgaaccagattacggtttttagagtagtgttaataccagtttttatattgtttgcgttagttgattttggatttggcaatgtgtcatttctaggaggatatgaaataagaattgagttattaatcagtggttttatttttatattggcttcccttagcgattttgttgatggttatttagctagaaaatggaatttagttacaaatatggggaaatttttggatccattagcggataaattattagttgcaagtgctttaattgtacttgtgcaactaggactaacaaattctgtagtagcaatcattattattgccagagaatttgccgtaactggtttacgtttactacaaattgaacaaggattcgtaagtgcagctggtcaattaggtaaaattaaaacagcagttactatggtagcaattacttggttgttattaggtgatccattggcaacattgattggtttgtcattaggacaaattttattatacattggcgttatttttactatcttatctggtattgaatacttttataaaggtagagatgtttttaaacaaaaataa

SEQ ID NO: 405675 - DNA, 393 bp, Staphylococcus aureus
ttgaaaacggtcggtgaagcgctaaaaggtagacgtgaaaggttaggaatgactttaacagaattagagcaacgtactggaattaaacgtgaaatgctagtgcatattgaaaataatgaattcgatcaactaccgaataaaaattacagcgaaggatttattagaaaatatgcaagcgtagtaaatattgaacctaaccaattaattcaagctcatcaagatgaaattccatcgaaccaagccgaatgggacgaagtaattacagttttcaataataataaagacttagattataagagtaaatcaaaagagccaatacaattattagtaatcatgggtattacagttttaataactttattgttatggatcatgttagttttaatattttaa

SEQ ID NO: 405676 - DNA, 828 bp, Staphylococcus aureus
atgacagttgcagagaaaaaagaatggtacctagaatacgaaattgaaattaatagaccgggtcttttaggtgatgtatctagtttattaggtatgttaggtataagtattgttacaattaatggtgttgatcaaggtaaacgaggccttttaattaaaacagacaatcttgaaaaagttgaacgttttgagcaaatagctcgtggtataaatgaaattgaaataacaaagcttaaaaaaccagaattaagagaccgtcttgcagtaagacatggaagatatattgagcaagatgcaaaagataagaaaacctttcgatttgagcgtgaagatttaggcttgttagtagactttttagctgaattgttcaaagaagaaggtcataagttgattggcattagaggtatgccacgggttggtaaaactgaatcaattgttgcgggaagtgtttgtgcacataagagatggttatttattagttctactttaataaaacaaactgtacgtagctctctaattaaaggggaatatgatgccaatcatgtatacattattgatggtgcagttactgccagagaatctaatccaaaacatcaagagcttgttaacgaagttatgacgttaccatcaatcaaagtcgttgaacatccagatttatttgttgaaacaagtacttgtacaatggaagattttgactatattatcgaattgagagaaaatgaaaatcaagaaatacattacgaagaaatgaagaaacagacagtccaaagtaagaataatttagattttggagatccgtttggtggtggttttggtttcttcgagtaa

SEQ ID NO: 405677 - DNA, 705 bp, Staphylococcus aureus
atgaaagcattagtattaggtggttctggttcaattggttctgagatagtcaaacaattattaactgatggatttgaagtttatgtgcaatattatcgtactgatataaatgaattaactagcaaatttaatgatgataaagttcgttttatacaagcggatttatctcaaacaattgatattgacaaaacatttggtgacattaaatcattagactgtttaatatatgcaagtggtcagtctttatatggtgttttacaagatatgaaagaccatgatattgatgcatgttatcagttaaatgtcttgcaattaattcgattatgtagatatttcgttgatgttttacgtcaaagtgccaatggaagaattattgtaatttcatcaatttggggtgagacaggagctagtatggaaactatttattcggcgatgaaaagtgcacaattaggtttcgttaaggcgcttagtcaagagcttgcactaacatcagtgacagtaaatgctatcgcacctggatttgtagccggtaatatggcaagtgagtggcaagaagatgaacttcaagcaatgataactgaattaccacaacagcgattggttttaccgagtgaggttgctcatacatgcgcctatttatatcacccaaatgctagaagtgttactggaactatacagaaagttaatggtgcttggtatatttaa

SEQ ID NO: 405678 - DNA, 1287 bp, Staphylococcus aureus
atgaaagagcgttattatgaattaatagacgaaagagtattcgaacaagaattagaaaatggtttacgattatttattatccccaaaccaggttttcaaaagacatttgtcacttacactacacaatttggttcattagataatcaattcaaaccccttggacaagaccaatttgttactgtacctgatggagttgctcactttttagaacataaattatttgaaaaagaagaagaagacttatttactgcgtttgctgaagataacgcacaagcaaatgcgtttacaagctttgatcgtacaagctacttgttcagtgcaactgataatattgaaaacaacattaaacgtttacttacaatggttgaaacgccttattttacaaaagaaactgttgataaagaaaaaggtattattgcagaagaaataaaaatgtatcaagagcaacctggatataaattaatgtttgatacattgcgtgcaatgtatcaacaacatccaatacgtgttgatattgccggtagtgtagaaagtatatacgatattacaaaagatgatttgtatctatgttatgaaacgttttatcatccatcaaatatggttttatttgttgttggcgatgtggatcctgaagcaatatgtcgaatagtaaaacaacacgaggatgctcgtaataaagttaaccaacccaaaatcgaacgaggacttgttgatgaaccggaggatgttaaagaagcatttgttactgaatctatgaaaattcaatcaccaagactaatgcttggttttaaaaataaaccattacaagaagcgcctcaaaaatatgtacaacgtgatttagaaatgtcattattctttgagttaatttttggggaagaaacagatttttatcagaatttattaaacgaaggacttatcgatgatacatttggttatcaatttgtactagagccgacgtatagtttttcaatcgtgacaagtgctactgaagaaccagataaattaaaaaaattattattagatgagttgcgtgataaaaaaggcaatttccaagatgcagaagcatttgaacttttgaaaaagcaatttataggtgaattcatatcaagtttaaactcacctgaatatattgctaatcaatatactaaattgtattttgaaggtgttagcgtgtttgacatgttagacattgttgaaaatatcacgttagatagtattaacgaaacgtcatcgttatatttaaatttagatcagcaagtcgatagtcgtttggagattaaaaagtaa

SEQ ID NO: 405679 - DNA, 1266 bp, Staphylococcus aureus
ttgagtagacaatctcaaccaaatatacatatcaaagtttcaccaacaactaaatttaaaacaactactatagtttttaaatttatggcacctttagaatatgacacaataacagctagatcattattaagcaaattattagttcgagcaactaagaaatggccaaccgataagtcgtttaataatcacttagccgatttatatggtgcgtatgtgaatagtacaatttcaaaattcaaagatcagcatgtcattacattttcattagaaattgttaatgaacgttatttaagaaacggtgaatcattatttaatcaaggattagatttattacaagaaatcatttggaatccattaattgaaaataaagcattcaatgataattttgttaaccaagagaaaacattattagccaaaaaaatagaagcaatggtagataataaagcacaatattcgtttttaaaattactcgaccatatgtttgaaaatgaagcatataaatacttatctacaggacaactagaacaaatcccacatattactgctgaaacactatatcatacatatcaatcaatgattaataatgatcaatgttctgtttatgttgtcggcaatgtagaacctgaaagtgttgagaaacaaatacgtgaaaaatttgcacttaaaccattcgataaacatcaattccaacattctactcatcatttacacgatgaagaagttgattatattgttgaatatgatgacgtggatcaagctaaattaaatatgggataccgttttccaacacaatatggacaaagtggatatgctgcctttgttgtatttaacatgatgtttggaggagatccttcatctgttttatttaatgaagtgcgagaaaagcaaagtttagcgtactctatacattcacaaattgatggcaaaaatggctatttatttgttttgagtggggtttcaagtgataagtacgaaactgcaaaagacactattataagtgaatttgaaaaaataaaagcaggagatttcactgaagaaaaattagagttagctaaaaaagtaatcatttctcatcgatatgaatctgaagatcgtccgaaaagtattatagagattatgcataaccaaatattattagagcaaccacaaagcaaagaaacatttataaatgatatacagaaggtaagtcgcgaagatattgtttctgttgctgaaaaagcatttttagatacaatctatgtgttgacaaaaggaggggataaataa

SEQ ID NO: 405680 - DNA, 714 bp, Staphylococcus aureus
atgtcagaaatgaatgcggtatataacgttaaacaatacattttaaatttgattaagcaaaataaattggaatatggtgaccaacttccaagtaatttatcaattgccagagaattaaatgtaaaaaccgacgatgtttatgaagcaattcaggcattgattactgaacaagtcattaaagataattttgaagagggcacaagtgttaagtcactgccccctttcttttatccattgaatgaacttataagtattgggcaaatgattaaaaatgcaggatttgaatgcggaactgaatacttaaattttgatgagcaaccagcaactatgttagatgcaaatttgttgagcgttgaagaaggatatccagtaaccattatagaacgattacgaactgccgatggagaaccggtcgtctattgtttagataaaattgctaaaaaagaattaacatgtacagagtatcaaatgagcaatggatcgattctaagtgcgataaaagaacaaagtaatcataatatttgttatgctgatacagaaattgaagcggtaaattatgaacctcgaatatccgaagtactgaatgcttcgccacacgaaggtttgattttattaaaaattacgcactataatgaatcagatgaacctattttgtattcattaaattatatgaaaaatagcttagttcaatttaaaatcactagaaaaatatag

SEQ ID NO: 405681 - DNA, 2370 bp, Staphylococcus aureus
ttggcacaagcaaaaaagaaatcgacagctaagaaaaaaacaacatcaaaaaaaagaacaaattcgaggaaaaagaagaatgataatccgatacgttatgtcatagctattttagtagttgtattaatggtgttgggtgttttccaattaggaataataggtcgtctaattgacagcttctttaattatttatttgggtacagtagatatttaacatatattttagtactcttagcaactggttttattacatactctaaacgtattcctaaaactagacgaacggctggttcgattgtattgcaaattgcattgctatttgtatcacagttagtttttcattttaatagtggtatcaaagctgaaagagaacctgtactttcttatgtgtatcagtcataccaacacagtcatttcccaaattttggtggcggtgtattaggcttttatttattagagttaagcgtacctttaatttcattatttggtgtatgtattattactattttattattatgctcaagtgttattttattaacaaaccatcaacatcgtgaagttgcaaaagttgcactggaaaatataaaagcttggtttggttcatttaatgaaaaaatgtcggaaagaaaccaagaaaaacaattgaagcgtgaagaaaaagcaagacttaaagaagaacaaaaggcacgtcaaaatgaacagccacaaataaaagatgtgagtgattttacggaagtgcctcaagaaagagatattccaatttatgggcatactgaaaatgaaagtaaaagccagagtcaaccaagtcgaaaaaaacgagtgtttgatgcagagaatagttcgaataacatcgtaaatcatcatcaagcagatcagcaagaacaattaacagaacaaactcataacagtgttgaaagtgaaaacactattgaagaagctggtgaagttacgaatgtatcgtatgttgttccaccgttaactttacttaatcaacctgcaaaacaaaaagcaacatctaaagctgaagtgcaacgtaaaggacaagtactagagaatacattaaaagattttggggtaaatgcaaaagtgacacaaattaaaattggtcctgcagtaactcaatatgaaattcaaccagctcaaggggttaaagtgagtaaaattgtaaacttgcataatgatattgcattagctttagcagcaaaagatgttagaatcgaagcgccaatacctggtcgttctgcagtaggtattgaagtgccaaatgagaaaatttcattagtttcactaaaagaagttttagatgaaaaattcccgtctaataataaactagaagttggattaggaagagatatatcaggtgatccaattactgttccactaaatgaaatgccacacttattggtggcaggatcgacgggtagtggtaaatctgtttgtataaatggtattattacaagtattttattaaatgctaagccgcatgaagttaaacttatgttaatcgatccgaaaatggttgaactaaatgtttataacggaattccacacttattaattccggttgttacaaatcctcataaagctgctcaagctttagaaaaaattgtagctgagatggaaagacgttatgatttattccaacattcatcaactagaaacattaaaggttataacgaattaatccgtaagcaaaatcaagaattagatgagaagcaaccagaattaccttatatcgttgttattgtagatgagcttgcagatttaatgatggtagctggtaaagaagttgaaaatgcgattcaacgtattacacaaatggcacgtgcagcaggtatacatttaattgtagcgacacaaagaccttctgtggatgtaattacaggtatcattaaaaataatattccatctagaatagcttttgctgtgagttctcaaacagattcaagaactattattggtactggcggcgcagaaaagttacttggtaaaggtgacatgttatacgttggaaatggtgactcatcacaaacacgtattcaaggggcgtttttaagtgaccaagaggtgcaagatgttgtaaattatgtagtagaacaacaacaggcaaattatgtaaaagaaatggaaccagatgcaccagtggataaatcggaaatgaaaagtgaagatgctttatatgatgaagcgtatttgtttgttgttgaacaacaaaaggcaagtacatcattgttacaacgccaatttagaattggttataatagagcatctaggttgatggatgatttagaacgcaatcaggtaatcggtccacaaaaaggaagcaagcctagacaagttttaatagatcttaataatgacgaggtgtaa

SEQ ID NO: 405682 - DNA, 1725 bp, Staphylococcus aureus
atgaatagtgagtttatatatggacgggtaacaaatttaggaggtaagattttgagtttaataaagaaaaagaataaagatattcgcattataccattaggcggtgttggcgaaattgctaaaaatatgtatatcgttgaagtagacgatgaaatgtttatgttagatgctggacttatgtttccagaagacgaaatgctaggtattgatattgttataccagacatttcatacgtacttgaaaataaagataaattgaagggtatattccttacacacggacatgagcacgcgattggtgcagtgagttatgttttagaacaattagatgcaccagtatatggatctaaattgacaatagcgttaattaaagaaaatatgaaagcccgtaatattgataaaaaagttcgctactatacagttaataatgattcaattatgagattcaaaaacgtgaatattagtttctttaatacgacacacagtattcctgatagtttaggtgtttgtattcacacttcatatggtgccattgtgtatacaggtgaatttaagtttgaccaaagtttacatggacattatgcaccagatattaaacgtatggcagagattggtgaagaaggcgtatttgtcttaatcagtgattctactgaggcagagaaacctggatataatactccggaaaatgtgattgaacatcatatgtatgatgcttttgcaaaagtgcgaggtcgcttgatagtttcatgttatgcttcgaactttatacgtattcagcaagttttaaatattgctagcaagctaaatcgtaaagtgtcatttttaggaagatcacttgaaagttcatttaatattgctcgtaaaatggggtatttcgacattcctaaagatttgctaattcctataacagaagttgataattatcctaaaaatgaagtgataattatagctactggtatgcaaggagaacctgtagaagccttaagtcaaatggcgcaacataagcataaaattatgaatatcgaagaaggcgattctgtatttttagcaattacggcttctgctaatatggaagttatcattgcgaatacattaaatgagcttgtacgtgctggcgcacatattattccaaataacaaaaagattcatgcttcaagtcatggttgcatggaagaattaaaaatgatgattaatattatgaaacctgaatactttattcctgtacaaggtgaatttaaaatgcagatagcacatgcgaagctagcagctgaagcaggtgttgcaccagaaaagattttccttgtggaaaaaggagatgtcattaattacaacggtaaagatatgatattaaatgaaaaggtaaattcaggaaatattttaatagatggcattggtattggggatgtaggaaatatcgtgttgagagaccgtcatcttttagcagaagatggtatctttattgctgttgtaacgttagatcctaaaaatagacgtatagctgcgggacctgaaattcaatctcgtgggtttgtatatgtacgtgaaagtgaagacttattacgtgaagcagaagagaaagtacgtgaaatagtagaggctggtttacaagaaaaacgcatagaatggtctgaaattaaacaaaatatgcgtgatcaaattagtaaactattattcgaaagtacaaaacgtcgtcctatgattattccagtaatttctgaaatttaa

SEQ ID NO: 405683 - DNA, 2097 bp, Staphylococcus aureus
atgtctcaagaaaagaaagtttttaaaactgaatgggcaggaagatctttaacgattgaaacagggcaattagctaaacaagcaaatggcgctgtattggttcgttatggagatacagtcgtgttatcgacggcaactgcatcaaaagaacctcgtgatggagatttcttcccattaacagtgaactatgaagaaaaaatgtacgctgcgggtaaaattcctggtggatttaaaaagagagaaggacgtcctggtgacgatgcaacattaactgcgcgattaattgatagaccaattagacctttattccctaaaggatataagcatgatgttcaaattatgaacatggtattaagtgcagatcctgattgttcaccacaaatggctgcaatgattggttcatctatggcgcttagtgtgtcggatattccattccaagggccaatcgccggtgtaaatgtgggttatattgacggtaaatatatcattaacccaacagtagaagaaaaagaagtttctcgtttagaccttgaagtagctggtcataaagatgcggtaaacatggtagaggcaggcgctagtgagattactgaacaagaaatgttagaggcgattttctttggtcatgaagagattcaacgtttagttgatttccaacaacaaatcgtcgaccacattcaacctgttaaacaagaatttattccagcagagcgtgatgaagcgctagttgaacgtgtaaaatctttaaccgaagaaaaaggacttaaagaaacagttttaacatttgataaacaacaacgagatgaaaatcttgataacttaaaagaagaaatcgtcaatgaatttatcgatgaagaagatccagagaatgaattacttattaaagaagtttatgcaattttaaatgaattagtgaaagaagaagttcgacgtttaattgcagatgaaaaaattagaccagacggccgtaaacctgatgaaatccgtccattagattctgaagttggtattttacctagaacgcatggttcaggtctatttacacgtggtcagactcaagcactttcagttttaacattaggtgctttaggcgattatcaattaattgatggtttaggacctgaagaagaaaaaagattcatgcatcattacaacttcccgaatttttcagtaggtgaaactggtccagtacgtgcgccaggtcgtcgtgaaattggacatggtgcgttaggtgaaagagcattaaaatatattattcctgatactgctgatttcccatatacaattcgtattgtaagtgaggtacttgaatcaaatggttcatcatctcaagcgtcaatttgtggatcaacattagcattaatggatgcgggcgtaccgattaaagcaccagttgctggtattgctatgggccttgttacacgtgaagatagctatacgattttaactgatatccaaggtatggaagatgcattaggtgatatggactttaaagtcgctggtactaaagaaggtattacagcaatccaaatggatattaaaattgacggtttaacgcgtgaaattatcgaagaggctctagaacaagcgagacgtggtcgtttagaaataatgaatcatatgttacaaacaattgatcaaccacgtactgaattaagtgcttacgcgccaaaagttgtaactatgacaattaaaccagataagattagagatgttatcggacctggtggtaaaaaaattaacgaaattattgatgaaacaggtgttaaattagatattgaacaagatggtactatctttattggtgctgttgatcaagctatgataaatcgtgctcgtgaaatcattgaggaaattacacgtgaagcggaagtaggtcaaacttatcaagccactgttaaacgtattgaaaaatacggtgcgtttgtaggcctattcccaggtaaagatgcgttgcttcacatttcacaaatttcaaaaaatagaattgaaaaagtggaagatgtattaaaaatcggtgacacaattgaagttaagattactgaaattgataaacaaggtcgagtaaatgcttcacatagagcattagaagaataa

SEQ ID NO: 405684 - DNA, 270 bp, Staphylococcus aureus
atggcaatttcacaagaacgtaaaaacgaaatcattaaagaataccgtgtacacgaaactgatactggttcaccagaagtacaaatcgctgtacttactgcagaaatcaacgcagtaaacgaacacttacgtacacacaaaaaagaccaccattcacgtcgtggattattaaaaatggtaggtcgtcgtagacatttattaaactacttacgtagtaaagatattcaacgttaccgtgaattaattaaatcacttggtatccgtcgttaa

SEQ ID NO: 405685 - DNA, 972 bp, Staphylococcus aureus
atgaaagtcatagaagtgacacatcctatacaatctaaacagtatattacagaggatgttgcaatggcattcggatttttcgatggcatgcataaaggtcatgacaaagtctttgatatattaaacgaaatagctgaggcacgcagtttaaaaaaagcggtgatgacatttgatccgcatccgtctgtcgtgttgaatcctaaaagaaaacgaacaacgtatttaacgccactttcagataaaatcgaaaaaattagccaacatgatattgattattgtatagtggttaatttttcatctaggtttgctaatgtgagcgtagaagattttgttgaaaattatataattaaaaataatgtaaaagaagtcattgctggttttgattttacttttggtaaatttggaaaaggtaatatgactgtacttcaagaatatgatgcgtttaatacgacaattgtgagtaaacaagaaattgaaaatgaaaaaatttctacaacttctattcgtcaagatttaatcaatggtgagttgcaaaaagcgaatgatgctttaggctatatatattctattaaaggcactgtagtgcaaggtgaaaaaaggggaagaactattggcttcccaacagctaacattcaacctagtgatgattatttgttacctcgtaaaggtgtttatgctgttagtattgaaatcggcactgaaaataaattatatcgaggggtagctaacataggtgtaaagccaacatttcatgatcctaacaaagcagaagttgtcatcgaagtgaatatctttgactttgaggataatatttatggtgaacgagtgaccgtgaattggcatcatttcttacgtcctgagattaaatttgatggtatcgacccattagttaaacaaatgaacgatgataaatcgcgtgctaaatatttattagcagttgattttggtgatgaagtagcttataatatctag

SEQ ID NO: 405686 - DNA, 918 bp, Staphylococcus aureus
atgtataatgggatattaccagtatataaagagcgcggtttaacaagtcatgacgttgtattcaaattgcgtaaaatattaaaaactaaaaaaataggtcacacgggtacgcttgatcccgaagttgcaggcgtgttaccggtatgtataggtaatgcaacgagagttagtgattatgttatggatatgggcaaagcttatgaagcaactgtatcgataggaagaagtacaacgactgaagatcaaacgggtgatacattggaaacaaaaggtgtacactcagcagattttaataaggacgatattgaccgattgttagaaagttttaaaggtatcattgaacaaattccgccgatgtactcatccgtcaaagtaaatggtaaaaaattatatgaatatgcgcgtaataatgaaacagttgaaagaccaaagcgtaaagttaatattaaagacattgggcgtatatctgaattagattttaaagaaaatgagtgtcattttaaaatacgcgtcatctgtggtaaaggtacatatattagaacgctagcaactgatattggtgtgaaattaggctttccggcacatatgtcgaaattaacacgaatcgagtctggtggatttgtgttgaaagatagccttacattagaacaaataaaagaacttcatgagcaggattcattgcaaaataaattgtttcctttagaatatggattaaagggtttgccaagcattaaaattaaagattcgcacataaaaaaacgtattttaaatgggcagaaatttaataaaaatgaatttgataacaaaattaaagaccaaattgtatttattgatgatgattcagaaaaagtattagcaatttatatggtacaccctacaaaagaatcagaaattaaacctaaaaaagtctttaattaa

SEQ ID NO: 405687 - DNA, 351 bp, Staphylococcus aureus
atgagcagtatgagagcagagcgtgttggtgaacaaatgaagaaggaattaatggatatcatcaacaataaagtcaaagatcctcgagttggttttattacaattacagatgttgttttaacaaatgatttatcgcaggctaaagtatttttaactgtattaggtaacgataaagaagtagaaaatacatttaaagcacttgataaagcaaaaggcttcattaagtctgaattaggttctagaatgcgattacgtattatgccggaattaatgtatgaatatgatcaatcaatcgaatatggtaataaaattgaacgaatgattcaagatttacacaaacaagatagataa

SEQ ID NO: 405688 - DNA, 2118 bp, Staphylococcus aureus
atgagtaaacaaagaatttacgaatatgcgaaagaattaaatctaaagagtaaagagattatagatgagttaaaaagcatgaatattgaggtttcaaatcatatgcaagctttggaagatgaccaaattaaagcattagataaaaagttcaaaaaagaacaaaagaacgacaataaacaaagcactcaaaataatcaccaaaaatcaaacaatcaaaaccaaaataaagggcaacaaaaagataacaaaaagaatcaacaacaaaataataaaggcaacaaaggcaataaaaagaataatagaaataataagaaaaataacaagaataataaaccacaaaatcaaccagctgctccaaaagaaataccatcaaaagtgacatatcaagaaggtattacagtaggcgaatttgcggataaattaaatgttgaatcatcagaaattatcaaaaaattattcttacttggtattgttgctaatatcaatcaatcattaaatcaagaaacaatcgaattaattgccgatgattatggcgttgaggttgaagaagaagttgtgattaatgaagaagacttatcaatctatttcgaagacgaaaaagatgatccagaggcaattgagagaccagcagttgtaacaattatgggacatgttgaccatggtaaaacgactttattagattcaattcgtcatacaaaagttacagcaggtgaagcaggcggaatcactcaacatattggtgcatatcaaattgaaaacgatggcaaaaaaatcactttcttagatacaccgggacatgctgcatttacaacgatgcgtgcgcgtggtgcacaagtaacagatattactattttagtagtagcagctgacgatggtgttatgccacaaacaattgaagcaattaaccatgctaaagaagcagaagtaccaattattgttgcagtaaataaaattgataaaccaacttcaaatcctgatcgagttatgcaagaattaactgaatatggtttaattcctgaagattggggcggcgaaacaattttcgttccactttctgcattaagtggtgatggtatcgacgatttattagaaatgataggattagttgcagaagttcaagaacttaaagcaaatcctaaaaaccgtgctgttggtacagttatcgaagctgaattagataaatcacgtggtccttctgcatcattattagtacaaaacggtacattaaatgttggtgatgcgattgtagttggtaatacttacggccgtatccgtgcaatggttaatgacttaggtcaaagaatcaaaacggctggtccatcaacgcctgttgaaattacaggtattaatgatgtgccacaagctggggatcgctttgttgtatttagtgatgaaaaacaagctcgtcgtattggtgaatcaagacacgaagctagcattatacaacaacgtcaagaaagtaaaaatgtttcattagataacctgtttgaacaaatgaaacaaggtgaaatgaaagatttaaacgttattattaaaggtgatgttcaaggttctgttgaagctttagctgcatcattaatgaaaattgatgttgaaggcgtaaatgttcgtatcattcatacagcggttggtgcaattaatgagtcagacgtgacacttgctaatgcctcaaatggtattatcattggtttcaatgttcgtccagacagtggtgcaaaacgtgctgcagaagctgaaaatgttgatatgcgtttacacagagttatttataatgttatcgaagaaattgaatcagcgatgaaaggtttacttgatccagaatttgaagaacaagttatcggacaagctgaagttcgtcaaacattcaaagtttctaaagttggtactattgctggatgttatgttactgaaggtaaaattacgcgaaatgctggtgtacgtattattcgtgatggtattgttcaatatgaaggcgaattagatacacttaaacgtttcaaagatgatgctaaggaagttgcaaaaggttatgaatgtggtattacaattgaaaactacaatgaccttaaagaaggcgatgttatcgaagcatttgaaatggttgaaattaagcgttaa

SEQ ID NO: 405689 - DNA, 318 bp, Staphylococcus aureus
atgagtatagatcaaatattaaactttttaggattagcaatgagagctggtaaagtaaaaacaggtgaatcagtcattgttaatgagattaaaaaaggaaatttgaagctcgttattgttgcaaatgatgcgtctgataatacagctaaattaattacagataaatgtaagagttacaaagttccattcagaaagtttggaaatcgaaatgaattgggaatagcacttggaaaaggtgagcgtgttaatgtagggattactgacccaggctttgctaaaaagttgctatcaatgatagatgaatatcataaggagtga

SEQ ID NO: 405690 - DNA, 285 bp, Staphylococcus aureus
atgaaaaagaaaaaaattccgatgcgaaaatgtattctttcaaatgaaatgcatcccaaaaaagatatgattcgtgttgttgttaataaagaaggcgaaatctttgcggatgttactggaaagaaacaaggccgtggcgcatatgtttctaaagatgttgctatggttgaaaaagcacaacaaaaagaaattttagaaaaatattttaaagcatctaaagagcaattggatcctgtttacaaagaaattattagattaatttatagagaagagatcccaaaatga

SEQ ID NO: 405691 - DNA, 1176 bp, Staphylococcus aureus
gtgtcaagtaatgaattattattagctactgagtatttagaaaaagaaaagaagattcctagagcagtattaattgatgctattgaagcagctttaattactgcatacaaaaagaattatgatagtgcaagaaatgtccgtgtggaattaaatatggatcaaggtactttcaaagttatcgctcgtaaagatgttgttgaagaagtatttgacgacagagatgaagtggatttaagtacagcgcttgttaaaaaccctgcatatgaaattggtgatatatacgaagaagatgtaacacctaaagattttggtcgtgtaggtgctcaagcagcgaaacaagcagtaatgcaacgtcttcgtgatgctgaacgtgaaattttatttgaagaatttatagacaaagaagaagacatacttactggaattattgaccgtgttgaccatcgttatgtatatgtgaatttaggtcgtatcgaagctgttttatctgaagcagaaagaagtcctaacgaaaaatatattcctaacgaacgtatcaaagtatatgttaacaaagtggaacaaacgacaaaaggtcctcaaatctatgtttctcgtagccatccaggtttattaaaacgtttatttgaacaagaagttccagaaatttacgatggtactgtaattgttaaatcagtagcacgtgaagctggcgatcgctctaaaattagtgtcttctctgaaaacaatgatatagatgctgttggtgcatgtgttggtgctaaaggcgcacgtgttgaagctgttgttgaagagctaggtggtgaaaaaatcgacatcgttcaatggaatgaagatccaaaagtatttgtaaaaaatgctttaagcccttctcaagttttagaagttattgttgatgaaacaaatcaatctacagtagttgttgttcctgattatcaattgtcattagcgattggtaaaagaggacaaaacgcacgtctagctgctaaattaaccggctggaaaattgatattaaatcagaaacagatgcgcgtgaagcgggtatctatccagtagttgaagctgaaaaagtaactgaagaagatgttgctttagaagatgctgacacaacagaatcaaccgaagaggtaaatgatgtttcagttgaaacaaatgtagagaaagaatctgaataa

SEQ ID NO: 405692 - DNA, 468 bp, Staphylococcus aureus
atgagtaaaattacagaacaagtagaagtgattgttaaaccaattatggaagacttgaattttgaacttgtagacgttgaatatgtcaaagagggtagagatcattttcttagaatctctattgataaagaaggtggcgtagatttaaatgattgtacgctagcttctgaaaaaataagtgaagctatggatgcaaatgatcctattcctgaaatgtattatttagacgtagcgtcacctggtgcagaacgtccaattaaaaaagaacaagatttccaaaatgcaataactaaacctgtatttgtttctttatatgtaccaattgaaggtgaaaaggaatggttaggcattttacaagaagtcaataatgaaacaattgtagtacaagttaaaatcaaagcaagaacgaaagatatagagataccgagagacaaaatagcaaaagcacgtcacgcagttatgatttaa

SEQ ID NO: 405693 - DNA, 4317 bp, Staphylococcus aureus
ttggcaatgacagagcaacaaaaatttaaagtgcttgctgatcaaattaaaatttcaaatcaattagatgctgaaattttaaattcaggtgaactgacacgtatagatgtttctaacaaaaacagaacatgggaatttcatattacattaccacaattcttagctcatgaagattatttattatttataaatgcaatagagcaagagtttaaagatatcgccaacgttacatgtcgttttacggtaacaaatggcacgaatcaagatgaacatgcaattaaatactttgggcactgtattgaccaaacagctttatctccaaaagttaaaggtcaattgaaacagaaaaagcttattatgtctggaaaagtattaaaagtaatggtatcaaatgacattgaacgtaatcattttgataaggcatgtaatggaagtcttatcaaagcgtttagaaattgtggttttgatatcgataaaatcatattcgaaacaaatgataatgatcaagaacaaaacttagcttctttagaagcacatattcaagaagaagacgaacaaagtgcacgattggcaacagagaaacttgaaaaaatgaaagctgaaaaagcgaaacaacaagataacaacgaaagtgctgtcgataagtgtcaaattggtaagccgattcaaattgaaaatattaaaccaattgaatctattattgaggaagagtttaaagttgcaatagagggtgtcatttttgatataaacttaaaagaacttaaaagtggtcgccatatcgtagaaattaaagtgactgactatacggactctttagttttaaaaatgtttactcgtaaaaacaaagatgatttagaacattttaaagcgctaagtgttggtaaatgggttagggctcaaggtcgtattgaagaagatacatttattagagatttagttatgatgatgtctgatattgaagagattaaaaaagcgacaaaaaaagataaggctgaagaaaagcgtgtagaattccacttgcatactgcaatgagccaaatggatggtatacccaatattggtgcgtatgttaaacaggcagcagactggggacatccagccattgcggttacagaccataatgttgtgcaagcatttccagatgctcacgcagcagcggaaaaacatggcattaaaatgatatacggtatggaaggtatgttagttgatgatggtgttccgattgcatacaaaccacaagatgtcgtattaaaagatgctacttatgttgtgttcgacgttgagacaactggtttatcaaatcagtatgataaaatcatcgagcttgcagctgtgaaagttcataacggtgaaatcatcgataagtttgaaaggtttagtaatccgcatgaacgattatcggaaacgattatcaatttgacgcatattactgatgatatgttagtagatgcccctgagattgaagaagtacttacagagtttaaagaatgggttggcgatgcgatattcgtagcgcataatgcttcgtttgatatgggcttcatcgatacgggatatgaacgtcttgggtttggaccatcaacgaatggtgttatcgatactttagaattatctcgtacgattaatactgaatatggtaaacatggtttgaatttcttggctaaaaaatatggcgtagaattaacgcaacatcaccgtgccatttatgatacagaagcaacagcttacattttcataaaaatggttcaacaaatgaaagaattaggcgtattaaatcataacgaaatcaacaaaaaactcagtaatgaagatgcatataaacgtgcaagacctagtcatgtcacattaattgtacaaaaccaacaaggtcttaaaaatctatttaaaattgtaagtgcatcattggtgaagtatttctaccgtacacctcgaattccacgttcattgttagatgaatatcgtgagggattattggtaggtacagcgtgtgatgaaggtgaattatttacggcagttatgcagaaggaccagagtcaagttgaaaaaattgccaaatattatgattttattgaaattcaaccaccggcactttatcaagatttaattgatagagagcttattagagatactgaaacattacatgaaatttatcaacgtttaatacatgcaggtgacacagcgggtatacctgttattgcgacaggaaatgcacactatttgtttgaacatgatggtatcgcacgtaaaattttaatagcatcacaacccggcaatccacttaatcgctcaactttaccggaagcacattttagaactacagatgaaatgttaaacgagtttcattttttaggtgaagaaaaagcgcatgaaattgttgtgaaaaatacaaacgaattagcagatcgaattgaacgtgttgttcctattaaagatgaattatacacaccgcgtatggaaggtgctaacgaagaaattagagaactaagttatgcaaatgcgcgtaaactgtatggtgaagacctgcctcaaatcgtaattgatcgattagaaaaagaattaaaaagtattatcggtaatggatttgcggtaatttacttaatttcgcaacgtttagttaaaaaatcattagatgatggatacttagttggttcccgtggttcagtaggttctagttttgtagcgacaatgactgagattactgaagtaaacccgttaccgccacactatatttgtccgaactgtaaaacgagtgaatttttcaatgatggttcagtaggatcaggatttgatttacctgataagacgtgtgaaacttgtggagcgccacttattaaagaaggacaagatattccgtttgaaacatttttaggatttaagggagataaagttcctgatatcgacttaaactttagtggtgaatatcaaccgaatgcccataactacacaaaagtattatttggtgaggataaagtattccgtgcaggtacaattggtactgttgctgaaaagactgcttttggttatgttaaaggttatttgaatgatcaaggtatccacaaaagaggtgctgaaatagatcgactcgttaaaggatgtacaggtgttaaacgtacaactggacagcatccagggggtattattgtagtacctgattacatggatatttatgattttacgccgatacaatatcctgccgatgatcaaaattcagcatggatgacgacacattttgatttccattctattcatgataatgtattaaaacttgatatacttggacacgatgatccaacaatgattcgtatgcttcaagatttatcaggaattgatccaaaaacaatacctgtagatgataaagaagttatgcagatatttagtacacctgaaagtttgggtgttactgaagatgaaattttatgtaaaacaggtacatttggggtaccagaattcggtacaggattcgtgcgtcaaatgttagaagatacaaagccaacaacattttctgaattagttcaaatctcaggattatctcatggtacagatgtgtggttaggcaatgctcaagaattaattaaaaccggtatatgtgatttatcaagtgtaattggttgtcgtgatgatatcatggtttatttaatgtatgctggtttagaaccatcaatggcttttaaaataatggagtcagtacgtaaaggtaaaggtttaactgaagaaatgattgaaacgatgaaagaaaatgaagtgccagattggtatttagattcatgtcttaaaattaagtacatgttccctaaagcccatgcagcagcatacgttttaatggcagtacgtatcgcatatttcaaagtacatcatccactttattactatgcatcttactttacaattcgtgcgtcagactttgatttaatcacgatgattaaagataaaacaagcattcgaaatactgtaaaagacatgtattctcgctatatggatctaggtaaaaaagaaaaagacgtattaacagtcttggaaattatgaatgaaatggcgcatcgaggttatcgaatgcaaccgattagtttagaaaagagtcaggcgttcgaatttatcattgaaggcgatacacttattccgccgttcatatcagtgcctgggcttggcgaaaacgttgcgaaacgaattgttgaagctcgtgacgatggcccatttttatcaaaagaagatttaaacaaaaaagctggattatctcagaaaattattgagtatttagatgagttaggctcattaccgaatttaccagataaagctcaactttcgatatttgatatgtaa

SEQ ID NO: 405694 - DNA, 1704 bp, Staphylococcus aureus
atgaagcaatccaaagtttttataccaacgatgcgtgacgtgccatcagaagcagaagcacaaagtcatcgtttattattgaaatcgggtttgataaaacaaagtacaagtgggatttatagttatttaccgctagcaacacgtgtgttaaataatattactgcaattgtgcgacaagaaatggaacgtatcgattctgttgaaattttaatgccagcgttacaacaagctgaattatgggaagaatcaggacgttggggtgcatatggcccagaattaatgcgtttacaagatagacatggaagacaatttgcattaggtccaacacatgaagaattagttacatcaatagtaagaaatgaattgaaatcatacaaacaattaccgatgacattattccaaattcaatctaaattccgtgatgaaaagagaccacgttttggtttacttcgtgggcgtgaatttattatgaaagatgcatattcattccatgctgacgaggcatcattagatcaaacgtatcaagatatgtatcaagcgtatagccgtatttttgagagagttggcattaacgcaagaccagtagttgcagattcaggtgctataggcggtagccatacacatgaatttatggcattaagtgctatcggtgaggatacaatcgtttacagtaaagaaagtgattatgctgctaacatcgaaaaagcagaagtcgtttacgaaccaaatcataagcatactactgtgcaacctttagaaaaaattgaaacaccaaatgttaagactgcgcaagaattggcagacttcttaggtagaccagtagatgaaatcgttaaaacgatgattttcaaagttgatggcgaatatattatggttttagtgcgtggccatcatgaaattaatgacattaaattaaaatcttatttcggcacagataatattgaattagcaacacaagacgaaattgttaatttagttggtgcaaatcctggttcactaggtcctgtaattgataaagaaatcaaaatttatgcagataattttgtgcaagatttaaataatttagttgtcggtgctaacgaagatggttatcacttaattaatgtaaatgtaggtagagacttcaacgttgatgaatatggcgatttccgttttattttagaaggcgaaaagttaagtgatggttcaggcgttgcacattttgctgaaggtattgaagttggtcaagtattcaaattgggtactaagtattcagaatcaatgaatgctacattcttagataaccaaggaaaagctcaatctttaattatgggttgttacggaattggaatttctagaacgctaagtgcgattgttgaacaaaatcacgatgataatggaattgtttggcctaaatcagttactccgtttgatttacatttaatttctattaatcctaagaaagatgatcaacgagaactagcagatgcactatatgctgaatttaatactaaatttgatgtgttgtacgatgatcgtcaggaacgtgcaggtgttaaatttaatgatgccgatttaattggtttaccactgcgaattgttgttggtaaacgtgcatcggaaggtattgtagaagttaaagaacgtttaacaggtgatagcgaagaagttcacattgatgacttaatgactgtcattacaaataaatatgataacttaaaataa

SEQ ID NO: 405695 - DNA, 1287 bp, Staphylococcus aureus
gtgagctatttagttacaataattgcatttattattgtttttggtgtactagtaactgttcatgaatatggccatatgttttttgcgaaaagagcaggcattatgtgtccagaatttgcgatcggtatggggccaaaaatttttagttttagaaaaaatgaaacactttacactattaggttattgcctgttggtggatatgttcgtatggcaggagatggcttagaagagccaccagtcgagcccggtatgaacgttaaaattaaacttaatgaagaaaatgaaataacacatatcatattagatgatcatcataagtttcaacaaattgaagcgatcgaagttaaaaaatgtgattttaaggatgacttattcatagaaggtatcactgcttatgataatgaaagacatcattttaaaattgctagaaagtctttctttgttgaaaatggtagcttagttcaaattgctccgagagacagacaatttgaacataaaaagccatggccgaaatttttaacattatttgcgggaccgttatttaactttatattagctttagtcctatttattggtcttgcatattatcaaggcacgcctacgtctactgtagaacaagtcgcagataagtatccagctcaacaagcaggattacaaaaaggtgataagatcgtccaaattggcaaatataaaatatctgaatttgatgatgttgataaggcgttagataaagttaaagataataagacgactgttaaatttgaacgtgatggtaaaacaaagtcagttgaattaacacctaaaaagactgaaaaaaaactgactaaagtaagttcagagacgaagtatgttctcggattccaaccagcgagtgaacatacactttttaaaccaattgtattcggatttaaaagctttttaatcggtagtacttatatttttacagctgtagtaggtatgttggctagtatatttacgggcggattctcatttgatatgttaaatggtccggttggtatttatcataacgtcgactcagttgttaaagcgggtatcattagcttaattggttacactgcgttattaagtgtaaacttaggtattatgaatttaattcctattcctgcactagacggtggtcgtattttatttgttatatatgaagcgattttcagaaaaccagttaataaaaaagcggaaacaacgattattgctattggtgccattttcatggtcgttataatgatattagtaacgtggaatgatattcgacgatatttcttataa

SEQ ID NO: 405696 - DNA, 783 bp, Staphylococcus aureus
atgaaagttagaacgctgacagctattattgccttaatcgtattcttgcctatcttgttaaaaggcggccttgtgttaatgatatttgctaatatattagcattgattgcattaaaagaattgttgaatatgaatatgattaaatttgtttcagttcctggtttaattagtgcagttggtcttatcatcattatgttgccacaacatgcagggccatgggtacaagtaattcaattaaaaagtttaattgcaatgagctttattgtattaagttatactgtcttatctaaaaacagatttagttttatggatgctgcattttgcttaatgtctgtggcttatgtaggcattggttttatgttcttttatgaaacgagatcagaaggattacattacatattatatgcctttttaattgtttggcttacagatacaggggcttacttgtttggtaaaatgatgggtaaacataagctttggccagtaataagtccgaataaaacaatcgaaggattcataggtggcttgttctgtagtttgatagtaccacttgcaatgttatattttgtagatttcaatatgaatgtatggatattacttggagtgacattgattttaagtttatttggtcaattaggtgatttagtggaatcaggatttaagcgtcatttcggcgttaaagactcaggtcgaatactacctggacacggtggtattttagaccgatttgacagctttatgtttgtgttaccattattaaatattttattaatacaatcttaa

SEQ ID NO: 405697 - DNA, 771 bp, Staphylococcus aureus
atgtttaaaaagctaataaataaaaagaacactataaataattataatgaagaattagactcgtctaatatacctgaacatatcgctattattatggatggtaatgggcgatgggctaagaagcgaaaaatgcctagaattaaaggtcattacgaaggtatgcaaacaataaaaaaaattactagggtagctagtgatattggtgttaagtacttaactttatacgccttttccactgaaaattggtcaagacctgaaagtgaagtaaattatattatgaatttgcctgtcaatttcttaaagacattcttaccggaactaattgaaaaaaatgtcaaagttgaaacaattggatttactgataagttgccaaaatcaacgatagaagcaattaataatgctaaagaaaagacagctaataataccggcttaaaattaatatttgcaattaattatggtggcagagcagaacttgttcatagtattaaaaatatgtttgacgagcttcatcaacaaggtttaaatagtgatatcatagatgaaacatatataaacaatcatttaatgacaaaagactatcctgatccagagttgttaattcgtacttcaggagaacaaagaataagtaatttcttgatttggcaagtttcgtatagtgaatttatctttaatcaaaaattatggcctgactttgacgaagatgaattaattaaatgtataaaaatttatcagtcacgtcaaagacgctttggcggattgagtgaggagtag

SEQ ID NO: 405698 - DNA, 555 bp, Staphylococcus aureus
atgagtgacattattaatgaaactaaatcaagaatgcaaaaatcaatcgaaagcttatcacgtgaattagctaacatcagtgcaggaagagctaattcaaatttattaaacggcgtaacagttgattactatggtgcaccaacacctgtacaacaattagcaagcatcaatgttccagaagcacgtttacttgttatttctccatacgacaaaacttctgtagctgacatcgaaaaagcgataatagcagctaacttaggtgttaacccaacaagtgatggtgaagtgatacgtattgctgtacctgccttaacagaagaacgtagaaaagagcgcgttaaagatgttaagaaaattggtgaagaagctaaagtatctgttcgaaatattcgtcgtgatatgaatgatcagttgaaaaaagatgaaaaaaatggcgacattactgaagatgagttgagaagtggtactgaagatgttcagaaagcaacagacaattcaataaaagaaattgatcaaatgattgctgataaagaaaaagatattatgtcagtataa

SEQ ID NO: 405699 - DNA, 723 bp, Staphylococcus aureus
atggctcaaatttctaaatataaacgtgtagttttgaaactaagtggtgaagcgttagctggagaaaaaggatttggcataaatccagtaattattaaaagtgttgctgagcaagtggctgaagttgctaaaatggactgtgaaatcgcagtaatcgttggtggcggaaacatttggagaggtaaaacaggtagtgacttaggtatggaccgtggaactgctgattacatgggtatgcttgcaactgtaatgaatgccttagcattacaagatagtttagaacaattggattgtgatacacgagtattaacatctattgaaatgaagcaagtggctgaaccttatattcgtcgtcgtgcaattagacacttagaaaagaaacgcgtagttatttttgctgcaggtattggaaacccatacttctctacagatactacagcggcattacgtgctgcagaagttgaagcagatgttattttaatgggcaaaaataatgtagatggtgtatattctgcagatcctaaagtaaacaaagatgcggtaaaatatgaacatttaacgcatattcaaatgcttcaagaaggtttacaagtaatggattcaacagcatcctcattctgtatggataataacattccgttaactgttttctctattatggaagaaggaaatattaaacgtgctgttatgggtgaaaagataggtacgttaattacaaaataa

SEQ ID NO: 405700 - DNA, 882 bp, Staphylococcus aureus
atggcaactatttcagcaaaacttgttaaagaattacgtgaaaaaactggcgcgggtatgatggattgtaaaaaagcgctaactgaaactgatggtgacatcgataaagcgattgactacctacgtgaaaaaggtattgctaaagcagctaaaaaagcagaccgtattgcggctgaaggtttagtacatgtagaaactaaaggtaacgacgcagttatcgttgaaatcaactctgaaacagactttgttgctcgtaacgaaggtttccaagagttagttaaagaaatcgctaatcaagtattagatacaaaagctgaaactgttgaagctttaatggaaacaactttaccaaatggtaaatcagttgatgaaagaattaaagaagcaatttcaacaatcggtgaaaaattaagtgttcgtcgttttgctatcagaactaaaactgataacgatgctttcggcgcttacttacacatgggtggacgcattggtgtattaacagttgttgaaggttcaactgacgaagaagcagcaagagacgttgctatgcatatcgctgcaatcaaccctaaatatgtttcttctgaacaagttagcgaagaagaaatcaaccacgaaagagaagttttaaaacaacaagcattaaatgaaggtaaaccagaaaacatcgttgaaaaaatggtggaaggacgtttacgtaaatacttacaagaaatttgtgctgtagatcaagacttcgttaaaaaccctgatgtaacagttgaagctttcttaaaaacaaaaggtggaaaacttgttgacttcgtacgctatgaagtaggcgaaggtatggaaaaacgcgaagaaaactttgcggatgaagttaaaggacaaatgaaataa

SEQ ID NO: 405701 - DNA, 768 bp, Staphylococcus aureus
atggcagtaatttcaatgaaacaattactagaagcgggtgttcacttcggtcaccaaacacgtcgttggaacccaaaaatgaaaaaatatatcttcactgagagaaatggtatttatatcatcgacttacaaaaaacagtgaaaaaagtagacgaggcatacaacttcttgaaacaagtttcagaagatggtggacaagtcttattcgtaggaactaaaaaacaagcacaagaatcagttaaatctgaagcagaacgtgctggtcaattctacattaaccaaagatggttaggtggattattaactaactataaaacgatctcaaaacgaatcaaacgtatttctgaaattgaaaaaatggaagaagatggtttattcgaagtattacctaaaaaagaagtagtagaacttaaaaaagaatacgaccgtttaatcaaattcttaggcggaattcgtgatatgaaatcaatgcctcaagcattattcgtagttgacccacgtaaagagcgtaatgcaattgctgaagctcgtaaattaaatattcctatcgtaggtatcgttgacactaactgtgatcctgacgaaattgactacgttatcccagcaaacgacgatgctatccgtgcggttaaattattaactgctaaaatggcagatgcaatcttagaaggtcaacaaggcgtttctaatgaagaagtagctgcagaacaaaacatcgatttagatgaaaaagaaaaatcagaagaaacagaagcaactgaagaataa

SEQ ID NO: 405702 - DNA, 774 bp, Staphylococcus aureus
atgagcttattatctaaaacgagagagttaaacacgttacttcaaaaacacaaaggtattgcggttgattttaaagatgtagcacaaacgattagtagcgtaactgtaacaaatgtatttattgtatcgcgtcgaggtaaaattttaggatcgagtctaaatgaattattaaaaagtcaaagaattattcaaatgttggaagaaagacatattccaagtgaatatacagaacgattaatggaagttaaacaaacagaatcaaatattgatatcgacaatgtattaacagtattcccacctgaaaacagagaattattcatagatagtcgtacaactatcttcccaattttaggtggaggggaaagattaggtacattagtacttggtcgagtacatgatgattttaatgaaaatgatttggtactaggtgaatatgctgctacagttattggtatggaaatcttacgtgagaagcatagtgaagtagaaaaagaagcgcgcgataaagctgctattacaatggcaattaattcattatcttattctgaaaaagaagcgattgaacatatctttgaagaacttggcggtacggaaggcctattaatcgcatcaaaagttgcagatagagttggtattactagatctgtaattgtaaatgcactacgtaaattagaaagtgctggtgtaattgaatcacgttctttaggaatgaaaggtactttcattaaagttaaaaaagaaaaattcttagatgaattagaaaaaagtaaataa

SEQ ID NO: 405703 - DNA, 1404 bp, Staphylococcus aureus
atggatacagctggaataagattaactccaaaagaaatcgtatctaaattaaatgaatacatcgttggacaaaatgatgctaaacgtaaagtggcaattgccctacgtaatcgatacagaagaagtttattagatgaggaatcaaagcaagaaatttcacctaaaaatattttgatgattggaccaaccggcgttggtaaaactgaaattgcaagaagaatggccaaagttgtcggcgcgccatttataaaagtagaagctactaaatttactgaggtaggttatgtaggacgagatgttgaaagtatggttagagatcttgttgatgtttcagtaagattagtcaaggcgcagaaaaaatcattggtacaagatgaagcaacagctaaggccaatgaaaaacttgttaagttattagttccaagtatgaaaaagaaagcgtctcaaacgaataatcctttagagtcacttttcggaggtgcaattccaaatttcggacaaaataacgaagatgaagaagaaccacctactgaggaaattaaaacaaaacgttctgaaattaagagacagctagaagaaggcaaacttgaaaaagaaaaggtaagaattaaagtcgaacaagatcctggtgctttaggtatgctaggtacaaatcaaaatcagcaaatgcaagagatgatgaatcaattaatgcctaaaaagaaagttgagcgagaagttgctgttgagacggcaaggaaaatcttagctgatagttatgcggatgaactaattgatcaagaaagcgctaaccaagaagcgcttgaattagcagaacaaatgggtatcatctttatagatgaaatcgacaaagttgcgacgaataatcataatagtggtcaagatgtctcaagacaaggtgttcaaagagatattttacctatacttgaaggtagcgttattcaaaccaaatatggtactgtgaatactgaacatatgctgtttataggtgctggagctttccatgtatctaagccgagtgacttgataccagaattgcaaggtcgttttccgattagagttgaacttgatagtttatcggtagaagattttgtaagaattttgacagaaccaaaattgtcattaattaaacaatatgaagcattgcttcaaacagaagaagttactgtaaactttaccgatgaagcaattactcgcttagctgagattgcttatcaagtaaatcaagatacagacaacattggtgcacgtcgacttcatacaattttagaaaagatgctagaagatttatcattcgaagcaccaagtatgccgaatgcagttgtagatattaccccacaatatgttgatgataaattaaaatcaatttcaacaaataaagatttaagtgcatttattctataa

SEQ ID NO: 405704 - DNA, 546 bp, Staphylococcus aureus
atgagtaatacaacattacatgcaacaacaatttatgctgtaagacataatgggaaagcagctatggctggagatgggcaagtaacgcttggtcaacaagtcatcatgaaacaaacggcaagaaaagtgcgacgtttatatgaaggtaaagtgttagctggtttcgcaggtagtgtagcagatgcgtttacgttatttgaaaaattcgaaacaaaattacaacagtttagtggtaacttagaaagagctgctgttgaattggcacaagaatggcgaggcgataaacaattacgtcaattagaagctatgctaattgtaatggataaagatgctattttagttgtcagtggaactggcgaagttattgctccagatgatgaccttatcgctattggatcaggaggcaactacgcattaagcgcaggacgtgcattgaaacgccatgcatcgcatttgtctgctgaagaaatggcatatgagagcttgaaagtagcggctgatatttgtgtctttaccaacgataatattgttgtcgaaacactataa

SEQ ID NO: 405705 - DNA, 897 bp, Staphylococcus aureus
ttgaatcatattcaagatgcgtttttaaatacattgaaagttgaacggaatttttcggaacacacattgaaatcatatcaagatgacttaattcagtttaatcaatttttagaacaagaacatttagagttgaatacttttgaatacagagatgctagaaattatttgagctatttatattcaaatcatttgaaaagaacatctgtttctcgtaaaatctcaacgttaagaactttctatgaatattggatgacgcttgatgagaacattattaatccatttgttcaattagtacatccgaaaaaagaaaaatatcttccgcaattcttttacgaagaagaaatggaagcgttattcaaaactgtagaagaggacacttcaaaaaatttacgggatcgagttattcttgaattgttgtatgctacaggcatccgtgtttcggaattagtaaatattaaaaaacaagatatagatttttacgcgaatggtgttaccgtattaggaaaagggagcaaagagcgctttgtaccgtttggtgcttattgtagacaaagcatcgaaaattatttagaacatttcaaaccaattcagtcatgcaatcatgattttcttattgtaaatatgaagggtgaagcaatcactgaacgcggtgtacgatatgttttaaatgatattgttaaacgaacagcaggcgtaagtgagattcatccccacaagctcagacatacatttgcaacgcatttattgaatcaaggtgcagacctaagaacagtacaatcgttattaggtcatgttaatttgtcaacaactggtaaatatacacacgtatctaaccaacaattaagaaaagtgtatctaaatgcacatcctcgagcgaaaaaggagaatgaaacatga

SEQ ID NO: 405706 - DNA, 1308 bp, Staphylococcus aureus
atgactcaaactgtaaatgtaataggtgctggtcttgccggttcagaagcggcatatcaattagctgaaagaggaattaaagttaatctaatagagatgagacctgttaaacaaacaccagcgcaccatactgataaatttgcggaacttgtatgttccaattcattacgcggaaatgctttaactaatggtgtgggtgttttaaaagaagaaatgagaagattgaattctataattattgaagcggctgataaggcacgagttccagctggtggtgcattagcagttgatagacacgatttttcaggttatattactgaaacacttaaaaatcatgaaaatatcacagttattaatgaagaaattaatgccattccagatggatacacaattatcgcaacaggaccacttactacagaaacccttgcgcaagaaatagtggacattactggtaaagatcaactttatttctatgatgcggctgctccaattattgaaaaagaatctattgatatggataaagtttacttaaagtcccgttatgataaaggtgaagctgcatatttaaactgtcctatgactgaggatgaatttaatcgcttttatgatgcagtattagaagctgaagttgcgcctgtaaattcatttgaaaaagaaaaatatttcgagggttgtatgccttttgaagtaatggcagaacgcggacgcaagacattactatttggaccaatgaaaccagtaggattagaagatccaaagactgggaaacgtccttatgcggtggttcaattaagacaagatgacgctgctggtacactctacaatattgttggcttccaaacgcatttaaaatggggagctcaaaaagaagtcattaaattaattccaggcttagaaaatgttgatattgttagatatggtgtgatgcatagaaataccttcattaattcaccggacgtattaaacgagaaatatgaattgatttcacaaccaaacatacagtttgcgggacaaatgactggtgttgaaggttatgtagaaagcgcagctagcggcttagttgcaggtatcaatcttgcgcataaaatattaggcaagggtgaggtagtatttccgagagaaacaatgattggaagtatggcttactatatttctcatgctaaaaacaataagaatttccaacctatgaatgctaacttcgggttattaccatctttagaaactagaattaaagataaaaaagaacgctatgaagcacaagctaatagagctttggattacttagaaaatttcaaaaaaactttataa

SEQ ID NO: 405707 - DNA, 2076 bp, Staphylococcus aureus
atgacattggcagataatttagtcattgttgaatcgcctgcaaaagcaaaaaccattgaaaagtatttaggtaagaaatataaagttatagcttcaatgggacacgtcagagacttaccaagaagtcaaatgggtgtcgacactgaagataattacgaaccaaaatatataacaatacgcggaaaaggtcctgttgtaaaagaattgaaaaaacatgcaaaaaaagcgaaaaacgtctttctcgcaagtgaccccgaccgtgaaggtgaagcaattgcttggcatttatcaaaaattttagagcttgaagattctaaagaaaatcgcgttgttttcaacgaaataactaaagacgctgttaaagaaagttttaaaaatcctagagaaattgaaatgaacttagtcgatgcacaacaagcgcgtcgaatattagatagattagttggctataacatctcgccagttctttggaaaaaagtaaaaaaagggttgtcagcgggtcgagttcaatctgttgcacttcgtttagtcattgaccgtgaaaatgaaattcgaaactttaaaccagaagaatattggactattgaaggagaatttagatacaaaaaatcaaaattcaatgctaaattccttcattataaaaataaaccttttaaactaaaaacgaaaaaagatgttgagaaaattacagctgcattagatggagatcaattcgaaattacaaacgtgactaaaaaagaaaaaacgcgtaatccagcaaacccatttacaacttctacattacaacaagaggcggcacgtaaattaaactttaaagcaagaaaaacaatgatggtcgcacaacaattatatgaaggtatagatttgaaaaaacaaggtacgattggtttaataacatatatgagaaccgattctacacgtatttcagatactgccaaagttgaagcaaaacagtatataactgataaatacggtgaatcttacacttctaaacgtaaagcatcagggaaacaaggtgaccaagatgcccatgaggctattagaccttcaagtactatgcgtacgccagatgatatgaagtcatttttgacgaaagaccaataccgattatacaaattaatttgggaacgatttgttgctagtcaaatggctccagcaatacttgatacagtctcattagacataacacaaggtgacattaaatttagagcgaatggtcaaacaatcaagtttaaaggatttatgacactttatgtagaaactaaagatgatagtgatagcgaaaaggaaaataaactgcctaaattagagcaaggtgataaagtcacagcaactcaaattgaaccagctcaacactatacacaaccacctccaagatatactgaggcgagattagtaaaaacactagaagaattgaaaattgggcgaccatcaacttatgcaccgacaatagatacgattcaaaagcgtaactatgtcaaattagaaagtaagcgttttgttcctactgagttgggagaaatagttcatgaacaagtgaaagaatacttcccagagattattgatgtggaattcacagtgaatatggaaacgttacttgataagattgcagaaggcgacattacatggaggaaagtaatcgacggtttctttagtagctttaaacaagatgttgaacgtgctgaagaagagatggaaaagattgaaatcaaagatgagccagccggtgaagactgtgaaatttgtggttctcctatggttataaaaatgggacgctatggtaagttcatggcttgctcaaacttcccggattgtcgtaatacaaaagcgatagttaagtctattggtgttaaatgtccaaaatgtaatgatggtgacgtcgtagaaagaaaatctaaaaagaatcgtgtcttttatggatgttcgaaatatcctgaatgcgactttatctcttgggataagccgattggaagagattgtccaaaatgtaaccaatatcttgttgaaaataaaaaaggcaagacaacacaagtaatatgttcaaattgcgattataaagaggcagcgcagaaataa

SEQ ID NO: 405708 - DNA, 873 bp, Staphylococcus aureus
ttgattaaactatttttgcttaagttatactgggcacacttttcgactaaacaaattcatcaatttttaatggcatatcctaatgtaattaaagaggagggaagaaaaaaagatagttatttatgtgaatgggtgaatagggaagaaaatgttcatttattacgtaaatactatgcttttataaaacttgatcataacgatattattaaagaactgcagaaattaaaagtaagttacattacatatatggattctgaatacccagtgctattaaaagaaatatatcaatttccattacttcttttctataaagggaacatcaaattaataaataatatgcatcatttggcagtagtaggtgcaagagattctacaagttatacccaacagtctttagaatttttattatcaaatgataaaagcaaatatttaacaattgtttccggccttgctcaaggagctgatgcaatggcacatcaaatagctttaaaatacaatctccctacaattgcagttttagcctttggccatcaaacacattatcccaaaagtacattagcattaagaaataaaatagaagaaaaaggtttagttatatctgaatatccaccacatacaccaatcgctaaatatagatttcctgagcgcaatagaattatcagcggtttgtcaaaaggggttttaattactgaggctaaggaacaatgtggcagtcacatcacgatagattttgcattagagcaaaatagaaatgtttatgttttacctggatctatgtttaatcctatgacaaaaggtaatttattacgtatccaagaaggtgctaaggtagtattaaacgctaatgatatatttgaagactactatatttaa

SEQ ID NO: 405709 - DNA, 1245 bp, Staphylococcus aureus
atgaaattttcaactttaagtgaagaagaatttaccaactacaccaaaaagcacttcaaacattatacacagtctatagaattatataattatagaaataaaataaatcatgaagcacatattgtgggagtgaagaatgataaaaatgaagttatagctgcatgtttattaacagaggcacgaatttttaaattctacaaatatttctactctcatagaggtcctttacttgattatttcgatgctaaattagtttgttacttttttaaagaattatctaaattcatttataaaaatagaggagtatttattcttgttgatccatatttaatagagaatttaagagatgcaaatggtaggataataaagaattataataattcagtgatagtaaagatgctagggaaaattgggtatctccatcaaggttatacaacaggatattcaaataaaagtcaaattaggtggatttctgtattggatttaaaagataaagatgagaatcaacttttaaaagaaatggaataccaaactagaagaaatataaaaaagactattgagattggtgttaaggttgaagatttatctattgaagaaacaaatcgattttataaattgtttcaaatggctgaagaaaaacatggttttcatttcatgaatgaagattattttaaacgaatgcaagaaatatataaagataaggcaatgttaaagatagcttgtataaatcttaatgaatatcaagataaattaaaaatacaattattgaaaatcgaaaatgaaatgatgactgtgaacagagcattaaatgaaaatccaaattctaaaaaaaataaatcaaaattaaatcagttaaatatgcaattatctagtattaataatagaattagtaaaaccgaagaactaatatttgaagatggacctgttttggatttagctgctgctttatttatatgtactgatgatgaagtttattatctatcaagtggatcaaatccgaaatataatcagtatatgggtgcatatcatctacaatggcatatgataaaatatgcaaaatcacataatattaataggtataatttttatggaataacaggcgtctttagtaatgaggcggatgattttggtgttcaacaatttaaaaagggttttaatgcacatgttgaagaattaattggtgatttcatcaaaccagtaagaccaattctatataaatttgcaaaacttatttataaggtttaa

SEQ ID NO: 405710 - DNA, 1119 bp, Staphylococcus aureus
atgaataaacaacaaagtaaagtacgctattcaattagaaaagttagtattggaattttgtcaatttcaataggtatgtttttggcattgggtatgtcgaacaaagcatatgcagatgaaattgataaatctaaagattttacaagagggtatgagcaaaatgtattcgcgaaatcagagttaaatgctaataaaaatacgacaaaagacaaaataaaaaatgaaggtgctgttaaaacatcggacacaagtttaaagttagacaacaaatcagcaatttcaaacggaaatgaaattaatcaagatataaagatttcaaatactccgaaaaactcaagccaaggtaacaatctagttattaataacaatgaacttactaaagaaattaaaattgcaaacttggaagctcaaaattctaatcagaagaaaacgaataaagttactaataattactttggttactacagttttagagaagctccaaaaacacaaatctatactgtaaaaaaaggagacacacttagtgctatagcattaaaatacaaaactacagtttcaaatattcaaaatacaaataatatagcaaatcctaatttaatatttattggtcaaaaattaaaagtgccaatgacaccattagtagaaccaaaaccaaaaacagtgtcttcaaataataaaagtaatagtaatagcagtacattaaattatttgaaaacattagagaatagaggatgggatttcgacggtagttatggatggcaatgtttcgatttagttaatgtatattggaatcatctttatggtcatggattaaaaggatatggagctaaagatataccatatgcaaataattttaatagtgaagctaaaatttatcacaacacaccaactttcaaagctgaacctggggacttagtggtttttagtggaagatttggtggaggatatggtcatacagctattgtcttaaatggtgattatgatggaaaattaatgaagttccaaagtttagatcaaaactggaataatggtggatggcgtaaagcagaggttgcacataaagttgttcataattatgaaaatgatatgatttttattagaccatttaaaaaagcataa

SEQ ID NO: 405711 - DNA, 909 bp, Staphylococcus aureus
atgagtgtatttatagataagaatactaaagtaatggtacaaggtattacagggtctactgcccttttccatacaaaacaaatgcttgattatggtacgaaaatagtagcaggtgtgacgcctggtaaaggtggtcaagttgttgaaggcgttcctgttttcaacactgttgaagaagctaaaaatgaaactggggcaacggtttcagtcatttacgttccagcaccatttgctgcagactcaattttagaagcagctgatgcagacttagacatggttatttgtatcactgaacatattcctgtattagacatggttaaagttaaacgctacttacaaggtagaaaaacacgtttagttggtccgaactgtccaggtgtgattacagcagatgaatgtaaaattggtattatgcctggctatattcacaaaaaaggtcatgttggtgtagtatctcgttcaggtacattaacatatgaagcagtgcaccaattgactgaagaaggtattggtcaaactacagctgttggtattggtggagacccagtcaacggaacaaactttattgatgttttaaaagcattcaatgaagatgacgaaacgaaagcagttgttatgattggtgaaatcggtggtacggctgaagaagaagcagctgaatggattaaagcgaatatgacaaaaccagttgtaggctttatcggtggacaaacagcacctcctggaaaacgtatgggacatgctggtgcaatcatttcaggtggtaaaggtactgctgaagagaaaattaaaacattaaatagttgtggtgtgaaaacagcggcaacaccttcagaaattggttcaacattaattgaagctgctaaagaagcaggtatttatgaatcattattaactgttaataaataa

SEQ ID NO: 405712 - DNA, 1167 bp, Staphylococcus aureus
atgaatatccacgagtatcaaggtaaagaaatatttcgttcaatgggcgttgcagttccagaaggacgagtagcatttactgctgaagaagcggtggagaaagcaaaagaattaaattctgatgtttatgttgtaaaagcacaaattcatgctggaggtagaggtaaagcaggcggagtaaaaattgctaaatctttatctgaggtagaaacatatgcaaaagaattattagggaaaactttggtgacacatcaaactggtccagaaggtaaagaaattaagcgtttatatatcgaagaaggttgtgctattcaaaaagaatattacgttggattcgttattgatcgtgcgactgaccaagtaacattgatggcgtctgaagaagggggcactgagattgaagaagttgctgcgaagactcctgaaaagatcttcaaagaaactatcgatccagtaatcggactttcaccattccaagcaagacgaattgcgtttaatattaatattcctaaagaatctgttaacaaagctgctaaattcttattagcactttataatgtattcattgaaaaagattgttcaatcgtagaaatcaacccattagttacaacagctgatggtgatgtattggcattagatgctaaaattaattttgatgataatgcattattcagacataaagatgttgtagaattacgtgatttagaagaagaagatccgaaagagattgaagcgtctaaacatgatttatcatacattgcattagatggtgacatcggatgtatggttaatggtgcaggtttagccatggcaacaatggatacgattaatcatttcggtggaaacccagccaatttcttagatgcaggcggaagcgctactagagaaaaagtaactgaagcatttaaaatcattttaggtgatgaaaatgttaaaggtatttttgtaaacattttcggtggcattatgaaatgtgatgttatcgcagaaggtatcgttgaagctgtaaaagaagtagatttaactttaccactagttgtacgcctagaaggtacaaatgttgagttaggtaaaaaaatcttaaaagactcaggattagcaattgaaccagcagcaacaatggctgaaggtgcacaaaaaattgttaaactagtcaaagaagcataa

SEQ ID NO: 405713 - DNA, 768 bp, Staphylococcus aureus
atgacgctaacaattaaagaagttacgcagttgattaatgcggttaatacaatagaagaattagaaaatcatgaatgctttttagatgagcgaaaaggtgttcaaaatgccatagctaggcgcagaaaagcgttagaaaaagaacaagctttaaaagaaaagtatgttgaaatgacttactttgaaaatgaaatattaaaagagcatcctaatgctattatttgtgggattgatgaagttggaagaggacctttagcaggtccagtcgttgcatgcgcaacaattttaaattcaaatcacaattatttgggccttgatgactcgaaaaaagtacctgttacgaaacgtctagaattaaatgaagcactaaaaaatgaagttactgcttttgcatatgggatcgcgacagctgaagaaatagatgaatttaatatttataaagctactcaaatcgccatgcagcgagctattgatggattatcagtacaaccaacgcatttattgatagacgcgatgacgcttgataatgcactgcctcaagtatctttaatcaagggtgatgcaagaagtgtgtccattgcagctgcaagtatcatggcaaaggtttttcgtgatgattatatgacacagttatctaaagattatcctgaatatggttttgaaaaaaacgcgggttacggtaccaaacaacatttactagcaatcgatgatattggcattatgaaagagcatagaaaaagctttgaacctataaaatcgttactgtaa

SEQ ID NO: 405714 - DNA, 885 bp, Staphylococcus aureus
atggttattcaatggtatccaggacatatggcgaaagccaaaagagaagtaagtgaacaattaaaaaaagtagatgtagtgtttgaactagtagatgcaagaattccatatagttcaagaaaccctatgatagatgaagttattaaccaaaaaccacgtgttgttatattaaataaaaaagatatgtctaatttaaatgagatgtcaaaatgggaacaattttttattgataaaggatactatcctgtatcagtggatgctaagcacggtaaaaatttaaagaaagtggaagctgcagcaattaaggcgactgctgaaaaatttgaacgcgaaaaagcgaaaggacttaaacctagagcgataagagcaatgatcgttggaattccaaatgttggtaaatccacattaataaataaactggcaaagcgtagtattgcgcagactggtaataaaccaggtgtgaccaaacaacaacaatggattaaagttggtaatgcattacaactattagacacaccagggatactttggcctaaatttgaagatgaagaagtcggtaagaagttgagtttaactggtgcgataaaagatagtattgtgcacttagatgaagttgccatctatggattaaactttttaattcaaaatgatttagcgcgattaaagtcacattataatattgaagttcctgaagatgcagaaatcatagcgtggtttgatgcgatagggaaaaaacgtggcttaattcgacgtggtaatgaaattgattacgaagcagtcattgaactgattatttatgatattcgaaatgctaaaataggaaattattgttttgatatttttaaagatatgactgaggaattagcaaatgacgctaacaattaa

SEQ ID NO: 405715 - DNA, 2607 bp, Staphylococcus aureus
gtgttaaaaaagtggctaaattcaaacgtcaaacaattctttgttataactttcattagtgtaatattaacgcttattttattttctactcatatctatgattatattgtgaatggtactgtttttagcggggctggagatggattccgtcaaatgatgccatttcaaatgtatttgtatgaacatctacgtagtttttctagtttatatgatgcatcgtttggattaggtggcgattatatgaaaggactatcatattattattcgctgtcacctttaatgtggctaaattttctattcattaaaataggagaaacggttggtatatttaatccgacgacaatacatttttggccgacaaaccaacttattatggctatgatacgagctatcataacatttgtcgtgaccttctacttatttaaaatattacactttaaacgctcagcaaatatgatcgctacgattttatacggcatgtcaactgtcgttatatactttaattttacttggtcattttatggaaatttattatatttattgccattatcgattcttggtttggaaagatattttcaacaacgcaaaatcggtattttcattgttgcgatagccttaacactatttagcaatttttatttcagttattatcaagctattattataggttgctactatttatatcgactcattttcacttacaaatatgacattgtctctagaacacaaaaattaatttgcgtcatatctgctacagttttgagtgtgttatcaagtgtatttggtttattcactggcatttctgcgtttttggaaaatgacagaaagcaaaatcccaatgttgatataccgtttttgacaccacttgattatcattattttttctttagcgatggattttatattacgatttcaattcttactatcgttgcattattgtcattcaaactgtatcgtttttacttttatagacttttcgcaatagtaacatggatattatttataggttcattatcacagtatttcgacagtgcttttaatggtttttcatttccagaaaggcgttgggtgtatatcttagcactatcatcaagtgctctttgcggattgtttattcaacatttatcaacattaaatatgaaatattatttaatcagaacaatacccgtatgcatcatcgcaatactttatgtattactatcaccgacacacccacttgcacttatagtaggtattatcctgctaatagtgcttgccgttattttaaaatttagtttatggcgttataaaaaattaaccgttgcaatattagtattaatcgttatgattcaacaaatcgtcattttagataacaacaaaaacatggcaatcaaaccttatcaacaatcattatcaacgttgaaacaacatgattaccatagtaactatgtaaaccagcttataaaaaagataaatcaaaatgcaacaggctcatttaatcgcattgattatatgtcagactatgcattaaattcaccatttatatatcattataatggcatttcattatattctagtatttttaatggagacattttaaaatattatgacaagacactccaaattaatatgccaatcgataaaaacagcacttatagattacttggcaatcgtcaaaatttactatcactttggaatgttaatgatcgaattagagtgaatcatgatgacaacttaccatatggatttaaaattaagtctgaacacaaagacaataaagttcgttggattcattctaaaaataccatccattatccaagtgcacatattacaaataaggtcttttccaataaagaattaaaatctccattagataaagaacaagcaatgttgcaagggattgtttctaacaatattaaagatgttaatacacattttaaagccaataaaaatttactatcagattcaacaattaaattaaatagtgcagcctggcaatctcctacaaaacatttattacaagttaaacaaaataatggtggtctaactgtacagttgccaaaatcagtttctaatcaatttaaagatttgtattttgaaatggatttagaattactttcgccggataaagctcatgatgttaaagtgaatgaatatacacaagaaagaaataaactcacttataaatatcgacgcgttgtaacacccgtaacgatacgcattaaagctccagatagaattagattatcattgcctaaaggtaagtatcgagtaaatttaaaagggatatacggcgaagattataccacgcttaaagacgcttcaaattcattagaagctgtcaaagttagtaagacaaagcatggttatactattactaaaaataaaaattcatctgggtatattgttttgccaacagcatataatcaaggtatgaaagcgacatcaggtgatcaaagtcttaaagttgaacaagtaaatggtgttatgaccggcattaaagcacctaaaaatataacaaagattcaattgagctataccccaccatactattatttacttataacaattactatatttggcattatatgtagtattattttcacgagatgggcaagacaaaaataa

SEQ ID NO: 405716 - DNA, 351 bp, Staphylococcus aureus
atgacaaatcacaaattaatcgaagcagtaactaaatcacaattacgtacagacttaccaagtttccgtcctggtgatactttacgtgtacacgtacgtatcattgagggtactcgtgagcgtatccaagtattcgaaggcgttgtaattaaacgtcgtggcggtggcgtttctgaaacgtttacagttcgtaaaatttcatcaggtgttggcgtggaacgtacattcccattacacacaccaaaaattgaaaaaatcgaagttaaacgtcgtggtaaagtacgtcgtgctaaattatattacttacgtagtttacgtggtaaagctgctagaatccaagaaattcgttaa

SEQ ID NO: 405717 - DNA, 738 bp, Staphylococcus aureus
atgaaaattgattatttaactttatttcctgaaatgtttgatggtgttttaaatcattcaattatgaaacgtgcccaagaaaacaataaattacaaatcaatacggttaattttagagattatgcaattaacaagcacaaccaagtagatgattatccgtatggtggcggacaaggtatggtgttaaagcctgaacctgtttttaatgcgatggaagacttagatgtcacagaacaaacacgcgttattttaatgtgtccacaaggcgagccattttcacatcagaaagctgttgaattaagcaaggccgaccacatcgttttcatatgcggacattatgaaggttacgatgaacgtatccgaacacatcttgtcacagatgaaatatcaatgggtgactatgttttaactggtggagaattgccagcgatgaccatgactgatgctattgttagactgattccaggtgttttaggtaatgaacagtcacatcaagacgattcattttcagatgggttattagagtttccgcaatatacacgtccgcgtgaatttaagggtctaacagttccagatgttttattgtctggaaatcatgccaatattgatgcatggagacatgagcaaaagttgatccgcacatataataaaagacctgacttaattgaaaaatatccattaactaatgcagataagcaaatattagaaagatataaaataggattgaaaaaaggttag

SEQ ID NO: 405718 - DNA, 504 bp, Staphylococcus aureus
atgagagttgaagttggtcaaattgttaacacacatggtattaaaggtgaaattaaagtaaaatccaattcagactttacagacgttcgttttcaacccggtcaagtgctgacagttgtgcataacaataacgaccttgaatatactgttaagtcacatagagtgcataaagggcttcatatgcttacatttgaaggtattaataatattaatgatattgagcatttaaaagggagttctatttatcaagagcgtgatcatgaagatatcgtacttgaggaaaatgaattttattattcagatattataggatgtacagtttttgatgatcaagaaacaccaataggtcgtgtaattaatatatttgaaacaggtgcgaatgatgtgtgggtgattaaaggatctaaagaatatttgattccttatattgctgatgttgtaaaagaagtggatgttgaaaataaaaaaattatcatcacgccaatggaaggattgttggattaa

SEQ ID NO: 405719 - DNA, 276 bp, Staphylococcus aureus
atggcagttaaaattcgtttaacacgtttaggttcaaaaagaaatccattctatcgtatcgtagtagcagatgctcgttctccacgtgacggacgtatcatcgaacaaatcggtacttataacccaacgagcgctaatgctccagaaattaaagttgacgaagcgttagctttaaaatggttaaatgatggtgcgaaaccaactgatacagttcacaatatcttatcaaaagaaggtattatgaaaaaatttgacgaacaaaagaaagctaagtaa

SEQ ID NO: 405720 - DNA, 1368 bp, Staphylococcus aureus
atggcatttgaagggttatcagaacgcttgcaagcgacgatgcaaaaaatgcgtggtaagggtaaacttactgaagctgatataaagataatgatgcgtgaagtaagattagcgttacttgaggctgacgtaaactttaaagtggtaaaagaatttattaaaacagtatcagaacgcgcattaggttccgatgtaatgcaatcattaacaccagggcaacaagttattaaaatagttcaagatgaattaacgcagttgatgggtggagaaaatacgtcgattaatatgtcaaataaaccacctactgttgttatgatggttggtttacaaggtgctggtaaaacaacaactgcaggtaaattagcattattgatgcgtaaaaaatacaacaaaaaacctatgttagttgcagcagatatttatcgtccagcagcgataaatcaattacaaacagtagggaaacaaattgatattcctgtatacagtgaaggagatcaagtaaagccacaacaaattgtaactaatgcattaaaacatgctaaagaagaacatttagactttgtaatcattgatacagcaggtcgattacacatcgatgaagcattgatgaacgaattaaaagaagtaaaagacattgctaaaccaaacgaaattatgttagttgtcgattcaatgacgggtcaagatgctgtcaatgttgcagaatcttttgacgatcaacttgatgtcacaggtgttaccttaactaaattagatggtgatacacgtggtggtgcagctttatctattcgttcggtgacacaaaaaccaattaaatttgttggtatgagtgaaaagttagatggtttagagctattccatcctgaacgtatggcatcacgtattttaggtatgggtgatgtgttaagtttaattgaaaaagcgcaacaagatgtggatcaagaaaaagcaaaagatttagagaaaaagatgcgtgagtcatcgtttactttagatgattttttagaacaacttgatcaggtgaaaaatctaggaccactggatgatattatgaaaatgattccaggtatgaataaaatgaaagggctagataagcttaatatgagtgaaaagcaaattgatcatattaaagcgattatccagtcaatgacgccggctgaaagaaacaatccagacacattgaatgtatcacgtaaaaagcgtattgctaaagggtctggtcgttcattacaagaagtcaatcgtttgatgaaacaatttaacgatatgaagaaaatgatgaaacagttcactggtggcggtaaaggtaaaaaaggtaaacgcaatcaaatgcaaaatatgttaaaaggtatgaatttaccgttttaa

SEQ ID NO: 405721 - DNA, 333 bp, Staphylococcus aureus
atgggtcaaaatgatttagttaaaacgttacgaatgaattatttgtttgatttttatcaatccttattgacgaataaacaacgtaattatttggaattattttatcttgaagattattctttaagtgaaatcgcagatacttttaatgtgagtagacaagcagtttatgataatataagaagaactggcgatttagttgaagattatgaaaagaaattggaattataccagaaatttgagcaacgccgagaaatatatgatgaaatgaaacaacatttaagtaatccagaacaaatacaacgttatattcaacaattagaagacttagaatag

SEQ ID NO: 405722 - DNA, 1251 bp, Staphylococcus aureus
atgagcttttttaaacgcttaaaagataagtttgcaacaaataaagaaaatgaagaagttaaatccttaacagaagaacaaggtcaagacaaattagaagatacacattctgaaggttcaacgcaggacgcaaatgatttagcagaaaatgctgaagtgaaaaagaagccacgcaagttgagtgaagcggattttgatgacgatggcttaatatcaattgaagattttgaagaaattgaagctcaaaaaatgggtgctaaatttaaagcaggactcgaaaaatctcgtcaaaatttccaagaacaattaaataatttgatagcgagatatcgtaaagtagatgaagacttttttgaagctttagaagaaatgttaatcactgcagacgtcggttttaatacagtgatgacgttaactgaagaattacgtatggaagcacaacgacgtaatattcaagatactgaagatttgcgtgaagtcattgttgaaaaaatcgtagagatttaccatcaagaagatgataattcagaagctatgaacttagaagatggtcgtttaaatgtcattttaatggttggtgtgaatggtgttggtaaaacaacaacaattggaaaattagcttaccgatataaaatggaaggtaaaaaagtaatgttagctgcgggcgatacttttagagcgggtgctattgatcaattgaaagtttggggcgaacgtgttggtgtagacgtaattagccaaagtgaaggttctgatccagctgctgttatgtatgatgcgattaatgccgctaaaaacaaaggtgttgatattttaatctgtgataccgctggacgtttacaaaataaaacaaatctaatgcaagaattagaaaaagttaagcgtgtaattaatcgagcagtgccagatgcgcctcatgaagcattactatgtttagatgctacaactggtcagaatgcgttgtcacaagctagaaactttaaagaagtaacaaatgttacaggtattgtattaacgaaattagatggtacagccaaaggtggtatcgtattagccattcgtaatgaattgcacatcccagttaaatatgtaggtttaggtgagcaattagatgacttacaaccatttaaccctgaaagttatgtctacggcttattcgctgatatgattgaacaaaatgaagaaataacaacagttgaaaatgatcaaattgtaacagaagaaaaggacgataatcatgggtcaaaatga

SEQ ID NO: 405723 - DNA, 3567 bp, Staphylococcus aureus
atggtttatttaaaatcaatagatgccattggatttaagtcttttgcagatcaaaccaatgttcaattcgataaaggtgtaactgcaattgttggtccaaatggaagcggtaaaagtaatattacagatgctattaaatgggtgttgggtgaacaatcggctaaatcattacgtggctcaaaaatggaagatattatcttctcaggtgcagaacatcgcaaagctcaaaattatgctgaagtacagttaagattagataatcattctaaaaagctcagtgttgatgaaaacgaagttattgtaacaagaagattgtatcgaagtggtgaaagtgagtactacataaataatgaccgtgcaagattaaaagatattgccgatttatttttagattctggattgggaaaagaagcgtatagcattatctcgcaaggtagagttgatgaaatactaaatgctaaaccaattgatagacgtcaaattattgaagaatcggctggtgtacttaaatataaaaaacgtaaggctgaatcattaaataaacttgaccaaacagaagataatttaacgagagtagaagacattttatatgatttggaaggtcgcgtagaacctctaaaagaggaggcagctatagctaaagaatataagacactttcacatcaaatgaaacatagtgacattgtagttacagtgcacgatattgatcaatatacaaatgacaatagacaattagatcaacgtttaaatgatttacaaggccaacaagcaaataaagaagctgacaagcaacgtttaagccaacaaattcaacaatataaaggtaaacgtcatcaacttgataatgatgttgaatcgcttaattatcaattagtaaaagctacggaagcctttgaaaaatatacgggacaattaaatgttttggaagaacgtaagaaaaatcaatctgaaacaaatgcacgatatgaagaagaacaagaaaatttaatggagcttttagaaaatatatcaaatgagatttctgaagctcaagatacttataagtctctgaaaagtaaacaaaaagaactcaatgctgtcattcgtgaacttgaagaacaactatatgtttcagacgaagcacatgatgaaaaattggaagaaattaaaaacgaatactatacattaatgtcagagcaatcagatgttaacaatgatattcgttttttaaagcatactatagaagagaatgaggctaaaaaatcaagactagattctcgattagttgaagtttttgagcaattgaaagatattcagggtcaaataaaaacgacaaaaaaagaatatcaacagaccaacaaagaactttctgctgtagataaagaaattaaaaatatagaaaaagacctcactgatacaaaaaaagcacaaaatgaatacgaagagaaattgtatcaagcatatcgatataccgaaaaaatgaaaacacgtattgatagtttggcaacgcaagaggaagaatatacttattttttcaatggcgtcaaacatattttgaaagctaaaaataaagaattaaagggtatttatggtgcagttgcggaaattattgatgtgccatctaaattaactcaggcaattgaaacagcattaggtgcttcattacaacatgtcattgtagattcagaaaaagatggacgccaggctattcaatttttaaaagaacgtaatttaggtcgtgcgacgtttttaccattaaatgttatacagagtagagtggtagcgactgatattaaatctattgctaaagaggcaaacggatttattagtatcgcttcggaagcagttaaagtagcaccagaatatcaaaatattatcgggaatttattaggtaatacgattatcgttgatcatttaaagcatgcaaatgaattggcacgtgcgattaaatatcgaactcgtattgttactttggaaggtgatattgtaaatcctggtggttctatgactggtggtggcgctcgtaagtcaaaaagtattctgtctcaaaaagacgagttgacaacaatgagacaccaattagaagattacttgcgtcaaacagaatcatttgaacaacaatttaaagagttgaagataaaaagtgatcaattaagtgaactgtattttgaaaaaagtcaaaagcataatacacttaaagagcaagtgcatcattttgaaatggagctcgatagattaactacacaagaaacacaaataaaaaatgatcatgaagaattcgaatttgaaaaaaatgatggttatacgagtgacaaaagtcgacaaactttgagtgaaaaagaaacttatctagaaagtattaaagcatctttaaaacgactagaagatgaaattgaacgctacacaaaactttctaaagaaggtaaggaaagcgttactaaaacacaacaaaccttacatcagaaacaatctgatcttgctgtggttaaagagcgtattaaaacacaacaacagacaatagatcgattaaataatcaaaatcaacaaactaaacatcaattaaaagatgttaaagaaaaaattgcattctttaattcggatgaagtgatgggcgaacaagcttttcaaaatattaaagatcaaattaatggtcaacaagaaacgagaacacgcttatcagatgaattagataaattgaaacaacaacgtattgagttgaatgaacaaatcgatgcgcaagaagctaaactacaagtttgtcaccaagatattttagctatcgaaaatcactaccaagatattaaagctgaacaatcaaagctagatgtattaattcatcatgcgatagatcatttaaatgatgaatatcaattgactgttgaacgtgcgaaatctgaatatacgagtgatgaatcgattgacgcattacgtaaaaaagttaagttaatgaagatgtcgattgatgaactaggtcctgtaaacttaaatgcaattgaacaatttgaagagttaaatgaacgttatacatttttaagtgaacaacgtacagatcttcgtaaagctaaagaaacattagagcaaattataagtgaaatggatcaagaggttactgaaagatttaaagaaactttccatgctattcaaggacattttacagctgtgttcaaacaattgtttggtggaggcgatgcagaattgcaattaactgaagccgattatttaacagctggtattgatattgtggtacaaccaccgggtaaaaagttgcaacatttatcgttactgagtggtggtgagcgtgcattaactgctattgctttactatttgcaattttaaaagtaagatctgcaccttttgttatattagatgaggttgaagctgcactagatgaagcaaatgttattagatacgcaaaatatttaaatgagttatcagacgaaacacaattcattgttattacacaccgtaaaggaacaatggaatttgcagataggttatacggtgtaacaatgcaagaatcaggtgttactaaacttgtgagtgtgaatttaaatacaatagatgatgtgttgaaggaggagcaataa

SEQ ID NO: 405724 - DNA, 732 bp, Staphylococcus aureus
atgtctaaacaaaagaaaagtgagatagttaatcgttttagaaagcgctttgatactaaaatgacagagttaggctttacttatcaaaatattgatttataccaacaagcattttcgcattcgagttttattaatgattttaatatgaatcgtttagaccataatgagcgtttagagtttttgggtgatgcggtattagaattgacggtttcacgatatttatttgataaacatcccaacttgccagaagggaatttaacaaaaatgcgtgccactattgtatgtgagccctcacttgtaatatttgcgaataaaattggattgaacgaaatgattttacttggtaaaggtgaagagaaaacagggggacgtacaagaccatcattaatatcagatgcattcgaagcatttattggggcattgtatttggatcaaggactagatatagtttggaaatttgctgagaaagtcattttcccacatgtagaacaaaatgagttattaggcgtggtagattttaaaacacaattccaagaatatgtgcaccagcaaaataaaggtgatgtaacctataatttaataaaagaagagggaccggcacatcatcgtctattcacttcagaagttattctgcaaggggaagcaatagctgaaggtaaagggaaaacgaaaaaagaatcagaacaacgtgctgctgaaagtgcctataagcaattaaaacaaattaaatag

SEQ ID NO: 405725 - DNA, 234 bp, Staphylococcus aureus
gtggaaaatttcgataaagtaaaagatatcatcgttgaccgtttaggtgtagacgctgataaagtaactgaagatgcatctttcaaagatgatttaggcgctgactcacttgatatcgctgaattagtaatggaattagaagacgagtttggtactgaaattcctgatgaagaagctgaaaaaatcaacactgttggtgatgctgttaaatttattaacagtcttgaaaaataa

SEQ ID NO: 405726 - DNA, 735 bp, Staphylococcus aureus
atgactaagagtgctttagtaacaggtgcatcaagaggaattggacgtagtattgcgttacaattagcagaagaaggatataatgtagcagtaaactatgcaggcagcaaagagaaagctgaagcagtagtcgaagaaatcaaagctaaaggtgttgacagttttgcgattcaagcaaatgttgccgatgctgatgaagttaaagcaatgattaaagaagtagttagccaatttggttctttagatgttttagtaaataatgcaggtattactcgcgataatttattaatgcgtatgaaagaacaagagtgggatgatgttattgacacaaacttaaaaggtgtatttaactgtatccaaaaagcaacaccacaaatgttaagacaacgtagtggtgctatcatcaatttatcaagtgttgttggagcagtaggtaatccgggacaagcaaactatgttgcaacaaaagcaggtgttattggtttaactaaatctgcggcgcgtgaattagcatctcgtggtatcactgtaaatgcagttgcacctggttttattgtttctgatatgacagatgctttaagtgatgagcttaaagaacaaatgttgactcaaattccgttagcacgttttggtcaagacacagatattgctaatacagtagcgttcttagcatcagacaaagcaaaatatattacaggtcaaacaatccatgtaaatggtggaatgtacatgtaa

SEQ ID NO: 405727 - DNA, 927 bp, Staphylococcus aureus
atgagtaaaacagcaattatttttccgggacaaggtgcccaaaaagttggtatggcgcaagatttgtttaacaacaatgatcaagcaactgaaattttaacttcagcagcgaacacattagactttgatattttagagacaatgtttactgatgaagaaggtaaattgggtgaaactgaaaacacacaaccagctttattgacgcatagttcggcattattagcagcgctaaaaaatttgaatcctgattttactatggggcatagtttaggtgaatattcaagtttagttgcagctgacgtattatcatttgaagatgcagttaaaattgttagaaaacgtggtcaattaatggcgcaagcatttcctactggtgtaggaagcatggctgcagtattgggattagattttgataaagtcgatgaaatttgtaagtcattatcatctgatgacaaaataattgaaccagcaaacattaattgcccaggtcaaattgttgtttcaggtcacaaagctttaattgatgagctagtagaaaaaggtaaatcattaggtgcaaaacgtgtcatgcctttagcagtatctggaccattccattcatcgctaatgaaagtgattgaagaagatttttcaagttacattaatcaatttgaatggcgtgatgctaagtttcctgtagttcaaaatgtaaatgcgcaaggtgaaactgacaaagaagtaattaaatctaatatggtcaagcaattatattcaccagtacaattcattaactcaacagaatggctaatagaccaaggtgttgatcattttattgaaattggtcctggaaaagttttatctggcttaattaaaaaaataaatagagatgttaagttaacatcaattcaaactttagaagatgtgaaaggatggaatgaaaatgactaa

SEQ ID NO: 405728 - DNA, 987 bp, Staphylococcus aureus
atggttaaattagcaattgatatgatgggtggcgacaatgcgcctgatatcgtattagaagccgtacaaaaggctgttgaagactttaaagatctagaaattatacttttcggtgacgaaaaaaagtataatctgaaccatgaacgaatcgaatttagacattgttctgaaaagattgaaatggaagatgagcctgttagagcgattaaacgtaaaaaagatagctcaatggtaaaaatggctgaagctgtgaaatctggtgaagcagatggatgtgtgtcagcaggtaatactggtgctttaatgtcagctggtttattcattgttggacgtattaaaggtgtagctagaccggctttagtagtaacattgccaacgattgatggaaaaggttttgtctttttagacgttggtgcaaatgctgatgctaaacctgaacacttattacagtatgcgcaactaggggatatttatgctcaaaaaattagaggtattgataatccgaaaatctcattattaaatataggaaccgagccagctaaaggtaatagtttaacgaaaaaatcatatgagttattaaatcatgatcattcattgaattttgttgggaatattgaagcgaagacattaatggatggcgatacagatgttgtagttaccgatggctatactgggaacatggtccttaaaaatttagaaggtactgcaaaatcaatcggtaaaatgttaaaagatacgattatgagtagtactaaaaataaattagcaggtgcaatattgaagaaagatttagctgaattcgctaaaaagatggattactcagaatacggtggttccgtattattaggattggaaggtactgtagttaaagcacacggtagttcaaatgctaaagctttttattctgcaattagacaagcgaaaatcgcaggagaacaaaatattgtacaaacaatgaaagagactgtaggtgaatcaaatgagtaa

SEQ ID NO: 405729 - DNA, 558 bp, Staphylococcus aureus
ttgaaactaaagaaagataaacgtagagaagcaatcagacaacaaattgatagcaatcccttcatcacagaccatgaactaagcgacttatttcaagtgagtatacaaacaattcgtttagatcgcacttatttaaacataccagaattaaggaagcgtattaaattagttgctgaaaagaattatgaccaaataagttctattgaagaacaagaatttattggtgatttgattcaagtcaatccaaatgttaaagcgcaatcaattttagatattacatcggattctgtttttcataaaactggaattgcgcgtggtcatgtgctgtttgctcaggcaaattcgttatgtgttgcgctaattaagcaaccaacagttttaactcatgagagtagcattcaatttattgaaaaagtaaaattaaatgatacggtaagagcagaagcacgagttgtaaatcaaactgcaaaacattattacgtcgaagtaaagtcatatgttaaacatacattagttttcaaaggaaattttaaaatgttttatgataagcgaggataa

SEQ ID NO: 405730 - DNA, 2061 bp, Staphylococcus aureus
ttggctaaagtaaacttaatagaaagtccatattctcttttacaattaaaaggtataggtcctaagaaaatagaagtattgcaacaactaaatattcatacagtggaagatcttgttctttatttgccaactagatatgaagataatacagtgattgatttgaatcaagcagaagatcaatctaacgttacgatagaaggacaagtatatacagctccagtagttgcattttttggaagaaataaatcaaaattaaccgttcatttaatggtaaataatattgctgtcaaatgtatttttttcaatcaaccgtatttaaaaaagaaaatcgaattaaatcaaactataactgttaaaggtaagtggaatagggttaaacaggaaattactggtaatagggttttctttaattcacaagggacacaaactcaagaaaacgcagatgttcaattagaaccagtctatcgtattaaggaaggtattaaacaaaagcaaatacgagaccaaattagacaagcgttaaatgatgtgacaattcatgaatggttaactgatgaactaagagaaaaatataaattagagaccttggactttactttgaacacattacatcatcctaaaagtaaagaggatttattacgtgctcgtagaacctatgcatttactgaactgtttttattcgaattacgtatgcaatggctaaatagattagaaaagtcatctgacgaagcaattgaaattgattatgacatagaccaagttaaatcatttattgatcgtttaccttttgaactaactgaagcacagaaatccagtgttaatgaaatttttagagatttaaaagcaccaatacgtatgcatcgattacttcaaggtgatgtaggttcaggaaaaacagtagttgctgcaatttgtatgtatgcgttaaaaactgctggttatcaatcagcattgatggtaccaactgaaattttagcagagcaacatgctgaaagtttaatggctttatttggagattctatgaacgttgcattgttaactgggtcagtaaaaggtaagaaacgaaagatacttttagaacaacttgaaaatggtacgattgattgtttaattggaacccatgctttgattcaagatgatgtgattttccataatgttggtttagtaattacagatgaacaacatcgatttggtgtgaatcaacgccagcttttaagagaaaaaggtgcaatgacgaatgtgttatttatgacagcaacgccgataccaagaacactagcaatatcagtttttggtgagatggatgtgtcttcaattaaacaattaccaaaaggtcgtaaacctatcattactacttgggcaaagcatgagcaatacgataaagttttgatgcaaatgacctcagagttgaaaaaaggtcgtcaagcatatgtcatttgcccgctaatagaaagttctgagcatctcgaagatgttcaaaatgttgtcgcattgtacgagtctttacaacagtattatggtgtttcccgtgtagggttattgcatggtaagttatctgccgatgaaaaagatgaggtcatgcaaaagtttagtaatcatgagataaatgttttagtttctactactgttgttgaagtaggtgttaatgtaccgaatgcaacttttatgatgatttatgatgcggatcgctttggattatcaactttacatcagttacgcggtcgtgtaggtagaagtgaccagcaaagttactgtgttttaattgcatcccctaaaacagaaacaggaattgaaagaatgacaattatgacacaaacaacggatggatttgaattgagtgaacgagacttagaaatgcgtggtcctggagatttctttggtgttaaacaaagtggattgccagatttcttagttgccaatttagttgaagattatcgtatgttagaagttgctcgtgatgaagcagctgaacttattcaatctggcgtattctttgaaaatacgtatcaacatttacgtcattttgttgaagaaaatttattacatcgtagttttgactaa

SEQ ID NO: 405731 - DNA, 1647 bp, Staphylococcus aureus
atgattagcaaaattaatggtaaattatttgccgatatgattatacaaggggcacaaaatttatctaacaatgcagatttggtagattctttgaatgtgtatccagtgccagatggtgatacaggaacaaatatgaatcttactatgacttcaggtcgcgaagaagtagagaataatttgtcgaaaaatatcggcgaattaggtaaaacattctcgaaaggtttactaatgggtgcaagaggtaactctggtgtcatcttgtcacaattattcagaggattttgtaaaaatattgaaagtgaatctgaaattaattcaaaattgttagctgaaagttttcaagctggtgttgaaacggcatataaagctgttatgaaaccagttgaaggtacaatacttacagttgcaaaagatgctgcgcaagctgcaatagaaaaagcaaataatactgaagattgtatagaattaatggagtacattattgtaaaagccaatgaatcacttgaaaacacaccaaacttattagctgtacttaaagaagttggtgttgttgatagtggcggtaaaggtttgttatgcgtttacgaaggattcttaaaagcgcttaaaggtgaaaaagttgaagccaaagttgcaaagatagataaagatgaatttgtacatgatgaacatgatttccatggtgtaattaatactgaagatattatttatggctattgtactgaaatgatggttcgttttggaaagaataaaaaagcctttgatgaacaagaattcaggcaagatatgagtcaatttggtgattctttattagtcattaatgatgaagaaattgtgaaagttcacgtgcataccgaatacccaggtaaagtgtttaattatggtcaacaatatggtgaattaattaaacttaaggttgaaaatatgagagaacagcaccgtgaagtgattcgaaaagaacagcacacagctaaaccgaaaatggaaacggttgaaacagcaattattactatttctatgggtgaaggtatttcagagatatttaaatcaatgggtgccacacatatcattagtggtggacaaacgatgaatccttctacagaagatatcgttaaagtcattgaacaatcaaaatgtaaacgtgcaattattttaccgaataataaaaatatcttaatggcaagtgaacaagcagcgagtattgttgatgcagaagctgttgttattccaacgaaatctattcctcaaggtataagcgcactattccaatatgatgtggacgcaacacttgaagaaaataaagcgcaaatggctgattcagtaaataacgttaaatctggttcattaacgtacgctgttcgtgatacgaaaattgatggcgttgagattaaaaaagacgcgtttatgggcttgattgaagataagattgtaagcagccaaagtgatcaattaacaacggttactgagttgttaaatgagatgttagcagaagatagtgaaatattgactgtgattattggtcaagatgcagagcaagcagttacagataacatgataaactggatcgaagagcaatatccagatgtagaagtggaagttcatgaaggtggacaaccaatttatcaatatttcttttcagtagaataa

SEQ ID NO: 405732 - DNA, 375 bp, Staphylococcus aureus
atgacattagagatttcaaatgattacggtaaaattgatatttcaaacgaagtgattgcttcggttgtaggtggaaaggccgttgaatgttatggtattgtaggtatggcatctagacaacaagttagagatggtattgcggaaatactaggacatgaaaattatgctaaaggcatcaaagtaactgaaaataatggcgtagtggatatagatatgtacattattgtaagttacggtgtgaaaatatctgaagttgccaataatgtacaatcaacagtgaaatatactttggaaaaatcacttaatgtatcagtaaattcaatcaatatatatgtacaaggtgtacgtgtgaataatacaggcaagaaagcttag

SEQ ID NO: 405733 - DNA, 189 bp, Staphylococcus aureus
atgggtaaacaatgtttcgtaacaggtcgtaaagcttcgactggtaacagacgttcacacgctttaaactctactaaacgtagatggaacgctaaccttcaaaaagttagaatcctagttgacggtaaacctaaaaaagtttgggtttctgcacgtgctttaaaatctggtaaagtaactagagtttaa

SEQ ID NO: 405734 - DNA, 642 bp, Staphylococcus aureus
atgcatataaatttattatgttctgatcgacacttgccgcaagatatttgggccaaaagtaatgaaggtaaatggggcggcgttgatagaggtgctttgattttattgaagcatcaaattatcccttttttctcagtgggagactttgattcagtcagtaaagaagaacgccaacttctaacagaacagttacaaatcaaaccagttcaagctgaaaaagctgatacggatttagctttagcggttgataaagctgttgcacttggatttgatagtattacaatttatggtgcaacaggcggacgattagatcacttttttggggcaattcagttattattgaaaaaagcatattataaacatgatgttcatatagaagttatcgatcaacaaaataaaattgaattattgcctaaaggtcaacatacagttgaaaaagataagagttatccgtacatttcatttataccgatgactgatgatgtagaactttctctagcaggttttaaatataatttagctagacaaatgcttaatataggttctactttaactatttcaaatgaaattgagtctttgcaagcgaaagtaactgtacatgatgggttgattttgcaaattagaagtacagatttaaattaa

SEQ ID NO: 405735 - DNA, 645 bp, Staphylococcus aureus
atgacaaaactatatccatcattattatctgttgattttttggatttacaacatgaattaaaacgacttgaagaagcaggcgtcgacggagttcattttgatgttatggatggtcaatttgtgcctaatatatctattggtttaccaatattagatgcagtaagaaaaggcacaacattacctatagacgtacatttgatgattgaaaatccagaaaagtatattgcatcatttgcagaacatggtgccgatatgatttcaattcatgtcgaatcaacgcctcatattcatcgtgctattcaaatgattaaacatttagataaaaaagctggtgtagtaattaatcctggtacaccaatatcacaaattgaacctattttagacattgttgattatgtactagtgatgacagttaacccagggtttggtggtcaatcatttattgatcaatgcgtagaaaaaatagcgggtcttaatgctattaaaatggaacgtcaattaaactttgatattgaagttgatggaggcgtaaataccgatacagcgaaagtttgtgttgaaaatggtgctacaatgctagtaacaggttcatttttctttaaacaagaggattataaaaaagtcacacaagcattgaaaggttga

SEQ ID NO: 405736 - DNA, 876 bp, Staphylococcus aureus
ttgaagacaggtcgaatagtgaaatcaattagtggggtatatcaagtagacgttaatggcgaacgtttcaatacaaaaccacgaggattatttagaaagaaaaaattttcaccggtagttggtgatatagtggaatttgaagttcaaaacattaacgaaggttatattcatcaagtgtttgagcgggaaaatgagttgaaaagaccacctgtaagtaatatagatacactagtaattgtaatgagtgctgtcgagccaaatttttcaacgcaattattagatcgatttttagttattgcacattcgtatcagttaaatgcgagaattttggtgactaaaaaagataaaacaccaattgaaaagcagttcgaaataaatgagttgttgaaaatatatgaaaatattggctatgagactgaatttattggaaatgatgatgatcgaaaaaaaattgtagaagcttggccagctggacttatagtacttagtggtcaatcaggtgtcggtaagtccactttcttaaatcattatcgtccagaacttaatcttgagacaaatgatatatcaaaatcattaaatcgaggaaagcatactacaagacatgtcgaactattcgaacgtcaaaacggttatattgcagacacacctggattcagtgctttagattttgatcatatagataaagatgaaataaaagattattttcttgaattaaatcgatatggtgaaacatgtaagtttaggaattgtaatcatatcaaagaacctaattgtaatgttaagcatcaattagagatagggaatattgcgcaatttagatacgaccattatttacaactatttaatgaaatttcaaatagaaaggttagatattaa

SEQ ID NO: 405737 - DNA, 1995 bp, Staphylococcus aureus
atgataggtaaaataataaatgaacgatataaaattgtagataagcttggcggcggtggcatgagtaccgtttatcttgctgaagatacgatacttaacattaaagttgcaattaaggcgatttttataccacctagagaaaaagaagaaacattaaaacgttttgaacgagaagtacataactcatcacagctatcacatcaaaatatagtaagtatgatcgatgttgatgaagaagatgactgttactacttagtaatggaatatatcgaaggtccgactttgtctgagtatattgaaagtcatgggccattaagtgttgacacagcgattaattttacgaatcaaatattggatggcattaaacatgcgcatgatatgcgtattgtacatagagatattaagccacaaaatatattaattgacagcaataaaacgttgaaaatatttgattttggaattgctaaagctttaagtgagacgtctttaactcagactaatcatgtgttaggtactgtgcagtacttttcgccagaacaagcaaaaggtgaggcaacggatgaatgtacagatatttattctataggtattgtgttatatgaaatgcttgttggtgaaccaccctttaatggagaaactgcagttagcattgcgattaaacatattcaggattctgtgccaaatgtgacaacagatgtacgtaaggatattccgcaatctttaagtaatgtcattttacgcgctacagaaaaagacaaagcgaatcgttacaaaacaattcaagaaatgaaagatgatttgagtagtgttttacatgaaaatcgagcgaatgaagatgtctatgaactcgataaaatgaaaacgatagcggtacctttgaaaaaagaagatctagcaaagcatattagtgaacataagtcgaatcaacctaaacgtgaaacgacgcaagtacctattgtaaatgggcctgctcatcatcagcaattccaaaagccagaaggtacggtgtacgaaccaaaacctaaaaagaaatcaacacgaaagattgtgctcttatcactaatcttttcgttgttaatgattgcacttgtttcttttgtggcaatggcaatgtttggtaataaatacgaagagacacctgatgtaatcgggaaatctgtaaaagaagcagagcaaatattcaataaaaacaacctgaaattgggtaaaatttctagaagttatagtgataaatatcctgaaaatgaaattattaagacaactcctaatactggtgaacgtgttgaacgtggtgacagtgttgatgttgttatatcaaagggccctgaaaaggttaaaatgccaaatgtcattggtttacctaaggaggaagccttgcagaaattaaaatcgttaggtcttaaagatgttacgattgaaaaagtatataataatcaagcgccaaaaggatacattgcaaatcaaagtgtaaccgcaaatactgaaatcgctattcatgattctaatattaaactatatgaatctttaggcattaagcaagtttatgtagaagactttgaacataaatcctttagcaaagctaaaaaagccttagaagaaaaagggtttaaagttgaaagtaaggaagagtatagtgacgatattgatgagggtgatgtgatttctcaatctcctaaaggaaaatcagtagatgaggggtcaacgatttcatttgttgtttctaaaggtaaaaaaagtgactcatcagatgtcaaaacgacaactgaatcggtagatgtaccatacactggtaaaaatgataagtcacaaaaagttaaagtttatattaaagataaagataatgacggttcaactgaaaaaggtagtttcgatattactagtgatcaacgtatagacattcctttaagaattgaaaaaggaaaaacagcaagttatattgttaaagttgacggtaaaactgtagctgaaaaagaagtcagctatgatgatgtataa

SEQ ID NO: 405738 - DNA, 744 bp, Staphylococcus aureus
atgctagaggcacaattttttactgatactggacaacatagagataagaatgaagatgcgggtggtattttttataatcaaactaatcaacaacttttagttctgtgtgatggtatgggtggccataaagcaggagaagttgcaagtaaatttgttacagatgagttgaaatcccgttttgaagcggaaaatcttatagaacaacatcaagctgaaaattggttgcgtaataatataaaagatataaattttcagttatatcactatgcacaagaaaatgcagaatataaaggtatgggtacaacatgtgtttgtgcacttgtttttgaaaaatcagttgtgatagcaaatgtcggtgattctagagcctatgttattaatagtcgacaaattgaacaaattactagtgatcactcatttgttaatcatcttgttttaacgggtcaaattacgccggaagaagcatttacacatccacaacgtaatattattacgaaggtgatgggcacagataaacgtgtgagtccagatttgtttattaagcgattaaatttttatgattatttattattaaattcagatggattaactgattatgttaaagacaatgaaattaagcgtttgttagtaaaagaaggtacaatagaagatcatggtgatcaattaatgcaattggcattagataaccattcgaaagataacgttactttcatactcgcggctattgaaggtgataaagtatga

SEQ ID NO: 405739 - DNA, 1095 bp, Staphylococcus aureus
atgataactgctgaaaagaaaaagaagaataaatttcttccaaattttgacaagcaatcaatatattcattgcgatttgacgaaatgcaaaactggctcgttgaacaagggcaacaaaaatttcgagcgaaacagatttttgaatggttatatcaaaaaagagtagattcgattgatgaaatgacgaacttatcgaaagacttacgacagcttttaaaagataactttactgttacaactttaacaactgtagtaaaacaagaaagtaaagacggtacaattaaattcttatttgaattacaagatggctatacaattgaaactgttttaatgagacatgattatggaaattcagtatgtgtaacgacacaagtaggttgtcgcatcggatgtacgttttgtgcttctacacttggcggcttaaaaagaaaccttgaagctggcgaaattgtttcacaagttttaacagttcaaaaagcccttgatgctacagaagagcgcgtatctcaaattgtcataatgggtatcggtgaaccatttgaaaattatgatgaaatgatggactttttaagaatcgtcaatgatgataacagtttaaatattggtgcacgtcacattacagtatcaacatcaggtatcattcctagaatatatgactttgcggatgaagatattcaaattaattttgctgtaagcttacacgccgcaaaagatgaagtgcgatcacgcttgatgccaattaaccgtgcatataatgttgagaagttaatcgaagcaattcaatattatcaagaaaaaacaaatcgtcgtgttacttttgaatatggtctgtttggtggtgtgaatgaccaactagaacatgcaagagaattagcacatttaataaaaggcttaaactgccatgttaacttaattcctgtcaaccatgttccagaaagaaattatgtgaaaacggctaaaaatgatatctttaaatttgaaaaagaattaaagagactaggaattaatgccacaatacgtcgtgaacaaggttcggatattgacgcagcttgtggtcaattaagagcaaaggaacgacaagtagaaacgaggtaa

SEQ ID NO: 405740 - DNA, 1308 bp, Staphylococcus aureus
atgatagaaaacgtgagaagtcttgcttttgacacgattcaagatatattaaatgaaggtgcgtatagtaacttgcgtatcaatgaagtgttgtcagaaaatgaattaaatgcaatggataaggctttatttacagaaattgtctacggaaccgttaaaagaaaatatacgttagatttttatttaaagccttttgtgaaaacaaagattaaggcatgggttaggcaattattatggatgagtatttatcaatatgtttatttagataaagttccaaatcatgccattattaatgaagcagttgaaatagcaaaagaacgcggtggctatcataatggtaatgtcgtaaatggtattttacgtacaatgatgcgtagtgacttacctgattttaatgaaattgcagatcctaaaaaaagaatggcaatcgagtatagtatgccgaagtggattatagatcattgggcaacacattatggtctcgaagaaactgaaacaattttacagtcatttttagaaacgacatcaacaactgtgcgtgccaacctgacgcgagcatcattagatgatattattgaaaagttgcaagacgaaggttatgacgttgaaaaagatcatgacttaccttattgtctccatataggaggacaaccaattattcattctcgttcatttaaagatggattcgtttcaattcaagataaaagctcaatgtttgttgcacacattatgaatgtagaccgacatgatcacgtattagatgcatgtagtgcacctggcggtaaagcttgtcacattgctgaagttttaatgccagaagggcaagttgacgcttcagatatacatgatcacaaaatagacttaattaattttaatataaaaaaattacgattaacaaatattaaagcttttcaacatgatgcgacaaaaccttatgataaaacatacgataagatacttgttgatgcaccatgtagcggattaggtgtaatgagacataagccggagattaagtatactcaaagcaaacaacatattgagtcactagttgaattacagcttgaaatattggaaaatgtaaaaaacaatgtaaaaataggtggcgaaatcatctattcaacatgtacaattgagcaactagaaaatgaaaacgtgatttatacgtttttgaaaaataataaaaacttcgaatttgaaccgtttcaacatccgataactggagagttggtcaaaacgttacaaatcatgccgcaagactttaattcagatggattctttatcactaagataaaaagaaaggacaattag

SEQ ID NO: 405741 - DNA, 936 bp, Staphylococcus aureus
atgactaaaataatatttatgggtacaccagacttttcaacaactgttttagaaatgcttattgcagaacatgatgtcattgcagtcgtaacgcaaccagatcgacctgttggacgtaaacgtgttatgacaccaccaccagttaaaaaagttgcaatgaaatatgatttacctgtatatcaacctgaaaaattaagtggatcagaagaattagaacaattgcttcaattagatgtagatttaattgtaactgctgcttttggacaattattacctgaatcattgttggcattaccaaatcttggggcaattaatgtacatgcatcattgttaccgaagtatagaggtggtgcaccaattcatcaggcaattatcgatggtgaacaagaaaccggcataacaattatgtatatggttaaaaaattagatgcgggtaatattatttcgcaacaagcaattaaaatagaagaaaatgataatgtcggtacgatgcatgataaattaagtgtattaggggcagatttattaaaagaaactttaccatctattatagagggcacaaatgaaagcgtacctcaagatgatacgcaagcaacatttgcttccaatattcgacgcgaagatgagcgaattagctggaataaaccaggaagacaagtgtttaatcaaattcgtggattatcaccatggccagttgcttatacaactatggatgacactaacttgaaaatatacgatgctgaactcgttgagactaataagataaacgagcctggaaccattatagaaacgactaaaaaagccattattgttgctacaaatgataatgaagctgttgcaattaaagatatgcaattagctgggaaaaagagaatgttagctgccaattatttaagtggtgcgcaaaacacactagtagggaagaaacttatatga

SEQ ID NO: 405742 - DNA, 489 bp, Staphylococcus aureus
atggcgattaaaaagttagtaccagcatcgcatcctattttaacgaaaaaagcgcaagcagttaaaacatttgatgattcgttaaaaagattattacaagatttagaagatacaatgtatgcacaagaagctgctggcttatgtgcacctcaaattaatcagtcattgcaagtggcaattattgatatggaaatggaaggattattacaacttgttaatccgaaaattattagtcaatcaaatgaaacaataacagacttagaaggttcaattacattgccagatgtttacggcgaagtgacaagaagtaaaatgatagttgtcgaaagttatgacgtcaatgggaacaaagttgaactaactgcacatgaagatgtagcaagaatgattttgcatattatagatcaaatgaacggtatcccttttacagaacgtgcggaccgtattttaacagataaagaagtggaggcatattttataaatgactaa

SEQ ID NO: 405743 - DNA, 279 bp, Staphylococcus aureus
atgtttgaactaaaagtgggtataataaaaagagaagctaatgtcattataagcaattcaactggagggaaagaaatgcaagtaaacaaagttatttatattttattagcattgttcttaggtagttttggtattcataaattttatgccggcaagaatatgcaaggtattctacacttaatattctgttggacaggtatcccacacattttagcaattattagtgcagtgattactgttttcaaacctgctgatgaacaaggtaatgtcactttataa

SEQ ID NO: 405744 - DNA, 954 bp, Staphylococcus aureus
atgaaaaagacactgggatgtttacttttaattatgcttttagtcgtagcaggttgttcttttggtgggaatcataaattatcatcaaagaaatcagaagaatcaaaacaagaaactgtaaaaaaagaatcggaagaagagaaagatccagatttagagaaatatgaagaaatagagaagaaaatgaaaggaattaaagatgcgccatctcttgataagttggatccattaatgacagaaaagtcgtttacgaatagtaaagggattcaaggatggaaagattacaaagaattaatgggtaaagtggaacttgcagattatagatttactaaagattcaaaaggatcttcaataaaagatgttgatgcattctttaaaggtaagaaaggtataaaaaggaaagtgattgaaacacacgatgatgtaaaacaagttgattattggtatgtagatccagatggaaagaaaattggcaattcaaacacacctgttttttacgcagaaattatgacaaaatataaagatggaaagttagtttatgcatcagtcgaaccaggatcttacgtaatacataaagatgatgcaattaaatatgacgattattctaagttaaaaaaattaagtcagctaactaaacttgatcatccaaaaccagttccatatagcgtagctcaaatcaaatctttcggagtacctttaacaagcgtttcatttatgacacatggatcaaaggatactaaagatgaagtgttgccggcattggcctatttcactttttcaccaaaaaattatgaagacaagtctaatccagatccaaaagttttaaatttagtacatatggatttcttaaatgcatctagtgattttggtaacgcacattttgttgttttaagtaaatatattaaagagtatgaatcaaactatgaaacagcgtcagatgattctttaaaatag

SEQ ID NO: 405745 - DNA, 2409 bp, Staphylococcus aureus
atgatagcgaaagtcatagtcgatgtcgcgtcgaagagcgttgactataaatttgattatataattcccgaacaactcgaatctgtcatccaacctggtgtgcgtgtaattgtaccttttggaccaagaacgattcaaggttatgtaatggaagtaacagcagaacctgatgcacaacttgacgtttcgaagttaaaaaaaatcatagaagtgaaagatatacaaccagaattaacatcagaattaatagctttaagtgagtggatgggttcaactcatgtcattaaacgtatttctatgctagaagtgatgcttccgagtgctattaaagcgaagtataaaaaagcatttaagatgaaagatgacatagagctaccttcagctttattacaaaaatttgataagcatggttactattattataaagatgcgcaaaaaaataatgatattcaattgcttatgaagttgttaaaagatgatatcgttgaagaaaaaacgattctcacacaaaatataactaaaaaaaccaagcgtgctgttcgtgtcattgaagggtatcatcctgatgaagtattagctaagttggagaaagttattaaacaatacgatttgtatgcttacttgtctgaagaacaacataaaacaatatttttaactgatattgaggatatgggcttttcaaaatccagtttagatggacttatcaaaaaaggttatgttgaaaaatatgacgcggttgttgaaagagacccatttaaagatcgtgttttcgaacaagaatcaaaacagcaattaacagaagaccaatataaagcatatgaagcgattaaagctaaaattgtaagccaagagcaagaaacatttttacttcatggtgtgacgggatcaggtaaaacagaagtatatttacaaacgatagaagatgttttaagccaaggaaaacaggcgatgatgttagttcctgaaatcgctctaacaccgcaaatggttttacgcttcaaacgtcgatttggtgatgacgttgctgtattacattctggcttatctaatggggaacgttatgatgaatggcaaaaaattagggatggtcgtgcgagagtaagtgttggtgcaaggtcaagtgtgttcgcacctttcaaaaatttagggttaatcatcattgatgaagaacatgaatctacatataaacaagaagattatccgagatatcacgctagagaaattgcccaatggcgaagtgaatatcatcactgtccagtcattttaggaagtgcaacaccatgtcttgaaagttatgcacgagctgaaaaaggcgtttatcatttgctatcattaccaaacagagtgaaccaacaagctttacctgaaattgatatagtagacatgcgtgaagaattgagtgaaggtaatcggtcaatgttttcaaaagatttacgtgaagccatacaattaagattagatcgacaggaacaagttgttttatttttaaatcgacgtggttatgcatcgtttatgttatgtcgggattgtggatatgtaccgcaatgtccaaactgtgatatttcattaacgtatcataaaacgacagacttattaaaatgtcactattgtggttaccaagagacgccaccgaatcaatgtccaaattgtgagagtgaacacattcgacaagtaggtactggtactcagaaagttgaagaactattgcaacaagaatttgaagatgcgcgcataattaggatggatgtagatacaacctcaaagaaaggtgcacatgaaaagttattgactgaattcgaaaaaggtaacggtgacattttactaggtactcagatgattgcgaaaggattagattatccaaatattactttagttggtgtgctgaatgcagatacaatgttaaatttacctgattttcgggcgagcgaacgtacttatcaactattaacgcaagtggctggtagagctggtcgtcatgaaaaggcaggtcaagtcatcattcaaacgtataatccagatcattattcaatattggatgttcaaaaaaatgattatttaacattttatcgtcaggaaatggaatatcgtaaattaggaaagtatccaccgtattattatttgattaatttcacaatctcacataaagaaatgaagaaggttatggtagcatcgcagcatgttcataaaattttattacagcatttaacagaaaaagcgcttgtactaggtccatctccggcagcacttgcgagaatcaacaatgaatttagattccaaattttagtgaaatataaaagtgaacctggattattacaagccattcagtttttagatgactattaccatgaaaaatttataaaagaaaaattagcattgaagattgatattgatccacagatgatgatgtaa

SEQ ID NO: 405746 - DNA, 1200 bp, Staphylococcus aureus
atgaagaaaatattattagccgttacaggtggcattgcggcatataaagcaattgatttgacaagtaagttaacacaatctgggtatgaagttcgcgttatgttaacgaatcacgcacaaaaatttgtgacaccattagcatttcaagcaataagtcgaaatgctgtttatacagatacttttatagaagaaaatccttcagaaatacagcatattgcattaggtgattgggcagatgcaatcattgttgcacctgcaacggcaaatacaattgcaaaattgagtgtaggtattgctgatgatttggtgacatcaacgttgctagcaacagagacaccgaaatttattgcgcctgctatgaatgtgcatatgtatgaaaataaacgtacgcagcaaaatattaatattttaaaagaagatgggtatcattttatcgaaccaggaagcggatttctagcatgtggttatgttgctaaaggacgtatggaagaaccgcttcaaatcgtttctgtaattgatgctcattttcaaaatagtaatcgtttagctaatagttcatttcaagataaacgcgcattggttacagcaggaccaactattgaagttatcgatccagtcagatttgtatccaatcgttcttctggaaaaatgggctatgcaatagctgaagcattgcgaaatcgaggagctatcgtgacgttagttgctggtcctacaacactagaggatccaaaagatattgaagttattcatgttcaaagtgctgaagaaatgtttgaacaagtgacaagccgatttgacgaacaagatattgttgtaaaagcagcagccgtatctgactatacaccggttgatgtattagaacataagatgaaaaagcaggatggtgatttgtcagtatcttttaaacgtactaaagacattcttaaatatttaggtgaacataaaacatcacagtatttaataggctttgcagcagagactgaagatattgaaaattatgcacaacaaaaattacgcaagaaaaatgcagatgtgattatttcaaataatgttggggatatgtctatcggatttagttctgatgataatgaattgacaatgcattttaaaaataatgaaaaagtaaatatcaagaaaggaaaaaaagtagtattagctgcacaaattttagatgaactagaaactaggtggcaataa

SEQ ID NO: 405747 - DNA, 219 bp, Staphylococcus aureus
atgttaaatccacctttaaaccaattaacgtcacaaattaaatcaaagtatttaattgcaacaactgcagcgaaaagagcgcgtgaaattgatgaacaacctgaaactgaattattaagtgaatatcattcatttaaaccagttggtagagcgttagaagaaattgctgacggtaaaattcgccctgttatttcaagtgattattatggtaaagaatag

SEQ ID NO: 405748 - DNA, 624 bp, Staphylococcus aureus
atggataatgaaaaaggattgttaatcgttttatcaggaccatctggagtaggtaaaggtactgttagaaaacgaatatttgaagatccaagtacatcatataagtattctatttcaatgacaacacgtcaaatgcgtgaaggtgaagttgatggcgtagattacttttttaaaactagggatgcgtttgaagctttaatcaaagatgaccaatttatagaatatgctgaatatgtaggcaactattatggtacaccagttcaatatgttaaagatacaatggacgaaggtcatgatgtatttttagaaattgaagtagaaggtgcaaagcaagttagaaagaaatttccagatgcgctatttattttcttagcacctccaagtttagaacacttgagagagcgattagtaggtagaggaacagaatctgatgagaaaatacaaagtcgtattaacgaagcgcgtaaagaagttgaaatgatgaatttatacgattacgttgtagttaatgatgaagtagaacttgcgaagaatagaattcaatgtattgtagaagctgagcacttaaaaagagagcgcgtagaagctaagtatagaaaaatgattttggaggctaaaaaataa

SEQ ID NO: 405749 - DNA, 1698 bp, Staphylococcus aureus
atggcttatgatggcttatttacaaagaaaatggttgagtctctacaatttttaacaacaggacgcgttcacaaaatcaatcaacctgataatgacacgatactaatggttgtacgtcaaaatagacaaaaccatcaattgttattgtcaatccatccaaacttttcaagattacaattgactactaaaaaatatgataatccatttaatccacccatgtttgcgcgtgtttttagaaaacacttagaaggtggtattatcgaatcgattaagcaaattggtaatgatcgtcgcattgaaatcgatataaagagtaaagatgaaattggcgatactatttaccgcactgtcatccttgagattatgggtaaacatagtaacttaattttagtagatgaaaatcgcaaaataattgaaggatttaaacacttaacaccaaatacgaatcactatcgtacagtaatgccaggatttaattatgaagcaccacctactcagcacaaaataaatccgtatgatattacaggtgcagaggtgttgaaatatatcgattttaacgcaggtaatattgctaaacaattattgaatcagtttgaaggatttagccctttaattacgaatgaaatcgttagtcgtcgtcaatttattacttcatcaacattaccagaagcatttgacgaagtaatggcagaaaccaagttaccacctactcctatttttcataaaaatcatgaaacaggtaaagaggatttctattttataaagttaaatcaatttaatgatgatacagttacatacgattcattaaatgatttgcttgatcgtttttatgatgcgcgtggcgaacgtgaacgcgttaaacaacgtgcgaatgatttagttcgatttgttcaacagcagttgtacaaatatcaaaataaattagcgaagttgattgaagaatatgagcagtctaaaaataaagatactgaacagttatatggtgaattgatcactgctaatatatatcgaattaagcaaggcgataaagaagtgacggcattgaattattatacgaatgaagaagttgtcattcctttaaatcctacaaaatccccatcagcaaatgctcaatattattataaacaatataatcgtatgaaaacgagagaacgtgaattacaacatcaaattcaattgacgaaagacaatatagattatttttcaacaatcgaacaacaattacatcatatttctgtccatgacattgatgaaattagagatgaattagcagaacaaggctttatgaaacagcgtaaaaatcaaactaagaaaaagaaagcgcagattcaattacaacattatgtatcaactgatggcgacgatatatatgttggtaagaataacaagcaaaatgattatttaacaaataaaaaagctaaaaaaactcacacatggttacacacaaaagatattcctggttcacatgtcgttatatttaatgatgcaccaagtgatacgacaatcaaggaagcggctatgttagcaggatacttttcaaaagctggtaattctggacaaatacctgttgattatacattaattaaaaatgtgcataaaccatcaggtgcaaagcctgggtttgtaacatatgacaatcaaaaaactttgtatgctacacctgattatgaacttattcaaaaaatgaaacaatcataa

SEQ ID NO: 405750 - DNA, 402 bp, Staphylococcus aureus
atggatattccaaaaatcacgacatttttaatgtttaataaccaagctgaagaagctgttaaactatacacaagcttatttgaagatagtgagattataacaatggctaagtatggtgaaaatggacctggtgatcccgggactgtacaacactcaatatttacattaaatggacaagtattcatggcgattgatgctaatagtggcacagaattaccaatgaatcctgcgatttcattatttgttacagtaaaagatactattgaaatggaacgactatttaatggattaaaagatgaaggtgccattttaatgccaaaaacgaatatgccaccatacagagagtttgcttgggttcaagataagtttggagtaagttttcaattagcattacctgagtaa

SEQ ID NO: 405751 - DNA, 213 bp, Staphylococcus aureus
atgaatgacaaaacatctaatgatttatatgggaagataaaacattgtaacgaatttatcaatcattcaaatgattccaatctatctagtagtcacgatgtcgacgaaagttcaacgaagcaaaaacatataaaaaataaaacaactatagatcataatgatgatttatttaaacatgtaaaggatatattacgtaaacaagaacaaatttaa

SEQ ID NO: 405752 - DNA, 612 bp, Staphylococcus aureus
atggctaaagaaattgcaaaatcattattagatattgaagctgtaacattatcaccaaatgatttatatacatggagttcaggtattaaatcaccgatttactgtgataaccgtgttacgttaggttatcctttagttcgaggcgcaatccgcgatggtttaattaacttaattaaagaacactttcctgaagtagaagttatttctggtactgcaacagctggtattccacatgcagcttttattgctgaaaaattaaaattaccaatgaattatgttcgttcatcaaataagagtcatggtaagcaaaatcaaatcgaaggtgctaaaagtgaaggtaaaaaagtagttgtgatagaagatttaatttcgacagggggatcttcagtcacagcagttgaagccttaaaactagcaggtgcagaagtattaggtgttgtagctatctttacttacggtttgaaaaaagcagatgatacatttagcaatattcaactacctttttacactttaagtgattacaatgaattaattgaagtagctgaaaatgaaggtaaaatttctagtgaagatatccaaacattagttgaatggagagacaacttagcataa

SEQ ID NO: 405753 - DNA, 693 bp, Staphylococcus aureus
atgaaagatttaccaattattgcattagattttgaatcaaaagaaaaagtaaatcaatttttagatttatttgatgaatcattattcgtaaaagtaggtatggaacttttttatcaagaaggtcctcaattaattaatgagataaaagaaagaggccatgatgtatttttagatttaaaactgcatgatattcctaatacagttggtaaggcgatggaaggactagctaaattgaatgttgatctggtaaatgttcatgctgctggtggcgtaaaaatgatgtctgaggccattaaaggattaagaaaacataatcaagatacaaaaattattgcagtaacacagcttacgtcaacaacagaagacatgttacgacacgaacaaaatatacaaacatcgattgaagaggccgttttaaattatgccaagttagcaaatgcagctggtttagatggcgttgtttgttcacctcttgaaagtcgtatgttgactgaaaagttaggtacatcatttttaaaagtaacaccaggtattagacctaaaggtgcatctcaaaatgaccaacaccgtattacgacaccggaagaagcaagacagcttggttcgacgcatattgtagtcggtagaccgattacacaaagtgacaatccagtcgaaagttatcataaaattaaagaaagttggttagtataa

SEQ ID NO: 405754 - DNA, 3174 bp, Staphylococcus aureus
atgcctaaacgtaatgatatcaaaacaattttagtaatagggtctgggccaattatcataggtcaagcagctgaatttgattatgctggaacacaagcatgtctagctttaaaagaagagggatatcgagttattcttgtaaattcaaatccagcgacaatcatgactgataaggaaattgcggataaagtatatatcgaaccgttaactcatgattttatagcgcgaattatacgtaaagagcaacctgacgctttacttccaactttaggtggtcaaacaggtttaaacatggcgattcaactacacgaaagtggtgtgcttcaagataataacgtccaattattaggaactgagctaacatcaattcaacaagcagaagaccgtgaaatgtttagaacattaatgaatgatttaaacgttcctgtaccagagagtgacattgtaaatacagtagagcaagcctttaaattcaaagagcaagtgggatacccgctaattgttagaccggcatttacgatgggtggtaccggaggcggtatttgtcataatgatgaagaattacatgaaatcgtctcaaatggtcttcattatagtccagcaacgcaatgtttattagaaaaatctatcgcaggttttaaagaaatcgaatacgaagtaatgcgtgataaaaacgataatgccatcgttgtatgtaacatggaaaatattgatccagttggtattcatacaggcgattcaattgttgtggctcctagtcaaacattatcagatgttgagtatcaaatgttacgtgatgtttcattaaaagttattcgagctttaggtatcgaaggtggttgtaatgttcaattagcattagatccccattcattcgattattatattatagaagtaaatccgcgtgtatcacgttcatcagcgttagcttcaaaagcaacaggatatcctattgcaaaattagctgctaaaatcgcggttggtctaacattagatgaaatgttaaatccaattacaggaacatcttatgcagcgtttgaaccaactttagactatgtgatttcaaaaataccaagatttccttttgataaatttgaaaaaggagaacgagagcttggcacacaaatgaaagcaacaggtgaagttatggccattggtcgaacttacgaagaatcattgttaaaagcaattcgatcacttgagtatggtgtgcatcacttaggattaccaaatggtgaaagcttcgatcttgattatattaaagaacgtatttcacaccaagatgatgaacgattatttttcatcggcgaagcaattagaagaggcacaacattagaagaaattcataatatgactcagattgattacttcttcttacacaagttccaaaacattattgatattgagcatcaattaaaagagcatcaaggtgatttagaatatcttaaatatgcaaaagattatggatttagtgataaaacaatagcgcatcgctttaatatgacggaagaagaagtatatcaattgcgtatggaaaatgatattaaacctgtttacaagatggttgatacttgcgcagctgaatttgaatcttcaacaccatattattatggtacatacgaaactgaaaatgaatccatagttactgacaaagaaaaaatcttagtattaggctctggaccaattcgaatcggccaaggtgtagaatttgactatgcgacagttcacgccgtttgggcaattcaaaaagcagggtacgaagcgataattgtgaataacaatccagaaacagtttcaacagacttctcaatttctgacaaattatactttgaacctttaactgaagaagatgtgatgaatatcattaatttagaaaaacctaaaggtgtcgttgtacaatttggaggacaaacagcgattaatttagcagacaaattggctaaacatggtgttaaaatacttggtacttcactagaaaatctaaatcgtgctgaagatagaaaagaatttgaagcactattaagaaaaattaacgtgccacagccacaagggaaaacagctacatcacctgaggaagcattagcgaatgctgcagaaatcggatatccggttgtagtaagaccttcttatgtattaggtggtcgcgcaatggaaattgtagacaatgacaaagagttagaaaactatatgacccaggctgtaaaagcgagtccggaacatccggtactagtcgatagatatttaactggtaaagaaattgaagttgatgcgatttgtgatggagaaacggtcattattccaggaatcatggaacatattgaacgtgctggtgtgcatagtggtgactcaatcgctgtatatccaccacaaactttgacagaagacgagttagcaacacttgaggactatactataaaattagctaaaggtttaaacatcattggcttaatcaacattcaattcgttatagctcacgatggtgtgtatgttttagaagtaaatccacgttctagtagaacggtaccattcttaagtaaaattactgatattccaatggcacaattagctatgcgagcaatcattggggaaaaactaacagatatgggttatcaagaaggggttcaaccatatgctgagggtgtctttgtgaaagcaccagtatttagttttaataaattgaaaaatgttgatattactttaggacctgaaatgaagtcaacaggtgaagtgatggggaaagatactacattagaaaaggcgttattcaaagggttaacaggtagtggcgttgaagttaaagatcacggtacagtattaatgaccgtcagtgacaaagataaagaggaagttgttaaattggcacaacgcttaaatgaagttggctataaaattttagcaacgtctggaacagctaataaattagctgagtatgacatacctgcagaagtagtaggcaaaattggtggcgaaaatgatttattaacacgtattcaaaatggtgatgttcaaatcgttataaatacaatgactaaaggtaaagaagtagaaagggatggcttccaaattagacgtactacagttgaaaatggtattccatgtttgacatctttagatacagctaatgccttaacgaatgtaattgaaagtatgacatttacaatgcgtcaaatgtaa

SEQ ID NO: 405755 - DNA, 1101 bp, Staphylococcus aureus
atgcaaagcaaacgttatctagtgttagaagacggttctttttacgaaggctaccgtttaggatctgataacttaactgtaggagaaattgtatttaatacagcgatgacaggttatcaagaaactatttcagatccatcatatacaggtcagatcattacttttacgtatccattaatcggtaattatggtatcaatagagacgattttgaatcattagtacctacattaaacggtattgtagtgaaagaagcgagtgcgcatccaagtaattttagacagcaaaagacacttcatgacgttttagaattgcatcaaattccagggattgcaggtgttgatacaagaagtattacgcgtaaaattcgacaacacggtgtgttaaaagctggttttactgatcgaaaagaagatattgatcaacttgtcaaacatttacaacaagtagaattacctaaaaacgaagtagaaatcgtttcgactaaaacaccgtatgtttcgacaggtaaggatctaagtgtcgtacttgtagactttggtaagaagcaaaatattgttcgagaattaaacgtcagaggttgtaacgtcacagttgtaccatatacaactactgccgaagaaattttagcaatggctccagatggcgttatgctatcaaacggaccaggtaatcctgaagttgtagaatgtgcgattccaatgattcaaggaattttagggaaaattccgttctttggtatctgtctaggacatcaactttttgcattatctcaaggagcaagctcatttaaaatgaagtttggtcatcgtggtgcgaaccatccagttaaaaatttagagactggaaaagttgatattacgagtcaaaaccatggatatgcaatagatatagattcgttaaaaagtactgatttagaagttactcatcttgcattaaatgatggtactgtagaaggtttaaaacataaaacattaccagcattttctgttcaataccatcctgaagcaaatccaggaccgtcagattcaaactatctatttgatgattttgtagcaatgatgactaattttaaggaaaaggagcgtcatatcaatgcctaa

SEQ ID NO: 405756 - DNA, 1278 bp, Staphylococcus aureus
atgatgaaattaattaaaaacggtaaagtattacaaaatggcgaattacaacaagcagatattttaattgatggtaaggtaattaaacaaattgcacctgcaattgaaccaagcaatggtgttgacatcatagatgcgaaaggtcactttgtgtcacctggatttgtcgatgttcatgttcatttacgtgaacctggtggtgaatataaagagacaattgaaactggtactaaagctgctgctagaggcggatttacaactgtatgtccaatgcctaacacaagaccggtaccagattctgtagaacattttgaagctttacaaaaattaatcgatgacaatgctcaagtacgtgtattaccttatgcttcaattacaacacgtcaattaggtaaagaattggttgatttcccagcactagtaaaagaaggtgcctttgcgtttacagatgacggtgtaggagtacaaactgcaagcatgatgtatgaaggcatgattgaagctgcaaaagtaaacaaagccatcgtagcacactgtgaagataattcattaatctatggtggtgcaatgcatgaagggaaacgcagtaaagagttaggtataccaggtattccaaacatttgtgaatctgttcaaatcgcaagagatgtactattagctgaagcagcaggttgtcattatcatgtatgtcatgtttctactaaagaaagtgttagagtcattcgtgacgctaaacgcgcaggcattcatgttacagctgaagttacaccacaccatttattgttaacagaagatgatattcctggtaataatgccatttataaaatgaatccaccattgagaagtactgaagatagagaggctttgttagaagggttactagacggtacaattgactgtatcgcaacagaccatgcaccacatgcacgtgatgaaaaagcacaaccaatggaaaaagcaccattcggaattgttggtagtgaaacagcattcccattattatatacgcattttgtaaaaaatggtgattggacattacaacaattagtagattacttaacaattaaaccatgtgagacatttaatttagaatacggcacattaaaagaaaatggttatgcagatttaacaatcattgatttagatagtgaacaagaaattaaaggagaagatttcttatcaaaagcagataatacaccatttatcggctataaagtttatggaaatccgatcttaacaatggttgaaggcgaagttaaatttgagggggataaataa

SEQ ID NO: 405757 - DNA, 882 bp, Staphylococcus aureus
atgaatcatttattatcaatggaacatttatctacagatcaaatatacaaacttatccaaaaggcaagtcaatttaaatctggtgaacgtcaactaccaaactttgaagggaaatatgtcgcaaatttattctttgaaaattctactcgaacaaaatgtagttttgaaatggcagaacttaagctagggttaaaaacgattagctttgaaacatcaacatcatctgtttcaaaaggtgaatctttatatgacacatgtaaaactttagaaagtattggctgtgatttattagtcattagacatccgtttaataactactatgaaaaattagcgaatattaacatcccaattgcgaatgctggtgatggtagtggacaacatccaacacaaagtttacttgatttaatgacgatatatgaagaatatggatattttgaaggcttgaatgtattgatttgtggagacattaaaaattcacgtgtcgcacgtagtaattaccatagtttaaaagcattaggtgcaaacgtaatgtttaatagcccaaatgcttggattgatgattctttagaagcaccttatgtaaatatagatgatgttatagaaacagtagatatagttatgttattaagaattcaacatgaaaggcatgggcttgcagaagaaactagatttgcagcagatgattatcatcaaaagcatggcttaaatgaagtacgctataacaaattacaagaacatgctattgttatgcatccggcacctgtgaatagaggagtagaaatacaaagcgatttagtagaagcttcaaaatcaagaatttttaagcaaatggaaaatggcgtttacttaagaatggcagtcattgatgaattattaaaatag

SEQ ID NO: 405758 - DNA, 1308 bp, Staphylococcus aureus
atgcaaaatgatgaaatgtttgaacgaacagtaaaacccgtactagatgtaaatgaaaaaccacaaccagcgcaatgggcatttttaagcttacaacatttatttgcgatgtttggcgcaacagtactagtaccattcttaacaggactaccaatatcagcagcgttactagcttcgggaatcggtacattactttatatcttaataacgaaggcgcaaataccagcatacttgggatctagctttgcatttatcacgccaattatcacgggattaagtacgcatagcttaggagacatgcttgtagcattattcatgagtggtgttatgtacgtcataatcgggattctaatcaaattaagtgggacagcatggttaatgaaattattaccaccagttgttgttggaccagtcatcatggtaattggtttaagcttagcgcctactgcagtcaatatggcaatgtatgaaaatcctggagatatgaaaggttacaatatcagtttcttaattgttgcaatgataaccttgcttgtaacaatagtcgttcaaggattttttaaaggattcctatctttaattccagttcttgtaggtattatcgtaggttatgtggtagcgatttttatggggattgtgaaatttgatgcaattatgtcagcaaaatggatagatttccctcatatttatctgccatttaaagattatgtaccttcatttcacttaggacttgtacttgtaatgattccgattgtgttcgtaacagtaagtgaacatattgggcaccaaatggtattgaataaaatcgtaggtagaaacttctttgaaaagccaggacttgataaatcaatcattggtgatggtgtttctacaatgtttgccagtattattggtggaccaccaagtacaacatacggtgaaaatatcggtgtattagcgattaccagaatatacagtatttacgtcattggtggtgcagcagttatagcaattgttttagcattcattggtaagttcactgcattaatttcttctatacctacaccagttatgggaggagtatctatattacttttcggtattattgcagcaagtggcttaagaatgttagttgaaagcaaagtagattttgcgaacaatcgaaatttagttatagcttctgtaattttagttgtaggtatcggtaatttagtatttaacttaaaagaaattggtatcaaccttcaaattgaggggatggcattagctgcactttcaggaattattttgaacttaatcttacctaaagagaaaaaacaaaacaattaa

SEQ ID NO: 405759 - DNA, 528 bp, Staphylococcus aureus
atgtctgaacgtatcataatggatgatgccgcaatacaacgtacagtgacgagaatcgctcacgaaattttggagtataacaaaggtactgataatttaattcttttaggtatcaaaacaagaggtgaatatttagcgaatcgtatacaagataaaattcatcaaattgagcaacaacgtatacctactggaacaattgatattacatactttagagatgatatagagcacatgtcatcacttacgacaaaagacgcaatagacatcgacacagatattacagataaagtagtcatcattattgacgatgtgctgtatactggtcgaacggttcgtgcttcacttgatgctattttgctaaatgctagacctattaaaattggtttagctgctttggttgatcgaggacatcgtgagttaccaattcgagcagattttgttggtaaaaatatacctacttctaaagaggaaacggtaagtgtctatttagaagaaatggatcaaagaaatgcagttataattaaataa

SEQ ID NO: 405760 - DNA, 918 bp, Staphylococcus aureus
atggagacttatgaatttaacattacagataaagaacaaacaggtatgcgtgtagataagttgctgcctgaattaaataatgattggtctcgtaaccagatacaagattggattaaagcaggtttagtcgttgcaaacgataaagttgttaaatctaattataaagtgaaacttaatgatcatatagttgtcactgaaaaagaagtggttgaagctgatattctacctgaaaatttaaatttagatatttattatgaagatgacgatgttgcagttgtatataaaccgaaaggcatggtagttcatccatcaccagggcattataccaatacattagttaatggtttaatgtatcaaattaaaaatttgtcaggtattaatggagaaattcgtccaggtattgttcaccgtatagatatggatacttctggtttattaatggttgctaaaaatgatattgctcatcgtgggcttgtagaacaattaatggataaatctgttaaaagaaaatatatcgctttagttcacgggaatattcctcatgattacggtacaatcgatgcgccaattggtagaaacaaaaatgatcgtcaatctatggctgttgttgatgatggtaaggaagcagtgacacattttaacgtactagaacattttaaagattatacgcttgttgaatgtcaacttgaaacaggacgtacgcatcaaatccgtgttcacatgaaatatattggcttcccattagttggtgatccaaagtatggaccgaaaaagacattggatattggtggtcaagctctacatgctggacttattggattcgaacatccagtaacaggtgaatatattgaaagacatgctgaattaccacaagactttgaagatttattagatacaattcgaaaaagagatgcataa

SEQ ID NO: 405761 - DNA, 492 bp, Staphylococcus aureus
atgcacaaaaaatattttattggcacttccattttaatagcagtatttgtcgttatatttgaccaagttactaaatatattatagctactacaatgaaaattggagattcatttgaagtgataccgcactttttaaacataacatcacatcgaaataatggtgctgcatggggaatattgagtggaaaaatgacatttttctttattattaccattattatattaatagccttagtatatttctttattaaagatgctcaatataatttgtttatgcaagttgctattagtttactttttgcaggtgcacttggaaactttattgatagaattttaacaggagaagttgttgactttattgatacaaatatttttggttatgattttccaatatttaatatcgcagattcaagtttaacaattggtgtaatattaattattattgccttattaaaggatacttccaataaaaaggagaaggaggttaagtaa

SEQ ID NO: 405762 - DNA, 195 bp, Staphylococcus aureus
atgtcagttcgaggaataaataaagttaaacgagagctaggttttgtattaatggcaattaatataaggaaaatagcagctcaacgagctgtacattataaaatacatatcaaaaaagctgatttctatcaaataattaatagaaatcagctttttacattgcctaagaacttaatgtcccagcctccttcataa

SEQ ID NO: 405763 - DNA, 798 bp, Staphylococcus aureus
atgtatcataacagtaacgcaaactttgtcaatggtatcactttaaatgtgagagataagaatgaattaaagccattttatgaggacatattaggattaaatattataaatgagacattaacatcgatacaatatgaagtaggtcaaaataatcatgtcattacacttgttgaattacaaaatggacgtgaacctttaatgtccgaagcgggactgtttcatatcgcaattaaactacctcaaattagtgatttagctaatttactaattcatttaagcgaatatgatattccagttaacggaggtatacagcctgcttcgttatcattattttttgaagacccggaaggaaacggttttaaattttatgttgataaagacgaagcgcaatggacgaggcaaaataatttagtaaaaattgatattagaccattaaatgtaccgagattagtgagtcatgcaacaaaattgttatggttaggtattccagatgacgctattataggtgcattgcatattaagacaattcatttatcagaggtaaaagagtactacctcgattattttggattagagcaatcggcatatatggatgattattcaatatttttagcatcgaatggctattatcaacatttggccatgaatgattgggtatcagcaacaaaacgtgtagaaaattttgatacgtatggattagcaattgttgactttcattatcctgaaacaacacatttaaatttacaaggtccggatggtatctattatcgctttaatcatatcgaagttgaagattag

SEQ ID NO: 405764 - DNA, 2754 bp, Staphylococcus aureus
atggattacaaagaaacgttattaatgcctaaaacagatttcccaatgcgaggtggtttaccaaacaaggaaccgcaaattcaagaaaaatgggatgcagaagatcaataccataaagcgttagaaaaaaataaaggtaacgaaacattcattttacatgatggcccaccatacgcgaatggtaacttacatatgggacatgccttgaacaaaattttaaaagactttattgtacgttataaaactatgcaagggttctatgcaccatacgtaccaggttgggatacacatggtttaccaattgaacaagcattaacgaaaaaaggtgttgaccgaaagaaaatgtcaacagctgaattccgtgagaaatgtaaagaatttgctttagaacaaattgaattacagaaaaaagattttagacgtttaggtgttcgtggtgactttaatgatccatatattacattaaaacctgaatacgaagctgcacaaattcgtatttttggagaaatggcagataaaggtttaatttataaaggtaaaaagccagtttattggtctccttcaagtgagtcttcattagcagaagcagaaattgaatatcacgataaacgttcagcatcaatttacgttgcatttgacgttaaagatgacaaaggtgtcgttgatgcagatgctaaatttattatctggacaacaacgccatggacaattccatcaaatgttgcgattaccgttcatcctgaattaaaatatggtcaatacaatgtaaatggcgaaaaatatattattgcagaagccttgtctgacgctgtagcagaagcactggattgggataaagcatcaatcaaattagaaaaagaatacacaggtaaagaattagagtatgttgtagcacaacatccattcttagacagagaatcgttagtgattaatggtgatcatgttactacagatgctggtacaggttgtgtacatacagcaccaggtcacggggaagatgactatattgttggtcaaaaatatgaattgccagtaattagtccaatcgatgataaaggtgtatttactgaagaaggcggccaatttgaagggatgttctatgataaagctaataaagccgttactgatttattaacagaaaaaggtgcactattaaaattagactttattacacatagctatccacacgactggagaacaaaaaaacctgtaatcttccgtgctacaccacaatggtttgcctcaatcagtaaagtaagacaagatattttagatgcaatcgaaaatacaaacttcaaagtaaattggggtaaaacacgtatttacaatatggttcgtgaccgtggcgaatgggttatttctcgtcaacgtgtgtggggtgtaccgttaccagtattttatgctgaaaatggcgaaattatcatgacgaaagaaacagtgaatcatgttgctgatttatttgcagaacacggttcaaatatttggtttgaaagagaagcgaaagacttactaccagaaggatttacacatccaggcagccctaacggtacatttactaaagaaacagacattatggacgtttggtttgattctggttcatcacaccgtggcgtgttggaaacaagaccggaattaagtttcccagcggatatgtatttagaaggtagtgaccaatatcgtggttggttcaactcttctatcacaacttcagttgctacaagaggagtatcaccttataaattcttactttctcatggttttgttatggacggtgaaggtaagaaaatgagtaaatctttaggtaatgtgattgtacctgaccaagtggttaaacaaaaaggtgctgatattgcgagactttgggtaagtagtacggactatttagctgatgttagaatttctgatgaaattttaaaacaaacatctgatgtttatcgtaaaatcagaaatacattaagatttatgttaggtaacattaacgatttcaatcctgacacagatagcattcctgaatcagagttattagaagtggatcgttacttgctaaatcgtttacgtgaatttactgcaagtacgattaacaactatgaaaactttgactacttaaatatttatcaagaagttcaaaactttatcaatgttgagttaagtaatttctatttggattacggtaaagatattttatatattgaacaacgtgattctcatatccgtcgtagtatgcaaacagtgttatatcaaattttagttgatatgacgaagttgttagcaccaatcttagtgcatacagctgaagaagtttggtctcatacaccacatgttaaagaagaaagtgttcacttagcagacatgcctaaagttgtagaagtagatcaagctttattggataaatggcgtacatttatgaatttacgtgatgatgtgaaccgtgcattagaaactgctcgtaatgaaaaagttattggtaaatcattagaagctaaagttacgattgctagtaacgataaatttaatgcatctgaattcttaacttcatttgatgcattacatcaattatttatcgtgtcacaagttaaagttgtagataagttagacgatcaggcaacagcttatgaacatggtgatattgtcatcgaacatgcagatggtgaaaaatgtgaaagatgttggaactattcagaggatcttggtgctgttgatgaattgacgcatctatgtccacgatgccaacaagttgtaaaatcacttgtataa

SEQ ID NO: 405765 - DNA, 618 bp, Staphylococcus aureus
atgccttttacaccaaatgaaattaagaataaagagttttcacgtgtaaagaatggtttagaacctactgaagttgctaattttttggagcaactaagcactgaaattgaacgtcttaaagaagataaaaaacaacttgaaaaagtaatcgaagagagagatactaatattaagtcttatcaagacgtgcatcaatctgtaagtgatgctttgatacaagctcaaaaagctggtgaagaaactaagcaagctgcagagaaacaagctgaagcgattatagctaaggcagaagcgcaagctaatcaaatggttggtgacgcggtagaaaaagcacgccgtttagcattccagactgaagatatgaaacgtcaatcaaaagtatttagatcgcgtttccgtatgttagttgaagcgcaattagacttattaaaaaacgaagattgggattacttgttgaattatgatttagacgctgaacaagtgacgcttgaaaatattcatcatttgcatgaaaatgatttaaagccagatgaagttgcagcaaatgcacaaaataatgcatcaaatacaccagacaataatcaacaatccaatgattcagaaacaactaagaagtaa

SEQ ID NO: 405766 - DNA, 807 bp, Staphylococcus aureus
atggtattttataatttttttaaggtagtgattaacatagatatttatcaacactttagacaggaagaatacgaattaattgatcagctaacggataaatgtgatcaagcggaacagcattatgcaccagtattaacgcattttttagatccaagagggcaatatatattggaagtgatttgtggcagttatgaagatttaaacgtatctttttatggtggacctaatgctgaaagaaaaagagcaatcatttcgccgaactattatgaacctaaagaaagcgactttgaattaactttaatggaaatagattatcctgaaaaattcgtcactttaaaacatcaacatattttagggacattaatgtctttaggtatcgaacgcgaacaagttggagatataattgtgaatgaacgaattcaatttgttttgacaagtagattggaatcatttattatgttagaattacaacgtattaaaggcgcatcagttaaactttatactattccagtaacagatatgatacaatctaatgagaattggaaaaatgaaagtgcaacagttagttctttaaggttagatgttgttattaaagaaatgatacgtaaatcacgtacgattgcgaaacaactaatcgaaaaaaaacgtgttaaagtgaatcacactattgttgattcagcagattttcaattacaagcaaatgatttaatatccatccaaggttttggtagagcacacattactgacttaggtggtaaaactaaaaaagataaaacgcacattacctatagaacattattcaaatag

SEQ ID NO: 405767 - DNA, 291 bp, Staphylococcus aureus
atggatataaatgtgctagctacaatatttaaattcatcctttttgttgttgaaatttattatttcggcatgattatatatttctttacatcttgggtaccaagtattagagaaactaaggtaggttattttttagcgaaaatatatgaacctttcttacaaccatttagaaaagtaattccacctattggaattatcgacatatcatcaatcgctgcaattatcgttttagtattattccaaaaagggttactccaaatctttaattggattttaattcaattacaataa

SEQ ID NO: 405768 - DNA, 564 bp, Staphylococcus aureus
gtgagccacttggctttaaaagatttatttagtggattttttgtaatagatgatgaagaggaagtagaagtacctgacaaacaacaacaggtaaatgaagcgccagcaaaagagcagtcacaacaaacaacaaaacaaaacgcaatcaaatcagtccctcaaaaatctgcatcaagatatacaacaacgtcagaagaaaggaataaccgtatgtctaattattcaaaaaataattcacgtaatgttgtaactatgaacaatgctacaccaaacaatgcatcacaagaaagttcaaaaatgtgtttattcgaaccacgtgttttttcagatacacaagatattgctgatgagcttaaaaaccgccgtgcgacacttgtcaatttacaacgtattgataaagtatcagcgaaaagaattattgattttttaagcggtactgtttatgcaatcggtggagatatccaacgtgtaggtactgatattttcttatgtacgcctgataatgtggaagtagctggaagcattacagaccatattgaaaatatggaacattcattcgactaa

SEQ ID NO: 405769 - DNA, 669 bp, Staphylococcus aureus
gtgaaagataatttacaacaaatctcaacacaaattaatgacaaaagtgaaaaaaataatttttcaacaaaaccaaacgtgattgcagttacaaaatatgttacaatagagcgagctaaagaagcgtatgaggctggaataagacattttggtgagaatagattggaaggcttttttcaaaagaaagaagcattaccatcagatgcggtgatccattttataggatcattacaatctcgaaaagttaaggacgttataaacgacgtagattatttccatgctttagatcgattgagcttagccaaagaaattaacaaacgtgcagaacataaaattaaatgtttcttgcaagtgaacgtttcgggagaagcttctaaacatggtattgctttagaagatgttgatcagtttatagatgatcttaaaaaatatgacaaaatcgaaattgtaggtttaatgacgatggcaccattgacagatgatgaagcatatattagatcgttatttaaacagttacgtttgaaaaaagaagaaatacaacgactcaatttagaatatgcgccttgtgatgaattatcaatgggaatgagtaatgactatcttattgcagttgaagaaggtgcgacgtttgttagaattgggactaaacttgtaggagaagaggagtga

SEQ ID NO: 405770 - DNA, 792 bp, Staphylococcus aureus
gtgaatgataattttaaaaagcaaccgcatcatttaatatatgaagagttattacaacaaggtattactctaggtattacaactagaggagatggtttaagtgactatcctaaaaatgcttttaatatggcgagatatattgatgatcgcccatataatattactcaacatcaattgcaattagctgaagaaattgcgtttgatagaaaaaattgggtgtttcccattcaaacacatgaaaataaagtcgcttgtattacaaaggatgatataggcacaaatatagacactttaactgatgcgcttcatggtattgatgcgatgtacacatatgatagtaatgtcttattaacgatgtgttatgcagactgtgtaccagtatatttttatagtacaaaacatcattttattgcattggcgcatgcaggttggcgtggtacctatactgaaattgtaaaagaagtgctaaaacatgtgaactttgatttgaaagacttacatgtcgttattggaccatctacatcatcaagttatgaaattaatgatgatattaaaaataaatttgaaacattgccaattgatagtgccaactatattgaaactagaggacgagatcgtcatggtattgatttgaaaaaagccaatgctgcattattaatttattatggtgttcctaaagaaaatatttatacgacagcgtatgctacatctgaacatttagaattatttttctcttatcgattagaaaaaggtcaaacaggacgcatgttagcattcattggtcaacagtaa

SEQ ID NO: 405771 - DNA, 1173 bp, Staphylococcus aureus
atgttagaatttgaacaaggatttaatcatttagcgactttaaaggtcattggtgtaggtggtggcggtaacaacgccgtaaaccgaatgattgaccacggaatgaataatgttgaatttatcgctatcaacacagacggtcaagctttaaacttatctaaagctgaatctaaaatccaaatcggtgaaaaattaacacgtggtttaggagcaggagctaatcctgaaatcggtaaaaaagctgcagaggaatctcgtgaacaaattgaagatgcaatccaaggtgcagacatggtatttgttacttctggtatgggtggcggaactggtactggtgcagcaccagtcgttgctaaaattgcaaaagaaatgggcgcattaactgttggtgttgtaactcgtccatttagttttgaaggacgtaaacgtcaaactcaagctgccgctggagtagaagctatgaaagctgcagtagatacattaatcgttataccaaatgaccgtttattagatatcgttgacaaatctacgccaatgatggaagcatttaaagaagctgacaacgtgttacgccaaggtgtacaaggtatctcagacttaatcgctgtttctggtgaagtaaacttagactttgcagacgttaagacaattatgtctaaccaaggttctgcattaatgggtattggtgtttcttctggtgaaaatagagcggtagaagctgctaaaaaagcaatctcttctccattacttgaaacatctatcgttggtgcacaaggtgtgcttatgaatattactggtggcgagtcattgtcattatttgaagcacaagaggctgctgatattgtccaagatgctgcagatgaagacgttaatatgattttcggtacagttattaatcctgaattacaagatgagattgttgtaacagttattgcaactggttttgatgacaaaccaacatcacatggtcgtaaatctggtagcactggattcggaacaagcgtaaatacttctagcaatgcaacttctaaagatgaatcattcacttcaaattcatcaaatgcacaagcaactgatagtgtaagtgaaagaacacatacaactaaagaagatgatattcctagcttcattagaaatagagaagaaagacgttcaagaagaacaagacgttaa

SEQ ID NO: 405772 - DNA, 1413 bp, Staphylococcus aureus
atggaagaacattactacgtaagtattgatattggatcatcaagcgtaaaaacaatagtaggcgagaaatttcacaatggtataaatgtgataggtacaggacaaacctacacgagcggtataaaaaatggtttaattgatgattttgatattgcgcgacaagcaatcaaagacacaattaaaaaggcatcaatcgcttcgggtgttgatattaaagaagttttcctgaaattacctatcattggaacggaagtttatgatgaatcaaatgaaatcgacttttatgaggatacagaaatcaacggttcacatatcgaaaaagtattagaaggtattagagaaaaaaatgatgtgcaagaaacagaagtaattaatgtgttcccgattcgttttatagtcgataaagaaaatgaggtttcagaccctaaagaattaattgtcagacattcattaaaggttgaagcaggcgtaattgctattcaaaaatcgattttaattaatatgattaaatgcgtagaagcatgtggtgttgatgtattagatgtttactctgatgcatataactatggttcaatcctaacagctactgaaaaagagttaggtgcatgtgtcattgatattggtgaagacgttacgcaagttgctttttatgaacgcggtgaattagtagatgctgattctatcgaaatggcagggcgtgatattacagacgatattgcacaaggattaaacacttcttatgaaactgctgaaaaagttaaacaccaatatggtcatgcattctatgattctgcttcagatcaagatatcttcactgttgaacaggttgatagtgatgaaacagtacagtatactcaaaaagatttgagtgactttattgaagcgcgtgtagaagaaatattcttcgaagtatttgatgttttacaagatttaggattaacaaaagtaaatggtgggtttattgtaactggtggatctgcaaacttacttggcgtaaaagaattattatcagatatggtaagtgaaaaagttagaattcacacgccatcacaaatgggaattagaaaacctgaattttcttcagcaatttctacaatttctagtagtatcgcttttgatgagttattagattatgttacaattaattatcatgataatgaagaaactgaagaagatgttattgatgtgaaagacaaagataacgaatctaaattaggcggatttgattggtttaaacgtaaaacaaacaaaaaagatactcatgaaaatgaagtagagtcaacagatgaagaaatttatcaatcagaagataatcatcaggaacataaacagaatcatgaacatgttcaagacaaagataaagataaagaagaaagtaaattcaaaaaactaatgaaatctctatttgaatga

SEQ ID NO: 405773 - DNA, 1320 bp, Staphylococcus aureus
atggatgataaaacgaagaacgatcaacaagaatcaaatgaagataaagatgaattagaattatttacgaggaatacatctaagaaaagacggcaaagaaaaagatcaaaggctacacatttttctaatcaaaataaagatgatacatctcaacaagctgattttgatgaagaaatttacttgataaataaagacttcaaaaaagaagaaagcaatgataaaaataatgattctgcttctagtcatgcgaatgataataatatcgatgattctacagactctaatattgaaaatgaggattatagatataatcaagaaattgacgaccaaaatgaatcgaatgtaatttcagtcgacaacgaacaacctcaatcagctcctaaagaacaaaatagcgactcgattgatgaggaaacagtaacgaaaaaagaacgaaaaagtaaagtaacacaattaaagccattaacacttgaagaaaagcggaagttaagacgtaagcgacaaaagcgaatccaatacagtgttattacaatattggtattgttgattgctgttatattaatttacatgttttcaccacttagtaaaattgcgcatgtaaatataaatggaaataatcacgttagtacttcaaagataaacaaagttttaggtgttaaaaatgattcaaggatgtatacgtttagtaaaaaaaatgctattaatgatctcgaagagaatccattaatcaaaagtgttgagatacacaagcaattaccaaacacattaaacgtagatatcacagaaaatgaaattattgctttagtgaaatataaaggtaaatatttacctttattagaaaatggtaaattgcttaaaggttcaaatgatgtcaaaattaatgatgcacctgtcatggatggtttcaaaggtacaaaagaagatgatatgattaaggcgttatctgaaatgacacctgaagttagacgatatattgccgaagtgacatacgccccaagtaaaaacaaacaaagcagaattgaattgtttacgacagatggacttcaagtaatcggtgatatttcgacgatatctaagaaaatgaaatattatccgcagatgtcacaatcattatcaagggatagttcgggtaaactaaaaacacgaggctatattgatttatcagtcggtgcttcatttatcccataccgtggaaacacgtctagtcaatcagaaagcgataaaaatgtgactaaatcatctcaagaggaaaatcaagcaaaagaagaattacaaagcgttttaaacaaaattaacaaacaatcaagtaagaataattaa

SEQ ID NO: 405774 - DNA, 1350 bp, Staphylococcus aureus
atgcttaattatacagggttagaaaataaaaatgtattagttgtcggtttggcaaaaagtggttatgaagcagctaaattattaagtaaattaggtgcgaatgtaactgtcaatgatggaaaagacttatcacaagatgctcatgcaaaagatttagaatctatgggcatttctgttgtaagtggaagtcatccattaacgttgcttgataataatccaataattgttaaaaatcctggaataccttatacagtatctattattgatgaagcagtgaaacgaggtttgaaaattttaacagaagttgagttaagttatctaatctctgaagcaccaatcatagctgtaacgggtacaaatggtaaaacgacagttacttctctaattggagatatgtttaaaaaaagtcgcttaactggaagattatccggcaatattggttatgttgcatctaaagtagcacaagaagtaaagcctacagattatttagttacagagttgtcgtcattccagttacttggaatcgaaaagtataaaccacacattgctataattactaacatttattcggcgcatctagattaccatgaaaatttagaaaactatcaaaatgctaaaaagcaaatatataaaaatcaaacggaagaggattatttgatttgtaattatcatcaaagacaagtgatagagtcggaagaattaaaagctaagacattgtatttctcaactcaacaagaagttgatggtatttatattaaagatggttttatcgtttataaaggtgttcgtattattaacactgaagatctagtattgcctggtgaacataatttagaaaatatattagcagctgtgcttgcttgtattttagctggtgtacctattaaagcaattattgatagtttaactacattttcaggaatagagcatagattgcaatatgttggtactaatagaactaataaatattataatgattccaaagcaacaaacacgctagcaacacagtttgccttaaattcatttaatcaaccaatcatttggttatgtggtggtttggatcgagggaatgaatttgacgaactcattccttatatggaaaatgttcgcgcgatggttgtattcggacaaacgaaagctaagtttgctaaactaggtaatagtcaagggaaatcggtcattgaagcgaacaatgtcgaagacgctgttgataaagtacaagatattatagaaccaaatgatgttgtattattgtcacctgcttgtgcgagttgggatcaatatagtacttttgaagagcgtggagagaaatttattgaaagattccgtgcccatttaccatcttattaa

SEQ ID NO: 405775 - DNA, 966 bp, Staphylococcus aureus
atgatttttgtatatgcgttattagcgctagtgattacatttgttttggtacctgttttaatacctacattaaaaaggatgaaatttggtcaaagtattcgagaagaaggtccacaaagccatatgaagaagactggtacaccaacgatgggtggactaacatttctattaagtattgtgataacgtctttggtggctattatatttgtagatcaagctaatccaatcatactgttattatttgtgacgattggttttgggttaattggttttatagatgattatattattgttgttaaaaagaataaccaaggtttaacaagtaaacagaagtttttggcgcaaattggtattgcgattatattctttgttttaagtaatgtgtttcatttggtgaatttttctacgagcatacatattccatttacgaatgtagcaatcccactatcatttgcatatgttattttcattgttttttggcaagtaggtttttctaatgcagtaaatttaacagatggtttagatggattagcaactggactgtcaattatcggatttacaatgtatgccatcatgagctttgtgttaggagaaacggcaattggtattttctgtatcattatgttgtttgcacttttaggatttttaccatataacattaaccctgctaaagtgtttatgggagatacaggtagcttagctttaggtggtatatttgctaccatttcaatcatgcttaatcaggaattatcattaatttttataggtttagtattcgtaattgaaacattatctgttatgttacaagtcgctagctttaaattgactggaaagcgtatatttaaaatgagtccgattcatcatcattttgaattgataggatggagcgaatggaaagtagttacagtattttgggctgttggtctgatttcaggtttaatcggtttatggattggagtgcattaa

SEQ ID NO: 405776 - DNA, 2235 bp, Staphylococcus aureus
atggcgaagcaaaaaattaaaattaaaaaaaataaaataggggcagtcctacttgttggtttattcggactgctcttttttatattggttttaagaatttcatatatcatgattactggacattctaatggtcaagatttagtcatgaaggcaaatgaaaagtatttagttaagaatgcacaacaaccagaacgaggaaagatatatgatcgtaatggtaaagtgctagcagaagatgtagaaagatataaacttgttgcagtaatagataaaaaggcgagtgccaattctaaaaaacctaggcatgtagttgataaaaaagagactgcaaagaaattatctacagtcattaatatgaagccagaggaaattgaaaagagacttagtcaaaagaaagctttccaaattgaatttggacgcaaaggaacaaatttaacgtatcaggacaaattgaaaatagagaaaatgaatttgcctggtatttctttattgcctgaaacagaacgcttttatccaaatggcaattttgcatcacacttaattggtagagctcagaaaaatccggatactggtgaacttaaaggtgcacttggagttgaaaagatttttgatagttatttaagtggatctaaaggatcattgagatatattcatgatatttggggatatatcgcaccaaatactaaaaaagagaagcagcctaaacgtggtgatgatgtccatttaacaatcgattcaaatattcaagtatttgttgaagaagctttagatggcatggttgaaagataccagccgaaagatttatttgcggttgtcatggatgccaaaactggagaaattttagcatacagtcagcgaccaacatttaatcctgaaactggtaaagactttggtaaaaagtgggcaaatgacctttatcaaaacacatacgagcctggatcaacatttaaatcatatgggttagcagctgctattcaagaaggtgcttttgatcctgataagaaatataaatctggacatagagatattatgggttcacgtatttcagactggaatagagtcggttggggtgaaatcccaatgtcactcggatttacttattcatctaatacattgatgatgcatttacaagatttagttggtgcagacaaaatgaaatcttggtatgaacgatttggatttggaaaatcaactaaaggtatgtttgatggagaagcacctggtcaaattggatggagtaatgagttgcaacaaaaaacgtcatcatttggtcaatcgacaacagtaacacctgttcaaatgttacaagcgcaatcagcgttctttaatgatggtaatatgttaaaaccatggtttgtgaatagcgttgaaaatcctgttagtaaaagacaattttataaagggcaaaaacaaatcgcaggcaaaccaataacaaaagatactgctgaaaaagttgaaaagcaattggatttagttgtgaatagtaagaagagtcacgctgcaaactatcgtattgatggttatgaggtcgaaggtaagactggtacagcacaagtcgctgcacctaatggtggtggatacgttaaaggtccaaacccatattttgtaagttttatgggtgacgcgccgaagaaaaatcctaaagttattgtatacgctggtatgagcttggcacaaaaaaatgaccaagaagcttatgaattaggtgttagtaaagcgtttaaaccaataatggaaaatactttgaaatatttaaatgtaggtaaatcaaaagatgacacatctaatgcagagtatagtaaagtgccagatgttgaaggtcaagacaaacaaaaagctattgataatgtgagtgcaaaatcattagaaccagttactattggttctggcacacaaataaaagcacaatctataaaagcagggaataaagtcttacctcatagtaaagtactgttattaacagatggagacttaactatgcctgacatgtcaggatggacgaaagaagatgtcattgcttttgaaaacctaacaaatattaaagtaaatttaaaaggtagcggttttgtgtcccaccaatcaattagtaagggacaaaaacttactgaaaaagataaaatagacgtagaattttcatcagagaatgtagacagcaattcgacgaataattctgattcaaattcagatgataagaagaaatctgacagtaaaactgacaaggataagtcggactaa

SEQ ID NO: 405777 - DNA, 402 bp, Staphylococcus aureus
atggctgtagaaaaagtgtaccaaccatatgacgaacaagtttataatagtataccgaagcaacaaccacaaactaagcccgaaaagaagactgtttcgagaaaagtggttgtacaattaactaaatttgaaaaagttttatacataactttgattactgtaattgctatgttaagtatttatatgctatctttaaaaatggatgcgtatgatacgcgaggaaagattgcagatttagattataaaatagataaacaatcaagtgaaaacagtgctttacaatctgaaatcaaaaagaattcttcttatgaacgcatatacgaaaaggctaagaaacaggggatgagccttgagaacgataatgtaaaggtagtgcgtagtaatggcgaagcaaaaaattaa

SEQ ID NO: 405778 - DNA, 936 bp, Staphylococcus aureus
gtgtttcatcatatcagcgttatgttaaacgaaaccattgattatttaaatgtaaaagaaaatggtgtgtacattgactgtacgctaggtggagcgggacatgccctttatttactaaatcaattaaatgacgacggaagattaatagcaatcgatcaagaccaaactgcaattgataatgctaaagaggtattaaaggatcatttgcataaggtgacttttgttcatagcaacttccgtgaattaactcaaatattaaaagacttaaacattgaaaaagtagatggaatttattacgacttgggtgtttcaagcccacaactcgacattccagaacgaggattcagttatcaccatgacgcaacattagacatgcgtatggaccaaacacaagaactaacagcatatgaaattgttaacaattggtcatatgaagcgttagtgaagattttttatcgctatggcgaggagaaattttcaaaacagatagctcgaagaatcgaagcacatcgcgaacaacaaccaataacaacaacattagaattagttgacattataaaagaaggtattcctgcaaaagcaagaagaaaaggcggacatcctgcaaaacgagtatttcaagcactacgaattgcagtaaacgatgaattgtcagcttttgaagattcaatagaacaagcgattgaattagtgaaagtagatggcaggatttcggtaatcactttccattctttagaagatcgtttatgtaaacaggtgttccaagaatatgaaaaaggtccagaggtaccaagaggattgccagttataccagaagcatatacacctaagttaaagcgtgttaatcgtaaaccgattaccgctacagaagaagatttagatgacaataacagagcacgaagcgcgaaattacgtgtagctgaaatacttaaataa

SEQ ID NO: 405779 - DNA, 432 bp, Staphylococcus aureus
atgttcatgggagaatacgatcatcaattagatacaaaaggacgtatgattataccgtccaagtttcgttatgacttaaatgagcgttttattatcacaagaggccttgataaatgtttattcggttacactctagacgaatggcaacagattgaagagaaaatgaaaaccttacctatgacaaaaaaagacgcacgtaagtttatgcgtatgttcttctctggtgctgttgaagtagaacttgataagcaagggcgtattaacatccctcaaaacttgaggaaatacgctaatttaactaaagaatgtacagtaatcggtgtttcaaatcgtattgagatttgggatagagaaacttggaatgatttctatgaagaatctgaagaaagtttcgaagatattgctgaagatttaatagattttgatttttaa

SEQ ID NO: 405780 - DNA, 1614 bp, Staphylococcus aureus
atggactgtaaagtagttagtttaaatgaaaaagatcagtttataccaaaaataaagagcagtgaccctgtaataacaggattatttcaatatgatgcagctcaacaaactagttttgaaaaaaggatgtctaaagaaaataatggaagagaagcggcattagcgaatgttattcgtgaatatatgagtgatttaaagctttcaagtgaacaagaattaaacatacaacatttagctaatggttcaaaagttgtgattggtggacaacaagcagggcttttcgggggaccattgtatacattccataaaatattttcaatcattactttatctaaggaattaacggatacacataagcaacaagtagtaccagttttttggattgcaggagaagatcatgatttcgatgaagtgaatcatacatttgtttataacgaaaatcatgggtcgctgcataaggttaaatatcatacaatggagatgccagagacgactgtctctagatattatcctgataaggctgagttgaaacaaactttaaaaacgatgttcattcatatgaaagaaactgttcatacacaaggtctactggagatttgtgacagaattattgaccaatatgactcgtggactgatatgtttaaagcactactgcatgaaacatttaaagcatatggcgttctatttatagatgcgcagtttgagccgttaagaaaaatggaagcgcctatgtttaaaaagattttgaaaaaacatcagttgcttgatgatgcttttagagcaacacaacaacgtactcaaaatcaaggcttgaatgcgatgatacaaacagatacaaatgttcatttattcttacatgatgaaaatatgcgtcaattagtttcgtatgatggtaagcattttaaattaaataaaacagataagacatatataaaggaagaaattataaatattgcggaaaatcaacctgaattattttctaataatgtagtgacaagaccattaatggaagaatggttatttaacacggtggcatttgttggaggaccgagtgaaattaagtactgggctgaactaaaagatgtatttgaactatttgatgttgaaatgcctatcgtgatgccaaggcttagaattacttatttaaatgaccgtatagaaaaattactttcgaaatacaatattccattagaaaaagtgttagtcgatggtgttgaaggagaaagaagtaagtttattagagaacaagcatcacatcaatttattgaaaaggtagaaggtatgattgaacaacagcgtcgtctaaacaaagacttattagatgaagtggcggggaatcaaaataatattaaccttgtgaataaaaataatgaaattcatatacaacagtatgattatttgttaaaacgttatcttttaaacattgaaagagaaaacgacatcagtatgaagcaatttagagaaattcaagaaacactccatccaatgggaggattacaagaaagaatatggaatccacttcaaattttgaatgattttgggacagatgtgttcaagccctccacctatccaccactttcttacacttttgatcatattattataaaaccttaa

SEQ ID NO: 405781 - DNA, 441 bp, Staphylococcus aureus
atgagtgaaatcaaacgtcttgaaattaattacaaaactgacgaattattcgaaaactttagagcgtttggcaacaaagacttatacatggtcaatgagttaaacggtcaaatgattgatgcaagttcagattcaccattttatggcatatttgtcggagatcaattaggagctagaatggcattactaaaaaaaggtgatgtcgaagaaatctacttcccagattttgaagattatatattattatggaagttagaagtattaccaaaatatcaaaacagagggtacgcttcagaattgattgattttgcaaagagtttcaatatgccaattaaagccattggcagaaatgattctaaggatttctttttacatcatggatttacagatgtggaagctaaaaatatagagggacatgatgtcttattgtggaaaccataa

SEQ ID NO: 405782 - DNA, 687 bp, Staphylococcus aureus
ttgggatataaaaatattttgatagactttgatgatacaattgttgatttttatgatgcagaagaatgggcgtttcactatatggcgaatgtttttaatcataaagcaacaaaggatgattttttaacatttaaaaaaatcaatcaccaacattgggaagcttttcaacaaaataaattaacgaagtctgaagtattatcagaacgatttgtgaattacttcaaacatcatcaaatggaagttgatgggcatcgtgcagatgtgttatttagaaatggattagcagaagctaaagttaaatactttgatcaaacattagaaacaattgtcgaattatcgaaaagacatgatttatatattgttactaatggtgtaaccgaaacgcaaaagagaaggttaaatcagacgccgttgcataaatatattaaaaagatatttatatctgaagaaacaggatatcaaaaacctaatccggaattttttaattatgtttttaatgatattggtgaggatgaaagacagcactcgattatagttggagattctttaacatctgacattctaggtggaatcaatgcgggtatagctacttgctggtttaattttagaggatttgatcataatccaggaattatacctgattatgaaattaattcatggaaacaactaaatgatattgtacgttaa

SEQ ID NO: 405783 - DNA, 135 bp, Staphylococcus aureus
atgactggactagcagaagcaatcgcaaatactgtgcaagctgcacaacaacatgatagtgtgaaattaggcacaagtatcgtagacatcgttgctaacggtgtgggtttactaggtaaattatttggattctaa

SEQ ID NO: 405784 - DNA, 135 bp, Staphylococcus aureus
atggaaggtttatttaacgcaattaaagataccgtaactgcagcaattaataatgatggcgcaaaattaggcacaagcattgtgagcatcgttgaaaatggcgtaggtttattaggtaaattattcggattctaa

SEQ ID NO: 405785 - DNA, 189 bp, Staphylococcus aureus
atgagaaatcaaattcaaaaactattagacagtgatttgagcagtttacatatatcgaaacaaacaggagttccacaaagcacaatacacagaatgagaaaaaatgaaagatcattagacaatatgtcattgaaaaacgctgaactactttataaatttgccaatagtatatttagcaatgaaaattaa

SEQ ID NO: 405786 - DNA, 948 bp, Staphylococcus aureus
atgagacttcaaaaagcacctctagtaacgtcaggactagtcttaggattattaggcctgggtaatctattaaaagacttatctcttactttaaacgctgtttgcggaatctttgctttcttgatttggattcaccttttatgtactatgatcaaatattttaataatgtgaaagaacaattaaacagtcctctagtttcatcagtgttcacaacatttttcatgtctggctttttaggtactacttatttaaatacattttttagtaacataacttttatcaatagcttaataacgcctatttggattttatgccttgtgggaattatgacgcatatgattattttttcaataaaatatttaaaagatttttcacttaaaaatgtttatccttcgtggactgtactttttattggtattgctatcgcaggattgacggcacccgttagcggatattttttcataggtcaattaacagtaatatatggctttgtagctacttgtattgtcttacctatagttttcaagcgattaaaagcatttccattgcagacgtcaatcaaaccgaacacatcgacaatttgtgcaccattttctttagtcgctgcagcatatgttatagcttttcctaaggcgaatgcttttatcgtaattatatttttactattagctcaaatattttatttttatatcattatacaattgcctaaattactaaaagaacctttttcgcccgtattttcagctttcacattccctttagtaatctcagcaactgctttaaagaacagtttgcctgtacttatgtttccagacatttggaaaggtcttttgtttatcgaagtgttattagccactgtaatagtacttagagtctttataggatatcttcacttctttttaaaaaaggaaaaacaagataaatttcttcgtaatgcgtctcagtaa

SEQ ID NO: 405787 - DNA, 228 bp, Staphylococcus aureus
atgacacatttgacaaaggttttagatacactaactggaatatgcgtagtattattatttagtaaatattttgtggcgtatgcaaatatggtgtttgattggaatttaagatggtatttgctagaaaacataccacatttgccaattatattatttattctgatgtttattttcggagtaccttctgaaatgataaaagataggcaaaggaaaaataacggtgtttaa

SEQ ID NO: 405788 - DNA, 1557 bp, Staphylococcus aureus
gtggaaaatacaattaatgaaagtgaaaagaaaaaacgatttaaattaaaaatgccaggtgcatttatgattttattcattttaacggttgttgcagttatagcaacatgggttattcctgctggtgcatattctaaactttcttacgaaccttcatcccaagaactaaagatagttaaccctcataaccaagtgaaaaaggttccgggtacgcaacaggaactagacaaaatgggggttaaaattaagattgaacaatttaaatcaggtgcaattaataagccggtatcaattccgaatacttatgaaagattaaagcaacatccagctggaccagaacaaataacaagtagcatggttgaaggtacgatagaagcggtcgatatcatggtattcattcttgtactagggggacttattggcgtagttcaagccagtggttcttttgaatcgggattgttagctttaacgaagaaaacaaaagggcatgaatttatgctaattgtgtttgtatcaatactaatgattatcggcgggacattatgtggtattgaagaagaagctgtagcattttatccgattttagtccctatatttatagcgttaggatacgattctatcgtttcagttggtgccatattccttgccagctctgtcggtagtacattttcaactattaacccgttctcggttgtaattgcctctaatgccgctggtacaacttttacggatggcttgtattggagaataggtgcttgtattgtcggtgcgatttttgttattagttatttatattggtactgtaaaaaaattaaaaacgatcctaaagcgtcatattcttatgaagacaaagatgcttttgaacagcaatggtctgtattaaaagatgacgatagtgcccattttactttgcgtaagaagataatccttacattatttgtactaccatttccaattatggtatggggagttatgacgcaaggttggtggttcccagttatggcttcagcatttttaatatttacaattataataatgtttattgctgggacaggtaaatctggattgggagaaaaaggaactgtagatgcatttgtcaatggtgcatcaagtttagtaggtgtatctttaattattggtttagctcgaggtattaatttagtgttgaatgaaggtatgatttcagatacaatcttacacttttcatcatctttagttcaacatatgagtggaccattatttatcatcgtattactatttattttcttctgtttaggttttatcgtgccatcatcttctggcttagcggtattatcaatgcctatctttgcaccactagctgatacagtaggtataccaagattcgtcatcgttacgacatatcaatttggtcaatatgcgatgttattcttagcgccgactggacttgttatggccacactacaaatgttaaacatgcgatattcacattggttccgatttgtatggccggtagttgcttttgtattgattttcggtggcggagtactaattacgcaagtactaatttattcataa

SEQ ID NO: 405789 - DNA, 936 bp, Staphylococcus aureus
atgatggcgaaaatagtagtagcattaggtggtaatgctttaggaaaatcacctcaagaacaactcgagcttgttaaaaatactgcgaaatcattagtaggattaataacaaaaggacatgagattgttattagtcatggtaatggaccacaggttggaagcattaatttgggacttaactatgctgcagaacataaccaaggtccggcatttccatttgctgaatgtggcgcaatgagtcaagcttacatcggctatcaattacaagaaagcttacaaaatgaattgcattctattggaatggataaacaagtggtaacactagtgacacaagttgaagttgatgaaaatgatccggcatttaacaatccttcaaaaccaattgggttattttacaacaaagaagaagctgaacaaattcaaaaagaaaaaggatttatatttgttgaagatgctggaagaggatatagacgcgttgttccttcaccacaacccatctctattattgaattagagagtattaaaacacttattaaaaatgatacactcgttattgctgctggtggtggaggtataccagtaattagagagcaacatgatggttttaaaggtattgatgcagttatagacaaagataaaacaagtgcgttgttgggtgctaatattcaatgcgatcaattgattattttaacagcaattgattatgtatatattaattttaacactgaaaaccaacagcctttgaaaacaacaaatgttgatgaattaaaacgatatatagacgaaaatcaatttgcaaaaggaagtatgttaccaaaaattgaagcagccatatcatttattgaaaacaatccaaaaggaagtgtgcttataacatcattaaatgaattagatgctgccttagagggtaaagtaggtactgtgattaaaaagtaa

SEQ ID NO: 405790 - DNA, 1002 bp, Staphylococcus aureus
atgaaaaatttacgaaacagaagttttttaactttattagacttttcacgacaagaggtagaattcttattaacactctccgaggatttaaaacgtgctaaatatattggcactgaaaagcctatgttaaaaaataaaaatattgcactgttatttgaaaaagattctacaagaacgcgatgtgcatttgaagttgcagcgcatgatcaaggtgcaaatgtaacttatttaggcccaactggatcacaaatgggtaaaaaagaaacaactaaagatactgcacgtgtgcttggtggaatgtatgatggcattgaataccgtggtttttcacaaagaacagtagaaactttagctgagtattcaggcgtaccagtgtggaatggtttaactgatgaagatcatcctactcaagttcttgctgatttcttaacagcaaaagaagtcttaaaaaaagattatgcagatattaactttacatatgttggagatggtcgtaataacgttgcaaatgcattaatgcaaggtgctgccattatgggtatgaacttccatttagtttgtccaaaagaattaaatccaacagatgaattattaaatcgctgtaaaaatattgccgctgaaaatggtggcaacatattaatcacagatgatattgaccaaggtgtaaaaggttcggatgtaatttacactgatgtttgggtatcaatgggtgaacctgatgaagtatggaaagaacgacttgaattattgaaaccatatcaagtaaataaagaaataatggataaaactggtaatccaaatgttatttttgagcattgcttaccatctttccataatgctgatacgaaaataggtcaacaaatttttgaaaaatatggtattcgagaaatggaagttacagatgaagtattcgaaagtaaagcttcagttgtattccaagaagctgagaacagaatgcatacaatcaaagcagtcatggttgctacattgggtgaattttaa

SEQ ID NO: 405791 - DNA, 726 bp, Staphylococcus aureus
atgaaaaagaacatcatgaataaattagttttatcaacagcattgttacttttagaaactacatcaacacaacttcctaaaacaccaatcagtttttcatctgaagcaaaagcctataatatcagtgaaaacgagactaatatcaatgaactaatcaaatattacactcagccgcatttttcattatctggaaaatggttatggcaaaagcccaatggtagcattcatgcaacattgcaaacgtgggtttggtatagtcatattcaagtgtttggatccgagagttggggaaacattaatcagttaagaaataaatacgttgatatatttggaactaaagatgaggacacagttgaaggttactggacttatgatgaaacatttactggtggtgttacgccagcagctacttcatctgataagccttatagactatttttaaaatatagtgataaacaacaaactatcatcggtggacatgaattttacaaaggaaataaaccagtattaactttaaaagaattagatttccgtattcgtcaaacattaataaaaaataaaaagttatataacggagaatttaataaaggtcaaattaagataactgctgatggaaataattacacgattgatttaagtaaaaagttaaaattaactgacacaaaccgttatgttaaaaatcctcgtaatgcagaaattgaagtcatactcgaaaaatctaactaa

SEQ ID NO: 405792 - DNA, 726 bp, Staphylococcus aureus
atgaacaataacatcacgaaaaaaattattttatcaacaacattgttactattaggtacagcatctacacaatttcctaatacacctatcaattcttcatctgaagcgaaagcttattatataaatcaaaacgaaactaacgttaatgagttaactaaatattactcgcaaaaatatttaaccttctctaacagtacgttatggcaaaaagataacggtacgattcatgcaacgttgttacagttttcttggtatagtcatattcaagtttatggacctgaaagttggggcaatatcaaccaattaagaaataaaagcgttgatatttttggcataaaagaccaagaaaccattgattcttttgcattatctcaagaaacgtttactggtggtgttactcctgcagcaacatctaacgataaacactataaactgaatgtaacatataaagataaagcagaaacgtttactggcggatttccagtttatgaaggcaataagcctgttttaactttaaaagaattagattttcgtattcgtcaaacattaattaaaagtaaaaaattatataataattcttataataaaggacaaattaaaataacaggtgcagacaataactacacaatagatttaagtaaaaggttgccatcaactgatgcaaatagatatgttaaaaaacctcaaaatgcaaaaattgaagttatcctcgaaaaatcaaactaa

SEQ ID NO: 405793 - DNA, 717 bp, Staphylococcus aureus
atgagtaagaacatcacgaaaaatataattttaacgacaacattattactattaggtactgtattacctcaaaatcaaaaaccagtatttagtttttactctgaagctaaagcttatagcattggtcaagatgaaactaacatcaatgaattaattaaatattacacacagcctcatttttcattttcaaataaatggctatatcaatatgataatggaaacatttatgttgaacttaagagatattcatggtcagcacatatatctttatggggcgctgaaagttggggaaatattaatcagttaaaagatcgttacgtagatgtgtttggactaaaagacaaagatactgatcagttatggtggtcttatagagagacatttacaggtggcgttacaccagccgcaaaaccttctgataaaacttataatctttttgtgcaatacaaagataaactacaaacgattattggtgcgcataaaatataccaaggcaataaaccagtattaacattgaaagaaatcgatttccgtgcacgagaagcgttaataaaaaataaaatattatataacgaaaatcgtaataaaggtaagcttaagatcaccggtggcggtaataactacactattgatttaagcaaaagattacattcagatctagcaaatgtttatgttaaaaatcctaataaaataactgttgacgtcctctttgattag

SEQ ID NO: 405794 - DNA, 198 bp, Staphylococcus aureus
atgacagagttgaataatattataaactctcttcaatctttgtttgagtctgaatcaggctataaaatttcgaaaaattcaggagttccatatcaaacagtacaagatttaagaaatgggaaaaccaaactagaagatgctagatttagaacgattattaaactttatagttactatgtctcattaaaagaacactaa

SEQ ID NO: 405795 - DNA, 960 bp, Staphylococcus aureus
atgaaaacacgtatagtcagctcagtaacaacaacactattgctaggttccatattaatgaatcctgtcgctaatgccgcagattctgatattaatattaaaaccggtactacagatattggaagcaatactacagtaaaaacaggtgatttagtcacttatgataaagaaaatggcatgcacaaaaaagtattttatagttttatcgatgataaaaatcataataaaaaactgctagttattagaacgaaaggtaccattgctggtcaatatagagtttatagcgaagaaggtgctaacaaaagtggtttagcctggccttcagcctttaaggtacagttgcaactacctgataatgaagtagctcaaatatctgattactatccaagaaattcgattgatacaaaagagtatatgagtactttaacttatggattcaacggtaatgttactggtgatgatacaggaaaaattggcggccttattggtgcaaatgtttcgattggtcatacactgaaatatgttcaacctgatttcaaaacaattttagagagcccaactgataaaaaagtaggctggaaagtgatatttaacaatatggtgaatcaaaattggggaccatatgatagagattcttggaacccggtatatggcaatcaacttttcatgaaaactagaaatggctctatgaaagcagcagataacttccttgatcctaacaaagcaagttctctattatcttcagggttttcaccagacttcgctacagttattactatggatagaaaagcatccaaacaacaaacaaatatagatgtaatatacgaacgagttcgtgatgactaccaattgcactggacttcaacaaattggaaaggtaccaatactaaagataaatggatagatcgttcttcagaaagatataaaatcgattgggaaaaagaagaaatgacaaattaa

SEQ ID NO: 405796 - DNA, 234 bp, Staphylococcus aureus
atggtttttaatgattgggaaattaacgttgtatactcaggagagcatgaggttgtaacaaacgaaaagagtttatttgtcattgacgaattttacgatgttgcaatcgcaatctattatttagatggaaaattaaaagtagctcatgtcaactatggttctgattttacaattgacgtagctaataaagtttttgaattgaatattcaaaatccaaatgttgatgagcattaa

SEQ ID NO: 405797 - DNA, 186 bp, Staphylococcus aureus
atgaataaacatataaataaaaaagccgcaaaactacttgaagattataaaaaggttcaacaaagaaaatcgaaagaaactgatagaggttgtttgaaaagtgtcatcatgcttatcgtcttatttttcttaattatttttggtattgtggcatgttctacaaacgtaaactttttcttccagtaa

SEQ ID NO: 405798 - DNA, 351 bp, Staphylococcus aureus
atgaaatttaaaaaatatatattaacaggaacattagcattacttttatcatcaactgggatagcaactatagaagggaataaagcagatgcaagtagtctggacaaatatttaactgaaagtcagtttcatgataaacgcatagcagaagaattaagaactttacttaacaaatcgaatgtatatgcattagctgcaggaagcttaaatccatattataaacgtacgattatgatgaatgaatatagagctaaagcggcacttaagaaaaatgatttcgtatcaatggctgatgctaaagttgcattagaaaaaatatacaaagaaattgatgaaattataaatagataa

SEQ ID NO: 405799 - DNA, 498 bp, Staphylococcus aureus
atgaaaaataaattgatagcaaaatctttattaacattagcggcaataggtattactacaactacaattgcgtcaacagcagatgcgagcgaaggatacggtccaagagaaaagaaaccagtgagtattaatcacaatatcgtagagtacaatgatggtacttttaaatatcaatctagaccaaaatttaactcaacacctaaatatattaaattcaaacatgactataatattttagaatttaacgatggtacattcgaatatggtgcacgtccacaatttaataaaccagcagcgaaaactgatgcaactattaaaaaagaacaaaaattgattcaagctcaaaatcttgtgagagaatttgaaaaaacacatactgtcagtgcacacagaaaagcacaaaaggcagtcaacttagtttcgtttgaatacaaagtgaagaaaatggtcttacaagagcgaattgataatgtattaaaacaaggattagttaaataa

SEQ ID NO: 405800 - DNA, 507 bp, Staphylococcus aureus
atgataattaaaattttaacaattctattactactttgtatattgagcaatttggttacaaatagaaagaagccttttctgttcttaaagacactctttatgggtgtggtatttatctttataggatatatttcactggcaatatctgccgtaattatttatggtattattcaatttatcacaattgattttggtagttttttcttaatgggtattatattgatcttgatttcaagtatattccaattatttatagttagattactttttagaaaaaagaatgtcgatttgacagaggttgtcgttttagagcatttaattcaatggttcttagtttactttgcgatctatcaagcagtaaatgaaaaaatggacattaatgatattaatatcgacaatttccaatctgtcttttttgacgtgtctaatttgaatttagtaattctaccaacgttaatcattagctgggtcacaatatttaactatagaatgagaagttacaaataa

SEQ ID NO: 405801 - DNA, 402 bp, Staphylococcus aureus
atgaaaaaaaatatcacaaaaactattatcgcatctacagtaatcgctgcaggtcttttaactcaaactaatgatgctaaagctttctttagttatgaatggaaaggtttagaaatcgcaaaaaatttagcagatcaagctaaaaaggacgatgaacgtattgataagttaatgaaagagtctgataaaaatctaactccttacaaagctgaaactgttaatgatctgtaccttattgttaaaaaattaagccaaggtgatgtgaagaaagcagttgtcagaattaaagatggtggtcctagagattactatacttttgacttaactcgtcctttagaagagaacagaaaaaatattaaagttgttaaaaacggtgaaatcgactcgattacttggtattaa

SEQ ID NO: 405802 - DNA, 330 bp, Staphylococcus aureus
atgaaaaagaattttattgggaaatcaattttaagcatagctgctattagtttaacggtatcaacgtttgccggtgaatctcatgcacaaactaaaaacgttgaagctgctaaaaaatatgatcagtatcaaacaaactttaaaaaacaagtaaataaaaaagttgtggatgcacaaaaagctgtaaactttttcaaacgtacaagaactgttgcaacacaccgtaaagcacaaagagctgttaatttaattcatttccaacacagttatgaaaagaaaaaattacaaagacaaatcgatctagttttaaaatataatactttaaaataa

SEQ ID NO: 405803 - DNA, 504 bp, Staphylococcus aureus
atgtctaaatggattattgtgagtgataaccatactgaatcaggcgttttatatcaaatttatgaaatgcacccagatgcagatgtatatttacatttaggagattcagaattcgcgtatgatgatacggaacttagcttatttaatagagtaaaaggcaattgtgatttttacccagaatttgaaaatgaagcggtcgcaaaatataatgacgtgaaagcattttatactcatggacatttatatcaagtcaatcgaacaagagatttattagctgaaaaaggacttgaattaggttgtttgtttgcattttatggacatacacatgtggcaaaatatgagtatattaatggtgttcatgttattaatcctggaagtatatctcaatctagaagttcaatggaagaaacatatgctgaagttattattgatgatcaaactttacatggcaccatcaatttcaaaaatcgacatcacgaaacaatcagtcatactactttttaa

SEQ ID NO: 405804 - DNA, 588 bp, Staphylococcus aureus
atgaaagagattgttattgcatcgaataatcaagggaaaataaatgactttaaagtaatatttccagattaccacgtaataggtatttcagaactaataccagattttgatgtggaagaaacaggatcaacatttgaagaaaatgctatattaaaatcagaagctgctgcaaaagcattgaataaaacggtcatagctgatgacagtggactagaagtttttgcattaaatggtgagccaggtatatactctgcacgttatgctggtgaaaataaaagcgatgaagcaaatattgaaaaattattaaataagcttggtaatacaactgatcgtcgtgcgcaatttgtttgtgtcataagtatgagtggccctgatatggaaacaaaagtatttaaaggtactgtttcaggtgaaattgcagatggaaaatatggcgaaaatggtttcggatatgatccgatattttatgtaccgaaattagataaaaccatggctcaactttcaaaagaacaaaaagggcaaattagtcatagacgaaatgcgattaatttacttcaagcttttcttgaaggtgataaaaatgtctaa

SEQ ID NO: 405805 - DNA, 801 bp, Staphylococcus aureus
atgaataaaccaataggtgtaatagactctggtgtcggaggtttgacagtagctaaagaaattatgcgtcagttgccaaatgagacgatttattacttaggtgatattggacgatgtccatatgggccaagaccaggagaacaagtaaaacaatatacagttgaaatcgctcgtaaattaatggaatttgatataaaaatgctcgtgattgcttgtaatacagcaactgctgtagctttagaatatttacaaaagaccttatcaatcccagtgattggcgtaattgaaccaggtgctagaacagcaataatgactactagaaatcaaaatgtattagtactaggaacggaaggcacaattaaatctgaagcatatcgtacgcatattaaacgtatcaatccacatgtagaggtacatggcgttgcctgtccaggttttgtgccacttgtagaacaaatgagatatagtgatccaacaattacaagcattgtcattcatcaaacactgaaacgttggcgtaatagtgagtctgatactgtcattttaggatgtacccactatccattgctctataaacctatctatgattattttggtggtaaaaagacagtgatttcgtctggattagaaacggctcgtgaagttagtgcattgctaacatttagtaatgaacatgcaagttatactgaacatccagatcatcgattttttgcaacaggtgatcctactcacattactaacattatcaaagagtggttaaatttatctgtcaatgtggaacgtatatcagtgaatgactag

SEQ ID NO: 405806 - DNA, 816 bp, Staphylococcus aureus
atgactgaacaatcagtgaaaaacactccacaacatgaaacacaatctaaaccgaaacaaaaaacagtaaaattaattattaaacgacaagatacaagtgattctaagccttatgaagaaacatttgaaattccatatcgtgaaaatttaaacgtcattgcttgtttaatggaaattagacgtaacccagttaatattaaaggtgaaaaaacaacacctgttgtctgggatatgaactgcttagaagaagtatgtggagcatgttctatggttatcaatggtcgtgcaagacaatcttgttctgcgattgttgatcaattagaacaacctattcgtttagagccaatgaatactttcccagttatccgtgacttacaagttgatcgttctagaatgttcgataacttaaaacgtatgaaagcatggatcccaattgatggaacgtatgatttaggtccgggaccacgtatgccagagaaaaaacgtcaaacagcttatgaattatctaaatgtatgacatgtggtgtatgtttagaggtttgtcctaatgttactgaaaataataaattcgttggtgcacaagcaatctcgcaagttcgtttgtttaatttgcacccaacaggatctatgactaaagatgaacgtttaaatgcattaatgggtactggtggcttacagcagtgtggtaattcacaaaactgtgttaatgcttgccctaaaggtattccattaacaacatccattgcagcaatgaacagagaaacaacattccacatgtttaaatcattctttggttcagaccatgaagtagaataa

SEQ ID NO: 405807 - DNA, 1767 bp, Staphylococcus aureus
atggcagagaaacatcttattgttgtcggaggtggcctagcgggcttaatgtcaacaattaaagcggcagaaaaaggtgcacatgtagatttgttctcagttgtaccagtaaagcgttcgcactctgtttgtgcccaaggtggcattaatggtgcggtcaatactaaaggggaaggcgattctccttggattcactttgatgatacagtgtatggtggcgatttccttgcaaaccaaccacctgttaaagcgatgacagaggcagcacctaaaattattcatttattagaccgtatgggcgtaatgttcaatagaacaaatgaaggtctattagattttagacgtttcggtggtacattacatcacagaacagcatatgcaggggcaacaactggacaacaattattatatgcattggatgaacaagttcgtgcatatgaagtagatggattagttacgaagtatgaaggatgggaattccttggcatagttaaaggtgacgatgatagtgcaagaggtatcgttgcacaaaatatgacaactgctgagattgaaacatttggttcagatgcagttattatggcaacgggtggccctggtattattttcggtaaaacaacaaactcaatgattaatacaggatcagcggcttccattgtttaccaacaaggcgctatttatgctaatggtgagttcattcaaattcatcctactgcaatccctggtgatgataaactgcgactaatgagtgaatcagcacgtggtgaaggtggacgaatttggacatataaagatggtaagccttggtacttcttagaagagaaatatcctgattatggtaacttagtacctcgtgatatcgcaacgcgtgaaattttcgatgtatgtattaaccaaaaattaggtataaatggcgaaaacatggtatatcttgatttgtcacataaagatccacatgagttagatgtaaaactaggtggtatcattgagatttatgaaaaattcactggtgatgacccacgcaaagtaccaatgaagattttcccagctgttcactattcaatgggtggtctatatgtagattatgatcaaatgacaaatattaaagggttatttgcagctggagaatgtgacttctctcaacatggtggtaaccgcttaggtgccaattcattgttatcagcgatttatggtggtacagtagcaggtccaaacgcgattgattatatttcaaatattgatcgatcatatactgatatggacgaaagtatttttgaaaagcgtaaagctgaagagcaagaacgttttgataaattattagctatgcgcggtacagaaaatgcatataaattacaccgtgaacttggtgaaattatgacagcaaatgtaactgttgttcgtgaaaatgaaaaactgttagaaacagataaaaagattgttgaattgatgaaacgttatgaagatattgatatggaagatactcaaacttggagtaaccaagcggtattctttacccgtcaactatggaacatgttagtacttgcacgtgttattacgattggtgcatataaccgtaacgaatcacgcggtgcccattataaaccagaattcccagagcgtaatgatgaagagtggttaaaaacgacaatggcctcattccaaggcgcatttgaaaaaccgcagtttacttatgatgacgtcgatgtgagtttaataccacctcgtaaacgtgattacacaagtaagtctaaagggggtaaaaaataa

SEQ ID NO: 405808 - DNA, 615 bp, Staphylococcus aureus
ttggctcaatcaaaaaatgaattttatctaagacgtattcactcgttattaggtattatcccaataggtgcatttttggtcgttcatttattagtgaatcaccaagcaacacaaggtgctgaagcgtttaataaggcatctaactttatggaatcattaccatttctaattattgtagaatttttatttatatacattccgttgttatatcacggtttgtttggtatacacattgcatttacagcaaaagaaaatgttggacattactcgatttttagaaactggatgttcttcttccaaagagtgagtggtatcttaacatttatctttattggtatccatttatggcaaacacgtttacaaaaagcattttacggcaaagaagtgaattacgatttaatgcacgaaacattgcaacatcctggatgggcaatattttatattatttgtattattgctgttgtgttccactttgcaaatggcttatggtcattcttagttacttggggtggacttcaatctccaaaatcacaacgagtatttacatgggtttcattaatcgtatttttagttatttcgtatattggtgttactgcaattattgcctttatgtaa

SEQ ID NO: 405809 - DNA, 1782 bp, Staphylococcus aureus
ttggaagactataagcaacgaattaaaaataaattaaatgtcgtacctatggaaccaggatgctatttaatgaaagatcgtaatgatcaagtgatatatgttggcaaagctaaaaagctaagaaatcgattgcgatcatattttacgggtgctcatgatgctaaaacaacgagactggttggtgaaatacgtcgctttgagtttattgtcacgtcaagtgaaacagaatcacttttactggaattgaatctgattaaacaatatcaaccaagatataatatattattaaaggatgataaaagttatccatttattaaaattacgaaggagaaatatcctagactactagtgacgagaactgtaaaacaaggtactggcaaatatttcggaccgtatccgaatgcatattctgctcaagaaactaaaaagttattagacagaatatatccatatcgcaaatgtgataagatgccagataaattatgtctttattaccatattggacaatgtttaggaccatgtgtatatgacgttgatttgagtaaatacgcacaaatgacgaaggaaattactgattttctgaatggggaagacaaaacaattttaaaaagtttagaagagcgaatgttaactgcaagtgaatcacttgattttgaacgggctaaagaatatagagatttaattcaacatattcaaaatctgacaaacaaacaaaaaattatgtcatcagataaaacgattcgtgatgtctttggttatagtgttgataaaggatggatgtgtatccaagttttctttatacgacaaggtaatatgataaagcgagatacaacgatgattccattacagcaaacagaagaagaagaattttatacatttattggacaattttatagcttaaaccaacatattttacctaaggaagttcatgtaccacgtaatttggataaagaaatgattcaatctgttgtggacactaaaatcgttcaacccgcgcgaggtcccaaaaaagatatggttgacctagctgcacataacgctaaagtatccttaaataataaatttgaattaatatcacgtgatgagtccagaacgattaaagctattgaagaacttggaacacaaatgggaattcaaacaccaattagaattgaagcattcgataattctaatattcaaggtgtggatccagtgtcagcaatggttacatttgtcgacggtaaaccagataagaaaaattatagaaagtataaaatcaaaacggttaaaggtccagatgattacaaatcaatgagagaagtagtaagacgacgatattctcgcgttttaaacgaaggattaccattacctgatttaataatagtagatggtggtaaaggacatatgaacggggttattgatgtgctacaaaacgaattaggtcttgatatccctgttgcaggtttgcagaaaaatgataaacaccaaacatctgaattattatatggcgctagtgcagaaattgtaccactgaagaaaaatagccaggcattttatttgttgcaccgtatccaagatgaggttcacagattcgcaatcacatttcatagacaaacacgtcaaaagacaggcttgaaatcaatacttgatgatatagatggtatcggtaacaaacgtaaaacattattattgcgttcattcggttcaatcaagaaaatgaaggaagctacacttgaagattttaaaaatataggtattcctgaaaacgtcgcaaagaacctacatgaacaattgcataaataa

SEQ ID NO: 405810 - DNA, 315 bp, Staphylococcus aureus
atggcaatcgtaaaagtaacagatgcagattttgattcaaaagtagaatctggtgtacaactagtagatttttgggcaacatggtgtggtccatgtaaaatgatcgctccggtattagaagaattagcagctgactatgaaggtaaagctgacattttaaaattagatgttgatgaaaatccatcaactgcagctaaatatgaagtgatgagtattccaacattaatcgtctttaaagacggtcaaccagttgataaagttgttggtttccaaccaaaagaaaacttagctgaagttttagataaacatttataa

SEQ ID NO: 405811 - DNA, 2349 bp, Staphylococcus aureus
atgagacaaaaaacattagacgtcttagaatttgaaaaaataaaatcactcgttgccaatgaaactattagtgacttaggcttggaaaaggtcaatcaaatgatgccagctactaattttgaaacggttgtttttcaaatggaagaaacggatgagattgctcaaatctataataagcatcgtttaccaagcttgagtggcttatctaaagtatcagcattcattcatcgcgctgatattggcggcgttttaaatgtatcagagcttaacttgataaaaagattaattcaagtacaaaatcaattcaagacattttataatcaattggttgaagaagatgaaggtgttaaatacccaatattagatgacaagatgaatcaattacctgtgttaactgatctttttcaacaaataaatgaaacatgcgatacgtatgatttatatgataatgcgagttatgaattgcaagggattagaagtaaaatttctagcacgaatcaacgtattagacaaaatttggaccgtattgttaaaagccaagcaaatcagaaaaaattatcagatgctattgtaacagttaggaatgaaagaaacgttatacctgtcaaagctgaatatcgacaagattttaatgggattgtacatgatcaatctgcttcaggacaaacattgtatattgagccatcatcagttgttgaaatgaataatcaaattagtcgattacgtcatgacgaagcaattgaaaaagaacgcattttaacgcaactaactggttatgtggctgcggacaaagatgcactacttgtggcagaacaagtcatgggtcagttagattttttaatcgcaaaagcgagatatagtagaagtattaaaggaacaaagccgatatttaaagaggaccgtactgtatatttacctaaagcataccatccattattaaatcgtgagactgttgtagctaataccatcgaatttatggaagatattgaaacggtaattattacaggaccgaatacaggtggtaaaactgtaacattaaaaacattaggtttaattattgttatggctcaatcaggattgttgattcccacacttgatggtagtcagttaagtgtatttaaaaatgtatattgcgatatcggagatgaacaatcaatagaacaatcattatcaactttttcatctcatatgacgaatatagttgaaattttaaagcatgcagacaaacatagtttagttttatttgatgaattaggtgcaggtacagatccgagtgaaggtgctgcattagcaatgagcattttagatcatgttagaaaaattggttctctagtaatggcaacgacgcactatcctgaacttaaagcatatagttataatcgagaaggcgttatgaatgcgagtgtagaatttgatgtagatactttgagtccaacgtataagttattaatgggtgtgccgggtcgttcaaatgcttttgacatttctaaaaagttaggtcttagtttgaatattattaataaggctaagacgatgattggtactgatgaaaaagaaataaatgaaatgattgaatcattagagcgtaattacaaacgtgtagagacacagaggttagaactggaccgtcttgtaaaagaagcggagcaagtgcatgatgatttatctaagcagtatcaacaattccaaaattatgaaaagtctctaatagaggaagcgaaagaaaaagcaaatcagaagattaaggctgcaacaaaagaagctgacgatattattaaagacttaagacaattgcgtgaacaaaaaggtgcagatgttaaagaacatgaattgattgataagaagaaacgattagatgatcattatgaagcgaaatctataaagcaaaatgtacaaaagcaaaaatacgataaaattgttgctggtgatgaagtaaaagtattatcttacggtcaaaagggtgaagttttagaaattgtcaatgatgaagaagcaattgttcaaatgggaattattaaaatgaagttacctattgaagatttagagaaaaaacaaaaagaaaaagttaagccaacgaaaatggttacacgtcaaaatcgtcaaacaattaaaactgaacttgacttacgaggctatcgttatgaggatgctttaattgaactagatcaatatttagatcaagccgttttaagtaattacgaacaagtttatatcattcatggtaaaggtacaggtgcacttcaaaaaggtgtacaacaacatttgaaaaagcataaaagtgttagtgactttagaggtggtatgccaagcgaaggtggatttggcgttaccgttgcaacactaaaataa

SEQ ID NO: 405812 - DNA, 1713 bp, Staphylococcus aureus
atgacaaaaaaagatgttatcaaactattagaacaaattgctacttatatggaattaaaaggggaaaatacttttaaaatatcagcgtatcgaaaagcagctcaaagtcttgaattagatgaacgaccattagatgaaatatctgatgtaacggagttaaaaggcattggtaaaggtgttgcagaagtaatcaatgattaccgtgagaccggtgaatctcagtatttacagcaattacaggaagaagttccggaaggtcttattccacttttgaaaattcaaggacttggaagcaagaaaattgctaagctatataaagagttgaatattgttgataaagcgtcacttcaagttgcttgtgaaaatggaaaagttagtgaattaagcggatttgctaagaaaacggaacaaaacatattagaagctgtgaaacaacttggtgctaagaaagatagatatccaattgatcaaatgagaagacttaatcaagaaatcattgattatatagatacattaaattatatcgatcaatattcatctgcaggaagcttccgtcgttttaaagaaatgagcaaagatttagatttcataataagtaccgataacccaaaagcagtgcagcagcaattattaaatattcccaataaagtaaaagaagttgcagtggggaacacaaaagtttcattagaattagcgtatgatgatgaaacgattggtgtcgattttcgattaattgaaccaagtgctttttatcatacattgcagcattttactgggtcaaaagaacataatataagaattcgacaacttgctaaagcacgtgatgaaaaagtaagtgaatatggaattgaacaagctgatggtacattaattcaatatgatagtgaagccaagatatatgaacattttaatgtgaattttataccacctgctatgcgagaagatggtagcgaatttgataaagatctaagtaatatcattacaatagatgatattaatggtgatattcatatgcatacaacgtatagtgatggtgcgttttctattcgagacatggtagaagcaaatatcgcaaaaggttataaattcatggtaattactgatcattcacaaagtttacgtgttgctaatggcttacaagtagaaagacttttaagacaaaacgaagaaattaaggctttagataaagaatatagtgaaattgatatttattcaggtacagaaatggatatattacctgatggctcgctggattatgatgatgaaattttagcacaacttgattatgtaattggagctattcatcaaagctttaaccaatcagaagaacaaattatggaacgattagctaatgcatgtcgcaatccatacgtgcgacatatagcgcatccaacagggcgtattataggtagaagagatggttataaaccgaatattgaacaattaatggcattagctgaagaaacgaatacagtattagaaattaatgccaatccacatcgactggatctgagcgctgatatcgttcgtaaatatccaaatgtgaaattaactattaacactgatgcgcatcatacaaatcatttagattttatgaattatggcgtagcaactgcgcaaaaaggatttgtaacaaaagatagagtgattaacgcattatcgcgtgaagcttttaaagactttattgaaaataatacaaaacttaagaaatag

SEQ ID NO: 405813 - DNA, 522 bp, Staphylococcus aureus
atggtcattgattttatcataatcattttctttgtgtattttgtcatcgttggattcagacgaggtttttggttatctatgatacatttgagtgcaacgattgtatcattgtggattgccagtcaattttacaaatctattgtagaaagattaattgtatttattccatatcctaaaacaacagcatttaatacaacttttgcgtttcattttaatcatctacaaaatcgatttgaagcgattgtagcttttttaatgattacattgttttgtaagttcattttatatctaattatcgtaacttttgataaaataatagcgtatcaaaacattcatattttcagtcgtgcaatgggaatgatagttggtgtgtttatgacgataattgtcttacactttacgttatatctattggcattatatcctaacgaagcattacaacatcagcttaaaatatctattgtgagtcattcattgatttttcacatcccatatttatcggctttcaccattaatttataa

SEQ ID NO: 405814 - DNA, 267 bp, Staphylococcus aureus
atgacacagtttaaaaacaaggtaaatgtatcaattaatgatcagctttttacaattgttggggaagataacccagagcacatacgatatgtagcacatttagttgatgataaaataaaagaattagggtataaagcagcaggtttagatacttcaagaaaagcaatactaactgctgtgaatattatgcatgaaaaagtactactagaagaagaaaatcgacgtttgaaacaacaaattcacaaattgcagcagcgtgagcaataa

SEQ ID NO: 405815 - DNA, 939 bp, Staphylococcus aureus
atggcgaatatcgtttttaaattgtcggataaagacataacgacattaatgtcacgcatttcttttgatactgagaatttacctcaaggtatgaaagcacgtgcaaagtatcaaaatacaactgtaaatatttaccaatcaggtaaagtcatgtttcaaggtaatcatgcagaagctgtgtctgaagaacttctaccgcagcattctcaattgaatactaataaaactaaaaagaaaaatatggctaattcttttcttgaacaaactttaatgtatgatcaatttaactgtattggtagtgatgaggctggaagtggcgattactttggtccgttgactgtgtgtgctgctttcgttaccaaagagcatgtccctattttaaaaactttgggtgtagatgattcaaaaaaattaaccgataccaaaattgtagaacttgctgagcaattggttactttcataccacattcattattaacactacacaatgaaaaatataatattcagcaagcaaaaggctggactcaagtaaaaatgaaagctgcccttcataatgaagccatcaaaaatgtacttgaaaaaattgattcgtctcaattagactatatcgtcattgatcagttcgcaaaacgcgaagtgtatagccattacgcattatcagatataccacttccaaagaaaacaaaatttgaaacaaaaggagaatcgaagtcattagccattgcagtggcaagcataatttctcgatacgcatttgttacatatatggatcaaatatcaaaaaatattaatatgacgattcctaaaggtgccggtgctaaagtcgatgtaatcgccgccaaaattataaaaaaatacggtctttcacgtttagataccatttcaaaaaagcattttaaaaatcgtgaaaaagcccaaaaaattttaaagcctctttga

SEQ ID NO: 405816 - DNA, 2403 bp, Staphylococcus aureus
atgttgatatcaaatgaatggttgaaagaatatgtaacaatcgatgattctgtaagtaatttggcagaacgtattacgcgcacaggtattgaagtggatgatttaattgactacacaaaagatatcaaaaatttagttgtcggcttcgttaagtcaaaagagaaacatcctgatgctgataaattaaatgtttgccaagttgatatcggagaagacgaacctgtacaaatcgtttgtggtgcaccgaacgttgatgcaggacaatatgtcattgttgctaaagtaggtggcagattgcctggtggtattaaaattaagcgtgccaaattacgcggtgaacgttcagaaggtatgatttgttcgttacaagaaattggtatttcaagtaactatataccgaaaagttttgaatcaggcatttatgtatttagtgaagcccaagttccaggaacagatgccttacaagctttatatttagatgatcaagtaatggaatttgatttaacgccgaatcgtgcagatgctttaagtatgataggtactgcttatgaagttgcagcattatataatacaaaaatgactaagccagagacaacatcaaatgagcttgatttatctgcaaatgatgaactgactgtgacaattgaaaatgaagataaagtaccatattatagtgcacgtgttgttcacgacgtgacaattgaaccctcgccaatttggatgcaagcacgcttaataaaagcgggtatacgtcctattaataatgttgttgacatttcaaattatgtgttattagaatacggtcaaccattgcacatgtttgatcaagatgcgattggttcacaacaaattgttgttcgtcaagctaatgaaggcgaaaaaatgacaacattagatgatacagaacgtgaattattaacgagcgatattgtcattactaatggacaaactccaattgcattagctggtgttatgggtggcgatttttcagaagttaaagaacaaacatcaaatatagtgattgaaggtgctatttttgatccagtttcaattcgtcatacatcaagacgtttaaatttacgcagtgaatcatctagtcgttttgaaaaaggaatagctactgaatttgtagatgaagcagtcgaccgtgcatgttatttattacaaacttatgcaaacggaaaagtgctaaaagatagagtgtcttcaggagaacttggtgcatttattacaccaatcgacatcactgctgataaaattaatcgcactattggatttgatttgtcacaaaatgatattgttactatttttaatcaactagggtttgatacagaaataaatgatgatgttattacagtgctagtaccatcacgtcgtaaagatattacaattaaagaagatttaattgaagaagttgcacgtatatatggatacgacgatattccatcaacgttacctgtcttcgataaagttactagtggtcagctaactgatcgccaatataaaactagaatggttaaagaagtgttagaaggtgctggattagaccaagctattacgtattcgttagtttctaaagaagatgctactgcattttcgatgcaacagcgtcaaacaattgatttattgatgccaatgagtgaagcgcatgcgtcattacgtcaaagtttattaccacatttaatcgaagcggcatcatataatgtggcacgcaaaaataaagatgtaaaattatttgaaatcggcaatgtcttctttgctaatggagaaggtgaactaccagatcaagttgaatatttaagtggtattttaactggagattatgtagtcaatcaatggcaagataagaaagaaacggttgatttctatttagcaaaaggtgtcgtggatcgagtatctgaaaagttaaatcttgaatttagttatcgccgtgctgatattgatggattacatccaggtcgtactgctgaaatcttattagagaataaagttgttggttttattggtgaattacatccaatattagcagctgataatgatttaaaacgtacgtatgtttttgagttgaattttgatgcattaatggctgtgtcggtaggttacattaattaccagccaattccgagattcccaggcatgtctcgtgacattgcattagaagtagatcaaaatattccagcagctgatttattatcaacgattcatgcacatggtggcaatatattaaaagatacacttgtctttgatgtatatcagggcgaacatttagaaaaaggtaaaaaatcaattgcaatacgtttaaattatttagacacagaagaaacattgacagatgagcgcgtttcaaaagtacaagcggaaattgaagcagcattaattgaacaaggtgctgttattagataa

SEQ ID NO: 405817 - DNA, 1059 bp, Staphylococcus aureus
atgtctgaacaacaaacaatgtcagagttaaaacaacaagcgcttgtagatattaatgaagcaaatgatgaacgtgcactgcaagaagttaaagtgaaatacttaggtaaaaaagggtcagttagcggactaatgaaattgatgaaggatttgccgaatgaagataaacctgcgtttggtcaaaaagtgaatgaattgcgtcaaacaattcaaaatgaattagatgaaagacaacagatgttagttaaagaaaaattaaataagcaattggctgaagaaacaattgatgtatcattaccaggtcgtcatattgaaatcggttcaaagcatccattaacacgtacaatagaagaaattgaagacttattcttaggtttaggttatgaaattgtgaatggatatgaagttgaacaagatcattataacttcgaaatgctgaatttacctaaatcacaccctgcacgtgatatgcaagatagtttctatattacggatgaaattttattacgtacgcatacatcaccagtgcaggcacgtacgatggaatcacgtcatggtcaaggtccagttaaaattatttgccctggtaaagtgtatcgtcgtgactctgatgatgcgacacatagtcatcaatttacacaaatcgaaggattagttgttgataaaaacgttaaaatgagtgatttgaaaggtactttagaattgttagctaagaaattatttggtgctgatcgtgaaattcgtttacgtccaagttacttcccattcactgaaccttctgtagaagttgatgtgtcatgttttaaatgtaaaggaaaaggttgtaatgtgtgtaaacacacaggatggattgaaattttaggtgctggaatggtacatcctaatgtattagaaatggctggttttgattcttcagagtactctggatttgcatttggtatgggaccagaccgtattgcaatgttgaaatatggtatagaagatattcgtcatttctatactaatgatgtgagatttttagatcaatttaaagcggtagaagatagaggtgacatgtaa

SEQ ID NO: 405818 - DNA, 741 bp, Staphylococcus aureus
atggaacaaattacttctgcacaaaataatagaattaaacaagcgaacaagctaaaaaagaaacgtgagagggataaaactggattagctttaattgaaggtgtgcatttaattgaagaagcttatcaaagtggaattgtaattacacaattatttgcaattgaaccggcaagattagatcagcaaattatcgcatacgcgcaagaagtttttgaaataaacatgaaagttgctgaatctttatcaggtacagtgacaccacaagggtttttcgcaatcattgagaagccgcattatgatatttctaaagcacaacaagtattgctcatcgatcgtgttcaagatcctggaaatttaggcacattaattagaactgcggatgctgctggaatggatgctgtaataatggagaagggtacgacagatccttatcaagataaagtgttgcgagcgagtcaaggtagtgttttccatttgccagttatgacacaagatctcgatacgtttattactcaatttaatggtcctgtttatggtacagcacttgaaaacgcagtggcatacaaagaagttacttcaagtgattcttttgcattactattaggtaatgagggagaaggtgttaatcctgaattattagcacatactacacaaaatttaatcatacctatttatggtaaagctgaaagtttaaatgtagcgattgcaggtagtattttactttatcatttgaaaggttga

SEQ ID NO: 405819 - DNA, 324 bp, Staphylococcus aureus
atgaaatttatggcagaaaataggctgacgttaacaaaaggaacagcaaaagatattatagaacgattttacacgagacatgggattgaaacattagaaggctttgatggcatgtttgttacacaaactttagaacaagaagattttgatgaagtgaaaattttaacagtttggaaatcaaagcaagcttttacggattggttaaaatctgatgtctttaaagcagcgcataaacatgttagaagtaaaaatgaagatgaaagtagcccgattataaataacaaagtaattacatatgatataggctatagttacatgaaataa

SEQ ID NO: 405820 - DNA, 735 bp, Staphylococcus aureus
atgagaatgaagcgatttttaactattgtacaaattttattggttgtaattattatcatttttggttacaaaattgttcaaacatatattgaagacaagcaagaacgcgcaaattatgagaaattacaacaaaaatttcaaatgctgatgagcaaacatcaagaacatgtgagaccacaatttgaatcacttgaaaaaataaataaagacattgttggatggataaaattatcaggaacatcattaaattatccagtactacaaggtaagacaaatcacgattatttaaatttagattttgagcgagaacatcgacgtaaaggtagtatttttatggattttagaaatgaattgaagaatttaagtcataatactattttatacgggcaccatgtcggtgataatacgatgtttgatgtgttagaagattatttaaagcaatcgttttatgaaaaacacaagataattgaatttgacaataaatatggtaaatatcaattgcaagtatttagtgcatataaaactactactaaagataattacatacgtacagattttgaaaatgatcaagattatcaacaatttttagatgagacaaaacgtaaatctgtaattaattcagatgttaatgtaacggtaaaagatagaataatgactttatcaacgtgcgaagatgcatatagtgaaacgacgaaaagaattgttgttgtcgcaaaaataattaaggtaagttaa

SEQ ID NO: 405821 - DNA, 969 bp, Staphylococcus aureus
atgatgataaaaaataaaaagaaactactatttttatgtttgttagtcattttaatcgcaactgcttatatttcgtttgtaaccggtacaattaaattgtcatttaatgacctatttacaaaatttacaactggtagcaatgaagcagtggattcaatcattgatttgcgattgccacgtatattaattgcattgatggttggcgcaatgttagcagtttctggagcattattacaagcagcactacaaaatcctttggcagaggcgaatatcattggcgtttcctcaggtgcacttataatgagagcactttgtatgttgtttattccacaattgtacttttacttaccattattaagttttattggaggtttaataccatttttaataattatattgttgcattctaaatttagattcaatgctgtaagtatgatattagtaggtgttgcgttattcgtattattaaatggtgttttagaaattttaactcaaaaccctttaatgaaaattcctcaaggcttaacaatgaaaatatggagcgacgtatacatattagcagtatcagcattattgggattaatattaacattactattgtcccctaaattgaatttactaaatttagacgacatacaagcgcgaagtatcggttttaatattgatcgttacagatggttaacaggtttattagcagtatttttagcaagtgcaactgttgcgattgttggacaactagcctttttaggtattattgtgccacatgtggttagaaagctagttgggggcaattacagagtacttattccgttttctacagttattggtgcatggctattgttagtggctgatttattaggacgagtgatacagcctcctttagaaattccagccaatgctattttaatgattgtcggtggtccaatgctaatttacttaatttgtcaaagtcaacgaaatcgaatctaa

SEQ ID NO: 405822 - DNA, 879 bp, Staphylococcus aureus
ttgagaatcataaagtatttaaccattttagtgataagcgtcgttatcttaaccagctgtcaatcttccagttctcaagaatcaactaaatccggcgaattcagaatcgtaccaacaactgttgcattgacaatgacattggacaaattggatttaccaattgtcggcaaacccacgtcatataagacattgcctaatcgttataaagatgtaccggaaattggtcaaccaatggagccgaatgttgaagctgttaaaaagttaaaaccaacacatgttttgagtgtgtcaacgattaaagatgaaatgcaaccattttacaaacaattaaatatgaaaggctacttttatgattttgatagtttaaaagggatgcaaaagtcgattacacaattaggtgatcaatttaatcgtaaagcacaagcaaaagaattaaatgaccatttaaattctgtaaagcaaaaaattgaaaataaagcagctaaacaaaagaaacatcccaaagtattaatattaatgggtgtaccgggtagctatttagtagcaactgataaatcatatattggtgatttagttaaaatagcaggtggagaaaatgttattaaagtgaaagatcgtcaatatatttcgtctaatactgaaaatttgttgaatatcaatccagatattattttacgattaccacacggaatgcctgaagaagttaagaaaatgtttcaaaaagaatttaaacaaaatgatatttggaaacattttaaagctgtgaaaaataatcatgtttatgacttagaggaagtgccattcggtattacagcaaatgttgatgctgataaggcaatgactcaattatatgatttattttataaggataaaaaatag

SEQ ID NO: 405823 - DNA, 1077 bp, Staphylococcus aureus
atgagaaatgttaaacaaattgctacaaaatctattatagctattattagcttaggtatacttacatatacaacaatgattggtagcgtgttggctgatgagataaaatatccatcagccaaatttaatcaacctgaagcaaaagataaaacagaattaactacatcaatttttgatgaaaagataaaagagaataaagcgttagagttactaatttttaatcaagaaaataaaaatgtaactgaggaacaacaactagttgacgaaaaggcgcaattgatttcagatatgactggtaaaatttacttgcaagtaaagctaaaaggtcaaatagataaagaacaacttgtttttcaaaatgacaaaaatgaagaatttccttttgttataaaagatgaaaaggatgacacaatagtaagaattttaattgaacagcatatggataaaatcaatatgcatgttaaaacgttggctgaaaagaaaaatctagataacaaagaaatggtgtattctattcattttaaagagaaaaaagtacaacatgatgatgcaaaagaagtgccttcaaaacatcaaaatcaagaaaataatcaagatcagcttaaaaaagatattgatgacaaaaaagatagtcaaaaatcagatactaaggaaagacgtactagcctttttactgaaaaaggattaaatgatattcctgtacaaaaagataaagtgcaacaagacagtaataaaaagattgaaaatgagcgacctaaagcatcaggtacattaaaagttgaaaatagccctccaacaataaaaaaggttgaaaataatcacaaagagcaaccgaaacataaagatgaaaaatcaaaaaaggaaaagaaaaaagtagttgaaaaagaaaaagcgttaccagcttttaatagagatgatgatagcaagaatagtagtcaattatctagtgatattaaagaacttgatgaaccaaatcataaaaagcaatatatgttatttgcagctggcattgtgttagcaactattttacttatttcggcacatttatacagcagaaagagaggtaaccaagtttga

SEQ ID NO: 405824 - DNA, 684 bp, Staphylococcus aureus
ttgaaaaatattttaaaagtttttaatacaacgattttagcgttaattatcatcatcgcgacattcagtaattctgcaaatgccgcagatagcggtactttgaattatgaggtttacaaatacaataccaatgacacgtcaattgctaatgactattttaataaaccggcaaagtacattaagaaaaatggtaaattgtatgttcaaataactgtcaaccacagtcattggattactggaatgagtatcgaaggacataaagaaaatattattagtaaaaacactgccaaagatgaacgcacttctgaatttgaagtaagtaagttgaacggtaaaatagatggaaaaattgacgtttatatcgatgaaaaagtaaatggaaagccattcaaatatgaccatcattacaacattacatataaatttaatggaccaactgatgtagcaggtgctaatgcaccaggtaaagatgataaaaattctgcttcaggtagtgacaaaggatctgatggaacgactactggtcaaagtgaatctaatagttcgaataaagacaaagtagaaaatccacaaacaaatgctggtacacctgcatatatatatgcaataccagttgcatccttagcattattaatcgcaatcacattgtttgttagaaaaaaatctaaaggcaatgtggaataa

SEQ ID NO: 405825 - DNA, 1053 bp, Staphylococcus aureus
atgacaaaacattatttaaacagtaagtatcaatcagaacaacgttcatcagctatgaaaaagattacaatgggtacagcatctatcattttaggttcccttgtatacataggcgcagacagccaacaagtcaatgcggcaacagaagctacgaacgcaactaataatcaaagcacacaagtttctcaagcaacatcacaaccaattaatttccaagtgcaaaaagatggctcttcagagaagtcacacatggatgactatatgcaacaccctggtaaagtaattaaacaaaataataaatattatttccaaaccgtgttaaacaatgcatcattctggaaagaatacaaattttacaatgcaaacaatcaagaattagcaacaactgttgttaacgataataaaaaagcggatactagaacaatcaatgttgcagttgaacctggatataagagcttaactactaaagtacatattgtcgtgccacaaattaattacaatcatagatatactacgcatttggaatttgaaaaagcaattcctacattagctgacgcagcaaaaccaaacaatgttaaaccggttcaaccaaaaccagctcaacctaaaacacctactgagcaaactaaaccagttcaacctaaagttgaaaaagttaaacctactgtaactacaacaagcaaagttgaagacaatcactctactaaagttgtaagtactgacacaacaaaagatcaaactaaaacacaaactgctcatacagttaaaacagcacaaactgctcaagaacaaaataaagttcaaacacctgttaaagatgttgcaacagcgaaatctgaaagcaacaatcaagctgtaagtgataataaatcacaacaaactaacaaagttacaaaacataacgaaacgcctaaacaagcatctaaagctaaagaattaccaaaaactggtttaacttcagttgataactttattagcacagttgccttcgcaacacttgcccttttaggttcattatctttattacttttcaaaagaaaagaatctaaataa

SEQ ID NO: 405826 - DNA, 1938 bp, Staphylococcus aureus
atgaacaaacagcaaaaagaatttaaatcattttattcaattagaaagtcatcactaggcgttgcatctgtagcaattagtacacttttattattaatgtcaaatggcgaagcacaagcagcagctgaagaaacaggtggtacaaatacagaagcacaaccaaaaactgaagcagttgcaagtccaacaacaacatctgaaaaagctccagaaactaaaccagtagctaatgctgtctcagtatctaataaagaagttgaggcccctacttctgaaacaaaagaagctaaagaagttaaagaagttaaagcccctaaggaaacaaaagaagttaaaccagcagcaaaagccactaacaatacatatcctattttgaatcaggaacttagagaagcgattaaaaaccctgcaataaaagacaaagatcatagcgcaccaaactctcgtccaattgattttgaaatgaaaaagaaagatggaactcaacagttttatcattatgcaagttctgttaaacctgctagagttattttcactgattcaaaaccagaaattgaattaggattacaatcaggtcaattttggagaaaatttgaagtttatgaaggtgacaaaaagttgccaattaaattagtatcatacgatactgttaaagattatgcttacattcgcttctctgtatcaaacggaacaaaagctgttaaaattgttagttcaacacacttcaataacaaagaagaaaaatacgattacacattaatggaattcgcacaaccaatttataacagtgcagataaattcaaaactgaagaagattataaagctgaaaaattattagcgccatataaaaaagcgaaaacactagaaagacaagtttatgaattaaataaaattcaagataaacttcctgaaaaattaaaggctgagtacaagaagaaattagaggatacaaagaaagctttagatgagcaagtgaaatcagctattactgaattccaaaatgtacaaccaacaaatgaaaaaatgactgatttacaagatacaaaatatgttgtttatgaaagtgttgagaataacgaatctatgatggatacttttgttaaacaccctattaaaacaggtatgcttaacggcaaaaaatatatggtcatggaaactactaatgacgattactggaaagatttcatggttgaaggtcaacgtgttagaactataagcaaagatgctaaaaataatactagaacaattattttcccatatgttgaaggtaaaactctatatgatgctatcgttaaagttcacgtaaaaacgattgattatgatggacaataccatgtcagaatcgttgataaagaagcatttacaaaagccaataccgataaatctaacaaaaaagaacaacaagataactcagctaagaaggaagctactccagctacgcctagcaaaccaacaccatcacctgttgaaaaagaatcacaaaaacaagacagccaaaaagatgacaataaacaattaccaagtgttgaaaaagaaaatgacgcatctagtgagtcaggtaaagacaaaacgcctgctacaaaaccaactaaaggtgaagtagaatcaagtagtacaactccaactaaggtagtatctacgactcaaaatgttgcaaaaccaacaactgcttcatcaaaaacaacaaaagatgttgttcaaacttcagcaggttctagcgaagcaaaagatagtgctccattacaaaaagcaaacattaaaaacacaaatgatggacacactcaaagccaaaacaataaaaatacacaagaaaataaagcaaaatcattaccacaaactggtgaagaatcaaataaagatatgacattaccattaatggcattattagctttaagtagcatcgttgcattcgtattacctagaaaacgtaaaaactaa

SEQ ID NO: 405827 - DNA, 453 bp, Staphylococcus aureus
atgtttataactggaatagtgatatcgttagttgtaatcttgatagcttcatatttttcctttgttttaacaacattaattataagcgaagattttagtgaccgagttactttaaaagtagcatttatcttaccaataatattaatatccctatccattcgtgcatgtttagaaaacctaaggagtaataaacaacttgctaaaacagcatttaaaatggctactacacaatatccttcagtggtaacaatgttcataggtatggttaaagaccatcaagcacaagtccactgttttggtgaatctacctatacctataaccaaaataaagaaaacctaatattaaaaaaagacataaataagtcatggttaaattcattaaagaatttgaagtcacttattaaatcagaaggatttaaaaagaattttttaaataacttagctgaagcttaa

SEQ ID NO: 405828 - DNA, 588 bp, Staphylococcus aureus
atggaaactaaagatttatcattaaaaatagatgcaacaaaaatagaagttgcaggaattaaaaataaattcacagctcaatgtaaacttgcatattcatttatagctacgatagcaactatatttgcaactatatattcagacgggaaacagttagttattttttctatgttacttttcgtctttccaagtttcattgaatcattcggaattgccaatgaaaataaggttataactgcaatagttaaaatctataaatatattttttttattgtttctttatttctattcattatttttgtttggtatttttacgataagcaagatgcgtataattatacaaaagttataggcgatatattattaatagtcagtatttttattaatttagtgtattctttgatttcttatttgaacttacgctacaatataaatgaacatattgctttagctgcagtagagcaaagtacgttagaaaaacaaaaagaaagattgcactttcaagataatattaaaaaagcacataaaaaagtatatcgtgaatttgttagtaaacaaaataaagataaaaaggggaaggataaatga

SEQ ID NO: 405829 - DNA, 1347 bp, Staphylococcus aureus
atgcattttattgcaattagtataaatcatcgcacagctgatgttgcactaagagagcaagttgcttttagagatgatgccttacgaattgcccatgaagatttatatgaaactaaatctattttagaaaatgtcatattatcaacatgtaatcgaactgaagtatatgctgttgttgatcaaattcacacaggtcgttactatattcaacgatttctagctcgtgcatttggatttgaagtagatgatattaaagcaatgtcagaagtaaaagtgggggacgaagcagtagaacatttattgcgtgtcacttctggtttagattcaatcgtacttggagaaactcaaattttaggtcaaataagagatgcatttttcttagcgcaaagcacaggtacgacaggaacaatttttaatcatctatttaaacaggcaattacttttgcaaaaagagcacataatgaaacagatatagctgataatgctgtaagtgtgtcttatgctgcggtcgagttggcgaaaaaagtatttggcaaattgaaaagtaagcaagctatcattattggtgcaggggaaatgagtgaattatcactattaaatcttcttggttctggaattactgatattacagtagtaaatagaacaattgaaaatgctatgaaattagcagcaaagcatcaagtgaaatatgatgaactatcatcattaccaaatttacttgaaagtgcagatattgtgattagttcaacgagtgcacaatcttatatcattacaaatgaaatgatagaaagaattgcagaaaatagaaagcaagattcactagtattgattgatattgcagttcctcgagatattgaacctggtattagtgccatcacaaacatctttaattatgatgttgatgacttaaaaggtttagttgatgcaaacttacgtgagcgacaattagcggctgcaacaatttcggaacaaattcctgcagaaatacatgcacacaatgagtggattagtatgttgggtgttgttccagtgattagagctttacgtgaaaaagctatggcaattcaagcagaaacgatggacagtattgatcgtaaattgccagggttaagcgaaagagaacgtaaaattatatctaaacatacaaaaagtatcatcaatcaaatgttgaaagatcctattaaacaggccaaagaattaagtagtgataagaaaagtaatgaaaaattagagctatttcaaaatatatttgatatcgaagctgaatgtcctcatgagcaagcgaagcaacaaaaagaaagcaaggtcaaggaaatttcagcgcgacgtatctttagttttgaataa

SEQ ID NO: 405830 - DNA, 816 bp, Staphylococcus aureus
atgcaagaaaacctgtttattcgattcaatgaaattatattattaatatacttaatcagtatcatttgctatttttatgattttgtacaaaaaagtcataagattagaagtttaggcatatatttattggggattgtttgggttttacaaacaatctctttatctatttttattatacaaactagacatattccattagggtctatttcagatgtattctatactttaagttggctgattatttcaatctctttaattcttaaccttatcaaagttttgaatttctctgtgtttttcttgaatttaatagggttaacacttttagggatgaatacatttcaaccgacacattatactaataaggttcagaaaattgctgttgtagacgagttactgttagtccatatcggtctagctgtgttaagttatgtcttctttgccttagcttttgtcaatgcattactgtatatcatgcaataccgtaatttgaaggaaaaacgttttgatcaaaaatactttagaattggtagcgttgctacacttgaatcaattgtgttttactcaacgttaagtgggtggataattctcatatttagtattattttaggtacacagtggggtgtaatttcagttggtgaacgtatattcattgacccgaaggtaatactctcttcaattattacagtattatatggaagttatattttacttagaatcaacaaatggttgaattcaagatatttaatatactataacattattttattttgcttaaatatgattaatttattttttgcaacacattttgtgaattga

SEQ ID NO: 405831 - DNA, 927 bp, Staphylococcus aureus
atgcgtaaattagtcgttggctccagaagaagtaaattagctttaacacaaagccagcaatttattgataaattaaaagctgtcgagccaaatctagaaattgaaattaaagaaattgtcacgaaaggcgatcgtatagtagataaacaattgtctaaagtcggaggcaaaggcttatttgttaaagaaatacaacatgaactttttgaaaaaaatatcgatatggcaatacactcgcttaaagacgtaccaagtgtaattccggaaggtttaacattaggttgtatccctgatagagaattaccttttgatgcgtatatttctaaaacacatacaccactatcccaattgccagaaggcagtattattggtactagttcattacgtcgtggtgcacaaatattatctaagtatcctaatttagagattaaatggattagaggtaatatagatacacgattagaaaagttacaaactgaagattatgatgcgattattttagctgcagctggtttaagaagaatgggctggtcagatgatattgtaacatcttatcttgatagagatacattgttacctgcaatcggacaaggtgctttagggatagaatgtcgtagtgacgatgaagaactattaacattattaagcaaagtacataatgatgaggttgcaaaatgtgtgactgctgaacgaacgtttttagcagaaatggatggtagttgtcaggtgccaattgcaggatatgctacaatctcagatcaaaacgaaatcgaatttacaggtttaattatgaccccagatggtaaagaacgatttgaatatacaatgaacggaacagatccggttgagttaggcaaaacagtgagtaacaaattaaaagagcaaggtgcttatgaaattataaaacgcttaaatgaacaacattaa

SEQ ID NO: 405832 - DNA, 669 bp, Staphylococcus aureus
atgaagccagttgtagttatgacacaaacaaatgacatgcaaagtgatttagtatcaattattcacaaaccctttattgatataaagccactaaattttgatattcatttgttaaatcaacgctatgactggcttattttttcatctaaaaatgctgtgaaattcttttataaatatctaaaaggaattaatgttgataacattgctgtgataggaagtaagacagcgcaatattgtgaatcacttggcattcgagttgattttatgccaaacgacttttctcaagaaggatttttaaaatcatttaatcaaactaaccaaaaaatacttttgccttcgagtgaattggcgagaccattgttattagcagcgttatctaaagataatgaagttgttaaaatagatttatatacttcagtgcctaacaaacaaaatatacaagatgttaaagaaatgatagaacatcaacaaatcgatgcattaacattttcaagttcgtcggcagtacgttattattttaatgaaggatttgtaccaaaattcaagtcgtattttgctattggagaacaaacagcacggaccattaaatcatatcaacaaccagtaacaattgcagaaattcaaacactcgaatcactaattgaaaagattttagaaagtaggggctaa

SEQ ID NO: 405833 - DNA, 975 bp, Staphylococcus aureus
atgaaatttgatagacatagaagattgagatcatcagcgacaatgagagatatggttagagagaatcatgtaagaaaagaagatttaatatatccaatttttgtagttgaaaaagacgatgtgaaaaaagaaattaagtcattgccaggtgtataccaaatcagtttgaatttacttgaaagtgaattaaaagaagcttatgacttaggcatacgtgccattatgtttttcggtgttccaaactcaaaagatgatataggtactggtgcatacattcacgatggtgttattcaacaggcaacacgtattgctaaaaaaatgtatgatgacttattaattgttgcagacacttgtttatgtgaatatactgatcatggtcattgtggcgtgattgatgaccatacacatgacgttgacaatgataaatcattgccactacttgttaaaacagcaatttctcaagtggaagctggtgctgatattattgcgccaagtaatatgatggatggttttgttgctgaaattcgtcgtggattagatgaagccggctattacaatattcctataatgagttatggtgtcaagtatgcatcaagtttctttggaccttttagagatgcagcagattcagcgccatcatttggggatagaaaaacgtatcagatggaccctgctaaccgtttggaagcacttcgtgaattagaaagtgatcttaaagaagggtgcgacatgatgattgttaaacctgctctaagttatttagatatagttcgagatgttaaaaatcatacgaatgttccagttgttgcatataatgtgagtggagaatatagtatgactaaagcagcggcacaaaatggttggatagatgaagaacgtgtcgttatggaacaaatggtttcaatgaaacgtgcaggtgctgatatgattattacgtattttgcaaaggacatttgtcgctatttagataaataa

SEQ ID NO: 405834 - DNA, 1287 bp, Staphylococcus aureus
atgagatatacgaaatcagaagaagcaatgaaggttgctgaaactttaatgcctggtggtgtaaatagtccagtacgcgcatttaaatcagtagatacaccagcaatttttatggatcacggtaaaggttcaaaaatttatgatatcgatggtaacgagtatatcgactatgtactaagttggggaccacttattttaggacatagagaccctcaagttattagtcatttacatgaagcaattgataaaggtacaagttttggtgcatcaacattacttgaaaataaattggcgcagctcgttattgaccgagtaccttcaatagaaaaagtgcgtatggtgtcatctggtacagaagctacattggatactttaagattagcacgtggttatactggcagaaataaaattgtgaaatttgaaggttgctatcatggtcatagtgattcgttattaatcaaagctggttctggggtggcaacattaggattgccggattctcctggtgtgcctgaaggtattgctaaaaatacaattacagttccatacaatgatttagatgcacttaaaatcgctttcgaaaaatttggaaacgatattgctggtgtaatcgtagaacctgttgctggtaatatgggtgtcgtaccgccgattgaaggttttttacagggattaagagatattacgactgaatacggcgcattgctaattttcgatgaagtaatgactggtttcagagtcggttatcattgtgcacaaggttactttggtgtgacaccagatttaacttgcttaggaaaagttatcggtggaggactacctgtaggtgcatttggtggtaaaaaagaaatcatggatcatatagcaccattaggaaatatttatcaagcgggtacgttatcaggaaatcctcttgcaatgacaagtggttatgaaacgttaagccaattaacgccagagacatatgagtattttaatatgttaggcgatatacttgaagacggtttaaaacgtgtatttgctaaacacaatgtaccaataactgtaaatagagcaggttcaatgattggttatttcttaaatgaaggacctgtaactaattttgaacaagcgaataaaagtgatttgaaattatttgcagaaatgtatcgagaaatggcaaaagaaggtgtgtttttaccaccatctcaatttgaaggtacattcttatctacggcacacacgaaagaagatattgaaaaaacgattcaagcatttgatacggctttaagtcgtattgtaaaataa

SEQ ID NO: 405835 - DNA, 1068 bp, Staphylococcus aureus
atgatatatagaaataatttcattgtgttcgttttatcattttttattagtattctactgtattcatcgcacgtattacttccatttatgtttggtcctattatcgcatcaatcatttgtgtaaaagttttcaaacttgatattaaatggccattcttacttagtgaattaggtattgtactattaggtgtgcaaatcggatcaacgtttacgaaaaatgtcgttatggatattaaaaacaattggctttcgattattgttgtatctatttcgatattattaattgcaatagtaatggcatttgtttttaaaaaaattgcacgtattaatacagaaacagctattttaagtgttataccaggagcactaacacaaatgctggtcatggctgaacaagacaaacgtgctaatttgttagttgttagcttaacgcaaacatcacgaattatatttgttgttgttttagtaccgttcatttcatatttttttcatgatggtaacatgcatgcgaatggaaagttaacaaaagtcttgcctttatcacaagtattaaacatagggcaaatagttattttagcgatagctatctttatagtttatctaattatgtctaaaataaagtttccaacatttcaattattagcaccactcattgtattaattgtttggaatttttctacaggtttaacatttacactagatcattggttgttgaacatggcacaactaatatatatgattagaattggagttcaaattgcgcatttattgtcagatttaaaaggtagactagcaatcgcaattacaattcaaaatattatgttgataattggtgcgctaatcatggtttatatcatacatttctttgataataatcctattaatgaattgtttcttggtgcagcaccaggaggggttaatcagatagttttagttgcattagctactggtgccgatgttgctatgattacgagttatcatattttccgaatctttttcatcctatttattattgcaccaggaattaattactttttaaaatatcgttcgaataagcgtgaagattag

SEQ ID NO: 405836 - DNA, 561 bp, Staphylococcus aureus
atgaatgaatgcgcatttggtactaaagatccagtctacttagactatcatgatcatgtatggggacaaccgctctatgatagcaaggcattgtttaaacttttagcattagaatcacaacatgctgggctatcttggttaactattttaaaaaagaaagaagcctatgaagaagcattttatgatttcgaaccagaaaaggtagcacaaatgaccgctcaagatatcgaccgcttaatgacttttccaaatatcgttcatcatcgtaaaaaattagaagcaattgttaatcaagctcaagggtatttaaaaattgaacaagcatatggtagttttagtaaatttttatggtcatatgtaaatggtaagcctaaagatttgcagtatgaacatgcttctgatcgtatcacagttgatgatactgcaacacaactatctaaagatttaaaacaatacgggtttaaatttttaggtccagtaacagtattttcgtttttagaagcagccggtttatatgatgcacatttacaagattgtccatcaaagcctaaacataattaa

SEQ ID NO: 405837 - DNA, 2631 bp, Staphylococcus aureus
atggaaatgaaaccaaaatatgatcctcgtgaagttgaagcgggacgttatgaagaatgggtaaagaatggttattttaaaccgtcagaagataaatcaaaagaaacatatacaattgttatcccgccaccaaatgtaactggtaaattacatttaggacatgcatgggatacgactttacaagatatcattacacgtatgaaacgtatgcaaggatacgatacgttatacttaccaggtatggatcatgctggtattgcgacacaggcaaaggtagaagctaaattaaatgaacaaggaataactagatatgatcttggtcgtgaaaagtttttagaacaggcatgggattggaaagaagagtatgcgtcatttattcgtgcgcaatgggctaaattaggtctaggtttagattatagtagagaacgttttactttagatgaaggtttaagtaaagcagttaaaaaagtttttgttgatttatacaataaaggaattatttatcgtggcgaacgtattataaattgggatcctaaagcacgtacagctttatctgatattgaagtaatacatgaagatgttcaaggtgcgttttatcattttaaatatccttacgctgatggtgaaggttttattgaaattgcaacaacaagaccagaaacgatgttaggtgatacagcgattgttgttaaccctaatgacgaacgatacaaagatgtaatcggtaaaactgttatattaccaatcgtaggacgcgaactgcctattttagcagatgagtatgttgatatagacttcggttctggtgctatgaaagtgacaccagcacatgaccctaatgattttgaaattggtcaaagacatcaattagaaaatattatcgttatggatgaaaatggtaaaatgaacgacaaagcgggtaaatatgaaggtatggaccgttttgattgtcgtaaacagctagttaaagatttaaaagaacaagatttagttatcaagattgaagatcatgttcattctgtaggtcattcagaacgatctggcgctgttgttgaaccatatttatcaacacaatggtttgtgcgcatggaagacttagcgaaacgttcattagataaccaaaaaacagatgatcgtattgatttttatccgcaacgtttcgaacatacatttaaccaatggatggaaaatattagagattggacgatttcaagacaattatggtggggtcatcaaattccggcttggtatcataaagaaacaggcgaaatatatgttggagaagaagcgccaactgatattgaaaattggcaacaagatgaagatgtattagatacgtggttctcaagtgctttatggcctttctctacgttaggttggcctgatttagaaagtgaagactttaaacgatactacccaacaaatgccttagttacaggttacgatattatctttttctgggtagcacgcatgatattccaaggcttagaatttacagatcgtcgtccatttaatgatgtattattacacggtttagttcgtgctgaagacgggcgtaagatgagtaaatcattaggtaatggtgtggatccaatggatgttattgacgaatacggtgctgatagcttgcgttacttcttagcaacaggttcatctccaggacatgatttaagatactcaactgaaaaagttgagtcagtgtggaactttatcaataaaatctggaatggggcacgtttcagtttaatgaatatcggtgaagactttaaagttgaagatatcgatttaagtggtaacttatcattagcagataaatggattctaacacgtttaaatgaaacgattgcaacagttactgatttaagtgacaaatatgaattcggcgaagttggacgtgcattatataatttcatttgggatgatttctgtgattggtacattgaaatgagtaaaattccaatgaatagtaatgatgaagaacaaaaacaagttacacgttcagtattgagttatactttagacaatattatgagaatgctacatccattcatgccatttgtaacagagaaaatatggcaaagtttaccacatgaaggtgacacaattgttaaagcttcatggccagaagtgcgtgaatcattgatttttgaagaaagtaaacaaacaatgcaacaacttgttgaaatcattaaatctgtaagacaatcacgtgtagaagtaaatacgccattgtctaaagaaatacctattttaattcaagctaaagataaagaaattgaaacaactttatcacaaaacaaagattatttaatcaaattctgtaatcctagtaccttaaatattagcactgacgtggaaattcctgagaaagcaatgacatcagttgtaattgcaggtaaagtggtattaccattagaagggctaattgatatggataaggaaatcagccgtttggaaaaagaattagctaaacttcaaagcgaattagatagagtagataaaaagctctctaatgaaaactttgtaagtaaagcacctgaaaaggttataaatgaagaaaaacgtaaaaaacaagattatcaagaaaaatatgatggtgtgaaggcaagaattgaacaattaaaagcatag

SEQ ID NO: 405838 - DNA, 1272 bp, Staphylococcus aureus
atgaattacctagagagcttgtattggatacacgaaagaactaaatttggcatcaaaccaggtgttaaacgtatggaatggatgctagcacaatttaataatcctcaaaataacattaagggtattcatgtaggtggcacaaatggtaaaggctctacagttgcttaccttagaacagctttagttgaaaatggttatgaagtaggtacatttacgtcgccgtttattgaaacatttaatgaacgaattagtctaaatggtgtgccaatatcaaatgacgctattgtagaattagtatcacgtattaaaccagtaagtgaaatgatggaacgtgaaacagatttaggtgttgcaactgaattcgaaataatcacagcgatgatgtttttatattttggtgaaatacatcctgttgattttgtcattgttgaggctggattgggtataaagaacgattcgacaaatgtctttacaccggttttatcaatcttaactagtatcggtctagaccatacagatattttaggtggtacttatctagatattgctagggataaaggcgcgattataaagcctaacgttccagtgatatatgctgttaaaaatgaagatgcattaaaatatgttcgtgaacgcgcaattgaacaacatgcaaagccaattgaattagatagagaaattgttgttgtatcgcaaaatgatgaatttacttaccgttataaagattatgaattagaaacaatcattttaagcatgttaggtgaacatcagaaacaaaatgctgcattagccataacagctcttattgaattaaatgaacaaggattaattgaattagatttcaataagatgatagacggtattgaatcagttcgttggactggacgtattgagcaggtgcatgacaaacctttaatcattttggatggcgcacataattcagagagtatagatgctctaattgatacaattaaacagtaccatgataaagaaaaagtagatattttgttctcagcaataaacggaaaaccgattaacgagatggtcaaacatttaagtttaattgcgcatacgttttatgcaactgaatttgattttccgaaagcgttacgcaaagaagaaattgtaggtagtattgaaaatgatgaaatacaattagtagatgactacgttgaatttataaaaaattatcaaggtgatacattagtaattaccggtagtctgtatttcataagtgaagttaaatcaaaattagactttgaagcattataa

SEQ ID NO: 405839 - DNA, 708 bp, Staphylococcus aureus
ttggtagtattgttatcttatagttgcagttgtatttttagttttctatatcaatttatatctatagaagaaacgtcatttgattatttacatagaagatcgaaatgtgattattgtaattcgtcactcaaatggtatgaattaatgccgattattagttttttattattaaaagggcgatgtcgaaactgtcgaaagcgtatttccctaacacatttcttaggggaaacctttgctttaatacctatcgtctttattaagtatgatttcacatacgtaaatgctacgctatttataactacatatgtttttctgcttatttttactatgaccgatatcacttctttaatgttagattgtcgcttaattataatttattgtatcgtttctctctcgttaagtatgatttatccagtagcttttatcattattagtatgaccacgcatatattctactttttatttcgggcatatattggttatggtgacgttttactaatatctgcactttctttgtttttccctctccaattcactatttatgtcattttatttacatttgtcattgctggtttagttgctttaattaccatgatatttaagccgattaaactattaccccttgttccatttatatttatttccttttttatcaattcacttttttataatgatatccatcaatttttaggaggcgtatatttttga

SEQ ID NO: 405840 - DNA, 687 bp, Staphylococcus aureus
ttgaaaattaaagaaatggtaacttcagaaatgccaagagaacgtttgttaagccatggtgcaaaaagtctttcgaatacagaattattagctatattaattaacaccggaagaaaaggattctcgagcatagacattagtaatgaactgcttaaatctgcttcgaatctgaatgaattgaaaaaatcttcaattaacgatttgataaaagttaaagggattggattacaaaaagcaattactttaaaagcagcatttgagttaggggaaaggatggggagaagagctgaaaataatcgtataaaaataacgcaaccaagtgatgttgctgattatatgattccaacaatgaaagatttaacacaagaacattttgtcattttattgttaaattcaaaaaatgtagtgattaaagaaacctgtgtttttaaaggtacattaaatagttcgattgtacatccacgtgaaatttttagtattgcggtgagagaaaatgccaatgcaatcatcgcagttcataatcatccatccggtgatgtaacgccctcacaagaagatatcataacaacaatgaggttgaaggagtgtggtttgattttagggatagatttattggatcatattataatcggtgataatagatttaccagtcttgtagaagcgggttactttgatgaaaatgattga

SEQ ID NO: 405841 - DNA, 285 bp, Staphylococcus aureus
gtgactctatttattattatcggggttctcgtgccaatggtttataccatgcagttaaatattaaaaatgaacctgtaacaaagcgcaatcttttaataacattagctttatctacgttaggtattttagtaaccgcgttagcaggtgtaatcgttacgaaacaagcttttcctttattaagtgtagcaattggctcaatttttactggaatcgtttggggccttttactaagtggtagctacgcgctgatacgatttttatctaacgcatttgggcgtaagtaa

SEQ ID NO: 405842 - DNA, 474 bp, Staphylococcus aureus
atgagattgatatttagtatgattaaaaacattatagcagtaatagcaattgtgataattgtttatatcgccttgaaatacgcaccttttttaaaagaacaagattggaatcctgtaaatcacgataatgatcaaatgaatcaagttacgcaacccactaatgatgcccaacatgtttatgtaagtggtgagaaatattcattaaaagaaaatgatttaataaagaatgtaccattaagccaaattaaaaatgtatttaaaatgatagataaacaagagtttatggctgtgtctggaatgaatcgcatggcttataatgatcaatatattataggtcaaagaggagacgaatttattctttataaatttggagatgagtcaatgcgtgtttacaatactgaatttgaaatgcaacaagacttaaatgaattagggcaaaatttacaactaaaatctgaaaatgcttatcaatag

SEQ ID NO: 405843 - DNA, 843 bp, Staphylococcus aureus
gtgcttaagttttttaaaaataacaaattaattgttgttttatgtgcaattatcgtttttattgcattaattgggctgtccatacgttcacaatctcaatcacctcctgaacaatatataggtgattctgtgtcttttggacaacgagttgtgagttatccagttaattttgttgctggtacgattggggacttttttaaaaaaggagattctaaagaatctaaaaataagattagccagttagaatctaagaaccaacaattagaagcggaaaatgaaaaattaaaaaaagagcttgatttaaaagatatttcaaaatttgatcctatttctactacggttttggcaagaaatccggatcagtggatgaatacaattgtaattgataagggatctaaatcaggtataacttcaaatatggctgtgatgacatcacaaggttttgttggaagagttactaaagttaataaattttcttcacaagttgatttaatctcaactaatacacgtgcgggtaaattatctgtaaatatacaacacggttctaaaaatatatttggtttaattgatcgttatgatgaaaagaactcagaacttgtaattagtgacattaataatagagataatatctcaaaaggtgataaagtcgttacaagtggattagctgatcaactaccaagtaatttatatataggagaagtgactaaggttcaaaatgatcaatacggcttagctaaagaagttagggttaagactggtgcggacttaacagatttgagtcatgtttatgttgcaaaaagagatcctaaaacaattcctgatgatgaaagcagggataaataa

SEQ ID NO: 405844 - DNA, 531 bp, Staphylococcus aureus
atgcgtacactgtattattttttgataggtattttactattttatatagatactgcaattgggcttcttattccaatgcacataggtaagtttgaacttgtatttgtaccacaccttacatttatgtatattttaatgatggtagtgtatcgtggctttggcgtatcattattgctcagcatatttttaggcgtaatgactgatgtatactttggtagtatttatggagtgtacttatttggctatatattgtttttagcacttatagatcgattctttaaaattttttacaaagatcattcgatgttattcattattatattagccagcaccttattattagaagtctatgtggcattaatatacggtatgttaggattcattcaatttgatattattcattttgtagtctttagattattgccaacattaattatgaattttgtactgttgattatgctttatccgttgattataaagttccttaaaaaaacaaacaatgacattgacatgaaacgtcgtcaatggtaa

SEQ ID NO: 405845 - DNA, 309 bp, Staphylococcus aureus
atgtttgctattattgaaacaggtggaaaacaaatcaaagtagaagaaggtcaagaaatcttcgttgaaaaattagacgtaaacgaaggagatacttttacatttgataaagtattatttgtaggtggagattcagttaaagttggagcgccaacagttgaaggtgcaacagttactgctactgttaataaacaaggtcgcggtaaaaaaatcactgtattcacatacaaacgtcgtaaaaattcaaaacgtaaaaaaggccatcgtcaaccatacactaaattaacaatcgataaaatcaacgcgtaa

SEQ ID NO: 405846 - DNA, 321 bp, Staphylococcus aureus
atgattactgttgatattacagttaatgatgaaggcaaagtaacagacgttattatggatggccatgctgaccatggtgaatatggtcatgatatcgtttgtgctggagcttcagctgtattgtttggtagtgttaatgcgattataggattgacatctgagagaccagatatcaattatgacgacaatggtggtcattttcatataagaagcgttgatacaaacaacgatgaagcgcaactaattcttcaaacaatgcttgtgtctttacaaactattgaagaagaatataatgagaatattagattaaattataagtga

SEQ ID NO: 405847 - DNA, 285 bp, Staphylococcus aureus
atgttaaaattaaacttacaattcttcgcatctaaaaaaggggtaagttctacaaaaaacggacgtgactctgaatcaaaacgcttaggtgctaaacgtgctgacggtcaattcgtaacaggtggttcaattttatatcgccaacgtggtactaaaatttaccctggtgaaaatgtaggtcgtggtggcgatgatacattattcgctaaaatcgacggcgttgttaaattcgaacgtaaaggtcgcgacaaaaaacaagtttctgtatatgcagtagctgaataa

SEQ ID NO: 405848 - DNA, 1293 bp, Staphylococcus aureus
atgtttgtcgatcaagtcaaaatatctcttaaagccggtgatggtggtaatggtattaccgcatacagaagagaaaaatatgtaccatttggtggaccagctggcggtgacggtggtaaaggtgcttcagtcgtatttgaagtggatgaaggtttaagaacgttattagattttagatatcaacgtcattttaaagcaagcaaaggtgaaaatggccaaagtagtaatatgcatggtaaaaatgcggaagatttagtattaaaagttccacctggtacaattattaaaaatgttgaaacagacgaagtgttagcagatcttgttgaagatggtcaaagagctgtagtagcgaagggcggtcgaggtggccgaggtaattcacgttttgcaacacctagaaaccctgcacctgacttcagtgaaaaaggtgaaccaggtgaggaattagatgtatctttagaattgaaattattagctgatgtaggattagtaggtttccctagtgtgggtaaatcgactttattatctatcgtttcaaaagctaagcctaaaattggggcatatcattttacaacgattaaaccaaatctaggtgttgtttcaacgcctgatcaacgtagttttgttatggcagatttaccaggtttaattgaaggtgcatctgatggcgttggattaggacatcaatttttaagacatgtagagagaacaaaagttattgttcacatgattgatatgagcggttctgaaggtagagaacctattgaagattataaagtcattaatcaagaattagctgcgtacgagcaacgtttagaagatagacctcaaatcgtagtagctaacaagatggatttacctgaatcacaagataatttaaacttgtttaaagaagaaattggcgaagatgtgccagttattccagtttcaacaataacgcgtgataatattgatcaattattatatgcaatagcagataaattagaagaatataaagatgttgacttcacagttgaagaagaggagtcagttggcattaaccgagtattatataaacatacaccgtcacaagataaatttacaatttcaagagatgatgatggtgcttatgtggtaagtggtaatgctattgaaagaatgtttaaaatgactgactttaacagtgatccagcagtacgtcgatttgctcgtcaaatgcgttcgatgggtattgatgatgcgcttagagaacgtggttgtaaaaatggtgatatcgttagaattcttggcggagaatttgaattcgttgaatag

SEQ ID NO: 405849 - DNA, 459 bp, Staphylococcus aureus
atgatggacaataaagattataaaaagttttatttaattagagaagatgtcttgcctgaatccgtggttaaaacattgaagattaaagatgccttaaaaagtgatccgacattgtccatttatgatgccgttaaacagtttgatctatctagaagtgctttttataaatatagagaaacgatatttccagtagacgataaaatgcttgaccatcgagaatttacattaattttatatgtaactgatattgttggtatgttggcacgtgtactagatgttatatcaaagttagaactatctgtattaacgattcatcaaagtattccaatggaagaaaaagcaacaataacattatcactgaatgctaaatctaaagaaacttcagtagaagatgttattggcgctttgagaaatttagattatgtatcaaaagtagaattaattagtatgagtatgtaa

SEQ ID NO: 405850 - DNA, 603 bp, Staphylococcus aureus
atgtacgcgtatgtcaaaggtaagttaacacatttatatcctacacacgtagttgttgaaactgctggtgttggttatgaaattcaaacaccaaattcttatcgttttcaaaagcatctagatcatgaagttttaattcatacatctttaattgttcgtgaagatgcacaattattgtatggatttagtagtgaagaagagaaagatatgttcttgagtttaattaaagttactggtattggtccgaaatcagctttagctattttagcgacaagtacgcctaatgaagtaaaacgtgccattgaaaatgaaaatgatacgtatttaactaaattcccaggaattggtaagaaaacggcaagacagattgtcttagatttaaaaggtaaagtgaaaattactgaagaagatagcgattcattattacaagtagacgctacttcgacggtgcaagatcaattcgtgcaagaagcaatgttagcgttagaagcattaggttattctaaacgagagcttgcaaaagttgagaaaacgttaaataaaaataaatatgactcagttgatgaagctgttaaggcaggtcttcaattagttgtatcttaa

SEQ ID NO: 405851 - DNA, 1005 bp, Staphylococcus aureus
atgaatgagcgtatggttgatcaatcaatgcatagtgaagaaactgatttcgaattgtcgcttagacctacgagattacgacaatatattggtcaaaattcaataaaaagtaatttagaagtatttattaaagcggctaaacttcgtcatgaaccattagatcatgtattgctttttggcccccctggattaggtaagacaacattatctaatatcattgccaatgaaatggaagttaatatacgtacagtatcagggccttcattagaaagacctggtgatttggctgcaattttatcaggacttcaacctggagatgttttgtttattgatgaaatacacagactgagtagtgttgttgaagaagtgttataccctgcaatggaagatttctttttagatattatcattggtaaaggcgatgaggctagaagtatccgtatcgacttacctccattcactttggtaggtgcaacaacgcgagctggcagcttaacaggtccactaagggatcgatttggtgtgcacttaagattagaatattataacgaatcagatttaaaagaaatcattattagaacagctgaggttttaggcacaggtattgatgaagaaagtgccattgaacttgctaaacgttctagagggactccaagagtagcaaatcgactattgaagcgggtaagagacttccagcaagtgaatgaagatgaacaaatatacattgaaacaacgaagcacgcattaggtttacttcaagttgatcaacacggactagattacattgatcataaaatgatgaactgtattattaagcagtataatggcggacctgttggtttagatacgattgccgtaacaattggtgaagaacgtattacaattgaggacgtttatgagccatttcttattcagaaaggctttttagaacgtacgccacgtggcagaaaagcaacaccattagcttatgaacattttgcaaagtcgaatgaggagagagaataa

SEQ ID NO: 405852 - DNA, 1026 bp, Staphylococcus aureus
gtgaatattgaagaatttgactatgacttaccagaatcattaattgctcaaacgcctttaaaagatcgtgatcatagtcgtttattagtcatggatagagaaactggtgaaatgaaacatttacatttcaaagatatcattgagtattttagacctggtgatacattagtgcttaacgatacgcgagtaatgccagctagactttttggtttaaaagaagaaactggtgcaaaagttgaaatgttaatgttaactcaaattgaaggtaatgattgggaagtcttactgaaaccagctaagcgtattaaagttggtaataaattgaattttggtaatggcaaaattatagctgaatgcataaaagaaatggatcaaggtggacgcatcatgcgtttacattatgaaggtattttacaagaaagattagatgaattaggggaaatgccactgccaccatacatcaaagaacgtttagatgatccagatcgttatcaaacagtttacgctaaagaaagtggttcagcggcagcaccaacagcaggattacattttactgatgagttattaattgaaattaaaaataaaggtgttaatatcgcatttgttacattacatgttgggttaggtacgtttagaccggtgagcgtagacgatgtgaatgaccacgaaatgcatagtgaatattatcaaatgacacaagaaacagctgatttattaaatgatactaagtccaaaggacatcgcattatatcagttggtacaacttcaacacgtacacttgaaacaattcgacgcgatcatgataaatttgttgaaacgagtggctggactaatatatttatttatccaggatttgattttaaagcaattgatggccagattactaattttcatttaccaaaatcaacattagttatgctagtatcagcgtttagtagtcgtgaaaatgttctgaatgcttataaaacggcagtaaatttagaatatagattctttagttttggcgatgcaatgttaattatataa

SEQ ID NO: 405853 - DNA, 1140 bp, Staphylococcus aureus
atgcctgcagtaacatacgaacacattaaaacttgtaaacaatcaggtgcgcgtttaggtatcgtgcacacaccacacggttcatttgaaacacctatgtttatgccagttggtactaaagcaaccgttaaaacaatgagtccagaagagttaagacaaattgaagcaaaaatcattttgggcaacacatatcatttgtggttacaacccggaaatgatattatcaaacacgctgggggattacataaattcatgaattgggatggtccgattcttacagattcaggcggtttccaagtgtttagtttaagtaatttacgtaaaattacagaagaaggcgtggaatttagacatcatactaatgggtctaaattatttttgagtcctgagaaatcaatgcaaattcaaaatgatttaggatctgatattatgatggcatttgatgaatgtccaccgatgcctgctgaatatgattatgtaaaaaaatctattgaacgtacaacacgttgggcgaaaagatgtctagatgcacaccaaagacctgaagatcaagcattgttcggcattatacaaggtggcgaatatgaagatttaagagaacaaagtgcaaaggatttagtagaattagattttcctggttatgcaatcggcggtttgtcagttggtgaacctaaaccggttatgtataaaatggttgaacatacagagcagtttatgcctaaagataaaccaagatatttaatgggtgtaggatctccagatgcgttaatcgaatgtagtattcgcggcatggatatgtttgattgtgtcttaccgacacgtattgccagaaatggtacttgtatgacatcgcaaggtcgtttagttattaaaaatgcaaaatttgcagatgatttaagaccgttagatgagaattgtgactgttatacatgtcaaaactattcaagagcgtatatacgtcatttaatcaaggcagaggaaacttttggtattcgtcttactactattcataatttacattttctgctaaaattaatggaagatataagacaagccattcgagaagatcgtcttttagatttcaaagaagaattcttcgagcaatatggattaaatgttgagaacccaaaaaacttttaa

SEQ ID NO: 405854 - DNA, 261 bp, Staphylococcus aureus
atgcaattttcattactaatatatatagtcgtaatttttgcggttatgtatttcttgatgatcagaccacaacaaaaacgtgcgaaacagcatcgtgagttgattaataacattcaatctggtcaaagaattacaactattggtggtattaaaggtactgttaaagcagtagatgaaacaactgttgttattacagttaatggtcatggtactgaattaactttcgaaaaacctgctattaaacaagttgacccttcataa

SEQ ID NO: 405855 - DNA, 2280 bp, Staphylococcus aureus
gtgaagaaaagtagtagaataattgcgttcttgcttttagtcgtattgttgtttgccggaatggctgcaacttataaaagtgttataaagaatgtcaatttaggacttgatttgcaaggtggatttgaggtgctttatcaagtcgatcctttaaataaaggcgacaaaatagataaaaaagccttacaatcaacagcgcaaacattagaaaatcgtgttaacgttttaggtgtttcggaacctaaaattcaagttgaagaacctaatagaattagagtacaacttgctggtgtaacagaccagaatgaagcacgtaaaattttatcttctcaagctaatttaacaattcgcgatgcagaagataaagtaaaattaagcggttctgatattaaacagggatctgccaaacaagaatttaaacaggaaacaaaccagcctacagttacttttaaagtaaaagacaaaaacaaatttaaaaaagtaacggaagaaatctctaagaaacgtgataatgtcatggttgtttggttagatttcaaaaaaggtgacagctataaaaaagaagcacaaaagaaaaaccctaaatttatttctgcagcaagtgttgatcaaccaatcaattctgatagcgtagaaatctcgggtggatttaaaggacaagaaggcgttaaaaaagcaaaacaaatcgccgaattgttaaatgcaggttctttaccagttgacttgaaagaaatttattcaaactcagtaggtgcccaatttggtcaagatgcattagataaaactgtgtttgcatcgtttattggtgtagcattaatttatttattcatgcttggattctaccgattacctggtttagtagcgattattgcattgacaacttatatctatctaacgttagtagcatttaatttcatttccggggttctaactttaccaggattagcggcgttggtattaggtgtaggtatggctgtagatgccaatattatcatgtatgagcgtattaaggatgaacttcgaataggtagaacgataaagcaagccttttctaaagcaaacaaaagttcattcctaacaatttttgattctaacttaacaacagttatcgccgcagcagtattattcttcttcggtgaaagttcagttaaaggtttcgcgacaatgttattattaggtattctaatgatctttgttacagccgtgttcttatcaagattcttattatcattacttgtttcatcaaatatattcaaaaatcaattttggttatttggtgttaaaaagaataaacgacatgatattaatgaaggtgtagatgttcatgaccttaaaacttcattcgagaaatggaattttgttaaattagctaagccattaattggagtaagtattttaattgtagttgtcggtttagttattctttatatcttcaagttaaacttaggaattgatttctcaagtggtacacgcgtagatttccaatctaaacaagcaattactcaacaaaaggtagagcaagttgtaaaagatagtggacttaaagcggatcaaattcagatcaatggtaaagacaataaagtagcaactgttcaatttaaagacgatttaacgcgtgctcaagataataaattgagtgataatattaaatcgaaattcggtgacacacctcaaattaacactgtatcaccaattattggacaggaattagcaaaaaatgcaatgcttgcattaatctatgcatcgataggtatcatcatctatgtatcattacgatttgaatggcgcatgggtctttcatctgtattggcattattacatgatgtattcattatagtagcgattttcagtttatttagaattgaagtagatttaacatttatcgccgctgtattaacaattgtcggttattcaattaatgatacaatcgtaacgtttgaccgtgtacgtgaaaacttacaaaaggttaaagtgattacgacaacagaacaaattgatgatatcgttaatagatcaattagacagacaatgacacgttcaattaatacagtattaacagttattgtagtagtagttgctatactattcttcggtgctcctacgatattcaactttactttagcattatttatcggattgatttctggtgtattctcttcaatcttcattgccgttccgctatggggaataatgaaaaaacgtcagttgaaaaaatcgccgaaacacaaattagttgtatataaagaaaagaaatcgaacgatgaaaagattttagtttaa

SEQ ID NO: 405856 - DNA, 2274 bp, Staphylococcus aureus
atgattaaaccgaagtataagtggaaattaactaaaccagctgaatacataagtgatgaattaacatcaaaattaaagttaacgccaatcgtaaaaaaaatattagaaagtaaatcgattattgatgaacaagcaatagaatccatcatttcagatacagatatcaatcatgatgcactgcaattgagcgatatgactaagactattgaaagaattaaaagagcgatagcgaatgatgagaaaatcctagtttatggtgattacgatgccgacggtgttaccgcaactacaattttagtgataacattacaacttttaggtgcacaagtaggatggcatattcctaaccgctttaccgaaggatatggaccaaacgaactagcatttagaaatgctcatgatgaaggcataacattaatcataactgttgataatggcatacaaggtcataatgaaattaaaatggttcaagatttaggagttgatgtcattgtaactgatcatcatgaaattggtagtacattaccagaagcatatgcaatcgtacatccaatgcatccatcgtttaattatccgttccaacaattgtgtggtgcaggtgttgcatacaaattagcacaagcattgattgaaaatgtacctgattattttaaagcattagttgcgataggtaccattgcggatttagtatccttaactgatgaaaatcgatcattagtgaaacaaggattaaaagtcttaaatgatcaatgtccgacctctgttaaagcattgctaaaagaagcgggatacaatgacaatattgatgaagaaacaattggttttattattggacctagacttaatgctgtaggtcgtttagatgacgcatcattagcttgcgaattgttgatgactgacgtcgaagaagaagctgcatttttagcagaacaagttgaacattttaaccgtgaaagaaaagatattgtagcaactatcacagaagaagcaatggctatggcagaaacgaaagttaaaaagggagatttatttttacttttagcaaaagaaaattggcatgaaggtgtcttaggtattgttgcttcgaaaattgtcgaaacatttgctttgccaacattaattttaaatattgatagggagcaaaatcatgcaaaaggctccgccagatcaattgatcaagtgtcgatgtttgaaatactatcagcacatcaagagttaatcgctaaatttggcggccatcatatggctgcaggtatgacgatggatattgaaaatatagaatcgttagctgaaggtttaaataaatggatgaaagaattatctaaaacaacttcgttagatcccgtaaagcaagtagatgtattattaacagaaaatgatataacgattaaaaatattcgtgatatgaatcgtttaagacccttcggaacagatttttctagacctatttttgaaatggatgatttatcagtttcttcagttaaggcgataggtcaacaaaaaaatcatctaaaattgacacttggtgaaagtaatatcgccgcgctattttggcaaaatggacacttagaacctgagttacaagatgaacagccaattaatatattaggatctgttcaaatcaacgaatggaatggtaatcaatcaccgcaaataattattcaagatattgcgatgaatgaacagcaaatattagattatagaagtaagcgaaaaagtttaccttttacagaaaatgatgaaaatattgtcgtgcttattcatcctaaaagtgataaagtaaatgcgaatgaatattattatggtgaagaaattaaacaacaaactgataaagtagtattaagagatttaccaacgtcaatggaagacttgtctaattccttgcaacaactgcaattttctcaactttatatagttttgcaacataatcattcgatttacttcgatggtatacctaatatggatatttttaaaaagtgttataaagcattaataactaaacaagaaacaaatatccagaaagagggtatgttattgtgtcaacatttaagtgtgaaaccagatacacttaaattcatgttgaaagttttcttagacttaaaatttgtaacacaagaagatggtttaattcgaatcaatcaacaacctgataaaagatcgattgattccagcaaagtatatcaattaagacaacaacgtatggatgttgaaaagcaattattatatcaagatttttcagaaataaaaaattggataaagtcacaattgtcgtga

SEQ ID NO: 405857 - DNA, 519 bp, Staphylococcus aureus
atggatttaaagcaatacgtatcagaagttcaagattggccgaaaccaggtgttagtttcaaggatattactacaattatggataatggtgaagcatatggctatgcaacagataaaattgtagaatacgcaaaagacagagatgttgatatcgttgtaggacctgaagcgcgtggctttatcattggctgtcctgtagcttattcaatggggattggctttgcacctgttagaaaagaagggaaattacctcgtgaagtcattcgttatgagtatgacctagaatatggtacaaatgttttaacaatgcacaaagatgcaattaaaccaggtcaacgtgtgttaattacagatgatttattagctactggtggtacgattgaagcagcaataaaattagttgaaaaattaggcggtatcgtagtaggtattgcatttataattgaattgaaatatttaaatggtattgaaaaaattaaagattacgatgttatgagtttaatctcatacgacgaataa

SEQ ID NO: 405858 - DNA, 2211 bp, Staphylococcus aureus
atgaatggggtgtatcatataatgaacaacgaatatccatatagtgcagacgaagttcttcacaaagcaaaatcatatttgtcagcagatgaatatgagtatgttttaaaaagctatcatattgcttatgaagcacataaaggtcagttccgaaaaaacggattaccatacattatgcatcctatacaagttgcaggtattttaacagaaatgcgattagacggaccgacgattgtcgcaggttttttgcatgatgtaattgaagatacaccgtatacatttgaagatgtaaaagaaatgttcaatgaagaagttgctcgaattgttgatggtgtgacgaagcttaaaaaagtaaaataccgctcaaaagaagaacaacaagctgaaaatcatcgcaagttatttattgcgattgccaaagatgtacgcgtaattttggtgaaattagcagacagattacataatatgcgtaccttgaaagccatgccgcgcgaaaaacaaattagaatttctcgagaaacattagaaatttatgcaccattagcacatcgtcttggtattaatacaatcaaatgggaactagaagatacggctcttcgttatattgataatgtgcaatattttagaatagtcaatttaatgaagaagaaacgtagtgaacgtgaagcgtatatcgaaacggctattgatagaatacgtactgaaatggaccgaatgaatatcgaaggcgatataaatggtagacctaaacatatttacagtatttatcggaaaatgatgaagcagaaaaaacaatttgatcaaatttttgatttgttggcgatacgtgttattgtcaattctattaatgattgttatgcgatacttgggttggtgcatacgttatggaaaccgatgccaggacgttttaaagattatattgcaatgcctaaacaaaatttgtatcagtcattgcatactacagtagtaggcccaaatggagacccgctcgaaatccaaatacgaacgtttgatatgcacgaaattgctgagcatggtgttgcagcacactgggcttacaaagaaggtaaaaaagtaagtgaaaaagatcaaacttatcaaaataagttaaattggttaaaagaattagctgaagcggatcatacatcgtctgacgctcaagaatttatggaaaccttaaaatatgacttacagagtgacaaagtatacgcatttaccccagcgagtgatgttattgagttgccatatggtgctgtgccgattgattttgcttatgcgattcacagtgaagtaggtaataagatgattggtgccaaggtgaatggcaaaattgtaccaattgactatattttacaaacaggcgatattgttgaaatacgtactagtaaacattcatatggaccaagtcgtgattggttgaaaattgttaaatcgtctagtgccaaaggtaaaattaaaagtttcttcaaaaaacaagatcgttcatctaatattgaaaaaggccgaatgatggttgaagctgaaataaaagagcaaggatttagagtcgaagatattttgacagagaaaaatattcaggttgttaatgaaaaatataactttgcaaatgaagatgatttattcgcagctgtaggatttggcggcgtgacatccttacagattgttaataaattaactgaaagacaacgtattttagataaacaacgtgctttaaatgaagcacaagaagttacgaaatcattgcctattaaagacaacatcattactgatagtggtgtctatgtagaaggtttagaaaatgtacttatcaagttgtcaaaatgttgtaatcctataccaggtgatgatattgtaggttatatcaccaaaggtcacggtattaaagtacatcgcactgattgcccaaatattaagaacgaaactgaacgactaattaatgttgaatgggtaaaatcaaaagacgcaactcaaaaatatcaggttgatttagaggtaactgcgtatgaccgaaatggcttgttgaatgaagtactacaagctgttagctcgacagccggcaatttaattaaagtttcaggacgttcagatattgataaaaatgcaataataaatattagtgtcatggtgaaaaacgtgaatgatgtttatcgtgtggtagaaaagatcaaacaacttggtgatgtttatacagtaacaagagtttggaactag

SEQ ID NO: 405859 - DNA, 453 bp, Staphylococcus aureus
atgaaagtagttgtacaaagagttaaagaagcatcggtgacgaatgatacattaaataatcaaatcaaaaaaggatattgtttattagtcggtatcggtcagaactctacagagcaagatgcagatgtaattgcaaagaaaattgctaatgcaagattatttgaagatgacaataataaattaaactttaatatccaacaaatgaatggtgaaatactatcagtttcacaatttactctctatgcagatgtaaaaaaaggtaaccgtccaggtttctcaaattctaaaaatcctgatcaagcggtaaaaatttatgagtattttaatgatgcgctacgagcgtatggtcttactgtgaaaacaggtgaatttggaacacacatgaatgttagcataaataatgatggtccagtcactattatttatgaaagtcaggacggcaaaattcaatga

SEQ ID NO: 405860 - DNA, 876 bp, Staphylococcus aureus
atgaaaaaaatagaggcatggttatctaaaaagggtcttaaaaataaacgtactctaatagtagtgattgcctttgtcttatttatcatctttttatttttattgctgaatagcaatagtgaagatagtgggaacatcacgataactgaaaatgctgaattacgtacaggtccaaacgctgcgtatccagtcatatataaagttgaaaaaggtgaccattttaaaaagattggtaaagtaggtaaatggattgaagttgaagatacatccagtaatgaaaaaggttggatagctggatggcacacaaatttagatattgtcgcggataatacgaaggagaaaaatcctttgcaaggtaaaacaatagtgcttgatcctggtcatggaggtagtgaccagggtgcttcaagcaatactaaatataaaagtttagaaaaagattatacgttgaaaacagcaaaagaattgcagcgtactttagaaaaagaaggcgcaactgttaagatgacaagaacagacgatacatatgtttcactagaaaatcgtgatatcaaaggcgatgcctatttgagtatacataatgatgcgttagaatcatctaatgcaaatggaatgacagtttattggtatcatgataatcaaagagctttagcagatacgttagacgctacgattcagaagaaaggtctactttctaatcgcggttcaagacaagaaaattatcaagtgttaagacaaacaaaagttcctgctgttttattagaattaggttatattagtaacccaactgatgaaacgatgattaaagatcaattacatagacaaattttagaacaagcaattgttgatggccttaaaatttatttttctgcgtag

SEQ ID NO: 405861 - DNA, 1263 bp, Staphylococcus aureus
atgattaaaatacctagagggacgcaggatattttacctgaagattcaaagaaatggcgttacattgaaaatcaattagatgaattaatgacattttataattataaagaaataagaacaccaatttttgaaagtacagatctttttgcaagaggtgttggtgattcaaccgatgtcgtacaaaaagaaatgtatacatttaaagataaaggcgatagaagtattacattaagacctgagggaacagctgcagttgtgcgttcatatattgaacataaaatgcaaggtaatccaaaccaaccaattaaactttattacaatggaccgatgtttagatatgaacgtaagcaaaaaggacgctatcgtcaatttaatcaatttggtgtagaagctattggtgctgaaaatcctagcgtagatgcagaagtattagctatggttatgcatatttatcaatcatttggattaaaacatttaaagcttgttattaatagtgtaggggatatggcgtctcgaaaagaatataacgaagcgttagtgaaacactttgaaccagtaattcatgaattttgttcagattgtcaatcacgtttgcatacaaatccgatgcgaattttggattgtaaagtagaccgtgataaagaagcgattaagactgcacctagaatcactgatttcttaaatgaggaatctaaggcatattatgaacaagtaaaagcttatttagatgatttaggtattccatatattgaagatcctaacttagttcgtggattggattattatacacatacagcatttgaattaatgatggataaccctaactatgatggtgccattacaacgctttgtggtggtggccgttataatggtttattagaattgctagatggtccaagtgaaacaggtattggttttgcgctaagtatagaacgattattgcttgcacttgaagaagaaggtatcgaattagatattgaagaaaacttagatttattcattgttacaatgggtgatcaagcagatcgatatgctgtgaagctattaaatcatttgagacataatggtattaaagcagataaagactatttacagcgtaaaattaaaggacaaatgaaacaagcagaccgtttaggtgccaagtttacaatcgttattggtgatcaagaattagaaaataataaaatcgatgttaaaaatatgacaactggtgaatctgaaacaattgaattagacgcattagtcgaatattttaagaagtag

SEQ ID NO: 405862 - DNA, 1767 bp, Staphylococcus aureus
atgagtaagagaacaacttattgtggattagttactgaggcatttttaggacaagaaattacattaaaaggatgggttaacaatcgtcgtgaccttggtggattgattttcgttgatttaagagatagagaaggaattgtacaagtcgtgtttaatcctgcattttcagaagaggcattgaaaattgctgaaacagtacgttctgaatatgttgtagaagttcaaggtacagttacgaagcgtgaccctgaaacagttaatcctaaaattaaaactggccaagttgaagtacaagttacaaatattaaagtgattaataaatctgagacaccaccattttctataaatgaagaaaatgttaacgttgatgaaaatattcgattaaaataccgttatttagatttacgtcgtcaagagttagcgcaaacatttaaaatgagacatcaaattacacgttctattcgtcaatatttggatgatgaagggttctttgacatcgaaacaccagtactaacgaagtcaacacctgagggtgcacgtgactatttagtaccatctcgtgttcatgatggtgaattttatgcattaccacaatcaccacaattatttaagcaattattgatgattagtggatttgacaaatactaccaaatcgtaaaatgcttccgtgacgaagatttacgtgcagatcgtcaacctgaatttacacaagtcgatattgaaatgagttttgtagaccaagaagatgtgatgcaaatgggtgaagaaatgcttaaaaaagttgttaaagaagttaaaggcgttgaaattaatggcgctttcccacgcatgacatataaagaagcgatgcgtcgctatggttctgataaaccagatacacgttttgaaatggaattaattgacgtttctcaattaggacgtgatatggactttaaagtatttaaagatactgttgaaaatgatggtgaaattaaagcaattgtcgctaaaggtgcagctgaacaatatactcgtaaagatatggatgctttaacagaatttgtaaacatctatggtgctaaaggattagcgtgggttaaagttgtggaagatggtttgacaggtccaattggacgtttctttgaaacagaaaatgttgaaacattacttacattaactggtgctgaagctggtgacttagtaatgtttgttgcagacaaaccaaatgtcgttgcacaaagtttaggtgcattacgtgtcaaattagctaaagaattaggtttaatcgatgaaacaaaattaaacttcttatgggtgacagattggccattattagaatatgatgaagatgcgaaacgttacgttgcagcacatcatccatttacatctccaaaagaagctgatattgctaagcttggcactgcgccagaagaagctgaggcaaatgcttatgacatagtattaaatggttatgaattaggtggcggttcaatcagaattcatgatggtgagttacaagaaaaaatgttcgaagttcttggatttactaaagaacaagcacaagaacagttcggcttcttactagatgcatttaaatatggtgcaccaccacatggcggtattgcattaggattagaccgattagtcatgttattgactaatagaacaaacttgagagatacaatcgcattccctaaaacagcatctgctacatgtttattaacgaatgcgcctggtgaagtttctgataaacaattagaagaactttctttgcgaattcgtcactaa

SEQ ID NO: 405863 - DNA, 774 bp, Staphylococcus aureus
atgaaacatcaattttcaagaaatgaactagcgattggacaacaaggtttagatttattgaagcaacaaactgttgtcatacttggcgttggaggtgttggttcatttgctgctgaagcattagcaagaacgaatattggtcatattatattaatagataaagatgatgttgatattacaaatgtaaacagacaattacacgctttaactacaacggtaggacaaagtaaagtttctttgatggaagaacgtattaaattaattaatccagattgtaaagtcacgcccttacatatgttttatacagaagagacatatgaagaaattttcgataactacgatatagattattttgtagatgcaagtgatacaataatgtacaaagtacacttaatgaaagagtgtcttgaccgagggattaaagtgatttccagtatgggtgctgcaaataaaacagatccaacacgttttacaatttcagatatctctaaaacacataccgatccaatggccaaaattattcgtcaaaaattgaaaaaactaggaattcgtaaagggattccagttgtattttcagatgaaagtccaattgtcataagagaagatgtaaaagatatagttggagataaaaatgctatcaatcgaaaaggacaaatgccaccttcttcaaatgcctttgtgccaagtgttgttggattaatttgtgcaagttatgtggtgaatgacgtattaaaagatattccagttcgtcgcattaaagacaaagggcaataa

SEQ ID NO: 405864 - DNA, 1275 bp, Staphylococcus aureus
gtgagtacagaaccattagcatcgagaatgcgcccaaaaaatatagatgaaatcatttcccaacaacatttagttggaccaagaggcattatcagaagaatggttgatacaaaaaaattaacttcaatgattttttatggtccacctggtataggcaaaacaagtattgccaaagcaatttcgggcagtacgcaatataaattcagacaattgaatgctgtaactaacactaaaaaagatatgcaacttgttgttgaagaagctaaaatgtctggtcaagttatcttgttattagatgaaatacatcgactagataaagctaaacaagactttttattacctcatttagaaaatggcaaaatcgtcttgatcggtgctacaacttcaaatccttatcatgctatcaatccagcgattcgttcaagagcgcaaattttcgagttatatcctttaaatgacgaagatgtgcgccaagcgttaactcgtgcaatagaagatgatgagaatggtttgaaaacatatcaacccaaaattgatgaagatgccatgacctacttttctacacaaagccaaggtgatgttcgtagtgcgttaaatgcattggaattagctgtattaagcgcagataatgacaaagacggttatcgacatgttacattgcaagatgctaaagactgtttacaaaaaggtgcatttgtaagtgacaaggatggtgacatgcattacgatgttatgagcgctttccaaaaatctatccgtggtagcgacgtcaatgccgctttacattatttagcacgattaattgaagctggagatttacctacaatagttcgacgattacttgtaattagctatgaggatataggcttagcctcacctaatgctggtcagagaacacttgctgctattgaatcagcagaacgtctaggtttaccagaagctagaattccactaagccaagcagtaatcgaactatgcttatcacctaagtcaaattcagcaatgagtgccattgatagtgcattgtccgatattagaaacggtcatgtgggccaaattccaaaccatttaaaagatggacattatcaaggtgctaaagatctaggccgatctattggttacaaatatccacaccaatatgttaatggctatgtttcacagcaatatttacctgataaactaaaaaacaaaatttattacgaaccaaaaacgacatctaaaagtgaacaacaactcaaagaaatatataacaacttacttaaacaaaggccgtaa

SEQ ID NO: 405865 - DNA, 423 bp, Staphylococcus aureus
atgaaaatttctactaaagggagatatggacttacattgatgatttctcttgctaaaaaagaggggcaaggatgtatatcattaaagtcaattgctgaagaaaataatttgagtgatttatatttagaacagcttgtaggtcctttaagaaatgcggggttaattcgaagtgtacgcggtgctaaaggtggataccaattaagagtgccagcggaagaaatctcagcaggggatattataagactgttagaaggtccaattacatttgttgaaagtattgaatcagaaccacctgcgcaaaaacaactatggattcgcatgagagatgcagtgagagatgttttagataatacaacattgaaatatttagcggaatatgtagatacaagtgaagatttagacggatacatgttttatatttaa

SEQ ID NO: 405866 - DNA, 183 bp, Staphylococcus aureus
atggcagacgaaagtaagttcgatcaatttaaaggaaatgttaaagaaacagtaggtaacgttactgataacaaagaattagaaaaagaaggtcagcaagataaagtgattggtaaagcaaaagaagttgttgaaaatgctaaaaacaaaataactgatgcaattgataaacttaaaaaataa

SEQ ID NO: 405867 - DNA, 147 bp, Staphylococcus aureus
atgagttttatggataaagctaaagacgcagtagaaaaatttaaaaatagcgataatgaacaagttaaaaatgtaaaagataagataaatgaatatacaggatcgaataacgaagagaaaaaagaaaatgaagataaagagaaataa

SEQ ID NO: 405868 - DNA, 1014 bp, Staphylococcus aureus
atggcgattaaatattcagcattaaaccttgtccctattcgagaaggtgaagatgaacaaacagcaattaatgatatggttaatctcgcacaacatttagacgaattatcatatgaaagatattggattgctgaacaccataacgctcccaacctagtaagttcagcaactgctttattaattcaacatacgttagaacatacgaaacacatacgtgtaggttctggaggcatcatgttacctaatcatgctccattaatcgttgcggaacaatttggcacgatggcaacattatttccaaatcgtgtcgatttaggattaggacgtgcacctggaacagatatgatgaccgcaagtgcattaagacgagatcaacatgatggtgtttataaatttccagaagaggtttcattattacaacaatatttcggccctgctcaccaacaagcatatgttcgtgcttatccagcagtaggtaaaaatgtgcctttatacattcttggttcttcaacagattctgcacatttagctgctcgcaaagggcttccatatgtgttcgctggacattttgcacctcaacaaatgaaagaagctatcgaaatttacaaaacgttatttgaaccttctgatgtattagacgaaccttatgttattgtatgtttaaatacaatcgttgctgaaaatgatgacgaagcacaatatttagcttcatctatggcacaagtaatggttagtatcactcgtggcagaatgcagcccgttcaaccgccaacacatgaactacaaaatatattaacgccgagagaatacgcgatggctatggaaagacagaaaatatcattaataggttcagaaaatactgttcaacaaaaaattcaagattttatggaaacttatggtgaagtcaacgaaattatggcaataagttatatttatgataaagatatgcaattagactcttatcgtcggttcaagaatgttataaatcagataaatgaaaaaaacactttataa

SEQ ID NO: 405869 - DNA, 1143 bp, Staphylococcus aureus
atggaaatttatgcagattatgctgcgaccacaccagtaaaacctgaagtagtagatgcgatgatgacgatttacaattcgcattatggtaatccatcatcaatacatgctaagggaagagatgcgcgtaaatatttagatgagtcaagacgtcaaattgcacaattacttggtgcagatacacatgaaattatatttacgagtggcgcaacagaatcgaataatacggcaattaaaggcatagtaaaagcaaatgaacaattgggtaatcacattatcacatcgaagattgaacatcattctgtgttacatgtttttgaacaattagagcgagaaggttttgatgtaacatatctagatgttgatgatacaggtgctattgatttagatcaacttgaagaaacaattacagataagacgattttagtatctattatgtttgtaaataatgaagttggcacagtgcaacaaatttatgatattcaagatattattgctgagacaaatgcatatttccatgttgatgcggttcaagcaattggacatcttgatgttaagtttgacgaatttgagatcgacgcaatgagtattactgctcataagtttggcggaccaaaaggtgtcggtgcattactagttaaagaccatgttacactagattatcctcaacttggcggtgaacaagaattgaaacgccgtgcaggcactgaaaatcttgcgcaaattgttgggatggctaaagcattacaattagcagaaaagaatcgagacgataacaatattcatttaatgaatttaaaagaacaatttttagttaaattacaagaaagagcgattccatttgaattaaatggttcaatgacggatgctacaggccatattgtaaatctatattttccgtttgttgaagttgaaacgatgttaacattgttggatatggcacaaatctatgtgtcgtctggatctgcatgtacagcaggctctacacaaccgtcgcatgttttagatgcaatgttcgaagatgaggagcgatcaaatcattcgattcgatttagttttaacgaattgactactgaaaatgaaattaatgcaattgtagctgaaattcataaaatatattttaaatttaaggaggagtcataa

SEQ ID NO: 405870 - DNA, 1119 bp, Staphylococcus aureus
ttgtcaaataaagatatacgtgttgtcgttggtatgtcaggcggtgtagatagttctgtaacagcccacgtcttaaaagaacaaggttatgatgtcattggcatatttatgaaaaactgggatgacactgacgaaaatggcgtatgtactgcaactgaagattacaacgatgttattgaagtgtgtaatcaaattggcattccgtattacgctgttaattttgaaaaagaatattgggataaagtctttacgtatttcttagatgaatacaaaaaaggtcgtactccaaatccagacgttatgtgtaataaagaaattaagtttaaagcctttttagatcatgcgatgaatttaggtgcagattatgtagcaacaggacattacgcacgcatacatcgtcatgaagatggtcatgttgaaatgttacgtggtgtagataataataaagatcaaacatacttcttgaatcaattatctcaacaacaactttcaaaagtgatgttcccaattggcgacatcgaaaagagtgaagtgcgtcgaattgctgaagaacaaggacttgttactgctaagaaaaaagattctacaggcatttgttttatcggcgaaaaaaactttaaaacatttttatcacaatatttacctgcacaaccgggtgatatgataacacttgatggtaagaaaatgggtaaacatagtggtttgatgtattacacaataggacaaagacatggattaggtataggtggagatggcgatccttggtttgttgtcggtaaaaacctaaaagataatgttttatatgtagaacaaggattccatcacgatgcattatacagtgattacttaattgcttcagactattcatttgtaaatccagaagataatgacttagatcaaggttttgaatgtacagctaaatttagatatcgccaaaaagatacgaaagtttttgtgaaacgtgaaaacgaccatgcactacgtgttacttttgctgagccagtaagagcaatcacacctggacaagcagttgttttttatcaaggtgatgtgtgtcttggtggtgcaacaattgacgatgtgttcaaaaatgaaggtcaattaaattatgttgtataa

SEQ ID NO: 405871 - DNA, 669 bp, Staphylococcus aureus
atgatagatcaacaaacaatttatcaatacatacaaaatggaaaaatagaagaagcgttacaagcattgttcggaaatatcgaagaaaatcctacaattattgaaaattatattaatgctggtatcgtacttgctgatgcgaatgagattgaaaaggcagagcgttttttccaaaaagctttaacaatagatccgaagaatggcgtcgtattttttaatctagcaaatgtatattataatcagcaacgttatcaagaagctattaaattatatcaacaagcattacaaacagagattgaacaagttgattgtaattatatgatcggtatggcgtttaatcagttagaatcatttaagctggcattgccgtatttaatgactgctgcggaactagataaagacaaagatgcagaagttcaatttcaatatggtcttgtattatgtcaattagaaatgtttaatgaagccataactcaacttaaacatgtattaacgattgataaaaatcatgttgatgcaagatacaatttgggcttagcgttatttatgaaaaatgaagatattgatgaagcaataactcattttaaagaagctgtgactatcgaccctaaacacttattaagtcagcatgcgctgaaaacattcactaaaatgaaagaggaggagtaa

SEQ ID NO: 405872 - DNA, 2478 bp, Staphylococcus aureus
atgtcagaccctacactatttgattattcaatgatcaaaggtactgttgaagcgatattgtttcaaaacagtgataatttttatacagtgcttaaagtagatactattgaaacaaatgaagactttgatacaatgccaactgttgtagggtttcttccgaatattgttgaaggcgatgtctacacatttaaagggcaagttgttgatcatccacgttatggtaaacaattaaaagcagagacttttgaaaaagaaatgccacaaacgaaagaagcaattataagttatttatctagtgatttgtttaaaggtgtaggtaaaaagacagctcaaaatattgttaatacattaggtgacaatgcgataaatgatatattagatgaccattcagtgctagaaaaagtttcgggattatctaaaaagaaacagaaacaaattgcagaacaaatttcagcaaatcaagaatctgaaaaaataatgattcgtttacatgatttagggtttggtcctaaactttcaatggcaatttatcagttttatctcggcgatacactgactattttagatcgaaatccatatcaattgatttatgatattaaaggtattggttttaataaagcagatcaacttgctagaaatattggtatcgcttataacgataatgaacgattaaaagctgcgttgctctatacgttagaagaagaatgtattaaacagggacatacatatttgcctatcaatgttgttatagatttaacggttgatgtattaaattatcaagatgaagaggtcatcgaacctgaaaaattagacgaaatgttgcaatacttaaatgaggaaaaacgactaattattgacaatgaacaagttgcaattccaagtttgtattattctgaaatcaaaagtgttcaaaacttattcagaataaagacgcatacaaataaacttacagaaattgaacagtcagatttacaaatgcatattggtgaaatagaagatgcgaatcaagtgaactatgcagcttcacaaaaagaagctttgcaaacggctatcaattctaaggtgatgctattaaccggtggaccgggaacaggaaaaacgacagtaattaaaggtattgttgaattatatgctgagattcatggcttatcattagattatgatgattatgtcaatgatgattatccagttgtattagcagcgccaacaggaagagcgtctaagagactacaagagtcaactggattagaagcaatgacgattcatcgtttaataggttggaatcaagacacaaagccagaggatatattagaaaatgaaataaacgcacgactcataatcattgatgagatgtctatggtagatacttggttgttccaccaatttttaagtgcagttcctttagatgcacaattgatatttgtaggtgatgaggaccaattgccttctgtaggtcctggtcaagtatttaaagatttaattgaatcgaaagctataccacgagtaaatctgactgaagtatatcgtcaacaagatggttcaagcattatagaattagcacatcgaatgaagttgggtcagaaaattgatattacacagcgttttcatgatagaagttttattaactgtcaggcaaaccaaataccaacagttgttgagaaggtagttactagtgctgttaataaagggtatactatggctgatattcaagtgcttgcaccaatgtataaaggaaatgccggtattaaacgtttaaatcaagttttacaagatattttaaaccctaaaaagaaagacacacgagaaattgagtttggtgatgtagtctttagaaaaggtgacaaagtattacaacttgttaataggccaaatgataacatattcaatggtgacataggagttattgttggtattttttgggcgaaagaaaatgcccttaataaagatgtacttgttgtggattttgaaggtaatgaaattacatttacgaaacaagatatgatggaattaacacatgcttattgtacatcaatccataaatcacaaggttcagaatttcctattgttatcatgcctattgttaaacagtattttagaatgttacaaagaccgatattatatactggtttaactagagcgaaaacgagtttagttttacttggtgatccggaagcatttgatattggattgaaaacaaatggtcaagcgcgtttaacacaattatgtacattgttgaaaaattattttaattcagaagatgaagaaatgctggaaaacacagcaactaatgatacaggagcttcacaaacgacaatagatgatcaagtagaagcgccaatgtcatcgaatgatagtgaagaagttatgtctgattcaacaaaaacagatacaaatgtattaacggaagctacaatgtttaaaattgacccaatgattaatatgggagaaatcacgccgtatgactttatagaacgttga

SEQ ID NO: 405873 - DNA, 2634 bp, Staphylococcus aureus
atgatgaaaaagttaaaagcgagtgaaattagacaaaaatatctagatttctttgttgaaaaaggacatatggttgaaccttctgcaccattagtgccaattgatgatgatacattattatggattaattcaggtgtagcaacattaaagaaatattttgatggacgtgaaacacctaaaaagccaagaattgtaaactctcaaaaagctattcgtacaaatgatattgaaaatgttggtttcacagcgcgtcaccatacattctttgaaatgttaggtaacttctcaattggtgattattttaaacaagaagcgattgaatttgcttgggaatttttaacgagtgataaatggatgggtatggagccagataaattgtacgttacgattcatccggaagatatggaagcatacaacatttggcataaagatattgggcttgaagaaagtcgtattattcgcattgaaggtaacttctgggatattggtgaagggccttcaggaccgaacactgagattttctatgatcgcggagaagcatatggacaagacgatccggcagaagaaatgtatccaggtggagaaaatgaacgctatcttgaagtatggaacttagtatttagtgaattcaatcataataaagatcatagttacacaccattacctaataaaaatattgatactggcatggggcttgagcgtatggcctcagtttctcaaaatgtacgtactaactatgaaacagatttatttatgcctataatgaatgaaatcgaaaaagtatcaggtaaacaatatttagtaaacaacgaacaagatgtggcatttaaagtaattgctgaccacattcgtacgattgcatttgcaatttctgatggtgcattacctgccaatgaaggtagagggtatgtattacgtcgattgttacgtcgtgccgttcgttttagtcaaacgttaggaatcaatgagccatttatgtacaaacttgttgatattgttgcagacattatggaaccatattatccaaatgttaaggaaaaagcagatttcattaagcgtgttataaagtctgaagaagaacgattccatgaaacattagaagatggtttagcgattttaaatgaattaattaaaaaagctaaagcgacaacaaatgaaattaatgggaaagatgcatttaaattgtatgatacgtatgggttcccaattgaattaactgaagaaatagcagtgcaagcaggattgaaagttgatatgacaacattcgagtcagaaatgcaacaacaacgtgatcgtgcacgtcaagcacgtcaaaattctcaatcaatgcaagttcaaagtgaagtattgaaaaatattacatctgcaagtacttttgttggttatgatactgcgacagctcaaacaacactaacacacttgatatacaatggtgaagaagtttcacaagttgaagcgggtgaaacagtatacttcatgttaacggaaacaccattttatgcaatcagtggtggacaagttgcggatacaggtattgtttataatgacaattttgaaattgctgttagtgaagtaaccaaagcaccaaatggtcaaaacttgcataaaggagtagtacaatttggccaagtaaatgttggcgctacagtgtctgctgaagtgaaccaaaatgatcgacgtgacattcaaaagaaccatagtgcaacacatttattacatgcagcgttgaaatcagtactgggtgatcatgttaaccaagctggttcactagtagaagcagatcgtttacgttttgatttctctcattttggtccaatgactaatgatgaaattgatcaagttgaacgcttagtaaatgaagaaatttggaaaggtattgacgttaacattcaagaaatggatattgcttcagctaaagaaatgggcgcaatggcattattcggtgaaaaatatggtgatgttgtgcgtgtagtaaatatggcaccattttcaattgaattatgtggtggtattcatgtccgcaatacttctgaaattggcttattcaaaatagtaagtgagtcaggtacaggagctggtgtgcgtcgtattgaagcattaacaggtaaagcagctttcttatatttagaagatattcaagagaaatttaatacgatgaaatcacagctgaaagtgaaatctgatgatcaagtagtcgataagttaacacaattacaagatgaagaaaaagcattattaaaacaattagagcaacgtgacaaagaaatcacatcacttaaaatgggtaatattgaagatcaagttgaagaaatcaatggctataaagtattggttactgaagtggatgtaccaaatgcgaaagcaattcgctcgacaatggacgattttaaatctaaactacaagatacaattatcattcttgcaagtaatgttgatgataaagtatcgatggttgcaactgtccctaaatctttaacaaataacgttaaagccggtgatcttatcaaacaaatggcaccaatcgttggtggtaaaggtggcggtcgtccagatatggctcaaggtggcggtacacaacctgaaaatatctcaaaatcattaagctttattaaagattacattaaaaatctataa

SEQ ID NO: 405874 - DNA, 261 bp, Staphylococcus aureus
atggaaaactttgataaaacaatgaaattcgactatgaagaacttccaacgcaagatgtaagagatgttttaaataatgtttatcgaacattagatgaacgaggatataatgccgtaaaccaaattgtaggttatttattatcaggtgaccctgcgtatattccacgccaaaatgaagcaagaaatcaaattcgtcatattgatagagatgttattatggaagagcttgtttcttactatttaaaagagcaaaataaataa

SEQ ID NO: 405875 - DNA, 429 bp, Staphylococcus aureus
atgttacaacataaaattttaggactcgatgtcggtagtagaacggtaggaattgcaattagtgatataatgggttggacggcacaaggattagacacactccgaatcaatgaagaaaataatgaattaggtattgaccaattagtagacattattaaaaaacataatgtgggtacagtcgtaataggactacctaaaaacatgaataattcaataggatttcgaggcgaagcttcgttaacatataaagaaaaattattagaagcttatccttctattgagattgtgatgtgggatgaaagattaagcacaatggctgctgaacgatcattattagaagcagatgtttcaagacaaaaaagaaaacaagtgattgataaaatggcagcggtatttattttacaaggctatttagattcactagattaa

SEQ ID NO: 405876 - DNA, 309 bp, Staphylococcus aureus
atgactgaacataatcatgattcacaactagaaattaataacgaagaagaattattaactttattcgatgaagagggaaatgaagttttataccgaaaagttttagaattttatcatcctgaattcaaaaaagagtatgttatcttagctgaagaaggtgctcaatcagatgaagacgatatgattgagcttgtaccaatgatcaatgaaccagatgagtcaggtgacggtggtaagttagtaccaatcgaaactgatgaagaatgggacatgattgaagaagttgtaaatactgaaatggaagaataa

SEQ ID NO: 405877 - DNA, 639 bp, Staphylococcus aureus
atggatgacctaaataaaaaatatttaatagatttacatcaacatcaaaatagttcaatcgaagttttgcgtgaatttgccgaggtaaatgaagtgccaattgtagatcgtttaacattagatttaattaagcaattaattcgtatgaataatgttaaaaatattttagaaattggtacagcaatcggctatagttctatgcaattcgcttctatatctgatgacattcatgtcacaacgatagagcgtaatgaaacgatgattcaatatgctaaacaaaatttagctacttatcattttgaaaaccaggttcgaattattgaaggtaatgctttagagcaatttgaaaatgtaaatgacaaagtttatgatatgatatttattgatgcagcaaaagcgcaatcaaagaaattttttgaaatatatacaccacttttaaagcaccaaggtctcgtaattacagataatgttttatatcacggttttgtatcggatattgggattgttagatcgagaaatgtaagacaaatggttaaaaaggttcaagattataatgagtggttaataaagcaaccaggatatacaacgaattttttaaatatagacgatggattagcgatttcaattaaaggagaatga

SEQ ID NO: 405878 - DNA, 924 bp, Staphylococcus aureus
atgacagaattacttgtcacacccaagtcattaagccatatggaaacacttattgatttaggtgcagatgcttttgtaattggcgagcaaaagtttggtttaagacttccaggggaattcaatagacaacaaatgacagaggctgtcgcattagctcacaaaaacgataaaaaagtatatgcggcagtgaatggattatttcataattatcatttagatgctgtagaagattatattaattttttacatgaaatacgagttgacagaattattttcggggatccagcagtagtaatgtatgtgaaggcgcaagaaaatccaataccacttcattggaatgcagagacgttagtaactaatcattttcaatgtaattactggggtaaaagaggcgcatcaagagctgtcttagcacgtgagctgaatttggatgaaattattaatataaaagaaaattcaaatgtggaaattgaggtgcaagttcaaggaatgacttgtatgtttcaatcaaagcgtatgctactaggcaattattatacgttccaagatcgccaaatgaaaattgaacgtcgcaatgatgaacaatctttattactttatgatgaagaaagacaaaataattacccagtttacgaagattacaatggtacgcacattatgtcaccaaacgacatttgtttaattgaagaattagcaccattttttgaggcgggtatagattcatttaaaatcgatggtattctacaaacggaagaatatattaatgtggtaacggaacagtatcgtcaagcgatagatttgtacaatgaagatcctgaaatctatgaagatgagaaatttatgttgatggatccaattgaagaaattcaacctgatcatcgaccatttgacgaaggtttcttatataaacaaacagtatattaa

SEQ ID NO: 405879 - DNA, 1269 bp, Staphylococcus aureus
atgaagacaatagaagagattaaatcaactcctaaaacagttatgaagaaaccagaattattagcacctgctggaaacttagaaaagttaaaaatagcagtacattatggcgctgatgccgtatttttaggtggtcaagaatatggattacgttcaaatgctgataatttcacgatggaagaaatagctgaaggtgttgaatttgcgaaccgttacggtgccaaaatttatgttacgacaaatattattgcacatgatgagaatattgaaggtctagaatcatatttgcgtaatttggaaaagactggtgcgacaggtatcattgttgcagatcctttaattatcgaaacatgtaaagaagttgcgccaaaacttgaaattcatttatctactcaacaatcactttctaattacaaagctgtagaatattggaaagaagaaggattggatcgtgttgtattagcacgtgagaccggcgcgatggaaatgcgtgaaatgaaggaaaaagtagatattgaaatcgaagcatttattcatggtgctatgtgtatcgcctattcaggtagatgtacattaagtaatcatatgactgcaagggattccaacagaggcggttgctgtcaaagttgccgttgggattatgaattattagaagttgatgataatggtgaacttgatgttttttataatcaaggtgaagttacaccgtttgcgatgagtcctaaagatttaaaattaatcgaatcaattcctcaaatgatggatattggtgtggactcattaaaaattgaaggacgtatgaagtcaattcattatattgcaacagttgtctcagtatatcgtaaagtcattgatgcgtatgcggcagatcctgacaactttaagattaatccggaatggttaatagagttagataaatgtgcaaatagagacactgcaccagcattctttgagggaacacctggttatgaagaacagatgtttggtcaacaacaatctaaaaaatcaccatttgatttttgtggtttggtattagactataatgaagatacaaaaattgcgactattcaacaacgaaataactttaaaccaggtcaagaaatagaattctttggtccagaaattgaaacatttacacaagtagtagaagcaatttatgatgaagaaggtaacagcttagacgcggcgcgccatccattacaaatcgttcaaattaaagtggatcgcccgatatatccaaacaacatgatgagaaaggaaattggctaa

SEQ ID NO: 405880 - DNA, 624 bp, Staphylococcus aureus
atgaaagctactacaatcattggcatagctggtggatctggctcaggaaaaacaactgtaactaacgaaattatgaaaaacttagaaggtcatagtgtcgctttacttgctcaagattactattataaagatcaaaagcacttgactttcgacgagcgcctagaaaccaattatgaccatccatttgcattcgataatgatttattaattgaaaatcttaaagacttgaaaaatggtaaagcagtagaagtaccgacatatgattatgctagtcatacaagaagtgacattaccattgattttaaacctaaagatgttattatcgtagaaggcattttcgctttagaaaataaggtattacgtgatatgatggatgttaaaatatatgttgatacagatgcagacttgagaatattacgccgtttaacacgagatactaaagagcgtgggcgttcaatggactctgttatcaatcaatatttaagtgttgttagacctatgcatgaccaatttattgaaccgactaagaaatatgctgatataattattcctgaaggtgggagcaataaagttgcaatagatattatgacaacaaaaattcagtctttagttagcaagcaatag

SEQ ID NO: 405881 - DNA, 477 bp, Staphylococcus aureus
atggaaaatcaaaagcaatatccaatgactcaagaaggttttgaaaaattagagcgtgaacttgaagaattaaaaacagttaagcgtcctgaagttgtagagaaaattaaagttgcacgttcatttggtgacttatcagagaactctgagtatgatgcagcaaaagatgaacaaggattcatcgaacaagatattcaaagaattgagcatatgttaagaaatgcattaatcattgaagatactggagataacaacgttgttaaaattggtaaaacagtaacgtttgtagaattaccaggtgatgaagaggaaagttatcaaatcgttggttcagctgaatcagatgcatttaatggtaagatttcaaatgaatcaccaatggctaaagcgttaattggtaaaggtttagatgatgaagttcgtgttccactacctaatggtggcgaaatgaacgtaaaaattgttaatatccaataa

SEQ ID NO: 405882 - DNA, 735 bp, Staphylococcus aureus
gtggatgtaagatttattaacgagcagacaattatgatttattttgaaaataaaatatccgaagagacatatcgtaatgtcacagcaatggtacggtggatacgagaaaaagaaatattagaaattcaagatattgtcccttcgtatcgagcagttctaatatattttgatgaacaagctataacatcttctaaattaattgaaaatttagaacttaacaaatttaatgaaaaaaatgttcatgctgtgaatcaaaccaatcgtattattaaaatacctgttcaatatggtggtacatatggaccagatattgaagaagtagcaaagcataatcgaataactgttgagcaagttattgaaaaacatacaagtaaaccttatttaatatatatgctaggatttatgccaggatttccatacttaggcggacttgatgaacaactacatacacctagacgtaatcagccaaggttaaaaattcatgcaggttctgtaggtattgcgaataatcaaacaggactatatccatcagattctcctggcggatggcaaattattggacgcacaccgttaaaagtatttagcagcgagcgtgaaccaatgtcaatgtacgaagcaggagaatggatacaattttatgcaatagatgaacagaaatttatacaaatcgaaagagatatatcagatggcaactttaatgttgatgactgggtggtgattgaaaatgtcaattaa

SEQ ID NO: 405883 - DNA, 1011 bp, Staphylococcus aureus
atgtcaattaagattttacaaccaggtctcttttcaacggtacaagatctaggaagaataggttatgaacatattggattttcaggcgcaggtgccatggatcaatttagttttaaggttgcgcagtcattaattaacaatgatggtccagcgattgaatatactttgattggtcctaccattcaatttaatacgcaaaatacatttgttataaccggtggtagtattaatgcttcgctaaataataaaactatatcaatgaattctgtcatattagctgagaaaggtgacattttaaaaataggtgctataaccaaaggtgcacgcggttatcttacttttggtcattctatcaacgtaccttctattgctgaaagttatgcaacacatacccgaagcagtataggaggattcaaaggtagaaagttattagctgatgatgtaataacagtgaaaataaataatgactttaaagaaaacattggaaagacgattcatttacaggacgatttattgccagaaaataatattatacacattcttcaaggacctcaattcgaggcattttctgaagaggctagagcgaaaattgtaaatcatccatatttaattactgaacaatcagaccgtatgggctatcgtttggaaggtgacagcgttgcaccaattaatcaagcagatatcatttctgaaccggttgctcttggtagtgttcaggtaccaaatgatggtcaacctattattctgcttaatgataaacaaacgataggtggttataccaaaattgcaactgtatgcaaatttgatctgccaaagttagcacagatgaaaccacaagatacaattcaatttaaatggatatcattccaagaagctgtagataagaatcgggaacaaatgtctctgtttaatgaaattcttaagagtcatcaaaagactccaatttttgatacatctagcttgcgacatacttcgaaaaaattagcaacaattttaaaaggggatttgtaa

SEQ ID NO: 405884 - DNA, 450 bp, Staphylococcus aureus
atgaatattgaaaaaatcgaacaaataatcaaattagtgaaggaaaatgatgttaagaaatttaaatataaaaattttgaagatgaaatagaaattgacttcactgactcgaatcatttggctgcacacagtaatcaatcaaatcaaagtatgaacaataatgatttgacagcttcaaaagcgaatgataactccgatgtttcgacaaatgattatcatgacattaaatcaccaatgataggtacattctttttacaagatagtaaagaattaactgaaccaattgtgaatgtcggtgacaaagttaacaagggagatattataggatatgttgaagcgatgaaagtattaaacgaggtaacaacagatgttgctggagaaattactgaaatagtagctgatcatggcacaaatgttgaatacgaccaagttttggtacgtattaagtaa

SEQ ID NO: 405885 - DNA, 1362 bp, Staphylococcus aureus
atgcttcgttgtttaattgcgaacagaggtgaaattgctgtaaggattataagagcttgcagagaatatgggattgaaactgtagcagtttatgcaaaaggggacgagcaaagcttgcatgtacatttagcagatcaagctatatgtattggggaagctaatgctttagatagttatttaaatattgaccgcatcatatctgctgcacaaatcactggtgctaatgcaattcacccaggatatggctttttatcagaatcaacaaaatttgctcaaaccgttgaggaacaaggcatagcgtttatagggcctactaaaaaaacgatggaaatgatgggggataaaataacagcaagacaaacagttcatcatgcaggtgttcctgtgattccaggatcaaatggtgctgtgaatcatgtgtctgaaattgagaatcttgccaaagacatcggttatccagttgttatcaaagctgccagtggcggtggtggtaaaggtatacgtattgtaaagaaagctgaagatttagaaaaggcatttaaagaagctaaaagtgaaggaaaaaaatactttgatgatgatcgtgtttatgttgaggcttttatacctgttgcaaaacatgttgaagttcaagttatgggagatgggcaggataattatgtacatttaggggaacgtgattgttctgtacaacgtaaaaatcaaaaattaatcgaagaatctccttgtgcagcattaactgaagaaagacgacaacaaatatgtaacgatgctgttaaagttgcacgtgcagcaaattatagaagtgcaggaacgattgaatttttagtaactgataccgcacattactttattgaaatgaatgctcgaatacaagttgaacatactgttacagagatgcgagcagaacgtgatttggttgcagcacaactgtatttattggaacataatcatttacctttttcacaaagcgatattcaatttaatggtcatgtgatagaagcgagaataaatgccgaaaatcctgaaaagaaatttcaaccaacaccaggtaaagtgacagcgttacatttacctcaaggctttaatgtgcgagtcgattctttactatatcacggttatcaagtttcaccatattatgattctttagtagctaaagtaattgtaaaatctcatgatagagcttcagcaattgataagttgaaagtcaccttagatgaaatggtgatagatggattttctacaactgccgattttttatatgcagttttaaattatccactatatcgtgatggagatgcaaaagatgttgatattaaatttttagaaaaacatcaaattgttaaaggggtggaattataa

SEQ ID NO: 405886 - DNA, 753 bp, Staphylococcus aureus
atgcgagttgatttgaattgtgatttaggcgaagcatttggaaattattcctttggtggtgatcatcaaattattccgttaattacaagtgcgaatgttgcttgtggttttcacgctggtgatgaaaatgtaatgaatgaaacggtaaaacttgccaaagcacataatgttgcagtaggtgcacatcctggtttacctgatttgaaaggctttggcagacgaaatatagatatctctaacgacgagatttataatttgatgatttatcaattaggtgcattacaagggttttgtcgcattcatcaagttaaaattaatcatgttaaaccgcatggtgcattgtatcagatgggtgcaaaagacagagaaatagcaaacgttatagcacaagctgtttatgactttgatccatcactagtgttagtaggattagcaaattcatatctaatttcagaagcaaagaatgtcggattaattacagcttctgaagtgtttgctgatagacgatacgaagatgatgggcagctcgttagtagaaaagaaagtgatgctgtgattactgatactgacgaagcacttaagcaggttttaaagatggtgaaggaaaataaagttatttcaaaaaacaataaggaagtaacgttacaagcagatacaatttgtgtgcatggtgatggagaacatgcattattatttgtttcgaaaattagagaaattttaatgaaagaaggcattgatattcaatccttatag

SEQ ID NO: 405887 - DNA, 1230 bp, Staphylococcus aureus
atggggagaaatttaaagcttaaaaaagaaagtgactttgaattcacaaaaaatcataaaaggttattattaggttctgtatttttgatggcaacttctgcaattgggccagcatttttaacgcaaacagcagtatttacatcacaattttttgcaagtttcgcatttgccatattactgtctatcatcattgacattggtgcacaaattaatatatggcgcatattagttgtaactggtttaagaggtcaagaaatatcaaataaagttgttcctgggcttggtactgttatctcaatattgattgcatttggtggtctagcttttaatattggtaatattgctggtgccggtttaggtttaaatgcaatttttggattagatgtaaaatggggcgcagctattactgcaatctttgcaatattaatctttgtaagtaaaagtggccaaaaaattatggacgttgtttcaatgattcttggtattgtgatgattttagttgtggcatatgtgatgtttgtttctaatccaccttatggtgatgcttttgtgcatacatttgcgccagaacatccaatgaaattagtcttgcccatcattacgttagttggtggaactgtaggtggttatattacctttgcaggtgcacatcgtatattagactctggcattaaaggtaagcaatatttaccatttgtaaatcaatcagcaattgctggtattttaactacaggtattatgagaacgttactattcctagcggtattaggagttgttgtaacaggtgtgacactaagttctgaaaatccaccagcgtcagtttttgaacacgcaattggaccaattggaaagaatatttttggtattgtgttatttgctgcagctatgtcatcagtaattggctcagcatacacaagcgcaacatttttaaaaacacttcataaatcacttaacgaaagaagtaatttaattgtgattgtgtttatcgttatttcaacaatgattttcttatttattggaaaaccaatcagccttttaattatagcaggcgcgataaatggatggattttacctattacgttaggtgcaattttgattgcaagtaaaaagaaatcaattgttggtgattataaacacccaaattggatgttcatctttggtatcgttgcagtacttgttacaatattgacaggtatattctcattcaaagaagtacttcagttattttaa

SEQ ID NO: 405888 - DNA, 1221 bp, Staphylococcus aureus
atgggttacagaactttaaaaagtatttttcatgaacacaatgaaagtaaaatgaaggaagagtatattaaaagatttaattctttagcttctttcaatactaatattaatatcatacctatggaaaatggaaaaaaagttaatgatttggaatatcctctattctttatggtgactaaaaatctatcaaaaaaacaagaattaatatcaattaatagtagaaaaattgatagagcacttaattctttaccatatgcagctagagaacaatattttaatgatttattaatcgatgaattacaaagtactaatgaaattgaaaatgtatttagtactaaacaagagattgcacatgcgttaaataaccaagcatcagaatttcttaagttcagaggcctcgtggatcaatataaagagatagaacttaataaaaaaattaaagttgataatgtaagagacattagagcgatttatgataaattagtttcaaatgaaattaacgaacaagataagttagatggagagctatttcgtaaaaattttgtcggtgtgcatgatgggtcaacgaataaatatatacatgttgggttacaacctgaaaccaaaattgttgaatttataggtgaaatgctaacatttttaaaatattttgatgcgcctcagccgttcaaaatcatggctagtcattatctgtttgaatatatacatcctttttatgatggcaatggtagagttggaagatttataattgccaagctcttgagtgattattatgataattatactgctttgacattttcatatgttataaatagaaataaatcgaaatattacaaggcgtttatgactgcttcaaatcatttgaattgtggtgatttgacggaatttattgacacaatgcttgagctattgatagcaggacaagaaagaatacttgatgagttaataccaaaaatggatgcgactgaaaaattaacgctttatttaactagtcattataaacagatagattatgaatttttgtatctcctttcaatggataaattgtttggaaataaaagaaatagattaacattaattgatttagaaaacatattgggagtaggaagagtaaaaattaataatacaattaaaaaatatgataactacttagttaaaattaaaagtagaccaacaatttatgagataagtgatgaatttctaaattcgattataaaataa

SEQ ID NO: 405889 - DNA, 753 bp, Staphylococcus aureus
ttgggggagtttgaagttaaatatttaacaggatttattttaatattattgttagaaggaatttttacaaattcagcgagtgcaatcgaatattcagacttacatcataaaagtaagtttgattcaaagcgtctaagtaatgctaagatgtcattcatcaatccaactcagcttgaaaataaaaacacaaacgatagactgttgaagcatgatttgttatttcatgacatgttcgtaaatgatgattggaaaaaggattttaaagttgaatttgaaaatgaggcactttcaaagaaatttataaataaggatatcgatatatttgctggaaattatggatacggatgtcatgggggagcaaccaataaaacgcaatgtagttatggtggtgttactttaagtgacaataataaatacgatgattataagaatataccttgtaatttatggattgacggacatcaaacagaaatagaactaactgcagtaaaaacgaaaaagaaaattgttactattcaagaattagaggttcaattaagaaattatttgaatgagaagtataagttgtacgaacaaggtggcgacattgttaaagggtatgttaaatattataatgatgatgaacaaaatgtagaatatgatttttataatttaaatggtgagtatggtcgtgaggtattaaaaatgtatgctgataataaaactatcaatagtgacaaattgcatttagatatctatttattcaaatcataa

SEQ ID NO: 405890 - DNA, 270 bp, Staphylococcus aureus
atggctgaaaataatcaaaatagtctcgtaacaaagatagctacatacggcagttttattgcaattgcgtcgtttgtcattttatttataagtatatttttaaagttttcatttaatatcgagtttacagcaacaattatgaacatatgtcgctacactctaattctaggatttatacttatgtccttacctgatgttgttgataaaaacatcaagaaaattatattcgatgcatttattatcatcgtctttatcttctttttactatag

SEQ ID NO: 405891 - DNA, 687 bp, Staphylococcus aureus
atgattggtataattggtgccatggaagaagaagtaacaatattaaaaaataaattaacacaattaagcgaaatttcagttgcacatgttaaattttatactggcattttaaaagatagagaagtagtgattacccaaagtggcattggaaaagttaatgctgcaatttctacgacattattaattaataagtttaaaccggacgtcattattaatacaggttctgctggagctttagatgaaagtttaaatgtaggtgacgttcttataagtgatgatgtaaaatatcatgatgcagacgcaacagcatttggttatgaatatggacaaataccacagatgccggtagcatttcaatcaagtaaacctttaatagaaaaagtatctcaagttgtacaacaacaacaattaacagctaaagtaggcttaattgtaagtggtgatagctttatcggtagtgttgaacaacgccaaaaaattaaaaaagcatttccaaatgcgatggcggttgaaatggaagcaactgcaattgcacaaacatgttatcaatttaatgtaccatttgttgtagttcgtgcagtttcagacttagcaaatggagaagcggaaatgagcttcgaagcatttttagaaaaagcagctgtatcatcaagtcaaactgttgaagcattagtgtctcaattataa

SEQ ID NO: 405892 - DNA, 528 bp, Staphylococcus aureus
atgggtttagttcgcaagttttttatgccgaattcatatgttcaatcaatatttcaaattgatttagacaagttagtggacaaaggcgttaaaggtattattacagatttagataatacgctagtaggttgggatgttaaagaacctacagaacgtgttaaagcatggtttaaggaagctaatgaaaaaggaatcactattacaatcgtgtctaataataatgagtctcgtgttgctagttttagtcagcatttagacatcgattttatttttaaagcgagaaagccaatggggaaagcgtttgataaagcaataactaagatgaatatcagaccagatcaaactgttgttataggtgaccaaatgcttactgatgtatttggtggtaatcgtcgaggtctatatacaattatggttgttccagttaaacgaactgatggctttattactaagtttaatagattaattgaaagacgattattacgtcatttcagtaaaaaaggttatatcacatgggaggaaaattga

SEQ ID NO: 405893 - DNA, 1101 bp, Staphylococcus aureus
ttgtctgacattttaaaatgtatcggttgtggtgcgccacttcaatctgaagataaaaataaacctggttttgtaccagagcataatatgtttcgtgatgacgtgatttgcagacgttgtttccgcttgaaaaattataacgaagttcaagatgtaggattagaaagtgaagactttttaaaattattatcaggacttgcggataaaaagggtattgtcgtcaatgtcgtggatgtatttgactttgaaggatcatttattaatgcagttaaacgtattgtcggaaacaaaaaaatcattttagcagcaaataaattggatttattgccgaaacaaattaataaacgtcgagttaaagaatggttaaaacgaacagcaagaaaatatggtttggaagctgacgatgtcgtattaatttcagctgaaaaaggctggggcatagacgacttattatcatcaattgcgaatattcgagaaaatgaagatgtgtatattgtagggacaacgaatgttgggaaatctacattgattaataaactgattgaagctagtgttggtgaaaaagatgtagtaacaacttcaagattccctggaacaactttagatatgatagatattcctttagatgaaacatcatttatgtatgatacaccaggtattattcaagatcaccaaatgacgcatttagttagtgaaaaagaattgaaaattattatgcctaagaaagaaataaaacaacgcgtatatcaattaaatgaggcgcagacattattcttcggcggtctagcgcgcatagattatgtatcaggtggtaaacgtccgttagtttgtttcttttctaatgacttgaatatacatcgtactaaaacggagaaggctaatgatttatggcgtaatcaacttggcgatttattaacgccacctggaaatccacaaaattttgatcttaatgaggtaaaggctgttagacttgaaacaggcaaagagaaacgcgatgttatgatctctggtctaggctttataactataggaccaggggctaaagtaatcgttcgtgttcctaaaaatgttgatgttgtattaagaaattctattttataa

SEQ ID NO: 405894 - DNA, 807 bp, Staphylococcus aureus
atgaaatttgcagttataggaaatcctatttcacattccttgtcgcccgttatgcatagagcaaattttaattctttaggattagatgatacttatgaagctttaaatattccaattgaagattttcatttaattaaagaaattatttcgaaaaaagaattagaaggctttaatatcacaattcctcataaagaacgtatcataccgtatttagattatgttgatgaacaagcgattaatgcaggtgcagttaacactgttttgataaaagatggcaagtggatagggtataatacagatggtattggttatgttaaaggattgcacagcgtttatccagatttagaaaatgcatacattttaattttgggcgcaggtggtgcaagtaaaggtattgcttatgaattagcaaaatttgtaaagcccaaattaactgttgcgaatagaacgatggctcgttttgaatcttggaatttaaatataaaccaaatttcattagcagatgctgaaaagtatttagctgaattcgatatcgttattaatacaacaccagcgggtatggctggaaataacgaaagtattattaatttaaagcatctttctcccaatactttaatgagtgatattgtttatataccgtataaaacacctattttagaggaagcagagcgcaagggaaaccatatttataatggcttagatatgtttgtttaccagggtgcggaaagctttaaaatttggactaataaagatgctgatattaattctatgaaaacagcagttttacaacaattaaaaggagaataa

SEQ ID NO: 405895 - DNA, 291 bp, Staphylococcus aureus
atgcttactggcaaacaaaaaagatacttaagaagtttagcacacaatattgatccgatttttcaaattggaaaaggcggtatcaacgaaaatatgattaaacaaatagatgatacgttagaaaacagagaattgattaaagtacatgtactacaaaataactttgatgataaaaaagaattagctgaaacattaagcgaagctactcatagtgaattagtgcaagtgattggatctatgatagtgatttatagagaatctaaagataataaagaaattgaattgccataa

SEQ ID NO: 405896 - DNA, 570 bp, Staphylococcus aureus
atgaaaaagatagtactttacggcggtcagtttaaccctatccatactgcacatatgatagtagctagcgaagtatttcatgaattacagccagatgaattttattttttacctagttttatgtctccattgaaaaagcaccatgattttatagacgttcagcacagattaacaatgatacagatgattatcgacgagcttggttttggagatatttgtgacgatgaaattaaacgtggtggtcaaagttatacctatgacacgatcaaggcattcaaggagcaacacaaagacagtgagttgtactttgttattgggacggatcagtataaccaactagagaaatggtatcaaattgaatacttaaaagaaatggttacttttgtagttgtaaatcgagacaaaaatagtcaaaatgttgaaaatgctatgattgcaattcagatacctagggtagatataagttcgacaatgattcgacaaagagttagtgaagggaaatctatccaagttcttgttcctaaatccgttgaaaactatattaagggggaaggattatatgaacattga

SEQ ID NO: 405897 - DNA, 585 bp, Staphylococcus aureus
atgaacattgaaaaagcaaaacggcttgcaaaagagaaactgccagagaaacgttataatcattctttaagagttgcagaaacagcgattaaattggcagaaatttatgatggagacactagtaaagtagaattagcaggtgtattacatgatttctgtaaatatgatgatttaggtaaaatgtatcaaattgttcgacaatacgaattaggtaatgatctactgagttatggtagtgaaatattgcatggccctgtgtgtgcagcaatcatggaacatgaatatggtatcaatgatgaggaagtattaatggctatcaaataccatactactggacgtcaacaaatgacaaaaactgaaaaactgatttttattgcagattacatcgaacctggaagaacaatcccaggagttgatgatattcgagatatggcatacaatcaaggtagtttagataagacaatttatgaaatttctaaacgcacagtactatttttaatacagaaagatattacggtatataataagacgattgactgtttaaattattataactatagtgacgaaagaataaaggatgattaa

SEQ ID NO: 405898 - DNA, 354 bp, Staphylococcus aureus
atgaattcacaagaattattagcaattgctgtggatgcaattgacaataaaaaaggcgaagatacgatttctttagaaatgaaaggtatcagcgatatgacagattattttgttgtaacgcacggaaataatgaacgacaagttcaagcgattgctagagcggtgaaagaagtagccaatgaacaaaatatagaagtaaaacgtatggaaggatacaatgaagcgcgttggatattaattgacttagctgatgttgtggtacatgttttccataaagacgaaagaaattattataatattgaaaagttatatcaagatgcaccattagaatcatatagtcaggttgcgtattaa

SEQ ID NO: 405899 - DNA, 717 bp, Staphylococcus aureus
atgtcgcaatatgcagaaatgagcctagtgtacgatcaattgactcaagatcaaccatatgaaaaatggtttgaaattgtaaaaaatcactgcaaagatgaatcaaatattttagatattggatgcggtactggtagtttaacagttcaattagaagctttaggtaatgttactggtatggatttaagtgttgatatgttgactgttgcagctcaaaaatcagcaaatgtaaattggcttgaaggagatatgacatcttttgatttgcaacaacaatttgatatcatcactattttttgtgactctctaaattatttgcaagatgaaactgcagtgattgaaacattcatcaatgtttatcatcatctgactgattcaggtgtatttatttttgatgtacatactgtttataaaatgatgactttgtttaataatcaaagttatattgatgataaaggggacatttttttagcatgggatgctgtgcaaggagatttacctttaagtgtttatcatgatatgacatttttcattcgacatgaagatgaaacatattcaagatttgatgagtctcattttcagagaacatttgatgaaaagacatatttgtcttggttagctcaagttggttttaaacatgttgaaacatttactgattttaatatagatgaacataatgaagatgcagaaagattgtttttcattgcgaaaaaataa

SEQ ID NO: 405900 - DNA, 678 bp, Staphylococcus aureus
ttgtatcaatttttattacgctataaagattttttaactcaatggaagttatatattctaagtgctgttgttttaattatggtattaattggttttatattctggagacaagatgattatacttcaagaaattttgaaaataaagatactgctctgaaacaaagcactagtgaaaatagtagtttgtccaaagtagaagatgtccaggtcaaagatggagataattccaaaaataagggtcctgtatatgtcgatgtaaaaggtgctgttaaacatcctaatgtttataaaatgacatctaaggatagagtagttgatttacttgataaagcacaattattggaggatgcagatgtaagtcaaattaatttgtctgaaaaattaacagatcaaaaaatgattttcatacctcataaaggacaaaagaatgttgaaccacaaattgaagtaaacagtgtgcacgaaaaaaatgggaacacaaataatactaaagtaaatttaaatacggcatctgtatcagaattgatgtctgttcctggagttgggcaagctaaagctaatgcaattgttgaatatcgcaaccaacaaggtgcatttcaagaaattgacgatttgaaaaaagtaaaaggttttggaagtaaaacttttgataaactgaaatcttatttcacgacataa

SEQ ID NO: 405901 - DNA, 432 bp, Staphylococcus aureus
atggcacaaagtcatttgctagcattacgttcaacttgtcaaagattatctgtaggtgcaacgattgttaaggataatcgtattattgctggtggttataatggctctgtagctggcgaggtgcattgtatagatgaaggatgtttaattgaagatggacattgtatcagaacgatacatgcagaaatgaatgctttattacaatgtgcaaaacaaggtgtatctactgaaggtgcaacaatctatgttactcattttccatgcctaaattgtacaaagtcaattattcaagcaggtataaagcgtatctactatgcagaagattatcataaccatgaatatgcaactaaattactcaaacaatctggtattgaatttaaaaaaattccattttcaccagaatatgttgctaaatatctgactaaaggttaa

SEQ ID NO: 405902 - DNA, 2202 bp, Staphylococcus aureus
ttgctgtttgtcgcgttatcaatgattgtaggagtgctttggaattctagcaaagtgctctctacatttcttttcattttacttttgtatattacttatcgtaaaaataaaatcgtttatgcccctatttctctctttttaatcattttctccgcatggtatttacattattcacaacaagcaatatttaattatatcaattatattgaacgtaattctcagtttaatgagcgtgctcaagtaatccaaattcaacgtcaaggtagtgacacatataaaggtaggttgagtttaaaaaatgaaatatatcctttctttttaacagataaaaagaattttgatttaaagaaaattgaaagtcgtaattgtattgttaaaggacaattcaaagttaatgacaataagtttgtaactcttaaattacaaagtatagttgtacaaagctgcctagaatcgaaccggtctaatttaattgagaaacataaacagtttataatgaatcgaatttatgattcgggtattaagtttccggatcgtattatggcattgattactggtgacgtaaaagaagttaatgagcaatttaaggaacgtgttaaagagataggtatatatcatttgctggcagttagtggctcgcatatagctgcaattgtatttttaatttaccaacctttaaaacgattaaatttacctttatttgtcattaaaggaattacaatcattgtattagctttatttgctcaatacacaaattatgcacctagtgctgtaagagctataataatgacaactcttgtactggttattactaagcaaattaaaataaagagtattcagctattagcatttgcatttataattatgtttattttaaatccactagttgtttatgatattggatttcaattttcattcatcatttcattttttattatgctactttttccttttttacagcaattgtcaaagttacaatcattattcataattacgtttattgcacaattagcttcatttatcgttgccattccaagctttcatcaacttcaatgggtgggatttttatctaatttgatttttgtaccgtactattcgattatattgtttccgctatctattttattctttattacaagtcattttattgtgggattaacgccgctaaattacttggttgacctaagttttaattttcatgactggttactagacctattcacaagaatcaagcaatcacatttttctgttcccaagtttaatgattggatatttatagtatttataatttctgtttattacatattttggttattggctaaacgtaaatatatattggttacgttttggactataattattctgacattattaataacgtttccaacaaattcacatcacaaaattacaatgttaaatgtggggcagggagacagtattttatatgaaggcggtaagaaccaaaatgtcttgattgatacaggtgggaaagtgattgatgatactaaacaacctagttattcaatttctaaatatcatattttaccaacgctaaatgaaagagggataaatgaattagagtatctaattttaacacatccacacaatgaccatattggtgaagtggaatatattattagtcatattaaaattaaacatatagtgatatacaataagggatatagtagtaatacattgatgttattatcgaaattaagccataagtacaacattaaacttatggatgtaagacaagttagtagttttaaacttggagatagtagttttctattttttgatagttttattccaaatagccgagataaaaatgagtattcgattattactatgattacatatcaaaataaaaaagttttattaatgggcgatgctagtaaaaataatgaatctttactactaaaaaaatataacttgccggagattgatattttaaaagtaggacatcatgggagcaagacaagtagttctaaagaatttatagagatgattaagcctaaaataagtttgatttcttctgggaagaacaatatgtatcatcttcctaatatagaagttgttaaacgattgcaaaggattcgcagtcgcatttacaatagtcaacaaaacggtcaagttacaattgacttagatgataatttaaaagttgattcaagctcttatggaaatgcaagtggtttatag

SEQ ID NO: 405903 - DNA, 975 bp, Staphylococcus aureus
atgagcgacaatattgtagctatttatggagatgtgcctgaattggttgaaaaacaaagtgcagaaatcatatcacaatttttgaaaagtgatagagatgactttaactttgtgaaatataatttatacgaaacagagattgcaccaattgttgaagaaacattaacattgcctttcttttcagataaaaaagcaattttggttaaaaatgcatatatatttacaggtgaaaaagcgccaaaagatatggctcataatgtagatcaattaatagaatttattgaaaaatatgatggcgaaaatttgattgtctttgagatatatcaaaataaacttgatgaaagaaaaaagttaactaaaactctaaaaaagcatgcaaggcttaaaaaaatagagcaaatgtctgaagaagaaataaaaaaatggattcaaagtaaattaaatgagaatttcaaagatatcaaaagagatgcattagatttatttattgagttgacaggtattaactttaatattgtctcacaagagatagaaaagttgattttatttttaggcgatagaccaacaattaataagcaggatgttaaccaaattattaatagaagtttagagcaaaatgtatttttactgactgaatacattcagaaaagaaagaaagaacaagcaattcatttagtaaaagatttaataactatgaaagaagaaccaattaaattacttgcactaattacaagtaattaccgattattttatcaatgtaagattctgagtcaaaaaggatatagtggacagcaaattgctaaaacaataggagtacatccatacagagtaaaattagcgttaggacaagtaagacattatcaacttgatgaattattgaatattatagatgcttgtgcggaaactgattataaacttaaatcatcatatatggataaacagttaatactggaattattcattctatctttataa

SEQ ID NO: 405904 - DNA, 252 bp, Staphylococcus aureus
atggcaaatatcaaatctgcaattaaacgtgtaaaaacaactgaaaaagctgaagcacgcaacatttcacaaaagagtgcaatgcgtacagcagttaaaaacgctaaaacagctgtttcaaataacgctgataataaaaatgaattagtaagcttagcagttaagttagtagacaaagctgctcaaagtaatttaatacattcaaacaaagctgaccgtattaaatcacaattaatgactgcaaataaataa

SEQ ID NO: 405905 - DNA, 1824 bp, Staphylococcus aureus
atggataatgagcaacgcttaaaaagaagagagaatataaggaatttctcgattatagcacatattgaccacggaaaatctacattggctgatagaattttagaaaataccaaatcagttgaaacaagagatatgcaagatcagttactagattcaatggatttagaaagagaacgtggtattacaatcaaattaaacgcagtacgtttaaagtacgaagctaaagatggaaatacttatacattccatttaatcgatacgcctggacacgtcgattttacatatgaagtgtcacgttctttggcagcttgtgagggcgcgattttagtagtagatgcggctcaaggtatcgaagcacaaacattagcaaatgtttatttagcattagataatgagttagagttattgcctgttattaacaaaattgatttacctgctgcagaacctgaacgcgtgaaacaagaaattgaagatatgataggtttagaccaagacgatgttgttttagcaagtgctaaatctaacattggaattgaagagatactagagaaaatagttgaagttgtgccagctccagatggtgacccagaagcaccactaaaagcgttaatatttgattctgagtatgatccatatagaggggtaatttcatcgataagaattgtggacggtgttgttaaagccggagataaaattcgaatgatggccactggtaaagagttcgaagtaacagaagttggaattaatacacctaagcagcttccagttgatgaattaacagttggtgatgttggttatattattgcaagtattaaaaatgttgatgattctagggttggtgacaccatcacattagctagtagacctgcatcagaaccattgcaaggttataagaaaatgaatccaatggtatattgcggactgttcccaatagataacaaaaattataatgatttaagagaagcattagaaaaattacaattgaatgatgcatcattagaatttgagcctgaatcgtcacaagcattaggttttggttatagaactggtttcttaggtatgttacacatggaaataattcaagaaagaattgaaagagaatttggtattgaattaattgcaactgcaccatctgtaatttatcaatgtgttttaagggacggttcagaagtgacggttgataacccagcacaaatgccagatcgtgataaaattgataaaatatttgagccatatgttcgtgcaactatgatggttccaaatgactatgtcggtgcagtaatggaattatgtcaacgtaaacgtggacaatttataaatatggactatttagatgatattcgtgtaaatattgtttatgaattacctttagctgaagttgtatttgatttcttcgatcaacttaaatctaatactaaaggatatgcatcatttgattatgaattcatcgaaaataaagaaagtaatttagtcaagatggatattttattaaatggtgataaagtggatgcgctaagcttcatagttcatagagattttgcatatgaacgtggtaaagcattagttgaaaaacttaaaacgttaattccaagacagcaatttgaagtacctgtacaggctgcaataggacaaaaaattgtagcgcgtacaaatattaaatcaatgggtaaaaacgttttagctaaatgttatggcggtgacataagccgtaaacgtaaattacttgaaaaacaaaaagcaggtaaagctaagatgaaagcagttggtaatgttgaaattccacaagatgctttcttggctgtattgaaaatggatgatgaataa

SEQ ID NO: 405906 - DNA, 1158 bp, Staphylococcus aureus
ttggataaaaagtctgagaagcggggcattaaaatgacggtacaaagtgcatatatacatattccattttgtgtaagaatatgtacatattgtgatttcaataaatattttatacagaatcaacctgtagatgagtacttagatgcactaatcacagaaatgtctacagcaaaatataggatcttaaagaccatgtatgtaggtggcggcacaccaacggccctttctattaatcagttggaaagattacttaaagcaatacgtgatacgtttacaatcacaggcgagtatacatttgaagcaaatcctgatgagttaactaaagagaaagtccaactattagagaaatatggagtaaaaaggatttcaatgggcgttcaaacattcaagccggagttattgtctgttttaggtagaacgcacaatactgaagatatttacacttcggtgttaaatgctaaaaacgcaggtattaaatcaatcagtttagatttaatgtatcatttaccgaaacagacgattgaagattttgaacaaagtttagatctagctttagatatggatattcaacatatttcgagttacggcttaatacttgaacctaaaacccaattttataatatgtatagaaaaggcttgctcaaacttcctaatgaggatttaggtgctgacatgtatcagttgctgatgtctaagatagaacaatctcctttccatcaatacgaaatatctaattttgcattagatggccatgaatcagaacataataaggtttactggtttaatgaggaatattatggatttggagcaggtgcaagtggttatgtagatggtgtgcgttatacgaatatcaatccagtgaatcattatatcaaagctataaataaagaaagtaaagcaattttagtatcaaataaaccttctttgactgagagaatggaagaagaaatgtttcttgggttgcgtttaaatgaaggtgtgagtagtagtaggttcaaaaagaagtttgaccaatctattgaaagtgtctttggtcaaacaataaataatttaaaagagaaggaattaattgtagaaaagaacgatgtgattgcacttacaaatagagggaaagtcataggtaatgaggtttttgaagctttcctaataaatgattaa

SEQ ID NO: 405907 - DNA, 978 bp, Staphylococcus aureus
atgattacagataggcaattgagtatattaaacgcaattgttgaggattatgttgattttggacaacccgttggttctaaaacactaattgagcgacataacttgaatgttagtcctgctacaattagaaatgagatgaaacagcttgaagatttaaactatatcgagaagacacatagttcttcagggcgttcgccatcacaattaggttttaggtattatgtcaatcgtttacttgaacaaacatctcatcaaaaaacaaataaattaagacgattaaatcaattgttagttgagaatcaatatgatgtatcatcagcattgacatattttgcagatgaattatcaaatatatctcaatatacaactttagttgttcatcctaatcataaacaagatattatcaataatgtacacttgattcgtgctaatcctaatttagttataatggttatcgtattttcatcaggtcatgttgagcatgtacatcttgcttcagacataccgtttaataatgacaaactaaatacaatatcaaattttgttacaaacaaactaactgagtttaatcagaatttacaagatgatattgtctcttttgttcaatcagagcaggaagaaatttttatcaataaattgttaaatacgatgaataatcatatttctaatcaaagtaatagcatttatatgggtggaaaggttaaacttattgatgcattgaatgaaagtaatgtatcttcaattcagcccattctacaatatatagaatcaaatagaattgcagaattattacaagatatatcttcaccaaatattaatgtaaaaattggtaatgaaattgatgacagcttaagtgatatttcaattgtaacaagtcaatatcattttgatgaaacgttaaaaggtcaaatcgctgtgattggacctacagctatgcattatcaaaatgtcattcaattattaaatagaatttggtaa

SEQ ID NO: 405908 - DNA, 627 bp, Staphylococcus aureus
atgacaaataaagacgaatcagttgaaaaaaacactgaatcaacagttgaagaaacaaacgtcaaacaaaatattgatgattcagttgaacaagctgaagaaagtaaaggtcatttacaagatgaagcaatagaagaaacgtctgacgagaatgttattgaagaaatagatccaaaagatcaaaaaattaatgaacttcaacaattagcagatgaaaacgaagagaaatatttaaggctctacgctgagtttgaaaattataagcgtagaattcaaaaagaaaatgaaataaacaaaacatatcaagcacaacgtgtgttaacagatattttaccagcaatagacaatatagaacgtgcacttcaaattgaaggtgatgatgagacttttaaatctcttcaaaaaggtgtacaaatggtgcatgaaagtttgattaacgcactaaaagataatggtcttgaagttattaaaactgaaggtgaagcatttgatccaaatattcaccaagctgtagttcaagatgataaccctgattttgaatctggcgaaatcactcaagaactacaaaaaggatacaagcttaaagatagagtattaagaccatcaatggtcaaagtaaaccaataa

SEQ ID NO: 405909 - DNA, 1833 bp, Staphylococcus aureus
atgagtaaaattattggtatagacttaggtacaacaaattcatgtgtaacagtattagaaggcgatgagccaaaagtaattcaaaaccctgaaggttcacgtacaacaccatctgttgtagctttcaaaaatggagaaactcaagttggtgaagtagcaaaacgtcaagctattacaaacccaaacactgttcaatctattaaacgtcatatgggtactgattataaagtagatattgaaggtaaatcatacacaccacaagaaatctcagctatgattttacaaaacttaaaaaatacagctgaaagctatttaggtgagaaagttgacaaagctgtaattacagtacctgcatactttaacgatgctgaacgtcaagcaactaaagatgctggtaaaattgctggtttagaagttgagcgtatcattaatgaaccaacagctgcagcattagcatatggtttagacaaaactgataaagatgaaaaagttcttgtttttgacttaggtggcggtacatttgacgtatctatcctagaattaggtgacggtgtattcgaagtactatcaacagccggtgacaacaaacttggcggtgatgattttgaccaagtaattattgactacctagttgcagaattcaaaaaagaaaatggcgtagacttatctcaagataaaatggcattacaacgtttgaaagatgctgctgaaaaagctaaaaaagacttatcaggtgtatcacaaactcaaatctcattaccatttatctcagctggtgaaaacggtccattacacttagaagtaaacttaactcgttctaaatttgaagaattatcagattcattaattagaagaacaatggaacctacacgccaagcaatgaaagacgctggcttaacaaactcagatatcgatgaagttatcttagttggtggatcaactcgtattccagcagtacaagaagctgtcaaaaaagaaatcggtaaagagcctaacaaaggagtaaacccggacgaagtagtggcaatgggagctgcaatccaaggtggcgttatcacaggtgacgttaaagacgtagtattattagacgtaacaccactatctttaggtattgaaattttaggtggacgtatgaatacgttaattgaacgtaacactacgattcctacatctaaatctcaaatctattcaacagcagtagataatcaaccatcagtagatgtacacgtattacaaggtgaacgtccaatggctgcggataataaaacacttggtagattccaattgactgatattccaccagctgaacgtggtaaacctcaaattgaagtaacgtttgatatcgataaaaacggtattgtaaatgtaactgcaaaagacttaggtacaaataaagaacaaagaattacaattcaatcaagttcttcattatcagacgaagaaatcgaccgtatggtaaaagatgctgaagttaacgctgaagcagataaaaaacgtcgtgaagaagtagacttaagaaacgaagctgacagtctagtattccaagttgaaaaaactttaactgatttaggcgaaaatatcggtgaagaagataaaaaatctgctgaagagaaaaaagacgctcttaaaactgctttagaaggtcaagatatagaagatattaaatctaaaaaagaagaacttgaaaaagtgattcaagaattatcagcaaaagtatatgagcaagcggctcaacagcaacaacaagcacaaggtgctaatgctggtcaaaacaatgatagtactgtagaagatgctgaatttaaagaagtaaaagacgacgacaaaaaataa

SEQ ID NO: 405910 - DNA, 1140 bp, Staphylococcus aureus
gtggccaaaagagattattatgaagttttaggcattagtaaggatgcttcaaaagatgaaatcaaaaaagcgtatcgaaagctttcgaaaaaatatcatccagatattaacaaagaagaaggtgcagatgaaaagtttaaagaaatttctgaagcctatgaagttttaagtgatgataataaacgcgcaagctatgatcaatttggacatgatggtccacaaggttttggtggacaaggattcaatggctctgactttggcggttttagtggcttcggtggcggcggttttgaagatatctttagctctttcttcggtggcggcagacaaagagatccaaatgcaccgcaaaaaggtgatgatcttcagtatacaatgacattaacatttgaagaagcggtatttggtacaacaaaagaaatttcaatccgtaaagatgtaacatgcgaaacatgtcatggtgatggtgcaaagcctggaacaagtaaaaagacttgtagttactgtaatggcgctggtcatgtagctgtagaacaaaacacaattttaggtagagttcgtactgaacaagtttgtcctaaatgtaatggaagtggtcaagaatttgaagaagcttgtccaacatgtcacggaaaaggtactgaaaataaaacagttaaattagaagtgaaagtacctgaaggtgtcgacaatgaacaacaaattagattagctggtgaaggctctccaggcgtgaatggaggacctgctggtgatttatacgtagtatttagagttaaaccatctgaaacatttaaacgtgatggtgatgatatttattacaaattaaatgttagcttcccacaagcagctttaggcgatgaaataaaaataccaacattaaataatgaagttatgttaacaatccctgctggtacacaaacaggtaagcaattccgcttaaaagaaaagggtataaaaaatgttcatggctatggatacggagatttatatgttgatattaaagtagtaacgcctactaaattaacagatagacaaaaagaactaatgaaagaatttgcccaattaaatggtgaagaaattaatgaacaaccttcgaattttaaagatagagcaaaaagattctttaagggagaataa

SEQ ID NO: 405911 - DNA, 939 bp, Staphylococcus aureus
atgaactggacagagctttcaattattattaatcatgaagcagtagaattggctaccaatatacttgaaaatcatggatcaaatggtgtcgtgatagaagattcagatgatttaattaaccaaccagaagataaatacggtgaaatttacgctttgaaaaaagaggattatccagataagggagtaagattgaaagcctattttaatgaaatgacttatgatgataagttgcgacagcaaattaaagatgagttattaaatttagatgaacttgatcaacataacgttcaattcagtgagcaaattattgcagagacggattgggaaaatgaatggaaaaactatttccatccattccgagcgtcgaagaagttcacaatagttcctagttgggaaacatatgctaaagaagcggatgaagagctttgcattgagctcgacccaggtatggcttttggaacaggtgatcatccgactacaagtatgtgtttgaaggcaatagaaacatatgtattgccacagcattcagtaattgatgttggtactggctcaggtatattaagtattgcaagtcatctaatcggtgtaaaacgtattaaagcgttggatattgatgaaatggcagtgagtgtagctaaagaaaacttcagaagaaatcattgtgaaacgttaattgaagctgttccaggtaacttattgaaagacgaaacagaaaaatttgatattgtaatagcaaatattttagcgcatattattgatgaaatgattgaagatgcttataatactctaaatgaaggcggttattttattacttctggtattataaaagagaagtatgaaggtatacagtcacatatggagcgtgtaggttttaaaattatttcagaacaacatgacaacggttgggtttgtcttgttggccagaaagtgagtgaataa

SEQ ID NO: 405912 - DNA, 753 bp, Staphylococcus aureus
gtgcaacgttatttcatagaccaaaacgctgatgtaagtcagcgtttttttattacaaaaaaagaagatattcatcatataacaaatgtaatgagatatgatgttggtagtaaaattattttaacttttaatgatcaaacagtttatttatgtgaaattgctgacataacaagtgataaaattgaagttgatttaaaagaaaaacaaaatattaatacagaattgccagttgatgttacgatttgcagtggactaatcaaagctgacaaatatgagtggttgctacaaaaagctactgaattgggtgcttcatcatttatagctgtgagcatggaacgttcaattgttaaattaaacgaggcaaaagttgccaaaaagatagagcgttggcaaaaaataattaaagaagctgctgaacaaagctatcgtttagtgattccatctattcaattcgagtcgaatttaaaattaatttgtgatactattgataattatgactatattcttattgcatatgaagaggaagcaaaagatggtgagttaagcaatttcaagcaaactttacaacaattcaatgctcaggataaagtgttgatgatttttggtcctgagggtggtttgtcagaaaatgaaatttcattatttagtaatactagtacagttgttggtcttgggccgagaattttacgggcagaaactgcgccattgtatgcgttaagtgcaataagttatgaaaaagaattaatggggtga

SEQ ID NO: 405913 - DNA, 1347 bp, Staphylococcus aureus
atgtcaacagttgcgtttcacacattaggttgtaaagtaaaccattatgaaactgaagcaatctggcaattatttaaagaagcaaactatgagcgcgttgactttgaagcgaatgctgatgtatttgttattaatacttgtacagtaacgaatacgggtgataaaaaaagtcgtcaaataattagacgtgcaataagacaaaatcctgatgctgtaatctgtgtaacaggttgttatgcgcaaacttcatcagctgaaattatggaaattcctggtgtcgatgtagtagttggtacacaagatagacataaactattaggttacattgacgaattccgtaaagaacgccaaccaattaatggtgttggaaatatcatgaaaaatcgtaaatatgaagaattagatgtcccttattttacagatagaacacgtgcgtcattaaaaattcaagaaggttgtaacaacttctgcacattctgtattattccatgggctcgtggcttaatgcgttcaagagatccggaaaaagtagttgaacaagcgacgcaactagtgaattcaggatataaggaaattgtattgacgggaattcatacaggtggatatggtcaagatttaaaagattataacttggcccaattattacgtgatcttgaaacgattaatggattagaacgaattcgaatttcttcaattgaagcaagtcaacttacagatgaagtaattgacgttttagaacgttcaacaaaagttgtgcgtcatttgcatattccattacaatctggttcagatacagtattaaaacgtatgagacgtaagtatacaatggatagattttcagaacgattaacaaaattgcataaagctttaccagacttggcagttacgagtgatgtaattgttggtttcccaggtgaaactgaagctgagttccaagaaacatatgattttatcgtaaagcataagttctctgaactgcatgttttcccttattctcctagaattggcacgccagctgcaagaatggatgaccaaattgatgaagaaattaaaaatgaacgggtgcataagttaattacgctaagcaatcaactcggaaagttatatgcgtctaaatttgatcaagatgtgcttgaagtaattcctgaggaacagggtgacacagaaggtacattagttggatatgcagataattatatgaaagtacaatttgaaggtgacgaatcactcataggtcaaattgtaaaagttaaaattacgcaagcaaattatccattaaatgaagggcaagcaattaaagttgttgatttcgcaacaaataaatctgatagagaagttttagtttaa

SEQ ID NO: 405914 - DNA, 177 bp, Staphylococcus aureus
atgtctaaaacagtagtacgtaaaaatgaatcacttgaagatgcgttacgtagatttaaacgttcagtttctaaaagtggaacaatccaagaagtacgtaaacgtgaattttacgaaaaaccaagcgtaaaacgtaaaaagaaatcagaagctgcacgtaaacgtaaattcaaataa

SEQ ID NO: 405915 - DNA, 708 bp, Staphylococcus aureus
gtgagttataataattttttacaaatgacaactatcttggaatcaacggctggagatacttgggttgaacaagttagcaatataattgttcaacctatttttacgttaatattaacctgtttgacattcttaggatttgtatatcaactttactctaaaaaaatcaatgcagctggtattatcgccacattatcattacttattttatttttgggatttctaatccaaggaaatgtcaatatgcattctatcttaatattctcaattggcgttatattagttgtaattgaattatttgtagttggtgcagtaattggtattattggcatgatactgataactataagcataacaacgctcggtgataatttgctatttatgcttgcgaatgttatcgttgccttgattttaacgattgtagaatgggtgatattagtgaagattttcaacagaaagattccgtttttggataaagttatcttaaaagattcaactaattctgagtcaggttacaattctcatgataaccgctcgcacctcgtaggaaagactgctcaaacagttacagatcttcgacctgcagggattattttttgtgaaaatgaacgtattgatgctgtttcagatggcaactttattttgcgcaataaaacggtaaaaatccttgaagttgaaggaacaagagtagttgtgagggaagtagattaa

SEQ ID NO: 405916 - DNA, 990 bp, Staphylococcus aureus
atgtttagtttaagttttatcgtaatagcagttattatagtagttgcattacttattttattctcatttgtacccattggtttatggatttcagcgttagcagctggcgttcatgttggtataggtacattggttggtatgcgtttacgtcgtgtatctccaagaaaagttatagcgccattaattaaagcgcacaaagcaggactagcattaacaacaaaccaattagaatcgcattatctagcaggaggaaatgttgacagagttgttgacgctaatattgctgcacaacgtgctgacattgatcttcctttcgaacgtgctgctgcaattgaccttgcaggacgtgacgtattagaagcggttcaaatgtctgttaatcctaaagtcattgaaacaccatttatcgcaggtgtagcaatgaacggtattgaagtgaaagccaaagctcgtatcacagttagagctaatattgctcgacttgttggtggtgctggtgaagaaacaatcatcgcacgtgttggtgaaggtatcgtttcaacaattggttctagtaagcatcatacagaagtacttgaaaacccagataatatttctaaaacagttttaagcaaaggtttagattcaggtactgcatttgaaattttatcaattgatattgctgacgttgatattagtaaaaatattggtgcagacttacaaactgaacaagcattagcagacaaaaatattgcacaagcaaaagctgaagaacgtagagctatggctgtagcaactgagcaagaaatgaaagcgcgtgtacaagaaatgcatgctaaagtagttgaagccgaatctgaagtaccattagctatggctgaagcattacgttcaggtaatatcagtgttaaagattattataatttgaaaaatatcgaagctgatacaggcatgagaaatgcaattaataaacgaactgatcaaagtgatgatgagtcacctgaacattaa

SEQ ID NO: 405917 - DNA, 699 bp, Staphylococcus aureus
atgagtgtcggtattctaatttttgtcatatcagtgatcatttctatcattactactatgcgcgaaaatagtcataaagatagacaaaatcaaaagccacctcaaaaaacatctaccgataatgaaccaaaaaaaggtggcttttttgaagaaattgagcgaacgtttaaagaaataagtgaagaattaaatgaagaagaaaagaaatcatcgaaacgaaaatatgatgatacgttaccacctttattcgatgaacttccaaaggaagagcctaaatcgaaacctgttgtagaacctatggcacctaaaaaacaacaagaaacaaaaccgatgacagagaaaccaatcacagtgcctaaagcagaaccggtggagcagaaacatagaccttctagacaagataattctgacgaaattagacgtcaattagaaaaatcacttagagatgatattaaaacgattcgtactgacattgatagagaaaaagaaaagcaaattgctaaaatggaaaaacgtgctagagatattattgaggataaatacttatctgaacgtacaaaacgtttgaaattaaagcagctgcttaattctcaaaatgtcgaaaaagatttgactaaatcagcgttccaatttgataaagatgaagtaatcaatggtatgatatggtcagaaattttagctaaaccaaaacaattataa

SEQ ID NO: 405918 - DNA, 948 bp, Staphylococcus aureus
atgcctggaattatacaaatagacgatatgaaccaatctcaagctttaattggaaataatgatgaacatttaaaagcaattgaagagagtttcgatgttgtcatccatgcaagaggacaagaagttgccgttaaaggtacaaaaatagaaaacgtagaaaaagcggaatcagtattaatcaatttgctgaaggttattgatttaggtaataatattacaattaaagatgttgaagcagctattaaaatggcgcataataacacaattcaacatctgttagatttatatgatgaagagataactaaagatgcatttggtaagacgattcgtgcgaaaacgatggggcaacgtatatatgttaatgccatgaaaaataatgatttagtatttggtataggtcctgctggtacaggtaagacattcttagctgtagtttatgcagcaaagcaactccgtaaaggtgctgttaaacgtattgtattaacaagacctgctgttgaagcaggagagtcacttggatttttaccaggagatttgaaagaaaaggtagatccatatttaagacctttatatgatggtctatatactgttcttgggcgtgaacaaacagagcgatttattgaaagaggcattatcgaaatagcgccacttgcatatatgcgcggacgaacattagaagatgcatttgtaattcttgatgaggcgcagaatacgacacatgcgcaaatgaaaatgtttttaacaagactaggttttggctcaaaaatggtagttactggtgaccaaactcaaatcgatttacctaaaggtgttaaaagtggacttaaggaagcggtcagtaggttacacaacgttaaaggtataagtatattgaaattagatcagagcgatgtagtcagacatccattggtaagtaagatcattgaacattatgaaggagagaattaa

SEQ ID NO: 405919 - DNA, 468 bp, Staphylococcus aureus
atgtttacgatagattttagcgatcacacaggcttagttaaagatgcttggtataaacaaattgaagatttattagaatttgctaaaaaagaagagcatatagaagacgatgctgagctttctgttacatttgtagataaacaagaaatacaagaaattaatcgaacatatagagataaagataaagttacagatgtaatctcatttgctttagaagaagatgagccagagattgattttagtggtcttgatataccacgtgttttaggggatataattatctgtacggatgtagcgcaagaacaagcaaacaattacggacattcttttgaacgagaattaggatttttagcattacatggatttttgcatctattaggttatgatcatatgactgaagcggatgaaaaggaaatgtttggtcgacaagatacaatattaaacgcatatggattaacacgagactaa

SEQ ID NO: 405920 - DNA, 345 bp, Staphylococcus aureus
atgaaaaggtttaaatatgcacttgatgggctgaaaatcttaattcaaaaagactataaatttcttttacatgtgtttgcaatgattgttgctattgtctttggtctcgtactaaatattaatcggattgagtggatatttatactcattgctattgcattagttctcactgttgaagctttaaacactgctattgaatatgttgtcgatttagtgaccgttgaatatcatgatttagctaaatacgctaaagatattgcggcttttagtgtacttatagtttcaatattagcatttattataggtttaatagtatttttaccacattttatagcgttattttag

SEQ ID NO: 405921 - DNA, 405 bp, Staphylococcus aureus
atgagttatcaacctcattattttcaagaagttagaaaagcacaacaagaatcatattcgccatacagtcaatttaaagtaggggcttatttaaaaacgaaagacggtagaactttttatggtaccaatgtagaaaatgcttcttatccattatcgatatgtgctgaacgagctagtttggtatcggcaatttctcaaggatacagaccaggtgattttgaatcaataactgtaaccgtagatgcagataaaccgtcatcaccttgtggtgcatgtcgtcaagttttgaaggaattatgtgatgatgatatgcctgtgtatatgacaaatcataaaggagatatggttatgatgacagtcgcagagttactaccatttggattttcaggaaaggatttagaataa

SEQ ID NO: 405922 - DNA, 900 bp, Staphylococcus aureus
atgacagaacataaatcaggatttgtttcaattataggtagaccaaatgtaggaaagtcaacatttgttaatagagtgatcggccataaaatagcaatcatgtccgataaagctcaaacaactagaaataaaattcaaggtgttatgacaagagatgacgcgcaaattatattcattgatacgccaggtattcataaacctaaacacaaattaggtgactatatgatgaaagtcgctaaaaatacattatctgagatagatgcaatcatgtttatggttaatgccaatgaggaaattggacgaggcgatgaatatattatagaaatgttgaaaaatgttaagacaccagtatttttagtattaaataaaatagatttagtgcatccagatgaattaatgccaaagattgaagaatatcaaagttatatggactttacagagattgtacctatttcagcattagaagggctaaatgtcgatcattttattgatgttttaaagacgtatttacccgaaggacctaaatattatccagatgatcaaatttcagaccatcctgaacaatttgtagtgggtgaaatcattcgtgaaaaaatccttcatcttacaagtgaagaaatccctcatgcgattggtgttaatgtggaccgtatggttaaagaaagcgaagatcgtgttcatatcgaagcaactatatatgttgaaagagattcgcaaaaaggaattgtcattggaaaaggcggtaaaaagttaaaagaagtaggaaaacgtgcgagacgtgatatagaaatgcttctaggctctaaagtttacttagaattatgggtcaaagttcaaagagactggcgaaacaaagttaactttattcgccaaattggttatgttgaagaccaagattaa

SEQ ID NO: 405923 - DNA, 747 bp, Staphylococcus aureus
atgcgccaaaaagggattatcatcaaagcagttgattatggtgaatctgataaaattatcacgattttaaatgagcatggtgcaaaagtaccacttatggcaaggcgtgctaaaaaagttaagacgggtttacaagcgcaaacgcaattgtttgtttatggtttgtttatttacaatcagtggcgaggtatgggaacgttaaattctgtagatgttattagtcaacattataaattacaaatggacctttacgtaagcagttatgccgctctggcagctgaaactattgagcgctcaatggatgaaggtgacattgcaccatataactatcaattattacaatttgttcttgaaaaaatagaatcaggtacatctgcacagttaatgtcagtcgtagttatgttaaagtgcatgaaacgatttggttttactgcatcatttaatcgctgtgctgtgagtggtaatgacacacaagcagatttaataggttatagttttaagtttgacggtgcgatttcaaggcaagaggcttctaaagatgtacatgcagttatattatcgaataaaacactatatttattagatgtattacaaaaattaccgatagataaaatgaattcattgaatatccatcaagaaattattgatgaaatgtcagatatcattttaatgttatatcgtgaatatgcaggtatgttttttaaaagtcagaaactaatcaaccaattaaaaagattggaacaataa

SEQ ID NO: 405924 - DNA, 1392 bp, Staphylococcus aureus
atggcaaaagatatggatacaattgtttcattagcaaaacacagaggttttgtgttccctggtagtgatatttacggtggtttatcaaacacatgggattatggtcctttaggtgttgaattaaagaataatgttaaaaaagcttggtggcaaaaattcattacacaatcaccgtttaacgttggtatcgatgctgcaatcttaatgaatccaaaagtatgggaagcttcaggacacttaaacaacttcaacgacccaatgattgataataaagatagtaaaattcgatatcgcgctgataaattaattgaagattatatgcaagatgttaaaggtgatgaaaacttcattgccgatggtttaagttttgaacaaatgaaaaaaattattgacgatgaaggtattgtttgtcctgtaagtaaaactgctaactggactgaaattcgccaattcaatttaatgtttaaaacattccaaggtgtaactgaagattctacaaatgaaattttcttacgtcctgaaacagcacaaggtatttttgtaaactataaaaacgtgcaacgttcaatgcgtaaaaaattaccatttggtatcggtcaaattggtaaatcattccgtaatgaaatcactccaggtaacttcattttcagaacaagagaatttgaacaaatggaacttgaattcttctgtaaacctggagaagaaatcgaatggcaaaattattggaaaacttttgcaagtgactggttaacaagcttaaatatgagcagtgaaaatatgcgtttacgtgatcatgatgaagatgaattatctcattactcaaatgcaacaactgatattgaatataaattcccatttggttggggtgagttatggggtatcgcaagtcgtacagacttcgacttacgtaaacatgctgaacactctggtgaagatttcagataccatgatccagaaacgaacgaaaaatatattccatattgtatcgagccatcacttggtgcagatcgtgtaacattagctttcttatgtgatgcatatgatgaagaaggcgttgaaggtagtaaagatgcacgtacagttttacacttccatcctgcattagcaccatataaagcagcgattttacctttaagtaagaaattatctggcgaagcgattaagatttttgagcaattaagttctaaattctcaatcgatttcgatgaatcacaatctatcggtaaaagataccgtcgtcaagatgaaatcggtacaccttattgtgtaacattcgactatgattcattagaagataatcaagttacagtacgtgacagagattcaatggaacaagttcgtatgccaatctcagagttagaagctttcttaactgaaaaaacaaaattctaa

SEQ ID NO: 405925 - DNA, 540 bp, Staphylococcus aureus
ttgaatttaacaagagcaacgcttagaccagatttagcgatattaacaatgtcaggttttttagaagcgcgtccccgagttggatattattattcaggtaaatcaaaaggcaaattttttaatgaaaaacttcgacaatttgaggttaaggactatatgtctcaacctgttgtgctaagagagaatacaacagtttatgacgctatttgtacaatttttttagaagatgtaagtacattatttattattaatgaagataacgattttgttggtgtgtgttcaagaaaagatttattaagagcttcaatgattggagcagatattcataaagtacctatcagtgtaaatatgacacgtatgcctaatgtcacttatttagaggaaagcgaattagtcatatacgcagcagatagaatgattgaaaaagaaattgattcgattccaattgtaagaaaaaaagataatcaaaagtatgaagtaattggaagaatttccaaaacaacaatagctaagttattagtagcattatataaagaatag

SEQ ID NO: 405926 - DNA, 819 bp, Staphylococcus aureus
atggaaaaaattaaaattatcgtagcttcagattctataggtgaaacggcagagttagttgctagggcaggtatttcacaattcaatcctaagcaatgtaaaaatgaattattaagatatccatatattgaatcttttgaagatgttgatgaagtgattcaagttgcaaaagatacaaatgctatcattgtttatacacttattaaacctgaaatgaagcaatatatgagtgagaaagtagcagaattccaattgaagtctgtcgatatcatggggccattaatggatttattatctgcttcggttgaagaaaaaccttataatgagccaggtatcgttcatagattagatgatgcatatttcaagaaaattgatgcgatagagtttgcagttaaatatgatgatggtaaagatcctaaaggattacctaaagctgatattgttttacttggtatttcgagaacttcaaagacaccattatctcagtatttagcgcataagagttacaaagttatgaatgtaccgattgtaccagaagtgacaccgccagatggcttatatgatattaatccaaagaaatgtatcgcacttaaaataagtgaagaaaaattaaatcgcattagaaaagagcgactaaaacaattaggactaggtgacacagctcgatatgcaacagaagcacgaattcaagaagaattgaattactttgaagaaatcgtaagtgaaattggatgtcctgtcattgatgtttctcaaaaagcaatcgaagaaacagcaaacgatataatccattatattgaacaaaataaatcgaaatga

SEQ ID NO: 405927 - DNA, 1800 bp, Staphylococcus aureus
ttgcgaatagatcaatcgatcattaatgaaataaaagataaaaccgacattttagacttggtaagtgaatatgtaaaattagaaaagagaggacgcaattatataggtttgtgtccttttcatgatgaaaagacaccttcatttacagtttctgaagataaacaaatttgtcattgttttggttgtaaaaaaggtggcaatgtttttcaatttactcaagaaattaaagacatatcatttgttgaagcggttaaagaattaggtgatagagttaatgttgctgtagatattgaggcaacacaatctaactcaaatgttcaaattgcttctgatgatttacaaatgattgaaatgcatgagttaatacaagaattttattattacgctttaacaaagacagtcgaaggcgaacaagcattaacgtacttacaagaacgtggttttacagatgcgcttattaaagagcgaggcattggctttgcacccgatagctcacatttttgtcatgattttcttcaaaaaaagggttacgatattgaattagcatatgaagccggattattatcacgtaacgaagaaaatttcagttattacgatagatttcgaaatcgtattatgtttcctttgaaaaatgcgcaaggaagaattgttggatattcaggtcgaacatataccggtcaagaaccaaaatacttaaatagtcctgaaacacctatctttcaaaaaagaaagttgttatacaacttagataaagcgcgtaaatcaattagaaaattagatgaaatcgtattactagaaggttttatggatgttataaaatctgatactgctggcttgaaaaacgttgttgcaacaatgggtacacagttgtcagatgaacatattacttttatacgaaagttaacatcaaatataacattaatgtttgatggggattttgcgggtagtgaagcaacacttaaaacaggtcaaaatttgttacagcaagggctaaatgtatttgttatacaattgccatcaggcatggatccggatgaatacattggtaagtatggcaacgatgcatttactgcttttgtaaaaaatgacaaaaagtcatttgcacattataaagtgagtatattaaaagatgaaattgcacataatgacctttcatatgaacgttatttgaaagaactaagtcatgatatttcgcttatgaaatcatcgattttgcaacaaaaggctttaaatgatgttgcaccatttttcaatgttagtcctgagcaattagctaacgaaatacaattcaatcaagcaccagccaattattatccagaagatgagtatggcggttacattgaacctgagccaattggtatggcacaatttgacaatttgagccgtcaagaaaaagcggagcgagcatttttaaaacatttaatgagagataaagatacatttttaaattattatgaaagtgttgataaggataacttcacaaatcagcattttaaatatgtattcgaagtcttacatgatttttatgcggaaaatgatcaatataatatcagtgatgctgtgcagtatgttaattcaaatgagttgagagaaacactaattagcttagaacaatataatttgaatgacgaaccatatgaaaatgaaattgatgattatgtcaatgttattaatgaaaaaggacaagaaacaattgagtcattgaatcataaattaagggaagctacaaggattggcgatgtagaattacaaaaatactatttacagcaaattgttgctaagaataaagaacgcatgtag

SEQ ID NO: 405928 - DNA, 1107 bp, Staphylococcus aureus
atgtctgataacacagttaaaattaaaaaacaaacaattgatccgacattaacattagaagatgttaagaagcaattaattgaaaaaggtaaaaaagagggtcatttaagtcatgaagaaattgctgaaaaacttcagaattttgatatcgactctgatcaaatggatgatttctttgatcaattaaatgataatgatatttcactagttaatgaaaaagatagttcagatactgacgagaaactgaatccaagtgatcttagtgcccctccaggtgttaaaataaatgacccagttcgtatgtaccttaaagaaattgggcgtgttaacttattaagtgcacaagaagaaatcgaattagccaaacgtattgaacaaggtgatgaagtagcaaaatcaagacttgcagaagcgaacttacgtttagttgtaagtattgctaaaagatacgtaggtcgtggtatgttattccttgatttaatccaagaaggtaatatgggtcttattaaagctgttgaaaaatttgactttaacaaaggatttaagttttcaacatatgcaacatggtggattagacaagcaatcactcgtgcaattgctgaccaagcacgtacgattcgtatccctgtgcatatggtagaaacaattaataaattaattcgtgttcaacgtcaattattacaggacttaggtcgagatccagcaccagaagaaattggtgaagaaatggatttaccagcagaaaaagttcgtgaaattttaaaaattgcgcaagaacctgtttcattagaaacaccaattggtgaagaagatgatagtcatttaggagactttattgaggatcaggaagcacaaagtccttcagatcatgctgcttatgaattattaaaagagcaattagaagatgtgcttgatacattaactgatagagaagaaaatgtattacgattaagatttggtcttgatgacggcagaacaagaacacttgaagaagttggtaaagttttcggtgttacacgtgaacgtattcgacaaattgaagcaaaagcacttagaaaattaagacatccaagtcgtagtaaacgtttgaaagactttatggattaa

SEQ ID NO: 405929 - DNA, 678 bp, Staphylococcus aureus
atgatttcgttaaataaccgattaacgacggtaagtcgatttttaaaacaaggtacaatcgcggatattggctcagatcatgcttatttgccaatctatgcaattcaaaaccatttatgcgaatgcggtattgctggagaagttattcaaggcccttttcaagctgctgtgaaaaatgtagctgcaaaccaattagtagatagaattgatgtacgtttaggggatggcttaagtgttattcaacctgaggacgtaatcgataatatcacaatttgtggtatgggcggaccacttattgctaaaattttaaaagatgggcaagataagttaagtcaacatccaaggttgattttacaaagtaatatccaaactgaaaatttaagacaaacattacaacaattgaattatgaaataattgatgaaataataatggaagaaaaaggccatatttatgaaattgttgtagcagaatattctacagaattaatagagctatcatctgatgaattgaaattcggaccaaaattgctgaacaacaaaaatgaatattttataaaaaaatggcaaagagagttagaagcactttatcatattaaatcgaaactcaatactgaacaacatcatcaacgtttagctcaaattaatgacgaaattgctgtaattgaaagggtgttatag

SEQ ID NO: 405930 - DNA, 1101 bp, Staphylococcus aureus
atgaaaatagctgatttaatgacattgttagatcatcatgtgccatttagtactgctgaatcttgggataatgtaggattgttaataggtgatgaagatgttgaagttactggtgttttaacagcattagactgtacgttggaagtagtaaatgaagcaatcgaaaaaggttataatactattattagtcatcatcctctaatctttaaaggcgtaacatcattaaaagctaatggttatggtttgatcattagaaaactaattcaacatgacattaatttaatagcgatgcatacaaatttagatgtaaatccgtatggtgtcaatatgatgttggcgaaggcgatgggtttgaagaacatttcaataataaataatcaacaagatgtatactataaagttcaaacatatatacctaaggataatgttggaccatttaaagataagcttagtgaaaatggattagcgcaagaaggtaattatgaatattgtttctttgaaagtgaaggaagagggcaattcaaaccagttggtgaagctaatccaacaataggacaaattgataaaattgaatatgtagatgaagttaaaattgaatttatgatagatgcatatcaaaagtcaagggctgagcaattaattaaacaataccatccatatgaaacaccggtatttgattttattgagataaaacaaacatccctttatggacttggcgttatggcagaagtggataatcaaatgacattggaagatttcgcagctgatattaaatctaaattaaatatcccaagtgtccgttttgttggtgagtctaatcagaaaattaaacgtattgcaattattggtggttcaggtattggatatgaatatcaagctgtccaacaaggcgcagatgtctttgttacaggtgatattaaacatcatgatgccttagatgctaaaattcatggtgtgaatttaattgatattaatcattacagcgaatatgtgatgaaagaaggtttaaaagcgttactaatgaattggttcaatacagaaaaaataaatttagatgttgaagcatctacaattaatacagatccatttcaatatatttaa

SEQ ID NO: 405931 - DNA, 1347 bp, Staphylococcus aureus
atggcaaaacatccattcgaacaatttaatctagaatctagtttaattgacgctgtgaaagaccttaattttgaaaaaccaactgaaattcagaatcgaattattccaagaatactaaagagaacaaatttaattggtcaatctcaaacgggtacagggaaatctcatgcatttttattaccattaatgcagttaattgatagtgaaataaaagaaccacaagcaatcgtagttgcaccaacaagagaacttgcacaacaactatacgatgcagcgaaccatttaagccaatttaaagctggtgtttcagttaaagtttttattggtggtacagatatagagaaagatagacaacgttgtaatgcacaaccacaattgattataggcacccctactagaattaatgacttagctaaaacgggacatttacatgtgcacttagcatcatatttagttattgatgaagcggatcttatgattgacttaggattaattgaagatgtagattacattgctgcaagattggaagataatgcaaatattgcggtgtttagtgctacaatcccacaacagttacaaccatttttaaataaatatttaagtcatccagaatatgtagctgtcgacagtaaaaaacaaaataaaaagaacatcgaattctatttaatacctactaaaggtgcagctaaagttgaaaagactttaaatttaattgatatactaaatccatacttatgtattattttctgtaatagtagagataatgcaaatgatttagcacgttcactaaatgaagctggtattaaagttggtatgattcatggtggcttaacgccacgtgaacgtaaacaacaaatgaaacgtatacgtaatttagaattccaatacgttattgccagcgatttagcatctcgtggtattgatattgaaggtgttagtcatgtcatcaattttgatgtgccaaatgatattgacttctttacgcatagagtcggacgaactggtcgtgggaattataaaggtgtagcaattacgctttatagtcctgatgaagaacacaatatttcattaatagaagatcgcggttttgtattcaatactgttgatattaaagatggtgagttaaaagaagttaaagcgcacaatcagcgtcaagcaagaatgcgcaaagatgaccatttaactaatcaagtgaagaacaaagttcgaagtaaaattaaaaacaaagttaaaccaggttataagaagaaatttaaacaagaagttgaaaaaatgaaacgtcaagagcgtaagcaatttagtaagcagcaaaatagacaaaaacgtaagcaaaacaaaaaaggttag

SEQ ID NO: 405932 - DNA, 891 bp, Staphylococcus aureus
atgttattaggatcacatgtttcaatgagtggtaaaaagatgttagaaggttctgctatagaagcgcatgaatatggtgaaacaacatttatgatttatactggtgcacctcaaaacacgcgccgtaaaagtattgaagatttaaatataactaaaggtcatgaagtgatggaaaaatatggtttatctaatattgttgttcatgcaccatacatcattaatattgcaaatacaaccaaaccagaaacgtttaatcttggtgtagatttcttgcaacaagaaattgaaagaacgcaagctataggggctaaagatattgtattacatccaggtgcgcatgttggagctggtgttgatgccggaattaataagattattgaaggattaaatgaagttttaacgaatgacaataatgtacgtattgcgcttgaaacgatggcaggtaaaggtacagagattggtcgctcatttgaagagttagcacgtattattgatggagttcataataacgaacgtttatcagtatgttttgatacatgtcatacgcatgatgctggatataatgttaaagaggactttgatggcgtattaaatgaatttgataaaatcattggagtcgacagaatcaaagttgttcatgtcaatgattctaaaaatgaccgtggcgctcaaaaagaccgacatgaaaatattggcttcggttacattggttttgatgcattaaattacattgtgcatcatgatagttttaaagatattccgaaaatcttagaaacaccttatgttggtgaagataagaaaaataaaaaaccgccatataaacttgaaattgaaatgttaaaacaacagcaatttgacccagaattaaaaaataaggttatgcaacaataa

SEQ ID NO: 405933 - DNA, 786 bp, Staphylococcus aureus
atgcgaggtgagaatacgatgacaccagtctttgaattgaaaaatgtcaattactactatgatcataaaaaagtgttagaaaatataaacattaaaataaataaaggtgaatttttagcaattgttggaccaaatggtgctggtaaatcaacattattgaagttgattctagggttattacctttacaaagtggtgagatttttgttgaaggtattgattttaaaaataagaaaacatcaattaaattaagctatgtatcacaaaaagcaaatgcctttaattcaggtttcccagcaagtgttaaagaagttgttttaagcggattaacaaagacaaaacgtcttttccaaacatttaatagcaaagataatgaaaaagtgattaaagtactagaaagactgaatataagtgatttaattcataaaaatatagcagaattatcaggtggtcaacaacaacgtgtaatgattgctcgagcattgatttcagaacctgcagtattagtacttgatgaaccaacgaatggtattgatgcaaaacatgtaagtgaattttataatactttagatcaattaaaacaagaaggtatcaccattatcttagttactcatgatatcggtgttgtagcagatactgctactgaagtagcatgtttaaataagcatttgcatttccatggtacaactgatgagtttaaatcacttgatgaagttgaaatttcaaaaatttatggacatcctgtacgttttgtcgatcatcagcataatcgagaatgttgtaattaa

SEQ ID NO: 405934 - DNA, 873 bp, Staphylococcus aureus
gtgtcacaattgatagatgcattattgaattttgattttatgaggtactctttaattagtggtatcttgataggttttattgcgcctctaatcggtgcttttatcgttgttagacgactatcacttatagctgatgctctaagtcatgtaactttaggtggtatatctttcggtatgtttttacttactattatgccaacactagtatttattaatccaatgtggtttggaatcttattcgcaatagtaggtgcgcttctaattgaaaaattaagaacgtcatacactgcttaccaagaaattgctattccaattataatgagtgctggtatcgccttgagtgcaatcttcatttcattagctgatgggttcaatcaagaaattgttggattgctatttggctcaataagcgcagtgaatataagtgatttaacaacgattattgtcattgccatcatagttgttctgtttattacattgttttataaagaattatttatattgtcatttgatgaggaatatagtaaagtcattggcattcctaaatggattcaatttttatttattgttattgtagcgatggttatttctgcctcaatgcgtgttgtagggatactgttagtaagtgcgttaatcacgttaccaattgcaataagtatgcgaataacaaaaagttttaagcaattgatattactaagtgtatttttaggtgaattatcagtaatattaggcttagtcctagctttctatatggacatttctccgggtggtgtaattgtagttctacttgttattttacttatgattacaatggcttatcagaaaatgcgaatgaagtttaaaaagggagctaatatcaatgaatacaaatga

SEQ ID NO: 405935 - DNA, 411 bp, Staphylococcus aureus
atgaatacaaatgatgctattaaaattttaaaagagaacggtttaaaatatacagataaacgtaaagatatgttagatatttttgtcgaagaagataagtatataaacgcaaagtatatacaacaagttatggatgaaaattatcctggaatttcattcgacacaatatatagaaacctgcacttatttaaagatttaggaattattgaaaatacagaacttgatggtgaaatgaagtttagaatcgcttgtacaaaccatcatcatcatcattttatctgtgaaaagtgtggagatacaaaggtaatagattattgtccaatagatcagataaaattatcactacctggtgttaatattcacaaacacaaacttgaagtttatggtgtatgtgagtcttgccaagattaa

SEQ ID NO: 405936 - DNA, 600 bp, Staphylococcus aureus
atggcttttgaattaccaaaattaccatacgcatttgatgcattagaaccacattttgacaaagaaactatggaaattcaccatgacagacatcataacacgtatgttacgaaattaaatgctgcagtagaaggtacagatttagaatctaaatctattgaagaaattgttgctaatttagacagtgtaccagctaacatccaaactgctgtacgtaataatggcggtggacatttaaaccattcattattctgggagttactttcaccaaactcagaagaaaaaggtactgtagtagaaaaaattaaagaacaatggggttctttagaagaatttaaaaaagaatttgctgacaaagcagctgcacgctttggttcaggttgggcttggttagtcgtaaacaatggccagttagaaattgtgactacaccaaaccaagataatccattaactgagggtaaaacacctattttaggtttagacgtatgggaacacgcttattacctaaaatatcaaaacaaacgccctgactacattggcgcattttggaatgtagttaactgggaaaaagttgacgaattatataatgcaacaaaataa

SEQ ID NO: 405937 - DNA, 2076 bp, Staphylococcus aureus
ttgttaaaaagactaaaagaaaaatcaaatgatgaaatcgttcaaaatacaattaacaagagaattaactttatatttggtgtgattgtatttatttttgcagtactagtactacgtttaggttatttacaaatcgcacaaggctcacattataaacaaattataaaaaatgatgaaaacattacagtgaatgagtctgtgccaagaggtcgtattttagacagaaatgggaaagttttagttgataatgcttctaaaatggctattacatatactaggggtcgaaaaacaacacaatcggaaatgttggatacggctgaaaagttatcaaagctaatcaagatggatactaagaaaattacagaacgtgataagaaagatttctggattcagttgcatcctaaaaaagcaaaagcaatgatgacaaaagaacaagctatgttagcagatggaagtattaaacaagatcaatatgataaacaactgttatcgaaaatcggaaaatcacaattagatgaattgtcttctaaagatttacaagttttagctatttttcgagagatgaatgcaggaacagttttagatccacaaatgataaaaaatgaagatgtcagtgaaaaagagtatgcagcagtttctcagcaactttccaaattaccaggtgttaacacgtctatggattgggatagaaaatatccatatggcgatactttaagaggtatattcggagatgtatcgacacctgctgaaggtattccaaaagaattgacagaacattacttatccaaaggatattcacgcaatgatcgtgttggaaaatcttacctagaatatcaatatgaagatgtattgcgtggtaagaagaaagaaatgaaatacacaacggacaaatctggtaaagttacatcttcagaagtgttaaatcctggcgctcgcggtcaagatttgaaattaacgatcgatatagatcttcaaaaagaagtagaagcattattagataaacaaattaagaagcttcgcagtcaaggtgccaaagatatggataatgcaatgatggttgtacaaaatcctaaaaatggagacattcttgcgcttgccggaaagcagattaataagagtggtaaaatgactgattatgacattggtacgtttacttctcaatttgcggttggatcttctgtaaaaggtggaacattattagccggttatcagaataaagctatcaaagttggagaaacaatggtcgatgaaccattacatttccaaggtggtttgacaaaacgatcatacttcaataaaaacgggcatgtaactattaatgataagcaagctttgatgcattcatcaaacgtatatatgtttaaaacagcattaaaattagcgggagacccttattattctggtatggctttaccttcagacataagttcacctgcccaaaagctaagaagaggattaaatcaagtaggcttaggtgtgaaaacagggatagatttaccaaatgaaacaagaggtcaaatcgaaccattaacaaataatccaggtaattatctagatttatcaattggtcaatatgatacctatacaccattacaattatcacaatatgtttcaactatagcgaatgatggttatagaatacagccacacattggattaacgattcatgaatcaactaataaagatgaggttggtccactcaagaagaaaattaatggcactgtcttgaacaaggttaataatactgaaaaggaaatcaaacaaattcaagaaggattcaaaatggcatttaatgataaagatggtactggatatgttagttttaaagatacagtagtacctactgctggtaaaacgggtaccgcagaagtgttccaaaacggagagccaagagttaactctacttatataggatacgcgccaattgatgatccaaaattagcgttttcaattgtatatacaaatcagcctgtaccaccaccatggttaacaggtggagacttaggtagagatgtaattaactactactttaagcagttaggtaaagatgataaaaataaagacaaagacaaataa

SEQ ID NO: 405938 - DNA, 150 bp, Staphylococcus aureus
atgcgcgtaaacgtaactttagcttgtacggaatgtggtgacagaaactacattacaactaagaacaaaagaaataatccagaacgtgttgaaatgaagaaattctgttcacgtgaaaacaaacaaactttacaccgtgaaacaaaataa

SEQ ID NO: 405939 - DNA, 594 bp, Staphylococcus aureus
atgacatgtattgttattaacgatataatagaattgaataaagtgggtgataatgtgactaaaaatgagattagaaaatacattttacataaaatgaagaattttaataaagctgaaaagcgaaaagcagacacatggttaagaaatcaattttttgcaactgaagaatacaaagaagcaaacgcaattgcgctagttctttcttttaatcatgaagtagatactttttctattattgaacaagccttaatggatcataaacgtatttttgtaccgaaaatggattatttaaatcatcaaatgacttttaaagagatatttaatctcaaagatattgatgtcgataataaggggatttactatccaacttcaaaaggtgaaacaacgaataacctagatttaattgttgttcctggtgttggatttcaagacgatggatatagaattgggtatggtggtggctattacgacaggtttttagctaattatcagacaaagacaataagcttattatacgattttcaaataacatcatttgaaccggaatcattcgatcaaccagtcgataaattgattatatatcaagcagcatag

SEQ ID NO: 405940 - DNA, 1464 bp, Staphylococcus aureus
atgaacatagacaaacaattttggaaaacaatatattattggattaggtacttgaattttgatattgtcagtagggaaaaagatgaccaagaaatttggttagcccataaaagaaaaaaacaagtagtcatttttaaacaacatatcaagtctacccaagaaatacgttttgacaaagcgaaagtgcttgaacacaaagatgaaatagcaaattttatttctttcgaaccacaaagttttgaattttattattttacagaatcggaattttcagaagaacaattaaatgaagtttcgccaattagaattaaattcaatgttataagacacacaaaagatttgataaagcatatgccgaatatatttttggctagacttatttcagaagataatgataaaaagacatatatgttctataaacgcaaagtattaaccgataactttttagataaatatatgcagaaattttcaccggcaacatacacaataatatttgtaaatgtcttaatatggttatgtatgattttatatttaaataatttttcggatgtaaaattattagatgttggcgggttagtgcattttaatgtcgtacatggtgaatggtatcgaattgttacatcgatgtttttacattttagttttgaacatatacttatgaatatgctttcattatttatttttggtaaaatagtcgaagcaattattggttcatggcggatgttaactgtatactttattgcagggttgtttggaaactttgtatcactatcatttaatacgactacaatttcagttggggctagtggtgctatatttggtctgattggatcaatttttgcgatgatgtatgtttcaaaaacatttaacaaaaaaatgttaggacagttattaattgcattagtgatattagttggtgtttctctgtttatgtcaaatataaatattgtggcgcatattggaggattcattggtggtttattaataactttaattggctattactataaagtgaatcgtaatattttttggattttactaattggtatgcttgttatatttattgcacttcaaattagaatttttacaattaaagaagataatatttataataaattgatcaaagatgatatgactagtggtaattatgataatgctcaaaatattgtgaagcagacaataaataaaaattatgccgatgatcaaacatattatttaagtggtatgattatggctactatcaattctaagtccgaaggtatgacagaatgggagcgaggacttagaatgtttcctaaatcaggtttattaaattttgagttagcgatagcaaatcgttcattaaatgatgatgaaaaagcattaaaatatgtgcgtaaagcattaaatgcagaccctaaaaatacagattatattaacttagaaaaagagttgactaaatcaaatgagtcgaaaaataaataa

SEQ ID NO: 405941 - DNA, 987 bp, Staphylococcus aureus
atgacaaaaattattttagcagctgatgtaggcgggacgacttgtaaattaggtattttcacacctgaattagaacaattacataaatggtctattcacactgatacatctgatagtacaggatatacacttttgaaaggaatttatgattcgtttgttgaaaaagtaaatgaaaataattataatttttcaaatgtacttggcgtaggtattggtgtaccaggtcctgttgactttgaaaaaggtacagtaaatggagcagtaaacttatattggccagaaaaagttaatgtacgtgagatttttgaacaattcgttgattgtccagtgtatgtagataatgatgctaacatagctgctttaggggagaaacacaaaggtgctggtgaaggtgccgatgatgttgttgccatcacacttggtacaggtctaggtggaggaattatttcaaatggtgaaatcgtacatggtcataatggctctggcgcagaaataggtcattttagagcagacttcgatcaacgatttaaatgtaattgtggtcgttctggatgtattgaaacagttgcttcagcgacaggcgttgttaacttagttaacttctactatccgaagttgacgtttagatcttctatattagaattgattaaagaaaataaggttacagcaaaagctgtttttgatgcggcaaaagctggtgaccaattctgtattttcattactgaaaaggttgcaaactatattggatatttatgtagtattattagtgttacaagtaatccgaaatatatcgttctaggtggaggaatgtctactgcaggacctattttaattgaaaatattaaaacagaatatcataatttaacatttgcacctgctcaatttgaaactgaaattgtacaagcgaaattaggtaatgatgcaggtattacaggagcagcaggattaatcaagacctatgtattagataaagagggggtaaaataa

SEQ ID NO: 405942 - DNA, 330 bp, Staphylococcus aureus
atggctattgttgatgtggttgttattccagttggaacggaaggtccgagtgttagtaaatatattgcagatattcagaaaaaacttcaagaatataaagcaatgggtaaaattgattttcaattaacaccaatgaatactctaattgaaggtgaattaagcgatgtattagaagttgtgcaagtgatacatgaattaccttttgataaaggtttaagtagagtttgtacaaatatccgtattgatgaccgacgagacaaatctagaaaaatgaatgataaactaacatcagtacaaaaacatttagaaaatagtggtgaaaacctatga

SEQ ID NO: 405943 - DNA, 624 bp, Staphylococcus aureus
atgaggatttcaagcttaactttaggcttagttgatactaatacgtatttcatcgaaaatgacaaagctgttattctgattgacccttcaggtgaaagtgaaaaaattattaaaaaattaaaccaaataaataaaccgttaaaagctattttattaacacatgcacactttgatcatatcggagcagtcgatgatatagttgatcgattcgatgtcccggtttatatgcatgaagcagagtttgattttctaaaagatcccgttaaaaatggggcagataaatttaagcaatatggattaccaattattacaagtaaggtaactcctgaaaagttaaacgaaggtagcacagaaatagaaggatttaagtttaatgtgttacacacacctggacattcaccaggaagtttaacatatgtgttcgatgaattcgcagttgttggagatacattatttaataatggaatcggacgtacagatttatataaaggtgattatgaaacgctagttgattctattcaagataaaatatttgaattagaaggcgatttacctttattccctggacatggtccatatacgacggttgatgatgaacaattaaatccatttttacacggttaa

SEQ ID NO: 405944 - DNA, 975 bp, Staphylococcus aureus
ttgaagattctatttcaagaaataattaataaagcgatagaaatgaaagcgagtgatgtacattttattccagttaaaaatgaagtaagtattaaatttagaattaatgataacttggagcagtatgaacaaattgggaatagcatttatcaaaagttattagtttatatgaagtttcaagctgggcttgatgtttctacacagcaagtcgcacagagcggtcgatatagttaccttttcaataaaatatattttttgagaatatcaactttaccattgtcacttggccaagaaagttgtgttatcagaattgtacctcaattttttcaaccacagaaatcaacttataaattcaatgattttaaacacctcatgaataagaaacaaggattactattgtttagtggaccaactggttcaggaaagagtacattaatgtatcaaatggtctcatacgcgaataaagccttgaatttaaatgtaatttctatagaggatcctgtagagatgcaaattcctggtatcgtccaaattaatgtgaatgataaagctggcataaactatgtaaattcgtttaaagctattttaagatgtgatcctgatgttattttaataggtgaaatcagagataaagatgttgccaagtgtgttatacaggctagtttaagtggtcaccttgttctgactacattgcatgcaactgattgtaaaggtgctattttaaggccattagaaatgggcatttctgtacaagaattgatacaggcaactaacttaattataaaccaacgacttgtaactactattaagcaacagcgacaattagtatgtgaaattctatctcagcaacaactccgatatttcttttcccataatcattcattaccatcatcatttaagaacttagaagataaacttgatgatatgacaaaagcaggtgtcatttgtgaaactacaatgcataaatacatttaa

SEQ ID NO: 405945 - DNA, 1071 bp, Staphylococcus aureus
gtgaaactacaatgcataaatacatttaaactacattctaagaagcgacaattaagtaaggcccaacaaatcgacttactttcaaatttatgtaatttgttgaaatatggtttcactctgtatcaaagttttcaatttttaaatcttcaaatgacatataaaaataagcaattaggtaccaccattctaagtgaaatttcaaatggtgcaccatgcaatcaaatattatcactgataggttatagcgatactatcgtcatgcaagtatatttggcagaaagatttggcaatattatagacgttctagaagaaaccgtaaattatatgaaagtgaatagaaagtcagaacaacgattgttaaagacactgcaataccccttaatactagtttctatctttattgctatgattattatattaaacctcacagtaattccacagtttcaacaattatatacttctatgaatattcaactatcttcttttcaaaaaacattgtcttttttcattaccagcttacctactataattgtagtaatgctcataatagtatctatgttggctattattatgaaattaatttataacaatttaaatatgctcaataagataaactttgtgatgaaactaccgctaatatcaggctatttccaattatttaaaacttattttgtaactaatgaattagtgttgttttataaaaatggtattacacttcaatcaatagtagacgtttatattaaccatagtagtgatccatttagacagtttctaggtaaatacttattaacttattcagaaatgggatatggtttgcctcaaattttagaaaaactaaaatgctttaagcctcaattaattaagtttgtgctacaaggtgaaaagagagggaagctagaagtagaactaaagttatattcgcaaatattagtaaaacaaatagaagataaagcgataaaacagactcagtttttacagcctattttatttttgattttaggtttatttattgtcgcaatttatttagtaattatgttaccaatgtttcaaatgatgcaaagtataaaataa

SEQ ID NO: 405946 - DNA, 312 bp, Staphylococcus aureus
atgtttaaatttcttaagaaaactcaagcgtttacattgatagagatgctattagtgttattaatcatcagtttattattaattttaatcattccaaatattgctaaacaaactgctcacatacaatcaacaggttgtaatgcacaggtaaaaatggttaatagtcaaattgaagcgtatgcattgaaacataatagaaatccatcgtctattgaagacttaattgcagatggttttataaaagaagcacaaaagacatgtaaatcaggagagacaatcacaattagtaatggagaagcagttgcaaattag

SEQ ID NO: 405947 - DNA, 435 bp, Staphylococcus aureus
ttgcaaattagaaagcagtcagcatttactatgattgagatgcttgtggtaatgatgttaatcagtatatttctacttttgacaatgacatctaaaggattaagcaatcttagagtaatagatgatgaggcaaatatcatttcttttattactgaattgaattatattaagtcgcaagctatagcaaatcaaggatatatcaatgttagattttatgaaaacagtgacactattaaagtaatagagaataataaaatacgatttctaaaattaaaagtaggcaaaataattaatgttgcaaaagttgatattattgcctttgataaaaaagggaatatcaataaatttggtagcataacaatttacaataacaattcaatttatagaataatattccatattgaaaaaggaagaattcgttatgaaaagctataa

SEQ ID NO: 405948 - DNA, 300 bp, Staphylococcus aureus
atgaaaagctataagtgtaaaggttcattcttaatagatagtatggctggatttttgctaattggattgattacattactattgataccaatgatgaatcaaatgcaagcgagtataaaccataaactacaaacaattgatgcttctaaagtaattttgacgactgtatctaaaattaataaagaagaacttaagaagggggtaactatagggaagtatgatattaagcaaagtgaccaacaaatttgtgctatttcaaaaaataccacttcttatcaaaagacatgtatacagtattaa

SEQ ID NO: 405949 - DNA, 375 bp, Staphylococcus aureus
atggttataagtataactttactaattgttccagacttaattagacttagtaaaacttttctaattgaaagtagggatttaacaactgtagatttcgaatttttctcaagagatattctagatgattttaaaggagtagatagaaacgatattgaaattaggcaacaccgtatcattttacataaaggtgaagaaatgatcgaatacaaattaattaataataaaattattaaagttgtaaatgacagaggaaatataacaatgattaataatgttacagcatttactgcaaatatctactataaatccattattaaaataacgataacagttaaagtcggtacaaatgtgcagactaaaactatttatgtataa

SEQ ID NO: 405950 - DNA, 525 bp, Staphylococcus aureus
atgaatcatgataaatcaccaataattttaattggtttcatgggtaccggtaaatctacgattggtaaatacgttgcagatgagcaaaatttatcatttattgatatagattcatatatcgaagagaagtataagttaacaataccagaaatattttgtaaacatggtgaacaatatttcaggaatttagagttcacatgtttgcaagaatgtattaacactgcagatataattgctactggtggtggtattgttgagagtgaagaggcatttaattttttgaaaaatcaaaaaaacattatttggttagattgtaatattgatattatatatagtcgaatcaatgatgacccacatcgacctaatgcaaataataagacaatcaagcagttaaatgacttgtattgctcgcggaatttaagatataatgaaatcgcattcaagaaatttgatagtcatttgctatcaatttcagaaatatattatgaattgctaaatttaataaaagcgagtgatcagtattag

SEQ ID NO: 405951 - DNA, 1092 bp, Staphylococcus aureus
atgtcaagtgatttaaaacaaacacctttatatcaaaattatgttgatagaggtgcaaaaattgtggaattcggaggatgggcgatgcctgttcaattttcaagtattaaagaggagcataatgctgttcgatacgaaattggcctgtttgatgttagtcatatgggtgaaattgaagtaacaggtaaagatgctagtcagtttgtgcaatatttattatcaaatgatactgataatttaactacttcaaaagcattatatactgctttatgtaatgaagaaggcggtattattgatgatttagtaatatataaattagctgacgacaattatttattagttgttaatgctgctaatactgaaaaagattttaattggattttaaaacacaaagagaaatttgatgttgaagtacaaaatgtatcaaaccaatatggtcaattagcaatacaaggaccaaaagctagagatttaattaatcaattagttgatgaagatgtaactgaaatgaaaatgtttgaatttaaacagggtgtcaaattatttggagcaaacgtcattttatctcagtcaggttacacaggtgaagatgggtttgaaatttattgtaatatcgatgatactgaaaaaatttgggatggtttattagagtataatgttatgccatgtgggttaggcgctcgtgatacattaagattagaggctggattgccattacatggacaagatttaactgaatcaattacaccatatgaaggtggtatcgcttttgcaagtaaaccattaattgatgctgattttattggtaaatctgtattaaaagatcaaaaagaaaatggtgcaccaagaagaacagtgggattagaattacttgaaaaaggaattgcaagaactggttatgaagttatggatttagatggaaatattattggagaagtaacttcaggaacacagtctccatcatcaggaaaatcaattgcacttgcaatgataaaaagagatgagtttgaaatgggtagagagttgcttgttcaagttcgtaagcgtcaattaaaagcgaaaattgttaagaaaaatcaaattgataaataa

SEQ ID NO: 405952 - DNA, 1347 bp, Staphylococcus aureus
gtgagtcatcgttatatacctttaactgaaaaagacaagcaagaaatgttacaaacaattggtgcaaaatctataggagaattattcggtgatgtaccaagtgacattttattaaatagagatttaaatattgctgaaggcgaagcggaaacaacgttacttagaagattaaatcgcattgcaagcaagaatatcactaaagaaacgcatacatcatttttgggtgctggtgtttatgatcattacgcgccatcagttgtggatgctatgatttcaagatcagaattttacacagcatatacgccatatcaaccggaaatttctcaaggtgaattacaagccatttttgagttccaaactttaatttgtgaattaacagatatggatgtagcaaattcttctatgtatgatgggatgactagctttgctgaagcatgtatcttagcatttagtcaaacaaagaaaaataaaattgtagtctcaaaaggtttacattatcaagcattacaagtacttcatacttatgctaagacgcgtaaggaattcgaagtagtggaaatcgatttagatggcactgttacagatttgaaaaaattagaagcagcagtggatgatgaaacagcagctgttgcagtacaatatccaaacttttacggttcaattgaagatcttgaaaagattcatagctttattgaagataaaaaagcattatttatcgtatatgcaaatccattagcattgggattacttacacctccaggttcatttggtgcagatattgttgtaggtgatactcagccattcggaattcctgctcaattcggtgggccacattgtggatattttgcaacgacgaaaaagttaatgcgtaaagtgccaggtagattagtcggtcaaacacaagatgatgaaggtaatcgtggctttgtattaacattacaagcacgtgaacaacatattcgacgcgataaagcgacatctaatatttgttctaaccaagcattaaatgctttagcgtcatcaattgcaatgtcagcacttggtaaacaaggtatctatgatattgcagttcaaaatatagaacatgctaactatgctaaacaacaatttattaaaaaaggttttgaagtattagatggtacatctttcaatgagtttgtagtcaaatttgacaaaccaattcaacaagttaacgaggaattagtgaagtacaatattatcggtggttttgatttaggtgttgtttcagacgactttaaaaatcacatgttaatagctgtaactgaattaagaacaaaagatgaaatcgatacatttgtagaaaaggctggtgagttaaatgactag

SEQ ID NO: 405953 - DNA, 1473 bp, Staphylococcus aureus
atgactagtaaatcaagtccattaatttttgaaagatctcgtgaaggcagatatgcatattcattaccaaaaagtgatattaaaacaaattctgttgagtcattgttagatgataaatttattcgtaaaaacaaagcggagtttcctgaagttgctgaactagacttagtacgtcattatactgaactttcaaataaaaatttcggtgtagacaacggattttatccattgggttcatgtacgatgaagtataaccctaaaattaatgaaaaggttgctagaataccaggatttagtgaatcacatccattacaagatgaagatcaagttcaaggttcattagaaattatttatagtttgcaagaagaattaaaagaaattactggtatggatgaggtgacattacaaccagctgctggcgcacatggtgaatggactgcattgatgatatttaaagcttaccatgagaataatggtgaaggtcatcgtgatgaagtcattgtgccagattctgcgcatggtacgaatccagcctcagcttcatttgcaggatttaaatcagttactgtaaaatcaaacgaacgtggcgaagttgatattgatgacttgaaacgtgttgtaaatgaaaatacagcagctattatgttaactaatccaaacactttaggtattttcgaaaaaaatattatggaaatccgtgaaatcgtccataatgctggtggtctattatattatgatggtgcgaatttaaacgctattatggacaaagttcgcccaggagatatgggatttgatgctgttcatttaaacttgcataaaacatttactggtccacatggtggtggcggtcctggttcaggtccagtcggtgtagtaaaagaactagcaagttacttaccaaagccaatggttattaaagatggcgacaaatttaaatatgataatgacattaaaaattctatcggacgtgtaaaaccattttatggtaactttggtatttacttaagagcttatacgtatattcgaactatgggagcaactggacttaaagaggtttctgaagcagcggttcttaatgcgaattatattaaagcacgtttatctaaacgctttgaaataccttataaacaatattgtaaacacgagtttgtgttaagtggtgtgcgtcaaaaagactttggtgtacgtactttagacatggctaagcgattattagatttcggtgtacatccaccaacaatatacttcccattaaatgttgaagaaggtatgatgattgaaccgactgagacagagtctaaagaaacacttgattattttatcgatacattaattagtattgctgaagaagctaaaaatgatcctgataaagtgctagaagcaccacatacaactgtgattgatcgattagacgaagctacagctgctcgtaaaccaatattaaagtttgaaaatcttaaacaggaaaaataa

SEQ ID NO: 405954 - DNA, 387 bp, Staphylococcus aureus
atgagtgctagtttgtacatcgcaataattttagttatagcaattattgcttatatgattgttcaacaaattcttaacaagcgagctgttaaagaattagatcaaaatgaattccataatgggattagaaaagctcaagtcatcgatgttagagagaaagttgactatgactacggtcacattaatgggtctcgcaatattcctatgacaatgttcaggcaacgattccaaggattaagaaaagatcaaccggtatacttatgtgatgccaatgggattgctagctatagagccgctcgtattttgaaaaagaatggatatacagatatctatatgttaaaaggcggctataaaaaatggactggaaaaataaagtctaaaaaatag

SEQ ID NO: 405955 - DNA, 831 bp, Staphylococcus aureus
atgactgaaacttggaattttattaatacaggaagtaaagacccatattataatatggcaatggatgaagcgttattaaattttgtctctagaggtgaaattgatccagttatacgtttttacacatggaatcctgcaacattatcaatagggtatttccaaaggctacaaaaagaaattgatattgataaggttaaagagaaaggttttggtctcgtaaggcgtcaaactggtggccgtggggtgctacatgataaagagttaacttacagtgtgattgtgcctgaatcgcatccgaatatgccttctacagttacagaagcgtacagagtgatttcacaaggattattagaaggatttaaaaacttaggatttgatacttattttgcggtacctaaaacgcctgaagagcgtcaaaaattaaaacaacctcgaagttcagtgtgttttgatgcaccaagttggtatgagctagttgttgaaggccgtaagattgctgggagtgctcaaacgagacaaaagggcgtaatcctccaacacggttcgattttacaagatattgatattgatgaactgtttgatatgtttatttataaaaatgaaagattaaaattaaaaatgaaagaggcattcgttgaaaaagcagttgccatcaatgatatttcagatgaacacattactattagtcaaatggaagaagctttcgagaaaggttttaagaaaggtttaaatatagaatttaagccacttgaattaacagaagctcaattggcagaagtggaagaattaactgaaaaatatcgttcagatgaatggatgtttagaaagtag

SEQ ID NO: 405956 - DNA, 219 bp, Staphylococcus aureus
atgcgtaatataatattttatcttgtacttattattgctgcgattggattagtaatgaatctagatgcctttattttttcaatcgtcagaatgttaatcagctttgctgtaatagctggtattatttatctgatttattatttcttcatcttaactgaagaccaacgcaaatatcgcaaagcaatgcgtaagtataaaagaaatcaaagaagaaaatag

SEQ ID NO: 405957 - DNA, 582 bp, Staphylococcus aureus
atgaaaaaattggtttcaattgttggcgcaacattattgttagctggatgtggatcacaaaatttagcaccattagaagaaaaaacaacagatttaagagaagataatcatcaactcaaactagatattcaagaacttaatcaacaaattagtgattctaaatctaaaattaaaggacttgaaaaggataaagaaaacagtaaaaaaactgcatctaataatacgaaaattaaattgatgaatgttacatcaacatactacgacaaagttgctaaagctttgaaatcctataacgatattgagaaagatgtaagtaaaaacaaaggcgataagaatgttcaatcgaaattaaatcaaatttctaatgatattcaaagtgctcacacttcatacaaagatgctatcgatggtttatcacttagtgatgatgataaaaaaacgtctaaaaatatcgataaattaaactctgatttgaatcatgcatttgatgatattaaaaatggctatcaaaataaagataaaaaacaacttacaaaaggacaacaagcgttgtcaaaattaaacttaaatgcaaaatcatga

SEQ ID NO: 405958 - DNA, 1062 bp, Staphylococcus aureus
atgagcagaataacacaagtgcatcgtattttagaacaaaaacatttagatgcgattatcattctttcggattacaatagaagatatttatcaggttttactggtaccagtggagcacttatcatatctaaagataaacaatatttgataacagactttagatatattgatcaagcaactaagcaggcgccaaattatgaaattattaatcgtaaatctactattattggtgagattaaagaattgctacaccaagaaaattttgaaaatgtaggttttgaggggcatcatgtaagttatgatacataccttgaattaaataaaagccgtatatcattaataagcatttctaatactgtagataaaattagagacgtcaaagatgctgacgaaattgctttaattcaaaaagcagctaatattgttgatgaaacatatgaatatattttaactgttgtaaaagcaggcatgactgaaaaagaattaaaggcaatattagaaagcaaaatgctagaattaggagcagatggaccatcattcgatacgattgtagcatctggtcatagaggtgcattaccacatggtgttgcaagtgataaaattattgaaaaaggcgacatgattacattagattttggcgcgtattataacggctattgttcagatattactagaacatttgctattggagaaccagatcctaaactgaaagaaatatatcaaatagtacttgaatctcaaatgaaagcaattaatgagattagacctggcatgactggtgcagaagctgatgccatttcaagaaactatttagagtcaaaagggtatggaaaagaatttggacattcactaggacatggtattggtttagaaatccatgaagggccaatgctggctcgtacgatacaagataaacttcaagttaacaactgtgttacagtagaacctggtgtttatatagaaggtttgggcggtataagaatagaagatgatattttaattacagaaaatggttgtcaagtctttactaaatgcacaaaagaccttatagttttaacataa

SEQ ID NO: 405959 - DNA, 558 bp, Staphylococcus aureus
atgatttcggttaatgattttaaaacaggtttaacaatttctgttgataacgctatttggaaagttatagacttccaacatgtaaagcctggtaaaggttcagcattcgttcgttcaaaattacgtaatttaagaactggtgcaattcaagagaaaacgtttagagctggtgaaaaagttgaaccagcaatgattgaaaatcgtcgcatgcaatatttatatgctgacggagataatcatgtatttatggataatgaaagctttgaacaaacagaactttcaagtgattacttaaaagaagaattgaattacttaaaagaaggtatggaagtacaaattcaaacatacgaaggtgaaactatcggtgttgaattacctaaaactgttgaattaacagtaactgaaacagaacctggtattaaaggtgatactgcaactggtgccactaaatcggcaactgttgaaactggttatacattaaatgtacctttatttgtaaacgaaggtgacgttttaattatcaacactggtgatggaagctacatttcaagaggataa

SEQ ID NO: 405960 - DNA, 465 bp, Staphylococcus aureus
atgaactttaaagaaatcaaagaattaattgaaattctggataaatcaactttaacggaaatcaatattgaagatactaaaggcaaagtgacgcttaagaaagaaaaagaaactgagattatcacgccacaaatctcacaaatgccagttgaagctgcggcaatgcctatgcctcaagcacaatcaactgatagcaataaaactgaagctccaaagccaacttcagataatcacaaaacaattaatgcacctatggtaggtacattttacaaatcgccatctccagacgaagaagcatatgtgcaagttggggacactgtttcaaatgaaacaacagtgtgtattttagaggcaatgaaactatttaatgaaattcaagcagaaatttcaggtgaaattgttgaaatcttagtagaagacggacaaatggtagagtatggccaaccgttatttaaggtgaaataa

SEQ ID NO: 405961 - DNA, 1356 bp, Staphylococcus aureus
atgaaaaaggttttaattgcaaaccgcggtgaaatcgcagttaggattattcgcgcttgtcgtgatttaggcatccaaactgttgcaatctattctgaaggggataaagatgcgctacatactcaaattgctgatgaagcatattgcgtaggtcccactttgtctaaagattcatatttaaatattccgaacatcttatctattgcaacttctacaggttgtgatggcgttcatccgggttatggctttttagctgaaaatgctgattttgcagaattatgcgaagcatgccaattgaagttcattggaccaagttatcaatctatccaaaaaatgggtatcaaagatgttgctaaggcagaaatgatcaaagccaatgttccagttgttcctggtagtgacggtttaatgaaagacgtctcagaagctaagaaaatcgccaaaaaaattggctatccggtcatcattaaagctactgctggcggtggcggaaaaggtatacgtgttgctcgtgatgaaaaagaacttgaaactggcttccgaatgacagaacaagaagctcaaactgcatttggtaatggtggactttatatggagaaattcatcgaaaacttccgccatattgaaatccaaattgttggggacagctatggtaatgtaattcatttaggagaacgtgattgtacaattcaaagacgtatgcagaaattagtggaagaagcaccttccccaattttagatgatgaaacacgtcgtgaaatgggaaatgccgcagttcgtgcagcgaaagctgtaaattatgaaaatgcgggaacaattgagtttatatatgatttaaatgataataaattttattttatggaaatgaatacacgtattcaagtagaacatcctgtaactgaaatggtaacaggaattgatttagttaaattacaattacaagttgctatgggtgacgtgttaccgtataaacaagaagatattaaattaacaggacacgcaattgaatttagaattaatgctgaaaatccttacaagaactttatgccatcaccaggtaaaattgagcaatatcttgcaccaggtggatatggtgttcgaatagagtcagcatgttatactaattatacgataccgccatattatgattcgatggtagcgaaattaatcatacatgaaccgacacgagatgaagcgattatggctggcattcgtgcactaagtgaatttgtggttcttggtattgatacaactattccattccatattaaattattgaataacgatatatttagaagcggtaaatttaatacaaactttttagagcaaaatagcattatgaatgatgaaggttaa

SEQ ID NO: 405962 - DNA, 363 bp, Staphylococcus aureus
atggtcaaagtaactgattattcaaattcaaaattaggtaaagtagaaatagcgccagaagtgctatctgttattgcaagtatagctacttcggaagtcgaaggcatcactggccattttgctgaattaaaagaaacaaatttagaaaaagttagtcgtaaaaatttaagccgtgatttaaaaatcgagagtaaagaagatggcatatatatagatgtatattgtgcattaaaacatggtgttaatatttcaaaaactgcaaacaaaattcaaacgtcaatttttaattcaatttctaatatgacagcgatagaacctaagcaaattaatattcacattacacaaatcgttattgaaaagtaa

SEQ ID NO: 405963 - DNA, 390 bp, Staphylococcus aureus
atgagtcgtaaagaatcccgagtgcaagcttttcaaactttatttcaattagaaatgaaggacagtgatttaacgataaatgaagcgataagctttattaaagacgataatccagatttagacttcgaatttattcattggctagtttctggcgttaaagatcacgaacctgtattagacgagacaattagtccttatttaaaagattggactattgcacgtttattaaaaacggatcgtattattttaagaatggcaacatatgaaatattacacagtgatacacctgctaaagtcgtaatgaatgaagcagttgaattaacaaaacaattcagtgatgatgatcattataaatttataaatggtgtattgagtaatataaaaaaataa

SEQ ID NO: 405964 - DNA, 1338 bp, Staphylococcus aureus
atgtcagattatttaagtgtttcagctttaacgaaatatattaaatataaatttgatcaagatccacatctccaatctgtattgattaaaggtgagctttcaaatttcaaaaagcattcaagtggtcatttatactttaatgtgaaagataaagaaagcgttataagtgccatgatgttcaaaggtagtgcttctaaattaaacttcgaacctaaagaaggagatgaagtcttattagaagcacgtgtttctgtttttgaacgtcgtggaaactatcaaatttatgtaaataaaatgcaattagatggtatagggaacttatatcaaaaattagaagcattaaagaaaaaattaactgaagaaggttgttttgataaagcgaataagaaatcaatacctaagtttcctaaaaaaattgcagttttaacagcgagtacaggtgccgcaattcgagatatccattcaacgataaatagtcgttttccattagctgaacaaatacaaattagtactttggttcaaggtgaaaaagcaaaagacgacattattgaaaaaattgaatatgcagatagtttaggtgtagataccattattgtaggtcgaggcggtggatccatagaagatttatggaatttcaacgaagaagctgtcgtccgtgcaatatataattgtaagacaccgattatatcagcagttggtcatgaaacagactttacattaagtgattttgctgcagacatcagagctgcgactccaactcaagctgctgttattgcaacaccagaccaatatgaattgctgcaacaaatacagcaatatcagtttacattgactcgtttcatcaagaaacatttagaacaacaacgtaaacatgttgaacatttgtcatcgtattacaagtttaaacaaccaactttattgtatgatcaacagatacaacgtcgagatgatttagaaaagagactgaaacaacaaattcaggcaacttttgaacaacagagacatcgattaatgctgttgcaacaacgttataatttaaaagcattactaagtagtgttaatcaagaacaacaaaataatcttcaattgacaaaccaacttgttaaattattgaattctaagatattaagttataaaaatgatttgaaaaataaagtagaaaacttaaacaatttaagtccaactaatacaatgttgcgtggatatgcaattgttaataaaaaagacgaagtcattacgagtactaaagatttaacagaaaatgatcaattgacattaacaatgaaagatggcttagtagatgcaaaagttacgaaagtaaggtgtaataatgactaa

SEQ ID NO: 405965 - DNA, 231 bp, Staphylococcus aureus
atgactaaagaaacgcaaagttttgaagaaatgatgcaagaattagagcaaattgttcaaaaattagataatgaaacagtatctttagaggaatcattagatttatatcaacgtggtatgaaactatcagcagcttgtgacacaactttaaaaaatgccgaaaaaaaggtgaatgacttaataaaagaagaagctgaggatgtaaaaaatgacgaatctaccgatgaataa

SEQ ID NO: 405966 - DNA, 882 bp, Staphylococcus aureus
atgacgaatctaccgatgaataaattaatagatgaagtcaataatgaattatcggttgcgataaataaatcagtaatggatactcagctagaagaaagtatgttgtattcattaaatgctggaggtaaacgcatccgaccagttctgttattactcactttagattcactaaataccgagtatgagttaggtatgaagagcgcaattgcactagaaatgattcatacatattcacttattcatgatgacctaccagcgatggataatgatgattatcgacgaggaaaattaacaaatcataaagtatatggtgagtggactgcgatattagcaggtgatgctttattaactaaagcatttgaacttatttcaagtgatgatagattaactgatgaagtaaaaataaaagttctacaacggctgtcaatagcaagtggtcatgttggaatggtcggcggtcaaatgttagatatgcaaagcgaaggccaaccaattgatcttgaaactttggaaatgatacacaaaacaaaaacaggagcattattaacttttgcggttatgagtgcagcagatatcgctaatgtcgatgatacaactaaagaacatttagaaagttatagttatcatttaggtatgatgttccagattaaagatgatttattagactgctatggtgatgaagcaaagttaggtaaaaaagtgggcagcgatcttgaaaataataaaagtacgtacgtgagtttattagggaaagatggcgcagaagataaattgacttatcatagagacgcagcagtggatgaactaacgcaaattgatgaacaattcaatacaaaacacttattagaaatcgttgatttattttatagcagggatcactaa

SEQ ID NO: 405967 - DNA, 453 bp, Staphylococcus aureus
gtgcccaaaaaatcggttaggcatataaaaattagagaaattatttcaaatgaacagatagagacacaagatgaattagttaaacgattaaacgattatgatttaaatgtcactcaagcaactgtttctcgtgatattaaagaactacaacttattaaagtacctataccttcaggtcaatatgtttatagtttaccaaatgatagaaaattccatcctttagaaaaattgggacgttatttaatggattcctttgttaatatagatggtactgataatttacttgttctaaaaacattacctggtaatgcacaatctattggagctatattagaccaaatcaattgggaagaagtactaggcacaatttgtggtgatgatacttgtttaattatttgtcgaagcaaagaggcaagtgatgaaatcaagtcaagaattttcaatttgttataa

SEQ ID NO: 405968 - DNA, 1680 bp, Staphylococcus aureus
atgttacaaaccttatcaatcaagcaatttgctattattgaagaattagaaattcaattttctgatggtttaactgttttaagtggtgaaacgggttcaggtaagtcaattattatagatgcaattggacaattaattggaatgagagcttcatctgattttgtaagacatggtgaaaaaaaggctgtcatcgaaggtatatttgatattgacgagagtaaagatgctatacatatattgaaaaatatggatattgatgtagatgaagattttttattagttaaacgggaaattttcagctctggtaaaagtctttgtaaaattaataatcaaacagttactttacaagatttacgaaaagttatgcaagaattattagatattcatggccaacatgaaacgcagtctttgttgaaacaaaaataccatttaacattattggataattacgcagaatcacgttatcaagatttgttggataaatatcaccaaacttttcaaaattataaagccaaaaagcaagagttagaagatttagaatcagcagaccaagcattgctacagcgtttagatttaatgaaattccaattagaagaattgtctgaagcacatctaaaagaaggcgaaatagagcaacttgaaatagatattaaacgcattcaaaactctgaaaaattaagcttagcgcttaataacgcacatatgacattaacggatgaaaatgctatcactgatcgtttatatgaactaagcaaccatttgttaacaataaacgatatagttccaaacaaatatgacaaattaaaagaagatattgatcaattttactacattttagaagatgcaaaacatgagttatatgatgaaatggctaatacagaattcgacgaacaagtgttaaacgagtatgaatctcgtatgaatttgctgaataatttaaaacgtaaatatggaaaagatatttcagaattaatcgcatatcaagaaaagcttaataatgaaatcaataaaattgaaaactatgaacaaagtacatcgcagttacgagaagaaataaatgcattgtataatcaagttatagaggttggacaagcgttatcaaagcagcgtcgtatagtcgctagggagttaagagaccacattgtatcggaaattcaaaacttacaaatgaaagacgcaaatcttgagatttcatttaaaaaattagaagaaccgaatattgatggaatcgaatttgtagaatttttaatcagtccaaataaaggggaaccattaaaaagtttaaataaaattgcgtcaggtggagaactttctagaattatgttagcgttaaaaagtatttttgttaaatcgagaggtcaaactgcaattttattcgatgaggttgactcaggtgtatctggacaagctgcacaaaaaatggcagagaaaatgcgagatatagcagaatatatacaagttatttgtatctctcacttaccacaagttgcatcgatgagcgaccatcatttattaatttcgaaatcatcaaaagatgatcgtacaacaacacaagttcaagagttaattagcgatgataaagtagatgaaattgcacgaatgatttcaggtgcaagtgttactgatttaactcgagaaaatgcaagagaaatgatacaacacaatcaaagacgtagataa

SEQ ID NO: 405969 - DNA, 1422 bp, Staphylococcus aureus
atgtcagagaaacaatatgatttagtcgttctcggtggaggtactgcaggatatgttgctgcgatacgtgcgtctcaattaggtaaaaaagtggcaatagtagaacgacaactattaggaggtacttgtctccataaaggttgtattcctactaaatcgctgcttaaatctgctgaagtatttcaaacagtaaaacaggcagcaatgtttggcgttgatgtcaaagatgctaatgttaattttgaaaatatgttggcacgaaaagaagacattattaatcaaatgtatcaaggtgtaaagcatttaatgcaacacaatcacattgacatttataatggcacgggacgtattctaggtacatctatattttcacctcaaagtggcacaatttctgtcgaatatgaagatggtgaatcagacttattacccaaccaatttgtattaattgcaactggttcttcgcctgcagagttgccattcttatcatttgatcatgataaaattttatctagcgatgatatattatcattaaagacgttaccatcaagtattggtattattggtggtggtgttatcggaatggaatttgcatcattgatgatagatttaggtgttgacgtaacagttatagaagcaggtgaaagaattttaccaactgaaagtaaacaagcttcacaactattaaaaaaatcattgtcagcacgtggtgttaaattctatgagggaataaaactttctgaaaatgatataaatgttaacgaagatggtgttacgtttgaaatttcctcagacataattaaagtagataaagtgttgctatcgattggtagaaaacctaacacatcagatattggtttaaacaacactaaaataaaactttcaacatcaggacatattttaacgaacgaatttcaacaaactgaagataaacatatttatgcagctggtgattgtataggaaaattacaattggcacatgttggatcaaaagaaggtgttgtggctgttgatcatatgtttgaggggaacccaatcccagtaaactataacatgatgcctaagtgtatttattcacaacctgaaattgcttctatcggtttaaacattgaacaagcaaaggcagagggaatgaaagttaaaagttttaaagtaccatttaaagcaattggtaaagcagtgattgatagccatgacacaaacgaagggtatagcgaaatggtgattgatcaatcaactgaagaaattgtgggtattaatatgattggtccacatgtaacagaattgattaatgaggcatcactgttacagttcatgaatggctcggcattagaattaggactaacaacacacgcacatccttccatctctgaagtgttgatggaattaggattgaaagcagaaagtagagctattcacgtataa

SEQ ID NO: 405970 - DNA, 993 bp, Staphylococcus aureus
atgattgattataaatcattaggccttagcgaagaagacctaaaagtaatatataaatggatggatttaggtagaaaaatagatgaaagactgtggttattgaaccgtgcaggtaaaattccatttgttgtaagtggtcaaggacaagaagcaactcagattgggatggcatacgcattagaagaaggtgatattacagcgccttattatagagatctagctttcgttacttatatgggtatctcagcgtatgatacgtttttatcagcgtttggaaagaaagacgatgttaactctggtggaaaacaaatgccatcacactttagtagtagagctaagaatattttgtctcaaagttcaccggtagcaactcaaataccccatgctgttggtgctgctttagctttaaaaatggatggtaagaagaaaattgcaacagcaactgttggtgaaggtagctcaaaccaaggtgacttccatgaaggtttaaacttcgcgggtgtacacaaacttccttttgtatgtgtcattataaataataaatatgcaatttcagtacctgattcattacaatacgcagctgaaaaattatcggatagagcacttggttacggtatacatggtgaacaagtagatggtaatgatccattagcaatgtataaagcgatgaaagaagcaagagatcgagctatttctggtcaaggttcaactttgattgaagcagtaacaagtcgtatgacagctcattcatcagatgatgacgaccaatatcgtacgaaagaagagcgtgaaacgcttaaaaaagcagactgcaatgaaaagttcaaaaaagagttgctttcagctggcattatcgatgatgcttggttggcagaaatagaagcggagcataaagacatcatcaataaagcgacaaaggctgctgaagacgcgccatatccaagtgtcgaagaagcctatgcatttgtgtacgaagaagggagtcttaactaa

SEQ ID NO: 405971 - DNA, 984 bp, Staphylococcus aureus
atggctaaattatcttatttagaggcgatacgccaggcacaagacttagcattacaacaaaataaagatgtgtttattcttggtgaagatgttggtagaaaaggtggcgtatttggtactactcaaggactgcaacaaaaatatggtgaagacagagttatcgatacgccattagctgagtcaaatattgttggaactgccattggtgcagctatggtaggtaaaagaccaattgcagaaattcaatttgcagattttattttacctgcgacaaatcaaattattagtgaagctgcgaaaatgcgttatcgttcaaataatgattggcaatgcccattaacgattcgtgcaccatttggtggcggtgttcacggaggactatatcattcacaaagtattgaaagtatatttgcttcatcgccaggtttaacaattgttattccttccacaccgtatgatgctaaagggcttttattatcatctatcgaatcaaatgatccagtattgtactttgagcataaaaaagcttatcgtttcttaaaggaagaagtgccagaagaatattacactgtacctttaggaaaagcagatgtgaaacgtgaaggtgaagatttaacagtattttgttatggattaatggtcaattattgtttacaagcagcggatattttagctgcagacggtatcaatgttgaagtcgttgatttacgaactgtttatccattagataaagaaacaattattgatcgtgctaaacatacaggtaaagttttacttgtaactgaagataatttagaaggtagtattatgtcagaagtgtcagcgattattgcagagcattgcttgttcgatttagatgcaccaatcatgcgtttagctgctccagatgtaccatctatgccattttctcctgtattagaaaatgaaattatgatgaatccagaaaaaatcttaaataaaatgcgtgaattagcagaattctag

SEQ ID NO: 405972 - DNA, 1275 bp, Staphylococcus aureus
atggaaataacaatgcctaagttaggtgagagtgttcatgaaggcaccattgaacaatggttagtttctgttggtgatcatattgatgaatatgaaccattatgtgaagttattacagataaagtgacagctgaagtcccttccacgatatcaggaacaattacagaaattttagttgaagcggggcagacagtagctattgatacaattatctgtaaaattgaaactgctgatgaaaagacaaatgaaacaactgaagagatacaagcaaaagtggatgagcatactcagaaatctactaaaaaagctagtgcaacagtggaacagacatctactgctaaacaaaatcaaccacgtaataatggtcgcttttcacctgttgtatttaaactcgcttcagagcatgacattgatttatcacaagttgtaggtagtggatttgaaggtcgtgtaactaagaaggatataatgtcagttattgaaaatggtggtaccacagctcaatctgacaaacaagttcaaacaaaatcaacatcagtagatacatcaagtaaccaatcatctgaagacaatagtgaaaacagcacaataccagtaaatggtgtgcgtaaagcaattgcgcaaaatatggttaatagtgtaacagagattccacatgcatggatgatgattgaagtagatgctacaaatcttgtgaatacgagaaatcattataaaaacagctttaaaaataaagaaggatataatctaacgttctttgctttctttgtaaaagctgtagcagatgctttaaaagcatatcctttattaaatagtagctggcaaggaaatgaaattgtcttacataaagacattaatatttcaattgctgttgctgatgaaaataaattatacgtacctgtgattaagcatgcagacgaaaagtcaatcaaaggtatagctagagaaattaatactttagcaacgaaagcgcgtaataagcaattgacagctgaagatatgcagggcggtacatttacggtaaataatactggtacatttggttcagtatcatcaatgggtattataaatcatccacaagcagcgattttacaagtagaatcaatcgttaaaaagccagtagtaattaatgatatgattgcaattcgtaacatggttaatttatgtatttcaattgatcatcgtattttagatggtttacaaacaggtaaatttatgaatcatattaaacagcgtatcgaacagtatactttagaaaatacaaatatatattag

SEQ ID NO: 405973 - DNA, 438 bp, Staphylococcus aureus
atggacatgaatttcgatttatacatgaacggtgttgtagaacaagcaaggaatgaaattgaatctgcgggatatgagcaattaactactgcagaagatgttgacaaagttcttaaacaagatggtacaacactagttatgatcaattctgtatgtggttgtgcaggtggtatcgcaagaccagcagcatcacatgctttacattatgacgtattacctgatcgtctagtgacagtatttgctggacaagataaagaagcgacacaaagagcgcgtgaatacttcgaaggttatgcgccttcaagtccgtcatttgcattagtaaaagatggaaagattacagaaatgattgaaagacatcaaatcgaaggtcatgatgtgatgaacgtaattaatcaattacaaacattattcaataaatattgtgaagaaagataa

SEQ ID NO: 405974 - DNA, 981 bp, Staphylococcus aureus
atgttaaagttaaatccttacaagattggatttagaacaataaaaacagcagtgggtatgactttaggtgtaattattagtaagctgttaggtttagataattatgcttcaagcgccatattagtcgtattatgtattaaacatacaaaagtacattcgctacaagcgattatttcaagattagtatcatgttttttagtattgtttttaggttcagcaatatttagtttattaggtcagagtccaattgtactcggtattatcgtattgttatttataccattaactgtcgtattaaaagtacaagaaggtgtcattacgagttgcgttatattacttcatgtttttaatgcaaaatcaattgatgcacatttaattgttaatgaaacattattactgttaattggactaagcattgcatttacaatgaatttaatgatgccaagtttagacaaacaactagacgaatacaaatgtaaaattgagcaacaaattgctgatatttttagtaaatatagttatatttgtgaaaaatatgaagataccattgcgattgaatttgaagtgttacttttaaatattaaaaaggcgaagtctatcgcgttccgagatgttaaaaatcattttgttagaaacgaaaattcatactatcattattttgatatgcgagaagagcaagtggaattgttaatgagaatgaaaccgctcatcgaaagtatctgtcataaagatccgcttttaaatgatgttgcgtcactgctgaaagaaattggtctaaatgtgaatagtaatgactatacagcaatgcgtttacacaatttgtatgagacgcgtttgaaattggatgaactgccattgccaacaacacacaaagcgcttaactcgagagcaagtattattcaaatattaaatgaattagaagaatatttacaaatcaaatcgcaatttggttcattgaaaatgcatagtgaagtagcttaa

SEQ ID NO: 405975 - DNA, 1134 bp, Staphylococcus aureus
atgattaatgagcaaagattacttaatacgttttttgaacttgtacaaatcgattctgagacagggaatgaatcaacaatccaacctattttaaaagaaaaattcatagcattagggttagatgttaaagaagatgaagcggctaaacatcctaaattaggtgccaataatctagtgtgtacaatgaatagtactatcgaagaaggcgaagtacctaaattatatttgacgagccatatggatactgttgtacccgcaattaatgtaaagccaattgtaaaagatgacggctacatatactctgatggtacgactattctaggtgcagatgataaagcaggattagcagcgatgcttgaagttttgcaagtgataaaggaacaacaaatcccacatggacaaattcaatttgtgattactgttggagaagaatcaggtttaattggtgctaaagaattaaattcagagttgttggacgcggactttggttatgctattgatgcaagtgctgatgtcggtactacggttgtaggtgcaccgacgcaaatgttaatttcagctaaaatttttggcaaaacggctcatgcaagtacgccaaaagagggtgttagtgctattaatattgcggcgaaagcaattagtcgaatgaaattaggacaagttgatgaaataactactgccaatattggtaagtttcatggcggttcagctacgaatattgttgcagatgaagtcattttagaagcagaggcacgttctcacgatccagaaagaataaaaacacaagtcaaacatatgactgatgtgtttgaaactactgcatcagaattaggtgggaaagcagtagttacagtggagcaaagttatccaggatttaaaattaatgataatgaagcggttgttaaaattgcacaagaaagtgctcgtaatttaggattatctgcaaatacaattatttctggtggcggttcagacggcagtattattaatacatttggtattccttcagtcattttaggagtgggttatgaaaaaatccatacaacaaatgagagaatgccgattaaatcattgaacttgcttgcaagtcaagtgttagaaataatcaaaatagttgcgcgacattcgaaatga

SEQ ID NO: 405976 - DNA, 1407 bp, Staphylococcus aureus
atgacacaacaaattggagttattggtttagccgttatgggtaaaaacctagcttggaatattgaatcacgcggatatagtgtatctgtatttaaccgctcaagtgaaaaaactgatttaatggttgaagaatcaaaagggaaaaatattcatccaacgtattcattggaagaatttgttaattctttagaaaaaccacgtaaaattttattaatggttcaagcaggtaaagctacggacgcaacgattgatagtttgttacctttattagatgatggagatattttaattgatggtggtaatacaaactatcaagatactatcagacgtaataaagcattagcacaaagtgcaatcaactttattggtatgggcgtttctggtggtgaaattggagcgttaactggtccgtcattaatgccgggtggacaagaagaagcttataacaaagttgcagatattcttgatgcaattgctgcaaaggcaaaagacggtgcttcatgtgttacttatattggacctaatggtgctggacactatgtgaaaatggtacacaatggtatcgaatatgctgacatgcaattaattgcagaaagttatgctatgatgaaagaattattaggcatgtctcatgaagacattgctcaaacgttcaaagactggaatgctggtgaattagaaagttatttaattgaaatcactggtgatattttcatgaaattagatgaaaataaagaagcattagttgaaaaaattcttgatactgcaggtcaaaaaggtacaggaaaatggacttcaattaacgcattagaattaggtattccattaacaatcattactgaatctgtatttgcacgttttatctcttcaatcaaagaagagcgcgtaaatgcttctaaagaattaaatggtccaaaagcatcatttgatggtgacaagaaagactttttagaaaaaattcgtaaagcattatatatgagtaaaatttgttcttatgcacaaggtttcgcgcaaatgcgtaaagcaagtgaagataatgaatggaatttaaaacttggtgatttagctatgatttggagagaaggttgcattatccgtgcacaattcttacaaaagatcaaagatgcttacgataataatccaggattacaaaacttattgctagatccttactttaaaaacatcgttactgaatatcaagatgcgttacgtgatgttgtcgcaactggtgttcaaaatggtgtaccaacacctggtttctcatcaagtattaattactatgatagttaccgtgctgctgatttacctgcaaacttaattcaagcacaacgtgactacttcggtgctcatacgtacgaaagaaaagataaagaaggcgtattccatacacaatggattgaagaataa

SEQ ID NO: 405977 - DNA, 372 bp, Staphylococcus aureus
atggaaaagttaaatcaagttatgttatatgttgatgatgtcgaaaaagcgaaagcattttggacagaaactttagaatttgttgttgtaagtgaaacaccgttagctgaggactatgttgcagttgaagtatcacctaccaaagatgctgaaacgtcattgacgattatggcaaaagaatttattgaaaagcatagcccggaagtgaacctaggaacaccatctttaatgtttaaagagaaaaactttgatgcattatactcaaaattaaatgatttaggtttaactgggcatgatatagtagaaatgaatggtcaacgtgtatttaattttcaagatggccaaggtaactattttgcagttagtgactaa

SEQ ID NO: 405978 - DNA, 1020 bp, Staphylococcus aureus
atggttacgattaaagatgttgcactaaaagccggtgtttctccttcgacagtttcaagagttataaaaggaaatcaacgtattagcgaagcgacaatttcaaaagtgaagaaagttatggaagaattgaattattttcctaataccgctgctagaactttaattacaaaccaaacatataaaattggtttagtgttaaaagggtctgaggagcctattcgactgaatccattctacatcaatgtattgctaggaatttctgaaacgtgtaaccagcatggctatggtacacaaacgacagtctcaaataatatgaatgatttaatggatgaagtttataaaatgattaaacaacgaatggttgatgcgtttatactgctctattcaaaagaaaatgatccgattaaacaaatgttaattgatgaaagcatgccatttattgtgattggtaagcctacatcggatatagatcatcaatttacacatatagataatgataatatattagcttctgaaaatttgacacgacatgttattgaacaaggtgtagatgaattaatatttattacagaaaaaggaaattttgaagtttcaaaagatagaattcaaggatttgaaacgatagcttctcaaaataaaattaattatcaaattattgagactagtaatgaaagagaagttatttttaattacatgcaaaatctacatacgcgtttgaaggacccaaatattaaacaggcaatcatttcgttagatgctatgttacatttagcgattttaagtgtcctatatgaacttaatattgaaattccgaaagatgtaatgacagcaacgttcaatgattcttatttaaccgaaattgcgtcaccaccacaaacctgtattgacatcaagcctcgaatgttaggtcaacaggctggtgcagcaattttaaatatattgaaaaacaaagcacaggatgttattgaactcgtcattatagatacagaattaaaaataagaaaatcaacacagcgatag

SEQ ID NO: 405979 - DNA, 1650 bp, Staphylococcus aureus
atgaataagcaatggtggaaagaagcagtagcatatcaagtatatccaagaagttttaatgatagtaatcacgatggtattggggatttacctggaatgattgataaattggactacttaaaagatttcggtatcgatgtcatttggctcagtccaatgtttaaatcacctaatgatgacaatggttatgatattagtgactaccaagagattatggatgaatttggaacgatggaagactttgatcgtttattaaaaggtgttcatgatagaggcatgaagcttattttagatttagttgtaaatcatacatctgatgaacatccttggtttatagaatccaaatctagtaaagacaatcccaaacgtgattggtacatttggcaagatccaaagccagatggctctgaacctaacaactgggaaagtatatttaatggatctacatgggaatatgatgctaatactgagcaatattatttccatttattcagtaaaaaacaacctgatttgaattggggtaatccggaagttagagatgctgtatttgaaatgatgaactggtggtttgataaaggcattgatggatttagagtagatgcaattacgcatattaagaagacgtttgaagcgggtgacttacctgtacctgagggtaaaacatatgccccagcatttgatgtagatatgaatcagccaggtatacaaacttggttacaagagatgaaagatcgctcattatgtaagtatgacattatgactgttggtgaagcgaatggtgtaagccctgatgatgctgatgactgggtcggggaagaaaatggtaaatttaatatgatattccaatttgaacatttgggactgtggaatagtggtgattctcactttgatgtaaattcgtataaatctgtattaaatagatggcaaaaacaacttgaaaataaaggttggaatgcgttgtttattgaaaatcacgaccaaccacgacgtgtatcgacgtggggtgacgatgacaagtattggtatgaatcagcaacaagtcatgcagctgtttatttcttgcaacaaggtacgccattcatttatcaaggtcaagaaattggtatgacgaattatccatttgaaagtattgaaacgtttaacgatgttgctgttaaaaatgactatcaaatagtgaaagctcaaggtggagatgtagacgctttacttgcgaaatataaagatgagaaccgagataattctcgcacaccaatgcaatgggatgatacgttaaatggaggatttacaaatggtgaaccgtggttcccagtgaatccgaattataaaactatcaatgttgcacaacaattagaagatgagcattcagtattacaattttataaagatttaattcaattaagaaagtctaatgatgtatacgtatatggtcaatttgatttagtagatgctgaaaattcacaagtttttgcgtacacgagaacattaaatgaaaagcaagttcttattgtaggtaatcttactaaccacgaagcagaattaactgtaccatttgatttaagccatggagaagtaaagctatttaattatgatgccaaagttaatttaaaacagttacgtccatatgaagcatgtgttatcgaactaaattaa

SEQ ID NO: 405980 - DNA, 867 bp, Staphylococcus aureus
ttggacgttatcaagcaaatacaacaggcaattgtttatattgaagatcgtttattagagcctttcaatttgcaagaattaagtgattacgttggtctttcgccataccatcttgatcaatcatttaaaatgattgtcggcttatctccagaagcttatgcacgcgcgcgtaaaatgacactcgctgcaaatgatgtgattaatggtgctacacgacttgtagatatcgctaaaaaatatcactatgcaaattcaaatgattttgcaaatgattttagtgattttcacggcgtatcacctattcaagcctctactaaaaaagatgaattacaaattcaagagcgattatatatcaaattatcaactactgagagagcaccttatccatacagattagaagagacagatgatatttcattggttggatatgcacgatttatagacactaagtatttgtcacatccttttaatgttccggattttttagaagacttgctcattgatggtaaaattaaagagttacgacgatataatgacgttagtccatttgaactatttgttattagttgtcctcttgaaaatggtttagaaatatttgtaggtgtaccaagtgaacgttatcctgcacacttagaaagtcgatttttacctggcaaacattgtgcgaaattcaatttacaaggtgaaattgattatgcaactaatgaagcttggtactatattgaatcaagtttgcagttaacattgccatatgaacgaaatgatttatatgttgaagtgtaccctctcgatatttcatttaatgacccattcactaaaattcagctttggattcctgttaaacagagtccttatgacgaagattaa

SEQ ID NO: 405981 - DNA, 1485 bp, Staphylococcus aureus
ttgagtactaaaaacaaacacatcccatgtttaatcacaatctttggtgcaactggtgacttaagccatcgtaagttgtttccatcaatattccatctctaccaacaagacaatttagatgaacatattgccatcatcggtattggacgtcgtgacattactaatgatgatttccgtaatcaagtaaaatcatcaattcaaaagcacgtaaaagatacaaacaaaattgacgcgtttatggaacatgtcttctatcatagacatgatgttagtaatgaagaaagctatcaagaattactagattttagtaatgaattagatagccaatttgaattaaaaggtaatcgactattctatttagcaatggcaccacaattctttggcgttatttctgattatctaaaatcttctggtcttactgatacaaaaggatttaaacgccttgttatcgaaaaaccattcggtagtgatttaaaatcagccgaagcattaaacaatcaaattcgtaaatcatttaaagaagaagaaatttatcgtattgaccactatttaggaaaagacatggttcaaaatatcgaggtattacgttttgcgaatgcgatgtttgaaccattatggaataacaaatatatttcaaacatccaagttacatcttctgaaatactaggtgttgaagatcgtggtggttattatgaatcaagtggcgcgctaaaagatatggtgcaaaaccacatgttacaaatggttgcattattagctatggaagcacctattagtttaaatagtgaagatatccgtgctgagaaagtaaaagtacttaaatcactgcgtcatttccaatctgaagatgttaaaaagaactttgttcgtggtcaatatggcgaaggctatatcgatggtaaacaagttaaagcataccgtgatgaagatcgcgttgcagatgactctaacacacctacctttgtttcaggtaaattaacaattgataactttagatgggctggtgtaccattctatattcgtactggtaaacgtatgaaatctaaaacaattcaagttgtcgttgaatttaaagaagtaccaatgaacttatactatgaaactgataaactgttagattcaaacctattagtaatcaatatccaacctaatgaaggtgtatctttacatctaaatgctaagaaaaatacacaaggtatcgaaacagaacctgtccaattgtcttactcaatgagcgctcaagataaaatgaatactgtagatgcatatgaaaatctattatttgattgtcttaaaggtgatgccactaacttcacgcactgggaagaattaaaatcaacatggaaatttgttgatgcaattcaagatgaatggaatatggttgatccagaattccctaactatgaatcaggtactaatggtccattagaaagtgatttactacttgctcgtgatggtaaccattggtgggacgatattcaataa

SEQ ID NO: 405982 - DNA, 921 bp, Staphylococcus aureus
atggaagttacattttttggaacgagtgcaggtttgcctacaaaagagagaaatacacaagcaatcgccttaaatttagaaccatattccaattccatatggcttttcgacgttggtgaaggtacacagcaccaaattttacatcatgcaattaaattaggaaaagtgacacatatatttattactcatatgcatggcgatcatatttttggtttgccaggattactttctagtcgttcttttcagggcggtgaacagaagccgcttacattggttggaccaaaaggaattaaagcatatgtggaaatgtctatgaatttatcagagtcacatttaaactatccaattacatatattgaaatcgatgatcatctgacatatcatcatgatggttttactgtagaggcgcatttacttaatcatggtattccatcatatggatatagagtaatggcacctgaaactacaggtacaatcaatgttgaagcgttaaaaaacattggtcttgaaccaggtcctaaatatcaagaagtaaaatctcatgatacatttgaacataatggtcaagtttatcaatcaaaagattttagaggtgagtccaaacagggtccagttgtagcaatttttggtgatacaaaaccatgttctaatgaacgtgtgatttctagagatgctgatgtgatggtacatgaagcgacctatatagatggtgaaaagcatttagccaacaattatcatcatagccatattgaagacgtatttgcattgataaaagaagccaatgttaaacgtacgttgattacacatttgagcaatcgctataatacagaagatataaatgaaatttatcaaacattgatacaaaatgaagatacacctaattttaattttgtaaaagattttgatagttttaaaatctaa

SEQ ID NO: 405983 - DNA, 816 bp, Staphylococcus aureus
atgaaactcgtattttatggagctggtaatatggcacaagctatatttacaggaattattaactcaagcaacttagatgccaatgatatatatttaacaaataaatctaatgaacaagctttaaaagcattcgctgaaaaactaggtgttaactatagttatgatgatgcgacattattaaaagatgcagattatgtatttttaggtaccaaaccacatgattttgatgctctagcaacacgcatcaaaccacatattacaaaagacaattgcttcatttcaattatggcaggtattccgattgattatattaaacaacaattagaatgccaaaatccagttgctagaattatgccaaacacaaatgcgcaagttggacactctgttactggcattagtttttcaaacaactttgaccctaaatctaaagatgaaattaacgatttagttaaagcatttggttctgtaattgaagtatcagaagatcatttacatcaagtaacagctatcaccggaagcggcccagcatttttatatcatgtattcgagcaatatgttaaagctggtacgaaacttggtctagaaaaagaacaagttgaagaatctatacgcaaccttattataggtacaagtaagatgattgaacgttcagatttgagcatggctcaattaagaaaaaatattacctctaaaggtggtacgacacaagctggccttgatacattgtcacaatatgatttagtatctattttcgaagattgtctaaacgctgccgtcgaccgtagtattgaactttctaatatagaagaccaataa

SEQ ID NO: 405984 - DNA, 756 bp, Staphylococcus aureus
atgaaaggacaacattttatagtgactggtggtacgagtggtttaggtttatcgattgtccgaaagttactagaaaataaagtgcatgtaacgttgttggtgcgtgatgttgataaagcaactagaatctttgaacaggaattggggaaaactataaatgttattccttgtgacttaaatgatttgaagtcgatacaggcactgcaatttgaagacaatacatcattcgatggattcatttatagtgcaggtttaggttatttcaaatctatttcagaccatagtttttcagaaatgattgaaacgtatcagcttaatttaattagttttaatgttttatatactgtgttgagaccatatttaacatctaacgcacatattgtaggtatttcaagtcaagctgcattttccacacaagcaaatgctgcacattatggggcatcgaaagcagggttttatgcattaatgaatgctttaagactagagtcaccaaacttacatatcatgacagttaatgttggcccgattgatacaccttttcatcaaaaagccgacccatcaatgaagtatgctaaaaagatgggggaaattatgcttgatgctaatcagcttgcagaagatatcatttatggcattaaaacaaaacaattggaaattaatcggcctaaatggatgcatcatgcgttgaaaatgtatcaaattgcgcctagattttttgaacgatgtttccctaaattatttaaaaataaagcataa

SEQ ID NO: 405985 - DNA, 249 bp, Staphylococcus aureus
atgaactgtcaatcggagagtgtggtaagactttgtgtacgatatgcggaacaactatcagtatttgaagaatttacagtgctggatattttaggcgatatttctgtagaccaaatttcagacggtacattatattatacttgtgaaaaattcaaactacttgtgttgcaaggaaatgtgctgggtgtacaaataataactaataatgatgaatcaacatgcgaagtgaaatatagaaagatgttttaa

SEQ ID NO: 405986 - DNA, 909 bp, Staphylococcus aureus
atgcaaaaaaatatattaaaaagtggtatttcattatctgaattaggtctaggttgcatgagtttaggtacagatttaaaaaaagccgaacaaattatagattgtgctgttgaaaatggtatcacttattttgatacagcagatatgtacgataaaggtataaatgaatcagttgttggtaaggcacttcttaaatatcaacaacgcgatgatatttttattggtacaaaagtaggcaatcgtttaacaaaagatggcagtacaacatgggatccgagtaaatcctatattaaagaggcagttaaaggttcactaaagcgtttaggtatcgatcatatcgatttatatcaacttcatggcggaaccattgatgacccattagacgaaacaataagcgcatttgatgaattgaaacaagaaggaattatacgtgcttacggtatttcttctattcgcccaaatgtaattgattattatttaaaacatagtcaaatcgaaacgataatgtctcaattcaatttgattgataatcgtccagaatcattattagatgcaattcacaacaatgatgttaaagtattggcaagaggacctgtgtctaaaggattattaacttcaaacagtgttaatgtgctcgacaataaatttaaagatggtatttttgattattctcatgatgaattgggtgaaacaatagcctctattaaagaaattgaaagtaatttatctgcattgacatttagttatttaacatcacatgacgtgcttggttccatcattgtaggtgcaagtagcgtcgaccaattaaaagaaaatattgaaaactatcatactaaagttagtttagatcagattaaaacagcaagagctcgtgtaaaggatttggaatataccaatcatttagtgtag

SEQ ID NO: 405987 - DNA, 543 bp, Staphylococcus aureus
atggatttaaatgaaaaaacaattgatcgaacagttatttataatggcaaaattgtagatgtagaaattcatacagtgacattaccaaacggtgaaacgtcaacaagagaattagtttatcataatggtgcagttgctgtttgtgcagtgacacctaaaaaagaagtcgtattagtgaaacagtatcgtaaaccagtagaaaaaccattgctagaaattccagctggtaaattagaagatgatgaagatagagtcgaagcggcaaaacgtgaattagaagaagaaacaggatatattgccaaagagttaacacatgttgtagatatgtatggttcaccaggtttttgcgatgaacaattatcaatatattttacggataatttagaagaaggtacagttcacttagatgaagatgaatttgtcgaagtcattaaagttccgattgagaatgttaaatcgatgctaatgaataaagaaatagaagatgcgaagactatcattgcattgcaacacctattattaaattataatcattctaaataa

SEQ ID NO: 405988 - DNA, 450 bp, Staphylococcus aureus
ttggaagaacgattaaatcgcgttaagcaacaattacaacaatcatcatataagctaacgccacaacgcgaagctactgttagagttctaattgaaaatgaaaaagatcatctaagtgctgaagacgtatatctgaaagtaaaagataaagcgcctgaaattggcttggcgacagtatacagaacgttagagttgttagctgaactaaaagttgtcgacaaaattaactttggtgatggcgtcgctcgttttgatttaagaaaagaaggcgcaaaacatttccaccatcatttagtatgtatggaatgtggtcgtgtagatgaaatcgatgaagatttgttaccagaagttgaaaatcgagttgaaaatgagttcaattttaaaattttagatcatcgtttaactttccatggtgtgtgtgaaacgtgccaagctaaaggtaaaggatag

SEQ ID NO: 405989 - DNA, 888 bp, Staphylococcus aureus
atggaaacaattattgaagaatatttgcgttttatacaaattgaaaaaggactaagttctaacacaattggtgcttatagacgtgatttgaaaaagtatcaagattatatgactgaacatcatatctcgcatattgattttatagatcgacaattaattcaagagtgtttggggcatttaatagaccaagggcaatctgctaaatctattgcgcgatttatttcaacaatccgtagttttcatcaatttgctataagagaaaaatatgcggcgaaagatccaacggtattattagattcaccaaaatatgacaaaaaattgcctgacgttttaaatgttgacgaagtgttggctttattagaaacgccagatttaaataaaattaatggatatcgtgatcgtacgatgttagaacttctgtacgcaacgggaatgcgtgtatctgaattgatacatttagagttagaaaacgtgaacttaataatgggatttgtacgcgtatttggtaaaggcgataaagaaagaattgtaccattaggcgacgcagtcattgagtacttaactacttatattgaaacgattagaccgcaacttttaaaaaagactgttactgaagtcttatttttaaatatgcatggtaaacctttatcacgacaagcaatatggaaaatgattaaacaaaatggtgtaaaggcaaacattaaaaagacgttaacgccacatacgttacgccactcttttgcgacacatttattggaaaatggcgcagatttaagagcagtgcaagagatgttaggtcactctgacatatctactacccaactctatacacatgtttcgaaatctcaaattagaaaaatgtataaccaatttcatcctagagcataa

SEQ ID NO: 405990 - DNA, 507 bp, Staphylococcus aureus
atgcaacaggcactgataaatttctattatcaatttcatactaagcaacattatttcctatgtcatgacattttagaagatgcatggaaagctgaaaataactacagtaagcaagatgcagttgttagtttaatcttgtttgcaactgcttgttaccattatcgccgcaataatttaaaaggcgcctataagtcttttaataaatctaaagaaataatacaaaatgctaaagatagagatgcgttataccttaatttaaatgattatcagttgttaattgagcaacagattgcaaaattgaatgcagcaaagcctttttcatctgttatattaccaataactccagtctttgaacgcatcatcaaggccaactatccagactatgattataatcaggaaacagcaacagatccttttattgtagaccatcacatgcgccgtgatcgttcagaagtgattgcagcaaaagaagaagcgattcaattaagaaaacatagacgtaattaa

SEQ ID NO: 405991 - DNA, 756 bp, Staphylococcus aureus
atgacgcaatacgaggtagatattatgtatgaagttaaattagatgctttcaatggaccattagatttattgctgcatcttatccaaaaatttgaaatagatatttatgatattcctatgcaagcattaacagagcagtatatgcagtacgttcatgcaatgaaacagcttgaaattaatattgcaagtgaatacctagtattagcgtcagaactcttaatgattaaaagtaagatgctattaccacaatcaacatcagatatggatgttgatgatgacccacgggaagatttagttgggcgtttaatagaatatcaaaattataaagaatatactgctattttaaatgacatgaaagaagaaagagatttttattttacaaaaagaccgacagatttatctcatttggaaacagatgaatcttgggatccaaatcatacgattgatttaactgaattaattgtagcttatcaaagagttaaaaatagagttgagttaaatacacctaaatctgttgaaatccgaaaagagacatttaccattcaacaagctacagaacaagtgacatcgagattgaaagataaagatcattttaacttctttagtctgtttacgttttctgagccaattgaacaagtagtcactcactttttagctattttagagatgtcaaaagcaggaataattaatattgagcagcaacgtaattttgaagatattaacattattagaggagtgaactaccattttggataa

SEQ ID NO: 405992 - DNA, 543 bp, Staphylococcus aureus
ttggataatcatggtatattagagtcgcttttatttacagctggcgatgaaggtttagatgaaaaacaactattagaaatattagatatgtcgaaagaccaactcgttgaattaattgaaaattattcatcacatggattaatgatacaacgatttggaatgacgtatgttttaacgactaaaaaagaagcggcaacgtatattgaacaattaattgaacaaaagtcacaaatgaaattatcacaagcagcaatggaagtactatcaattattgcttataaccagccattatcaagaagtgatattgaattaattcgtagtatcaattcagatggtgcagttaagacattgattgccaaaggactagttgaggctaaagtggttaatgaacagcgtagccaacagttaattactactgatttatttttaaatgtatttggtatttccaatatagaagatttgccgacaactgaagaagacgatgaagaaatggatgcttttttcagtaatctagtcaatcaaaaaggagaaaataatgactaa

SEQ ID NO: 405993 - DNA, 738 bp, Staphylococcus aureus
atgactaaagaattagaacgattacaaaaacgtatagctaatagcggttatacttcaagacgtaaggcagaaactttaatttctgaaggaaaagtgaaagtgaatggtacgactgtcactgaattaggaacaaaagtgaagccatcagatacgattgaagttgaaggtattaaaatagaactagaagacaaaatttacattttattccataaaccaactcaagtgataacaagtgtatctgatgatagaggacgtacagtggttacagattactttaaagatatagaagcacgtatttatcctgttggtcgtttagactatgatacttctggattgttattactcacaaatgatggtgaatttactaatttaatgacacatccaagatatcaaattaagaaaaaatatgttgcgaaattaaaaggttatttaatgagagaagaagtgaaagcgctagaaaaaggtattgaattagaagatggtatgacgcaaccggctgaagtgaaagttaagaaacaagataaagataaaaacacaacattggttgaaattacaattacagaaggtcgtaatcgccaagtcagaagaatgttcgaacattttggtcatcaagtgacgaaactgtctcgtattgaatatgggcctttaaatgttgtcggtttgaatgctggtgaaggacgtgtattgacgcctcatgaagtaaaagtgatgcgtcatttagcagaacatgggaaataa

SEQ ID NO: 405994 - DNA, 726 bp, Staphylococcus aureus
atgtcgaacgaaatacttatcgtagatgatgaggatagaatcagaagattacttaaaatgtatttagaaagagaatcttttgaaatccatgaagcaagtaatggccaagaggcttatgaacttgcaatggagaataattatgcttgcatactactagatttaatgttgcctgaaatggatggtatccaggtggcaactaaattgcgtgaacataaacaaacaccgattattatgttgactgctaaaggtgaagaaacaaaccgtgttgaaggttttgaatctggtgcagatgattatatcgtcaaaccattttcaccaagagaagtagtcttaagagttaaagcacttctaagaagaacgcaatctacaactgtagaacaaagcgaacctcacgcacgtgatgtgattgaatttaaacatttagaaatagataatgatgcacatcgcgtacttgctgataatcaagaagttaatttgactcctaaagagtacgaattattaatatatttagctaaaacaccaaataaagtatttgaccgtgaacaattattaaaagaagtttggcattatgaattctatggtgatttaagaacagttgatactcatgttaaacgacttagagaaaagttaaatcgtgtgtctagtgaagctgcgcatatgattcaaacagtctggggcgttgggtataaatttgaggttaaatctaatgatgagccggctaaatag

SEQ ID NO: 405995 - DNA, 1752 bp, Staphylococcus aureus
atgatgagccggctaaatagtgtcgtaattaaactgtggttaactattattttaatagtgacgacagttttaattttattaagtattgctttaattacctttatgcaatactatttcacacaagaaaccgaaaatgccataagagaagatgctagacgtataagttcactggtcgaacaatcacataataaagaagaagcaataaaatatagtcaaacattaattgaaaatcctggtgggttgatgattataaataataaacatcgtcaatcaacggcttcactttctaatattaaaaagcaaatgttgaatgaagtagtcaacaacgaccattttgacgatgtgtttgataaaggtaaatctgttactcgaaatgtaacgattaaagaaaagggctcatctcaaacatatattttgttaggctatccaacaaaagcacagaagaatagtcatagcaaatatagtggagtctttatatataaagacttgaaatcaatcgaagatacaaataatgctattacgattatcaccataattacggctgttattttcttaacaattacaacagtctttgcgtttttcttatcgtcaagaattacaaaacctttaagacgtttaagagaccaagctacacgtgtatctgaaggggattactcttataaaccttctgtcacaacgaaagatgaaattggtcaattatcgcaggcatttaatcagatgagtacagaaatcgaagagcatgtcgacgcattatccacatctaaaaatattagagacagcttaattaactctatggtagaaggtgtcctaggtattaatgagagtcgacaaattatcttatctaataagatggcgaatgatattatggacaatattgatgaagatgctaaagctttcttattaagacaaatagaagatacttttaaatcaaaacaaactgaaatgcgcgatttagaaatgaatgcacgattctttgttgtgaccacaagctatatcgacaagattgaacagggaggtaaaagtggtgttgttgtgacagttcgtgatatgactaatgagcacaatctagatcaaatgaagaaagatttcattgctaatgtatcacatgaattacgtacaccgatatcattacttcaaggttatactgaatcaattgtagatggtattgttacagaaccggatgaaataaaagaatcgcttgccattgtccttgatgaatcgaaacgtttaaatcgtttagttaatgaattgttaaatgtcgcacgcatggatgctgaagggttatccgtaaataaagaagttcagcctattgcagcgttactagataagatgaaaattaagtatcgccaacaagctgatgatttaggtctaaatatgacttttaattattgtaagaagcgtgtttggagttatgatatggatcgcatggaccaagtactaacgaacttaattgataatgcatcacgttatacgaaacctggagatgaaattgcaattacttgtgatgaaaatgaaagcgaagatattttatacattaaagatacaggtacaggcattgcaccagaacatttacaacaagtatttgatcgtttttataaagttgatgcagcgagaacgcgaggtaaacaaggtaccggtttaggtttgttcatttgtaaaatgattatcgaagagcatggtggttccatagatgttaaaagcgaattagggaaaggcacaacatttattattaaactaccaaaaccagaataa

SEQ ID NO: 405996 - DNA, 930 bp, Staphylococcus aureus
atgaaaaaattcattggatcagttttagctacgacattaattttagggggatgttccacgatggaaaatgaatcaaaaaaagacacaaaaacagaaacaaaatctgtaccagaagaaatggaagcttcaaaatatgtaggccaaggctttcaaccgcctgcagaaaaaaatgcgattgaatttgcgaagaagcatcgtaaagaatttgaaaaagtaggtgaacaattctttaaagataactttggactaaaagttaaagctacaaatgttgtaggtaaagatgatggtgtagaagtttatgtgcattgtgaagatcatggcattgtatttaatgcaagtctacctttgtacaaagatgccatccatcaaaaaggatcaatgcgcagtaatgacaatggtgatgatatgagtatgatggtgggtacagtgctgagtggctttgaatatcgagcgcaaaaagaaaagtatgataacttatataaattcttcaaagaaaatgaaaagaaatatcaatatacaggctttacaaaagaggcaattaacaagacacaaaatgtcggatataaaaatgaatatttttatattacatactcttctagaagtttaaaagaatatcgaaagtattatgaaccactgattcgaaaaaatgataaagaatttaaagaaggaatggaacgagcaagaaaagaagtgaattacgctgcaaatacagatgctgttgctacacttttttctactaagaaaaactttactaaagacaatacagtagatgatgtaatcgaactaagtgataaattatataatttaaaaaataaaccagataaatctacaatcacaatacaaatagggaaacccactattaatactaagaaagccttttatgatgataatcgtccaatagaatatggggtgcacagtaaagatgaataa

SEQ ID NO: 405997 - DNA, 2028 bp, Staphylococcus aureus
atgaataaaattaatgatagggatttaacagaattaagtagttactgggtttatcaaaatattgatataaaaaaagaatttaaagttaatggaaaaaggtttaaacaagtagacagttataatgatgataagaatagtaatttgaatggtgctgctgatattaaaatatatgagttattagatgataaaagtaaaccaactggtcaacagacaataatttatcaaggaacatctaatgaggcaattaatccaaataatccattaaaatcatcggggtttggagatgattggctccaaaatgctaaattaatgaataatgataatgaaagcacagattatttaaagcaaacagatcaattatcaaatcaatataaaataaagttagaagatgcagatagattatcaaatagtgattttttaaaaaaatatagaatggaatcaagtaacttcaaaaacaaaaccattgtggcggatggcggtaattcggaaggcggtgcaggagcaaaatatcaaggagcgaaacatccgaatgaaaaagttgttgctactgactcagcaatgattccttatgctgcttggcagaaatttgctagaccacgctttgataatatgattagttttaatagtaccaacgatttattaacatggttacaagatccattcatcaaagatatgccaggaaaacgcgttaacattaatgatggtgtgcccaggttagatactttaatagacagccatgtaggttataaaaggaagttaaatagaaaagataacacatacgatactgtaccactaatcaaaataaagtcggtaaaagatacagaaattaaaaatggaaaaaaagtaaaaaagactattaacataacattagatatggatgggcgaattccaataaatgtttggacaggagattcgattgcacgttctggaagaggaactttaattaaacttaatttagaaaatcttgatgcgttgagtaaactgattactggtgaaacaagtggtatgttagcagaatgcgtaatctttttaaatgaaagttttaacatctcagaaaatgaaaataaaaattttgcagatagaaagaaacaattatcagaaggatttaaggataagattaacttatttcagttagaagaaatggaaagaactttaattagtaaaataaactcacttgaagaagttgcagatgaaacaatagaaagtattagtgctgttaaacacttattacctgattttgcattggatgcattaaaagaaagaattaatgagttgtttaaaggtataaaatcttttatagaaaaagtgtatgatagtatagataatgaaattttagaaattttcaaaaatatagatcacgacttcagagatggagtatctgaagaaatgatgaaacatttgaaagtagtgaaacagaatatagaccaaataaaaaatcaaaatgatatttatggtaggcaaattgcagatattagaagtattatgaaacaacaagatgcaacaattttagatggaaattttcaaattaattgtagcggcgaaaatatggtacagggtctagttataccttctaattatttaggaagaaaaatgaaaatattaaaagaccatatcgatgatggtattaaaaaaatagcagactatgttcaaggtatatatgatgaatatgcatcgaaaattgtcgatgtaataaaatatttgattaatacaattcccaaaatacgtaagaatttaagacatgcaattgaaatgttaaatgtaaaaaagaaagaatttttgtccctgattcctaatgtaacttgtaattatattaaaactaaattagaagaattagataatactttaggcaaatgggagccttttcttaatgatttaaaagcagtgtcaccaattttagataaccatttagatgatattgttaagaacatgaagcctttgattgtacaaatgatatttgaaccatcacattatgatgatatgtttaattcaagaaaagctttaacgccagtgttctcaagcgttttataa

SEQ ID NO: 405998 - DNA, 1206 bp, Staphylococcus aureus
atgtggattgaaaaatttaaaaacaaaaataacgaaactaaatacagatactacgagaagtataaagatccatacacagataaatggaagcgcgtaagtgttgtgttgaacaagaatacaaaacaatcacaaaaagaagcaatgtttcgtttagaagaaaaaataaaagaaaaactaaacaacaagtcgtcaagcgaattaaaaactttgacttttcacgcgctattagatgaatggcttgaatatcatataaaaacatcaggttcaaagttgactactcttaataatataaaaataagaattagaaacattaaacgatacagctctgagaacttgcttttaaacaaactagatacaaaatatatgcagatatttattaataaattatcagatatctattctcaaaatcaagtaacccgtcaactcggagatatgaaaggagctattaaatatgcagttaaattttacaattatccaaatgaatatttgttaactaatgtcaaaattcctaaaagaagaaaaacaatagaggatatcgaaaaagatgaatctaaaatgtacaactatttagaaatgaaccaagtcctacagatacgtgatcatatactaaatgataataagttacacaagcgaaatcgcattttaattgccagcatcttagaagtacaggctttaactggtatgcgcataggagaactacaagcactgcaggaaaaagatatagatttattaaacaaaactatcaatataacaggtacaattcaccgcattaaatacgaggaaggattcggatacaaagacactacaaagactataagttcaaaaagaagtatcagcatcaattctagaaccgtagaaatttttaaaaagataatactggaaaacaaaatgttgaaaagatggaattcgagctatgttgacagagggttcatattcacaacaaaaaaagggaatcctttatgtaataatcaaatcgccggtgtgcttaagaaaactacaaaagctttaaatatgaataagaaagttaccacgcacacatttagacatacacacataactttattagtagaaatgaatgtttctttaaaagcaattatgaaaagggtaggacatgtagatgaaaaaacaaccattcgcatatatactcatgtaactgaaaaaatggatagagaactaactcaaaaactcgaaaacattccaagttag

SEQ ID NO: 405999 - DNA, 255 bp, Staphylococcus aureus
atgactcaatttctaggggcgcttcttcttacaggagttttaggttacataccatataaatatctaacaatgataggtttagttagtgaaaaaaacaagattatcaatactcctgtattattgattttttctattgaaacatgtttgatatggttttatacttttataatttttaataatgttgatttaaaaaatttgagagtttatgaatttggattgtataagcttattagacaaaagagacaagttgtttaa

SEQ ID NO: 406000 - DNA, 285 bp, Staphylococcus aureus
atgaatttggattgtataagcttattagacaaaagagacaagttgtttaataacaacggtaaaccagtatttatagttattaaagactttgaaaacagaatcattgaagagggtgaacttaaaacctataattcagctggtagcgatttcgatttactagaggttgagcgacaagatttcaaagtatctgatttagcgtcaaacgatgaattgtatattaaacatacacttgtagaccttaaacaacaaattaaattggatttatatttaatgaatgaatattaa

SEQ ID NO: 406001 - DNA, 126 bp, Staphylococcus aureus
atggcggataaaaacaaaaaacaagaagctacccgtagtaacccaataaacaaaagttttgaaaagccgggtgccagcgaaaacttaaaaagcactttatcagaaaaagctaagaaaaaagattaa

SEQ ID NO: 406002 - DNA, 396 bp, Staphylococcus aureus
atggaaacaaataaaacaatcgatttaatgaattatgtgaaatttccaaaaagatacacagaggcaaaaggcaaattagttgcacaaccaataactactataaatagcgcaagaagagttgaaaatgaagatatgactgtttgctacattttagatcaggatgatgatgtaatggactttatctttgacagagatataattactgtttactgtcctgaaaacggaactgcgactgatgaatatttttgtgaaattatatttaactcagatgacacatttaccctaaagcgattatctaattacgttaccattaaagatagaagctacccaatgtcaaaaataaatgacgtaaacattacgggcaaagtcgtcagattatttagagattttaaataa

SEQ ID NO: 406003 - DNA, 435 bp, Staphylococcus aureus
atgaaaaaagtaatcggactgctactagtaagtacattagctttaacagcttgtggtgaaaaagaaaaaccaaaaaaagaagaaaataaaaagtcacaaacacaaaaacacaaaggtagcaaaccaaaaacgcaacaagaaaaaatgaaaaaagttgaagataaaaatccacctaataatagcatacaaaataattcaaacaatcaaaaccaatcacaaaacaatcaacttaataataattcagatccatctaataatactcctgcaaatataaatgaaaacgattcacaaaatactaatttaaatgatgagtatgtcgtttcgcctggctggactaaagatgaacaggctaaagcttttgaagagtacaaaaaaggaaaagaagaggaagcaagagctggtgctagcgcagtaccaggagccaatattaactaa

SEQ ID NO: 406004 - DNA, 471 bp, Staphylococcus aureus
gtgtttatattgggattatacgaagaactttgcataaataacgaaaaaataaagatagaagaaactgaccagcttccaaatttccaacctggatgctatatgaacggaaaaatttatataaggcgtaatttatcagaagtacgtaaagcagaagtgttatatgaggaacttgcccaccacaagttgacgtatggcaacattttagaccaatcaaaatggattaatagaaaatttgaaaattatgcacgtagacatggttttacttcagctgtaccgctacatgaaattgtagaagctcacaactacggtgttcgtaatttgtacgagttgtcagagtatctgcagttgagtgaatcatacatactagaagctatagaacaatataaaaagatatatggtattggaactcactatggcgagtattctattacgtttgagccgttgagagtttttaaatataaggaaatataa

SEQ ID NO: 406005 - DNA, 330 bp, Staphylococcus aureus
atggagaataataaagtcagaaaaattttatctgaaaaccttcaagaacttatgaatgataaaaatattgatcagagagaacttgctgaagctattggagtttctcaacctacagtctccaattggattcaacaaactaaatatccacgaattaaaagaattcaacaacttgcagattacttcaatgtaccgaaatcaagaattactgaatcaaaaaaagatatacatcaagaaacaattgctgctcattttgataaagagggattaactgaagaagagattgaagaagtaaatagattcattgaatgggttagaaatagagacaaataa

SEQ ID NO: 406006 - DNA, 192 bp, Staphylococcus aureus
atgccggaacaattatccgtaagaaaatggagacttgtaagggacttgaaacagcaagaagtagcagatatattgggcgtcaatgcaaagacagttggtcattgggaaaaggatgacactaatttaagtaatgttacagtttacgctttagcaaagttatatgatattgaggtagaccagataaaggtctaa

SEQ ID NO: 406007 - DNA, 177 bp, Staphylococcus aureus
atgaacgaagaaaaattaaagatgattcttttacttcttgaagacgtaccaagagacgaatggaatcgattagtaaatgaagtaaataatcaatacagttaccaagctgacaaggtaggacttgccagttataactgtcaacaaatagcaaataactataagcactatggattttaa

SEQ ID NO: 406008 - DNA, 231 bp, Staphylococcus aureus
atgcataagagattgctcactcaatatttagataaagaaaacgttacttctttagatttacatttaattaatggtgaagttattaaagtacaagaacatataaaagatgctgaaagcaaaactctacacatcattcatccaaaagatagagttgtcagtttagatcatgttttgtatttcgacattaacgttaaaggtgaaaagaataacgatagtccttacccatcttaa

SEQ ID NO: 406009 - DNA, 216 bp, Staphylococcus aureus
atgaacaaaaaatcagaagggttagacatcagcataccaagggttttcagaagagatcacgcgccagtagaatctttaacagaaaatgaaggtcgactaagaaaggaaatattagaaagtattaaaaaaggttattacagctacttagaaataaacaaagtcttctatgtattagatagagaacttcaatacagagcgaataatagcaaaatttaa

SEQ ID NO: 406010 - DNA, 264 bp, Staphylococcus aureus
atgccaaaaatcatagtaccaccaacaccagaaaacacatatagaggcgaagaaaaatttgtgaaaaagttatacgcaacacctacacaaatccatcaattgtttggagtatgtagaagtacagtatacaactggttgaaatattaccgcaaagataatttaggtgtagaaaatttatacattgattattcaccaacaggcactctgattaatatttctaaattggaagagtatttgatcagaaagcataaaaaatggtattag

SEQ ID NO: 406011 - DNA, 162 bp, Staphylococcus aureus
atgagcaacatttataaaagctacttaatagcagtactgtgcttcacagtcttagcgattgtactcatgccgtttctatacttcactacagcatggtcaattgcgggattcgcaagtatcgcaacattcacattttataaggaatacttttatgaagaataa

SEQ ID NO: 406012 - DNA, 324 bp, Staphylococcus aureus
atgaccttacaacaaaaaatactatcacattttgcaacatatgacaatttcaattctgatggtgttgttgaaaattttgggatatctaaaacacatgcaaaatccactctttcaaaacttaagaaaaaaggaaagattgaaatggaaagttggggtatctggcgtgttattgaatcgcaattgcatttaagtgtagtcgaacgtaaaaaagaaattttagaagaacaatttgaattgttagcaagattaaatgaacaaagtgatgaccctagagaaatagaagaacgtatcaagttaatgattcgtctagctaaccaattttaa

SEQ ID NO: 406013 - DNA, 363 bp, Staphylococcus aureus
atggcagtattagaagatatttttgaagaattaaaactattaaataagaatttacgtgtgttaaacactgaactgtcaactgtagattcatcaattgtacaagagaaagttaaagaagcaccaatgccaaaagaagaaacagctcaactggaatcaattgaagaagttaaggaaacttctgctgatttgactaaagattatgttttatcagtaggaaaagagttccttaaaaaagcagacacttctgataagaaagaatttagaaataaacttaacgaacttggtgcggataagctatctactatcaaagaagagcattatgaaaaaattgttgatttcatgaaggcgagaattaatgcatga

SEQ ID NO: 406014 - DNA, 1167 bp, Staphylococcus aureus
atgaaactagatcactcaaatagagctcatgcaaagcttagtgcaagtggagcaaaacaatggctaaactgtccaccgagtattaaggcaagtgaaggtattgcagataaaagttcagtttttgctgaagaaggtacattcgctcatgagttaagtgagttatatttcagtcttaaatatgaaggcctaacacagtttgagtttaataaagcttttcaaaattataagcgaaatcaatattacagtgaagagttgcgcgaatatgttgaagagtacgtagctaatgtagaagaaaagtataacgaggctttgagtagagatgacgatgtaatagctttatttgaaacaaaattggatttaggtaaatacgtccctgaatcttttggtactggtgatgtcattatattttcaggtggtgtacttgaaattattgaccttaaatacggtaaaggcattgaagtttcagctatagataatcctcaacttagattatatggcttgggcgcatatgaactgcttagtttaatgtatgacattcatacagttcgcatgactatcatacaaccacgaatagataacttttctactgaagagttaccaatatcaagattacttcaatggggaaccgattttgttaaaccattagccagacttgcttataacggtgaaggtgagtttaaagcaggtagtcattgtagattctgtaagataaagcattcatgtagaacacgtgcagaatacatgcaaaatgtgcctcaaaagccaccacatttgttaagtgatgaagagattgcagaacttttatataaactgcctgatatcaaaaaatgggctgatgaagtagaacattatgcgctagatcaagcgaaaggaaatgataaaaactatcctggttggaagcttgtagaaggtcgttcgcgaagaatgataactgatacaaaagcaacgcttgaaaagttagttgaagcgggttataaacctgaagatattacagaaaccaagttacttagcattacgaaattagaaaaattaattggtaaaaaagcattttctaaaattacagagggctttatagaaaagccacaaggtaaattaacacttgctaccgagtctgataaacgaccagctataaagcaatctgctgaagatgattttgacaaactataa

SEQ ID NO: 406015 - DNA, 558 bp, Staphylococcus aureus
atgaaagcaaaagtattaaataaaactaaagtgattacaggaaaagtaagagcatcatatgcacatatttttgaacctcacagtatgcaagaagggcaagaagcaaagtattcaatcagtttaatcattcctaaatcagatacaagtacgataaaagccattgaacaagctatagaagctgctaaagaagaaggaaaagttagtaagtttggaggcaaagttcctgcaaatctgaaacttccattacgtgatggagatactgaaagagaagatgatgtgaattatcaagacgcttattttattaacgcatcaagcaaacaagcacctggtattattgaccaaaacaaaattagattaacggattctggaactattgtaagtggtgactatattagagcttcaatcaatttatttccattcaacacaaatggtaataagggtatcgcagttggattgaacaacattcaacttgtagaaaaaggcgaacctcttggcggtgcaagtgcagcagaagatgattttgatgaattagacactgatgatgaggatttcttataa

SEQ ID NO: 406016 - DNA, 1962 bp, Staphylococcus aureus
ttgaaatttatgaatatagatattgaaacatacagcagtaacgatatttcgaaatgtggtgcctataaatacacagaagctgaagatttcgaaattttaattatagcttattcgatagatggtggagcgattagtgcgattgacatgactaaagtagataatgagcctttccacgctgattatgagacgtttaaaattgctctatttgaccctgctgtaaaaaagtatgcattcaatgctaatttcgaaagaacttgtcttgctaaacattttaataaacagatgccacctgaagaatggatttgcacaatggttaattcaatgcgtattggcttacctgcttcgcttgataaagttggagaagttttaagactacaaagccaaaaagataaagcaggtaaaaatttaattcgttatttctctataccttgtaaaccaacaaaagttaatggaggaagaacaagaaacctacctgaacatgatcttgaaaaatggcaacaatttatagattactgtattcgagatgtagaagtagaaatggcgattgctaataaaattaaagactttccagtaactgcaattgaacaaacatattgggtttttgaccaacatataaacgacagaggtattaagctttctaaatcattgatgttaggagctaatgtgctcgataagcagagtaaagaagaattgcttaaacaagctaaacatataacaggtttagaaaatcctaatagtcctacacagttattggcttggttaaaggatgaacaaggattagatatacctaatttacaaaagaaaacggttcaggagtacttaaaagaagcaacaggaaaagctaaaaaaatgctagaaattagattgcaaatgtctaaaaccagtgtgaaaaaatacaacaaaatgcatgacatgatgtgcagtgatgaacgggtaagaggtctgtttcaattttacggtgccggtactggaagatgggcaggtagaggtgtacaacttcagaatttaacaaagcattatatttcagatactgaattagaaatagcaagagatcttattaaagaacaacgttttgatgatttagatttattactcaatgttcatcctcaagacttattaagtcaattagttaggacgacatttactgctgaagaaggtaatgaactagcagtaagtgatttttctgcaatagaggcaagagtcatagcatggtatgcaaaagaacaatggcgtttagatgtattcaacacacacggaaagatatatgaagcatcggcttctcaaatgtttaatgtaccggtagaaagcataactaaaggcgaccctctcagacaaaaaggaaaagtgtccgaattagctttaggctatcaaggtggcgctggagctttaaaagcaatgggtgcattggaaatgggcattgaagaaaacgagttacaaggtttagttgatagttggcgtaacgcaaatcctaacatagttaatttttggaaggcttgccaagaggctgcaattaatactgtaaaatcccgaaagacgcatcatacacatggacttagattttatatgaaaaaaggttttctaatgattgaactgcctagtggaagagctttagcttatccaaaagctttagttggtgaaaatagttggggtagtcaagttgttgaatttatggggttagatcttaaccgtaaatggtcaaagttaaaaacgtatggtgggaagttagtcgagaatattgttcaagcaactgcaagggatttacttgcgatttctatagcaaggcttgaagcattaggttttaaaatagttggccatgtccatgatgaagtaattgtagaaatacctagaggttcaaatggacttaaggaaatcgaaactatcatgaataagcctgttgattgggcaaaaggattgaatttgaatagtgacgggtttacttctccgttttatatgaaggattag

SEQ ID NO: 406017 - DNA, 186 bp, Staphylococcus aureus
atgcaacatcaagcttatatcaatgcttctgttgacattagaattcctacagaagtcgaaagtgttaattacaatcagattgataaagaaaaagaaaatttggcggactatttatttaataatccaggtgaactattaaaatataacgttataaatatcaaggttttagatttagaggtggaatga

SEQ ID NO: 406018 - DNA, 402 bp, Staphylococcus aureus
atggctagaagaaaagttataagagtgcgtattaaaggaaaactaatgacattgagagaagtttcagaaaaatatcatatatctccagaacttcttagatatagatacaaacataaaatgcgcggcgatgaattattgtgtggaagaaaggactcaaaatctaaagaagaagttgaatatatgaagagtcaaataaaagatgaagaaaaagggagagaaaaaatcagaaaaaaagcgattttgaaccgataccaacgaaatgtgagagcggaatatgaacaggaaagaaagagaagattaagaccatggctttatgatggaacgccacaaaaacattcacgtgatccgtactggttcgatgtcacttataaccaaatgttcaagaaatggagtgaagcataa

SEQ ID NO: 406019 - DNA, 258 bp, Staphylococcus aureus
atgagcgtaatcagtaacagaaaagtagatatgaacgaagcgcaagacaatgttaagcaaccagcgcactacacatacggcgacattgaaattatagattttatcgaacaggttacggcacagtatccacctcaactagcattcgcaataggtaatgcaatcaaatacttgtctagagcaccgttaaagaatggtcatgaggatttagcaaaggcgaagttttacgtccaaagagcttttgacttgtgggagggttaa

SEQ ID NO: 406020 - DNA, 201 bp, Staphylococcus aureus
atggcaacccaaagacaagttgaatatgtgatgtcattacaggagcaactggaattagaagactgcgaaaaatatacagacgaacaagttaaagcaatgagtcataaagaagttagcaatgtgattgaaaactataaggcaagcataagtaatgaagagctatacgacgaatgcatgtcgtttggtctgcctaattgttaa

SEQ ID NO: 406021 - DNA, 1059 bp, Staphylococcus aureus
atgaaagaacaacttaatcaactatcagcatatcagcctggtttatctccaagggcattgaaagaaaagtatggcattgaaggagatttatataaacttgcatcaaatgaaaatttgtatggaccatcgcctaaagttaaagaagcgatatcagcacacttagatgagttatattattatcctgaaacaggatcaccgacattaaaagcggcgattagtaaacatttaaatgtagatcaatcacgcattttatttggtgcgggattagatgaagttatattaatgatttctagagctgtattaacgccaggggatactattgttacaagtgaagcgacattcggtcaatattatcacaatgcgattgttgaatcagctaatgtgatacaagtacctttaaaagatggtggcttcgatttagaaggtattttaaaagaagttaatgaagatacgtcattggtatggttatgtaatccaaataatcctacaggtacatattttaatcatgagagcttagattcgtttttatctcaagtacctccacatgtaccagtaattatagatgaagcttattttgaatttgtgacagcagaggactacccggatacacttgctttgcaacaaaaatatgacaatgctttcttattacgtacattttcaaaggcgtatggattagcgggtttacgtgtaggatatgtggtagcaagtgaacatgcgattgaaaaatggaacatcattagaccaccatttaatgtgacacgtatatctgaatacgcagcagttgcagcacttgaagatcaacaatatttaaaagaggtaacacataaaaatagtgttgaacgcgaaagattttatcaattacctcaaagtgagtatttcttgccaagtcaaacgaattttatatttgtaaaaacaaagcgggtaaatgaactttatgaagcacttttaaatgtagggtgtattacgcgaccatttccaactggtgttagaattacaattggttttaaagaacaaaatgataaaatgttagaagttttatcaaactttaaatacgaatag

SEQ ID NO: 406022 - DNA, 1515 bp, Staphylococcus aureus
atgactaactttttcgacatattgagtgaacgtaaggggcaactcttttcgacaatgatagaacatattcaaatatcatttatcgcattattgattgcaactgctattgcggtaccattaggtattttattaacgaagactaaaacgatatctgaaatcgtaatgaatattgcggcaattcttcaaaccataccatcgttggcattattaggtttaatgattcctttatttggtatcggtcgtgtgccagcaattattgcacttgtagtgtatgcgttgttaccaattttaaggaatacgtatactggaattaaagaagttgatccatcactcattgaagcggctaaaggtataggtatgaaaccatttagacgtttaactaaagtcgaacttccgatagcaatgcctgttataatggctggtgtaagaacggctatggtattaattataggtacagcaacactagcagcattaattggtgcaggcggactaggagatttaattttattaggtatagaccgtaacaatgcatcgttgatattattaggtgcaattccagcagccttattggcaattatatttgatttaattttaagatttatggctaaattatcttataaaaagttattgatgacgttaggtgttatagtgatgattattatactggctatcgctattcctatgtttgcacaaaaaggtgataaaattacgttagctggaaagcttggctccgagccatcgattattacaaatatgtataaaattttaatagaagaagagaccaaaaatactgtagaagtgaaagatggtatgggcaaaacagcatttttatttaatgctttaaaatctgacgatatagatgggtatttagaatttactggaacagttttaggtgaattaacaaaagaaccattgaagtcaaaagaagagaaaaaagtttatgaacaagctaagcaaagtcttgaaaagaaatatcaaatgactatgttaaaaccaatgaagtataacaatacgtatgctttagctgtaaaacgtgattttgctaaacaacataatatacgtacaattggtgatttaaataaggttaaagatcaacttaaaccaggatttacattggaatttaatgatcgtccagatggttacaaagctgttcaaaaggcttataatttaaatttagataacatacgtacaatggaacctaagttgagatatcaagcgatcaataaaggtaatattaatttaatagatgcatattcaactgacgctgaattaaaacaatatgatatggttgtgttaaaagatgataagcacgtatttccaccatatcaaggagcaccattatttaaagaaagctttttaaagaaacatccagaaattaagaaaccgttaaacaaactagaaaacaaaatatctgatgaagatatgcaaatgatgaactataaagtaacagttaaaaatgaagacccatatacagttgcgaaagattatttaaaagcaaaagggttaatcaaataa

SEQ ID NO: 406023 - DNA, 978 bp, Staphylococcus aureus
gtgattaagtttaaaaatgtaactaagcgttatggcaaacatgttgctgtcgataacattagtttcaatattaatgagggtgaattttttgtgctaattggaccttcaggttgtggaaaaactacgacattaaaaatgattaatcgactcattcacttaagtgaaggttatatttattttaaagataaaccaataagtgattatccagtatacgaaatgcgttgggatattggatacgtattgcagcagattgcattattcccacatatgacaatcaaagaaaatattgcacaagtgccacaaatgaaaaagtggaaagaaaaagatatagataaaagagtagatgaattacttgaaatggttggattagaacctgaaaaatataaaaacagaaaacctgatgaattgtcaggggggcaacgacaacgtgtaggagttatacgtgcgttagcagctgatccaccagttattttaatggatgaaccgtttagtgcattagacccaatcagccgagaaaaacttcaagatgatttaattgaattacaaactaaaattaagaagacaatcatatttgttacacatgatattcaagaggcgatgaaacttggtgataagatttgtcttttgaatgaagggcatattgaacaaattgacacaccagaaggatttaaaaataatcctcaaagtgaatttgttaaacaatttatgggtagtcatttagaagatgatgcgccatgtgttgaagagaacgcaattatccgtgacttggatattatgaaaccaatcgatgaggttacatctatgagcgcttatccaattgtttatgacaatcaaccaattgaagtattgtatcaacttttatcagagagcgagcgtgtcattgtcatgcaagaagatagcgtaggtcaatatgttattgataggaaagatatcttcaaatatttgtcccagaaaaaggaggtagctcaacatgactaa

SEQ ID NO: 406024 - DNA, 1782 bp, Staphylococcus aureus
atgatgcaacaaacattatcgcattactttgggtatgaaacgtttcgaccaggacaagaagaaattattagcaaagtattagaccatcgtaatgtgcttggtgtcttaccaactggtggaggtaagtctatatgctatcaagtaccaggtttattgttaggtggtacaacaattgtaataagtccactaatatcattaatgaaagatcaagtggatcaattaaaagcgatgggaattcaagctgcttttttaaatagtagtttgactcaaaaagagcaacaacgtattgaaaaagcattatcaaatggagaaattcaatttttgtatgttgcaccagaacgatttgaaaaccgatattttttaaatatgcttcagcgtataaagattcacttagtcgcgtttgatgaagcgcattgtatttctaaatggggtcatgatttcaggccgagttaccaaaatgttatttcaaaagtatttacgttacctcaagattttacaataatagcgttgacagcaactgccacggttgaagtacagcaagatattagagaaaagttaaatatcgctcaaactgatcaaattaaaacgagtactaagcgtagaaacttaatttttaaagtaaatcctacttatcaacgtcaaaaatttatattggattatattaaaacacacgatgaagatgcaggtattatttattgttctacacgtaagcaagttgaagagcttcaagaagccttagaaagtcagaaaattgaaagtgttatatatcatgcaggtttgagcaataaagaaagagaagaagcgcagaatgatttcttatttgatcgtgttaaagtagtcgttgctacaaatgcttttggtatgggtattgataaatccaatgtacgctttgttattcattataatatgcctggagatttagaatcttattatcaagaagcgggtcgtgcaggtcgtgacgggttgaaaagtgaatgtattttgttatttagcgaacgcgatatcaatttacacgagtattttataacagtctctcaagctgatgatgactataaagataaaatgggcgaaaagttaactaaaatgattcaatatacaaaaacaaaaaaatgtctagaagcaacaattgtccattattttgaaccgaatgaaaaattagaagaatgtgaacaatgtagtaattgtgttcaacaagataaatcatataatatgacacaagaagctaagatgattattagttgcatcgctcgtatgaaacaacaagagagttatagtgttatcattcaagtgttaagaggagagtcaacagattatattaagtataaaggttatgaccaaatttcaacccatggtttaatgaaaggttacacaacatcagaattaagtcacttaatagatgaattaagattcaaagggttcttaaatgaaaatgacgaaatattaatgtgtgatacttcaattaaaaaattactcagtaatgaagtagaagtattcacaacaccatttaagcaaaaagcgactgaaaaagtatttataaatacggttgaaggggttgaccgagtattattcagtcagttggtagaagttcgtaaaaagttaagtgacaaattaacgatagcacctgtaagtatattttctgattacacgttggaggaatttgctaaacgtaagcctgcttcgaaacaagatatgattaatattgatggcgtaggtagttacaaattaaaacattattgtccagcatttttagaaacgattcaaaattataaagccaaagtatag

SEQ ID NO: 406025 - DNA, 1878 bp, Staphylococcus aureus
atggaagcatataaaattgaacatttaaataaatcttatgccgataagactatattcgataacctagatttatcaatttcagaaggtgaaaaaataggtttagtaggcataaatggtacagggaaaagtacgttgttaaaagtaattggtggtattgatgatgattttacagccaatgttatgcatccaaatcaatatcgaattcgatattcgtctcagaaacaggaccttaatgaagatatgacagtttttgatgcagtattaagttctgatacaacaactttacgcatcatcaagcaatatgagcaggcagtacaagcttatgcggatgaccaaagtgataaattgttcaagcgaatgatggatgcgcaagatgctatggatcaacatgatgcttgggactataacgctgaaattaaaacaatcctctcaaaactaggtatacatgatactactaaatacattaaagaattatccggcggacaacaaaaacgtgttgtacttgctaaaacattaatagaacaaccagatttattgttattagatgaacctacgaaccatttagacttcgaatcaatcagctggttgatcaattatgtgaagcaatatcctcatactgttttattcgtaacccatgatcgatattttttaaatgaagtttccactagaattattgaactaaacagaggtaagttagcgtcatatcctggtaactatgaatcttatattgaaatgcgcgctgaaagagaagtaacacttcaaaagcaacaacaaaagcaacgagctttatataaggaagaacttgcttggatgagggctggagctaaggctcgtactacaaagcaacaagctagaattaatcgatttaatgacctagaaaatgaagttaaccagcaatataaagacgataaaggtgaattgaatcttgcttattcaagattaggtaagcaagtgttcgaattagaagacttatcaaaggctattaatgataaagtattatttgaacatctgacggaaattattcaaaaaggtgagcgtattggtgttgttgggccaaatggagctggtaaaacaacactcttaaatattttgagtggagaagaccaacaattcgaaggtaaattgaagactgggcagacggttaaagtagcttattttaagcaaacagatgagaccctggatagagatattcgtatgattgattatttaagagaagaaaatgagatcgcaaaagaaaaagatggaacctcggtatctattacacaacttcttgaacgatttttatttccaagtgcaactcatggtaaaaaagtttataaattatctggtggagagcaaaagcgtttgtatttattacgtctactcgtacaccagccaaatgttctgttgttagatgaaccgacaaatgatttagatactgagactttaacaatacttgaagattatattcatactttcggtggtacagtgattaccgtaagccatgatcgctacttcttaaataaagttgcacagtcatattggtttattcatgatggtcagatggaaaagattatcggaacttttgaagattatgaaagttataaaaaatcattagataaaaataaatccacattgaagcaacaatctaaatcttctacaactgtacgtaagaaaaatggtttatcatataaagaaaaattagaatatgaacaattgatgaaacgcatagaacaagcggaagtaagaatggaagaaattgatgtgctcatgattgaggcaagtgcagattatgggaaaattaaagaattaaacgaagaaaaagaacaacttgaaattcaatatgatttagacatcacaagatggagtgagttagaagaaattaaagaacaacaataa

SEQ ID NO: 406026 - DNA, 1941 bp, Staphylococcus aureus
atgagttcacaaaaaaagaaaattagtctttttgcgttcttcttattaaccgtaataacgattaccttgaagacgtatttttcttattatgttgatttttctttaggtgttaaaggtttagtacaaaacttaatattattgatgaatccttatagtttagtagcactggttttaagtgtgttcctattctttaaaggcaaaaaagcattttggttcatgttcataggcggcttcttattgacgttcctattatatgccaatgttgtgtactttagattcttctctgattttttaacgtttagtactttaaaccaagtaggtaacgtagaatctatgggtggtgcggttagtgcatcattcaaatggtatgactttgtttatttcattgatacgttagtttacttattcattttaatatttaaaacaaaatggttagacacaaaagcatttagtaagaaatttgttcctgtcgtaatggcggcttcagtagcattattcttcttaaacttagcttttgctgaaactgacagaccagaattattaacacgtacatttgaccataaatatttagtgaaatatttaggaccttataactttacagtatacgatggtgttaaaactatcgaaaataatcaacaaaaagcgctagcatctgaagatgacttaacaaaagtattaaattatacgaaacaacgtcaaacagagcctaacccagaatattatggggtggcaaagaagaaaaatattattaagattcatttagaaagtttccaaaccttcttaattaataaaaaggttaatggtaaagaagtaacaccgtttttaaacaaattatcaagtgggaaagagcaattcacatacttccctaactttttccatcaaacaggtcaaggtaaaacatctgactctgaatttacaatggataacagtttatacggtttaccgcaaggttctgccttttcattaaaaggagataatacgtatcagtcattaccagcaattttagatcaaaagcaaggctacaaatctgatgtcatgcacggtgactataaaacattctggaacagagaccaagtatataaacactttggtatcgataaattctatgatgcaacatactatgacatgtcagataaaaacgttgtaaacttaggcttgaaagacaaaattttctttaaagattctgctaattatcaagctaagatgaaatcaccattctattctcatttaattacattgactaaccactatccattcacattagatgaaaaggatgcaactattgagaaatcaaacacaggtgatgcaacagttgatggttatattcaaacagcacgttatttagacgaagcattagaagaatatattaatgacttgaagaaaaaaggattatatgacaattcagtgattatgatttatggtgaccactatggtatctctgaaaaccataacaatgccatggaaaaactattaggtgaaaaaatcacaccggctaaatttacagatttaaacagaactggtttctggattaaaatccctggtaaatctggtggtatcaataatgaatatgctggtcaagtcgatgtaatgccaacaattttacatttggctggtatagatacgaagaactatttaatgttcggtactgatttattctctaaaggtcataatcaagtagttccattcagaaatggtgactttataacaaaagattataaatatgttaatggtaagatttattctaataaaaataatgaactcataactactcaaccagctgatttcgaaaagaataaaaagcaagttgaaaaggatctcgaaatgagtgacaacgtgcttaatggtgatttgtttagattctacaaaaatccagacttcaaaaaggtaaatccttcgaagtataaatatgaaacaggacctaaagcaaactctaaaaaataa

SEQ ID NO: 406027 - DNA, 1005 bp, Staphylococcus aureus
atgtcaatcataattgaaaaaagtggcttattcagtagctttcaggactttggcagaaggggatatgaacatgatggtgtaattccatgtggtgcacttgatactttagcacatgaaattgctaatcgattagttgcaaatgacaagaatgaagcaactttggaaatgactaataaaatggcaacgattcgttttacagaacctacgctgattgcattagcagggggtaatgtcaaagcttacactgagcatatgactatatctccatataaattgtatttgttagataaaggcgatgttttaaagtttagagaaacaagttatacatcgcgagtgtatttagctgtgggaggcggatttgaattagatgcatggttaggatctaactcaaccgactttaatgtaaaaattggtggttttaaaggtagaacattacaagatggcgatgaaataaagcttaagagagattatacagctcgtcatcataagttatttgaaaaccttgctcacacgaaacaaacagattggggtattgatggatacgccttgtcatttaattatatgtctgatgtatttcatgtcgttaaaaataaaggtacggaagattttaaagaagatgccattcaaagatttgtgaaacatgattataaagtaacgagcaaagcaaatcgcatggggatgatgcttgaaggtgaaaaaatcaaagctttttatgaagatatgccaccgtatcagactgtcaaaaaaggaacgatacaaattaagcgtgatggcacacctattatcctattaaatgatcattatacgctaggtagctacccgcaaatcggtacaatcgcaagttatcatttaacgaaattagcacaaaaaccgcaaggatcacgtttgaaatttcaatttatagatattttaacggctgaaaagaaccttgttaagtatagtaactggttaaaccaattattccatggaatagaatatagaatgcaattagaaatgatgaaataa

SEQ ID NO: 406028 - DNA, 711 bp, Staphylococcus aureus
atgaaaatatatagtcaaggtgaccaagccattgtagtcgcaattgaaaaagaagtatctaaaagtttaaccgaagatttattaacacttcgctcatatttaattgaacaaaattatccatttattatagaaattgtgccatcagaatcagacatgatgattgtctatgacgcaagggatatgattaaacaccataatatacaatcaccttttttatacatgaaagcactaatagaatcgattcatttaaacataaaacatgattttaaccagcaagatttgattgaaataccaattgtgtatggttcgaaatatggtccggatttagaatcacttttaaaacattacaaaatcaagctagaaacttttattgaattacattctaaggcgcaatattttgtttcgatgatgggatattcacctgggtttccttatttaactggattaaataagaaattgtatattaatcacacgagtaaacagaaaaaattcattccagctggttctgtagtacttgaagggaaaaaatgcggtattgtaactacggatacaattaatgattggttagttattggttatacaccattatcactttttaatccgaaagaatcagatttcgcacgcttaaagttaggcgataatattaaatttagacctatcaatgaaaatgaattagaagtaggagcgtttaaagatgtcaatcataattga

SEQ ID NO: 406029 - DNA, 609 bp, Staphylococcus aureus
atgcaattatttgaaacaatgaaaattgataatggacatatccctagacttacttatcatactaatcgcataaaatgttcttctgagcgattaaactttaaatttgatgaacatgcatggcgaaatgaattaaacgatgtaacaacaaagtatcacagtggtcaatatagacttaaaatcgtattaaatgctgaaagcaaatttgaaacgatagtgtcacctttacctgagaaaagtagttttacagcaaaatttcaagtgttgcccaaagtagttaatccaacttttataaaaaataaaacgacagaacgaaagcatttagcacacaatcatgaaacagatttaatattgctaacttcagaggacggcaaggtccttgaatttgatattggcaacattgtcattgaagaggatggaaaatggtacacaccaagttataaagatgatttcttaaaaggatgcatgcgtgattatttaatagatagtgacaaacttgttgaaaaagactttaataaaaacgaattgatttataaatatcataacaatgagatacgtttatttttgataaatagtttacgagaggttgccgatgtccacctttgcctttaa

SEQ ID NO: 406030 - DNA, 1152 bp, Staphylococcus aureus
gtgagaatagaatataattatcgctactatttaactgaaaatgaatataagcaataccatattcaattaaagggatttataaagaagtatgttgctactaagttggctgatgtgggagaagtgatacactttgcacaagcgcagcaacgacaaggtagatatgtctcgttatatttaagttacgaagcggcaaagtattttaatcatgctatgtgtacacattcattagctaaagatgatatttatgcagcagcttatagttttgaaaaagcggaaagcataaattcaacatatgaacatcaaacttcttatgtatcaaagtatcatttttcatttgttgaatcttctgaggttatgatgactaatattaaacgtgtccaacaagcaattgttgaaggcgaaacgtatcaagtgaactatacggcgcgcttaacggataacatttattatcctattagtactttatatgaacgattaactcaatttagtaatggtaattatactgcgttattacaaactgatgaaatccaagtagcgtctatctcaccagaattattttttcaaaaaggacaatttaacaatgtcgataacgttatcataagcaaaccgatgaaagggacaatgcctagaggtaaaacggaagctgaagatcaacagtattataaaacattgcaaacttcttcgaaagatcgtgcagaaaatgtcatgattgttgatttactaagaaacgatatagggagaatatcacagagtggctcaattaaggtgtataaactattttttattgaggcatataaaactgtatttcaaatgacttcgatggtaagtggaactttaaaaaataatacagacttaactcaaattttaacatcgttatttccttgtggttcgattacaggtgcaccgaaactgaatacaatgaaatatattaaacaattagaaagttcacctcgtggtatatactgcggagcaattggactattacttccaactgaagatgataaaatgatttttaatattccgattcgcactattgagtataaatatggacaagcgatttatggagtcggagcaggtattacaattgattctaagccaaaagatgaagtgaatgaattttacgcaaaaaccaagattttggagatgttataa

SEQ ID NO: 406031 - DNA, 594 bp, Staphylococcus aureus
atgattctagtcatagataataatgattcatttacatataatttaatagactatattaagactcaaacgaaactaacagttcaagttgttggtattgataatctgctgatagaagacgtcattaatatgaagccaaaagcaattgttatttcgcctgggccgggtaatccggatgattatcctatcttgaatgaagtgttagaacaattttatcagcgtgtacctatactaggtgtatgtttaggatttcaatgtatcgtgtcttattttggtggaaatatcattcacggctatcatcctgtacacggacatactacacagttacgccataccaatgaaggtatttttcaaggactgcctcaaaatttcaatgtaatgcgttatcattcattaattgctgacggagcgacttttccaaattgcttaaagattacagcaaaaaacgatgaagcgattattatggcatttgagcatattagatttccggtttttggtgtgcaatatcatcctgaatctattttgagtgaatacggttatcgacaagttgaattatttttatcgaaggtaggtgattactgtgagaatagaatataa

SEQ ID NO: 406032 - DNA, 669 bp, Staphylococcus aureus
atggaaagtgtattaaataatgaaaaagccatcgttgtctttagtggtggtcaagacagtacaacatgtctcttttatgcaaaaaaacatttcaaagaagttgaactcgtaacgtttaattatggccaaagacatgatactgaaattgaagtcgcaaaacaaattgcacaagatcaaggaatgaaacatcacgttttagatatgtcattattatcacaacttactccaaacgcattaacacaacatgatatggaaattactaataatgaagatggtatacctaatacatttgttccagctagaaatttacttttcttgtcgtttgcaggcgctctagcttatcaaattggggctaagcatattattacaggcgtatgtgaaacagacttttcaggctacccagactgtcgcgatagttttataaaatcaatgaacgtaacattaagcctagctatggacaaagattttgtcattcatactcctttaatgtggttaaacaaagcagaaacgtggaaattaagtgatgaactcgaagttttagattatattcgtacaaaaacattaacatgctataacggtatcattggggatggctgtggtgaatgtccagcttgtcatttacgtcaacgtggactaaatcaatatcttgaaagtaaaggagcgctttaa

SEQ ID NO: 406033 - DNA, 420 bp, Staphylococcus aureus
atgttacaacaaatctatcctagtacaacgcatccatatcaattcgaattaaataaagattttaatttttcggctgcacatcacattccatgtgaagaagcaggtatttgtcaaaatgtccatggtcatacttactttgttaatttaacaattgtcggtgataaactagatgacactggcttcttagtgaactttagccatttgaaaaagatgatacacggtaaatttgaccatcaactgttaaataacttacctgcttttaaaaacaaaatcccttcaactgaaatcgtagcggaaacaatttatcaaattgttaaagaaaatttggcatcgctcgaacaccaaccaaaatgtattcaagtatttgtaagagaaacaccaacaagttatgtcgtatttagaccaaaggaacaggtgtaa

SEQ ID NO: 406034 - DNA, 714 bp, Staphylococcus aureus
atggctaaaattcctgtactcgaaatattcggtccaaccattcagggtgaaggtcgagtaatcggtagaaaaacgatgtttgtgagaacagctggatgtgattatcgctgtagctggtgtgattctgcatttacttgggatggtagtgctaaaggcgatataaaactcatgaccgctgaagaaatttatgatgaattaaaacgaattggtggcgatttatttaaccacgttacaatttctggtggtaacccagcattaattaaaggtatccaagagttagttgacttatttcaagataaaggtattttcagcgcactggagacacaaggcagtaaattccaaccttggatgacacaaattgatgatttaacgattagtccaaaaccaccaagttcaactatgacacctgatttaaaaaagttagatgaagtgattacacaatgcgtaccttcatcattaaacttaaaagtagttgtattcgacgataaagattatgattttgccaaaatgatacaccaccgttatccagatattcccttctatttacaagttggtaacccatatttatcagacagcgtagataatcataccgaaaagttgttagaacgctacgagcagttggtggatttagttatgcaaagtaatgatatgaatcacgtttatgtgttaccacaacttcatacattactttggagcaataaaaaaggtgtataa

SEQ ID NO: 406035 - DNA, 585 bp, Staphylococcus aureus
atgattgtatatatattaattaatattgctatcgtcgtacttataactggattcaatttatataggcatcaaatgcaacatttatcattaagtgcaatgttgttatctattacgataaacgcctttataaatacattcataattgataaatataactttattactctgtgtactataacgatgtttatcatttggacgatactacagttttacattgataaaaaattaaaacctgtatacattacagaccaaaaatttattgctatcatattaacgattgttgtcagtttaacgcaacgtgttaccgacttttcaagtacacaatcaatatatatgtctattccatttttagcccctgccattttcatcattggtggtattatgttgtttatttcaacatttaatagcttagatgaaactgctgaaaataataacaaaataaagaaactaatgattaaaggacttatcattattaacatttcatttatcgttatgatggttttaacaccatattggtacttgtatttaatcgtctatcttattttcttgttgtttttattgtggcaaaaggtttataaattttaa

SEQ ID NO: 406036 - DNA, 441 bp, Staphylococcus aureus
atgaatacaaaatattttttagcagctggtgctgttatcacaacattagctttaggtgcttgtggtaattctaattcacaagatcaaggtaacaaaactgaacaaaaaacaaagtcagaagatagcaatgttaaaactgataaaacaaaacacctaacaggtacattcagttctaaaaacggtgaaactgttgaaggtaaagctgagattaaaaatggtaaattaatgcttactaactacaaatcatcaaaaggtccagatttatacgtctacctaacaaaaaatggcgacattaaaaacggtaaagaaatcgcaatggttgactacgataaagaaaaacaaacatttgatcttaaaaatgtagatttaagcaaatatgatgaagtaacaatctattgtaaaaaagctcacgtcatcttcggcggcgctaaattaaaataa

SEQ ID NO: 406037 - DNA, 474 bp, Staphylococcus aureus
atgaataaattattgctactcgttacatttatcattcgtgtgggttcaggtattgttatgttaatgcaaggctacgaaaaattaacgggcggatttacgctgaaaggtttagtaccagtcatcgctaacaatactgattcaccagagtggtataagtggtttttcgcaaatatagttgcacatacgacgtcattatttgatattgttgtcccactcggagagattgcaattggattaggtttaatttttggagtttttgcatatgctgctagtttctttggagcctttgttatgataaattatatcttagcagatatgatatttacgtatcctcttcaattaactttctttatccttttactaatgagtcactcattgttaaaacagatttcacttaaagaaatcattaattactttagaggtcgtaagaacagaggtgaaaaaatagatgacccacttactgatcgtggatga

SEQ ID NO: 406038 - DNA, 687 bp, Staphylococcus aureus
atgacccacttactgatcgtggatgatgaacaagacattgtagacatttgtcaaacctattttgaatatgaaggttacaaagtaacaacgacaactagcggtaaagaagcaatttctttactatcaaatgatattgatatcatggtacttgatatcatgatgccagaagttaatggttacgacattgtcaaagaaatgaaaaggcaaaaattagatatcccctttatctatttaactgccaaaacacaagaacatgataccatttacgccttaactttaggtgcagatgactatgtcaaaaaaccatttagtccaagggaactcgttttacgtattaataatttacttacaagaatgaagaaataccatcatcaaccagttgaacaactgtcgtttgatgaattaacacttattaacttaagtaaagttgtgactgtaaatggtcacgaagtccctatgcgtattaaggaatttgagttattgtggtatttagcttctagagaaaatgaagttatttctaaatcagaattacttgaaaaagtttggggatatgactattacgaagatgctaataccgtgaatgtccatatacaccgtattagagaaaaattagaaaaagagagctttacaacatataccatcacaactgtatggggattaggatataaatttgaaaggagccgataa

SEQ ID NO: 406039 - DNA, 1056 bp, Staphylococcus aureus
atggtgttatcaattagaagtcaaatcattattggcgtcgtatcgagtatactattaacttcaactattttagcaattgcatatattttaatgtggtttaacggccatatgacactaactttgaccttaacgacaataattacaagctgtttaaccttattaatatgtagtatttttattaatccacttatacaaaaaattaagcagtttaatataaaaactaagcaatttgctaacggaaattacgcaagcaatgataaaacgtttaattcaccaaaagaaatttatgaattaaatcaatcttttaataaaatggcttctgaaattacgcaacaaatgaatcaaattaaatccgaacaacaagaaaaaacagaactgattcaaaacttagcccatgatttaaaaacacctttagcaagcattatttcatattctgaaggactacgtgatggtataatcactaaggatcatgagattaaagagtcatacgacatattaattaaacaagcaaacagattatcaacattatttgatgatatgactcatattatcactttaaatacaggtaaaacatatcccccagaattaatacaactagaccaattacttgtatcaatattgcaaccatatgagcaacgtatcaaacatgaaaaccgcacattagaagtgaatttctgtaacgaaattgatgcattttatcaatatcgaacgccacttgagcgtattttaacaaacttacttgataatgcgctaaaattttcaaatgttggtagtcgcattgatattaatattagtgaaaacgaagatcaagatactatcgacattgctattagcgatgaaggtattggcattataccagaactacaagaacgtatattcgaacgtacattcagagtagaaaactctcgtaatacaaaaacgggtggttctggattaggcttatatatagctaatgaactcgcgcaacaaaataacgcaaaaatcagtgtaagcagtgatatagatgtaggaactacgatgactgtaacattacacaaattagacattacgtcataa

SEQ ID NO: 406040 - DNA, 984 bp, Staphylococcus aureus
atgaaaattagagtcgtcattccttgttttaatgaaggggaagtcattacacaaacacatcaacaattaactgaaatactttcacaagatagtagtgtgaaaggctatgattataatatgcttttcatagatgatggtagtacggataccactatagatgaaatgcaacatcttgccacaatagataggcatgtcagctttatttcttttagtagaaattttggaaaagaagcagctatgattgcaggttaccagcatagtactgaatttgatgcagtcatcatgatagattgtgatttgcaacatccacctgaatatattccgaaaatggttgaaggttttatggaaggctatgatcaagtgattgcaaagcgtgatagaagtggtgaaaattttagtcgcaaaacattaagccatttgtattataagttagttaattgctttgtagaagaagtacaatttgatgatggtgttggtgattttagacttttaagccaaagagctgttaaatccattgcatcacttgaagaatataatcgattttcaaaagggttatttgaatggataggctataatactaaagtgtttacgtatcaaaatgttgagagacaaaaaggggaatctaagtggtcctttaaaaagttatttaattatggtattgatggattgatttcctttaatagtaaacctttgagaatgatgatttatcttggcttgtttatcttttcaataagcgtgttatatattatctatttattcatcaatattatgatatctggtgttaatattccgggatatttttcaacgattgcagctattttattattaggcggcatacagttaatttcaattggtgttgtaggtgaatatattggcaggatatattatgaagttaaggcacgtcctaaatatattattcaagctacaaatctttcaagtcttgaaaatgatgagaaggatacccataaagtttattctaaataa

SEQ ID NO: 406041 - DNA, 840 bp, Staphylococcus aureus
atgttgaatgagatacaaatattaaataatggatacccgatgccttcagttgggttaggtgtttataaaatctctgacgaagatatgactaaagttgtaaatgctgcaattgacgcaggctatagagcgtttgatacagcatacttttatgataatgaggcttcactaggacgagcattaaaggataatggcgtcgatagagaagatttgtttataacaacgaagttatggaatgactatcaaggttatgagaaaacattcgaatatttcaacaaatcgattgaaaatttacaaactgattatcttgatttatttctaatacattggccttgtgaagcagatggtctatttttagaaacatataaagctatggaagaactttacgagcaaggtaaggtaaaagcaataggtgtatgtaattttaatgttcatcatctagaaaaattaatggctcaatcaagtatcaaaccaatggtgaatcaaattgaggtacatccatattttaaccaacaagaattacaagaattttgtgatcgtcacgatattaaagtgactgcatggatgcctttgatgagaaatagaggactactagacgaccctgtcattgttaaaattgctgaaaaatatcataaaacaccagcacaagttgtattacgttggcatttagcacacaatagaattattattccaaaatctcagacacctaaacgcattcaagaaaatatagatattttagattttaatttagaattaacagaagtagctgaaattgatgctttaaatagaaatgcaagacaaggtaaaaatccagatgatgtgaaaattggggatttaaaataa

SEQ ID NO: 406042 - DNA, 1350 bp, Staphylococcus aureus
ttggaaacttcgaccataattagtttgattatatttattctattaattgcattaaccactgtatttgttggttcagaatttgcattagtaaaaattagagcaacaagaattgaacagctagcagatgaaggaaataaacctgctaaaatagtaaaaaagatgattgctaatctagattattatctttctgcttgtcagttaggtataacagtaacatctttagggttaggttggcttggtgaaccaacgtttgaaaagctattacacccaatatttgaagcaatcaatttaccaactgcattaacgacgacgatttcgtttgcagtgtcatttataatcgttacgtatttgcatgtagtacttggtgaattagcgcctaaatctatagctattcaacatactgaaaagcttgctttagtatatgcaagaccattgttctatttcggtaacattatgaaaccattgatttggctgatgaatggttctgcacgtgttattattagaatgtttggtgtaaatcctgatgcccaaactgatgcaatgtcagaagaagaaatcaaaattattattaacaatagttataatggtggagaaatcaaccaaactgaattggcatatatgcaaaatatcttttcattcgatgaaagacatgcaaaagatataatggtacctagaactcaaatgattacactaaatgaaccttttaatgtagacgaattactagaaacaataaaagaacatcaatttacgcgttatccaattactgatgatggtgataaagaccacattaaaggatttattaacgtcaaagaatttttaactgaatacgcttctggaaaaacgattaaaatagcaaactatatacatgagttgccaatgatttcagagacaacacgtatcagtgatgcattaattagaatgcaacgtgaacatgtacatatgagtcttattatagatgaatatggtggaacggcaggtattttaacgatggaagatattttagaagaaatcgttggagaaattcgtgatgaatttgatgatgatgaagtgaatgatatcgttaaaattgataataagacattccaagtaaatggcagagtactattggatgatttaactgaagagttcggtatagaatttgatgactctgaggatattgatacgataggtggatggttacaatctcgtaataccaatttacaaaaagatgattacgtggatacaacttatgatcgctgggttgtttcagaaatcgataaccaccaaattatttgggtgatattaaactatgaatttaatgaagcgagacctactatcggacagtctgatgaagatgaaaaatcagaatag

SEQ ID NO: 406043 - DNA, 1182 bp, Staphylococcus aureus
gtgtcagaattaattatatataacggcaaagtttatactgaagatggcaaaatcgataatggttacattcatgtgaaagatggacagattgttgcaattggagaagtggatgataaagcagcaattgataatgatacgacaaataaaattcaagtgattgatgctaaaggtcatcatgtattaccaggttttattgatatacatattcatggtggttatggtcaagatgcaatggatgggtcatacgatggcttaaaatatctatccgaaaatttgttgtctgaagggacgacatcatacttggccactacaatgacgcaatcgactgataaaatagataatgcacttacaaatattgctaaatatgaagcggagcaagatgttcacaatgcagcggaaattgtaggtatacatttagaaggaccatttatatctgaaaataaagttggtgctcaacatccgcaatacgttgtacgcccatttatcgataaaattaaacattttcaagagactgctaacggattaataaagattatgacgtttgcacctgaagttgaaggtgcaaaagaagcgcttgaaacgtataaagatgacattattttttcaattggtcatacagtagcaacatacgaagaagcagttgaagctgttgagcgaggagctaaacatgtcacgcatttatataatgcagcgacgccattccaacatagagaaccaggtgtttttggagcagcatggttgaatgatgctctacataccgaaatgattgttgatggcactcattctcatccggcatcggttgcaattgcttaccgtatgaaaggtaatgaacgtttttatttaattaccgatgcaatgcgtgcaaaaggtatgcctgaaggagaatatgatttgggtggacaaaaagtaactgttcaatcgcaacaagcacgtcttgcaaatggtgcgcttgctggtagtattttaaaaatgaatcatgggttacgtaacttaatatcatttacaggtgatacattagatcatttatggcgagtaacaagtttaaatcaagccattgcattaggtatcgatgatagaaaaggtagtattaaagtaaataaggatgcagatcttgttattctagatgatgatatgaatgtaaaatctacaataaaacaaggcaaggttcacacatttagctaa

SEQ ID NO: 406044 - DNA, 1959 bp, Staphylococcus aureus
atgagagtaacagagttattaacaaaagatacaatagcaatggatttaatggcaaatgacaaaaatggtgttattgatgagttagtaaatcaattagacaaagcaggtaaattaagtgatgtcgcgtcatttaaggaagcgattcacaatcgagaatcacaaagtacaactggtatcggcgaaggtattgccattccacatgccaaagtggccgcagttaagtcaccagctattgcgtttggtaaatctaaagcaggcgtagattatcaaagtttggatatgcaaccagcacacttattctttatgattgcagcgccagaaggtggcgcccaaacacatctagatgctttagctaagttgtctggtattttaatggatgaaaatgtacgtgagaaattattacatgcttcatcacctgaagaagtactagcgatcatagatgaggctgatgatgaagtgacaaaagaagaagaggcagaagctgaagcacaacaagttgcaactgcagaacaatcatctaaacaatctaatgagccatatgtgttagcagtaactgcttgtccaacaggtattgcacacacatatatggcacgtgatgcattgaaaaagcaagcggataaaatgggtattaaaattaaagtagaaacgaatggttcaagcggcattaaaaaccatttaactgaacaagatattgaaaatgcaacaggtatcattgttgctgctgatgttcatgttgagacggatcgcttcgatggtaaaaatgtcgtagaagtaccagtagcagatggtattaaacgcccagaagaattaattaataaagcattagatacaagtcgtaaaccttttgttgcccgtgatggtcaaagaaaaggtaactcaaatgacagtcaagaaaaattaagcccaggtaaagcattctataaacacttaatgaacggtgtttctaacatgttgccacttgtaatatctggtggtattttaatggcaattgtatttttatttggagcaaattcatttaatccaaaaagctcagagtacaatgcgtttgcagagcagctttggaacattggtagtaaaagtgcattcgcgttaatcattccaattttatctggattcattgcacgtagtattgcggataaacctggtttcgcttcaggtcttgtaggtggtatgttagcaatttcaggtggttcaggatttattggtggtattattgcaggtttcttagcaggttacttaacacaaggtgttaaagccatgacacgtaagttaccacaagcattagagggattaaagccaacattaatttatccactattaacagtgacggctacaggcttattgatgatttatgcctttaatccaccagcatcttggttaaatcatttgttattagatggattaaacaatttatcaggttctaatattgtattattaggtttagttattggcgctatgatggcgattgatatgggcggtccattcaacaaagcggcatatgtttttgcaacaggtgcgttgattgaaggtaatgcagcaccaattacagctgcaatgattggtggtatgattccaccgttagcaattgcgacagcgatgttaatttttagacgtaaatttacaaaagaacaacgtggttcaattatccctaactatgtgatgggtatgtcatttattacagaaggtgcgattccatttgcagctgccgatccattacgtgttattccttcaatgatgattggttcaggtataggtggcgcaattgctttaggcttaggttcacgaattactgcgccacatggtggtattattgtaattgttggtactgatggtgcacacttacttcaaactcttattgcacttctagttggcacattagtttcagcattaatttacggtttaatcaaaccaaagttaactgaaacagaaatcgaagcttcaaaatcaatggacgagtag

SEQ ID NO: 406045 - DNA, 921 bp, Staphylococcus aureus
atgatttatacagtgactttcaatccttcaattgactatgtcatttttacgaatgattttaaaattgatggtttgaacagagcaacagcaacatataaattcgctggggggaaaggtattaatgtctcgcgcgtcttaaagacattggatgttgagtcaactgccttgggatttgcaggtggatttcctgggaaattcattatagatacattaaataacagtgcaattcaatcgaattttattgaagttgatgaagatacacgtattaatgtgaaattaaaaacaggacaagaaacagaaatcaatgcaccgggtcctcatataacgtcaacacaatttgaacaactgttacaacaaattaaaaatacaacaagcgaagatatagttattgttgctggaagtgtaccaagtagtattccaagcgatgcgtatgcgcaaattgcacaaattacagcacagacaggtgctaaattagtagtcgacgctgaaaaagaattggctgaaagcgttttaccatatcatccactatttattaaacctaataaagatgaattagaagtgatgtttaatacaacagtgaactcagacacagatgttattaaatatggtcgtttgttagttgataaaggtgcgcaatctgttattgtctcgcttggcggtgatggtgctatttatattgataaagaaatcagtattaaagcagttaatccacaagggaaagtggttaatacagttggctctggtgatagtacagttgcaggcatggtggctggaattgcttcaggtttaacgattgaaaaagcattccaacaagcagtcgcatgcggtactgccacggcatttgatgaggacttagcaacacgggacgctatagaaaaaataaaatcacaagttacgattagcgtacttgatggggagtga

SEQ ID NO: 406046 - DNA, 765 bp, Staphylococcus aureus
atgatgataattactgaaaaaagacacgagttaatattagaagaactttcgcacaaagattttttgactttacaagaattaatagatcgaactggttgcagtgcttcaacaatacgaagagatttatctaaactacaacaattagggaaattgcaacgtgtgcatggtggtgcaatgttaaaagaaaatcgtatggttgaggcgaatttaactgaaaaattagcaacgaatcttgatgaaaagaaaatgattgctaaaatagcagctaatcaaatcaacgataatgaatgcttatttatcgatgctggttcatctacattggagctaattaaatatattcaagcgaaagatatcattgtggtaaccaatggtttaacacatgtagaagctttacttaaaaaaggtattaaaacaattatgctaggtggtcaagttaaagaaaatacacttgctacgattggttctagtgctatggagatattaagacgatattgtttcgataaagcttttatcgggatgaatggattagatattgaacttggattaactactcccgatgagcaagaggcattagttaaacaaacagcaatgtcattagccaatcaatcatttgtacttatagatcattctaagtttaataaagtatattttgctcgtgtacctttgctagaaagtacgacaatcatcacatctgaaaaagcattaaatcaagaatcgttaaaagaataccaacaaaagtatcactttataggagggactttatga

SEQ ID NO: 406047 - DNA, 483 bp, Staphylococcus aureus
atggctaaaaataagaaaacgaacgcgatgcgtatgcttgatcgtgcaaaaattaaatacgaagttcatagctttgaggtaccagaagaacatttatctggtcaagaagtcgcagaactcatacaagcaaatgttaaaacagtatttaaaacgcttgttctagaaaatacaaaacatgaacattttgtatttgttatcccagtaagtgaaactttagatatgaaaaaggcagctgctttggttggagagaagaaattgcagcttatgcctttagataatttgaaaaatgtaacgggatacattcgtggtgggtgttcgcctgttggtatgaaaacattgtttccaacagtcgttgacaaatcgtgtgaaaattatagtcatatcagtgtgagtggtgggcttcgaacaatgcaaatcacaatagctgttgaggatttgattacaataactaaaggcaaaattggagcagttatccatgaatga

SEQ ID NO: 406048 - DNA, 465 bp, Staphylococcus aureus
gtgggtaaggggatgacagtaaaaaatttatttttaggctttgttgctgtaatattaaccgtttgtttaattggtttattaatattagcaacaaatgaagatgcgcttgctaaggtacataaaacaattaatacgcttaacgcgataaatgtatcaactgaagatacttataaaaagaaaatggatattctcaatattcatactgctaaagcatctgaagtgaatgaaaatgtgaaaaagcaaaatcattttaaacatcgtgtgaatgcaaataaatcaaattcttttaacgaacaagagtgccaagttattgctgatcgttatgcagataagcatatcaatgataattatggtttagaaagaatttctaagacaaatcatggatataattatgtgtattccaatgataattcaactagtaagcaacatgtaagtatttcaaatcaaggcataataacgaaataa

SEQ ID NO: 406049 - DNA, 1167 bp, Staphylococcus aureus
atgaataaacagatttttgtcttatattttaatattttcttgatttttttaggtatcggtttagtaataccagtcttgcctgtttatttaaaagatttgggattaactggtagtgatttaggattactagttgctgcttttgcgttatctcaaatgattatatcgccgtttggtggtacgctagctgacaaattagggaagaaattaattatatgtataggattaattttgttttcagtgtcagaatttatgtttgcagttggccacaatttttcggtattgatgttatcgagagtgattggtggtatgagtgctggtatggtaatgcctggtgtgacaggtttaatagctgacatttcaccaagccatcaaaaagcaaaaaactttggctacatgtcagcgattatcaattctggattcattttaggaccagggattggtggatttatggcagaagtttcacatcgtatgccattttactttgcaggagcattaggtattctagcatttataatgtcaattgtattgattcacgatccgaaaaagtctacgacaagtggtttccaaaagttagagccacaattgctaacgaaaattaactggaaagtgtttattacaccagttattttaacacttgtattatcgtttggtttatctgcatttgaaacattgtattcactatacacagctgacaaggtaaattattcacctaaagatatttcgattgctattacgggtggcggtatatttggggcacttttccaaatctatttcttcgataaatttatgaagtatttctcagagttaacatttatagcttggtcattattatattcagttgttgtcttaatattattagtttttgctaatgactattggtcaataatgttaatcagttttgttgtcttcataggttttgatatgatacgaccagccattacaaattatttttctaatattgctggagaaaggcaaggctttgcaggcggattgaactcgacattcactagtatgggtaatttcataggtcctttaatcgcaggtgcgttatttgatgtacacattgaagcaccaatttatatggctataggtgtttcattagcaggtgttgttattgttttaattgaaaagcaacatagagcaaaattgaaagaacaaaatatgtag

SEQ ID NO: 406050 - DNA, 423 bp, Staphylococcus aureus
atgaaattgcaaaaaagtaatcatactatactactagtgttggaaaaaggagaagatatcgttgaatgtataacaacctttgcagatgaccaagacttaacatttacatctgtcagcggcattggtgcatgtgatgacgttgtattaaaatttttcaatttaacaacgaaacaatacgaagaaaaacatattactgagccactggaattgacgagcttattaggtaatatttctcgtctagacaatggtcattttgcacatttgcatgctactttcggtactcaatcatatgaaacttttagcggacatctcgctaaagcaattgtttctgcaactgctgaaatcattcttactgtaactgatttggacattcaacgttcattcaaagatgcagtcgttttaaatttacttgatcctcaatag

SEQ ID NO: 406051 - DNA, 618 bp, Staphylococcus aureus
atgcaatctcgatacatcgctagaatttactttttaattttatttatcgtctccctttttgagactaaaatttttcaatttatgactttaaatttgtttttagcatatataccttttgagcttagtctattattacgattattcaaaccgaataaaaagtatgaatggccactctttatcatatatagttttatatttgtgttacttttaccaaatacattttatatggtaactgatttaatccatttgaaccaatttcaattcaacttttacgcaggactaaatttaagtgagtggaaatactttacctatttactgcttggtgtcttcttagcggtttatgtgatgattttaatctattttgaaatactaacattgacttctcaccgttggcttaatagattaattgttgtcgtgctaatgtttttaaatggattcggaatttatattggtcgtttcttacgcttacattccgtttatttctttaatgagcccttacatgttctaaatcacattctagaaagtctaacgcttaaaactgctatgtttgtatgttttatggttgtcatgcaagcagcaattctattatttggaaaaggagtgcgtttgaacaagtga

SEQ ID NO: 406052 - DNA, 285 bp, Staphylococcus aureus
gtgacaataaatataatcgttttaatagtatctatcattgtctttcaattgattattggacacatatggcatgatattggtttaagttatttaagaagtatcttactcatgatgctgccatttggactaggtgtatttatacaacaagtgtcgtattacgaacgacaatatcctaaatggcaagtgcctcaaaacataaaagttagattgaaatatatttatctcgctacgtttttagagtatgtcgtactatacctcactttatttacggacatactaagataa

SEQ ID NO: 406053 - DNA, 1374 bp, Staphylococcus aureus
atggcaattgctgtgttattaaatcgaatgtttcgaatggaacacaatccattatttgaatatatttatcaacaaaaagaagacattgatgcatgttattttatcattccggaagaggacatgtcttcagcttctgatttgaaagcacagttttatcgcggtactttgcagcgcttttaccaatcgttgcacgcagaaaagcttacaccttatgttatgtcttatgacgatatcatttcattttgtaaagaaaacaatatctctgaagtagtgactgcgggtgatattatgagttatcatcttgaagaatatgatattttacatcaacgttctttattcaatgaagcacgcattgccgttactttgatacgtgggaatcattactttaaagcgagtaaaacaatgaatcaacaaggggagccatacaatgtttttactagtttctataaaaaatggcgaccttacttgaggcatagagacgtatatcactatgatttaaaatcattcgaagactttgtcattgcatcacctgatgatttagtgtttgatgacatagcatttggatcctcacaaataattgaacagaataaatggcaacattttttagatcaagatatacagaattacgaaagcggaagagactatttacctgaagtattaacaagtcagctaagtgttgctttagcatatggattattagatattattgaaatttttaatgatttattggcgcgttatgatgaagatgaggcaaactatgaagcatttatacgtgaactcatttttagagaattttattatgtgttaatgacacagtatcctgaaacctcataccaagctttcaaacctaaatatcgacagataaaatggtcgcaaaatgaagcggattttaatgcatggtgcgaagggcaaacaggatttccaatcattgatgcagcaataatggaattgacacaaactggttttatgcataatcgaatgagaatggttgtgtcgcaatttttaaccaaagatttatttatagattggacatggggagaaaaattctttagaaagcaccttattgactatgatgcagcatcaaatattcatggatggcaatggtctgcttctacaggtacggatgcagtgccgtattttagaatgtttaatccaataagacagagtgaacgctttgatgctaaagctttgtatatcaaaacatatcttccgatttttaatcaaattgatgcaaaatatttgcatgatacacaacgcaatgagtccaacctttttgaacaggggattgaattaggtagtcattatccaagacaaatggtagatcatcaagaaaaacgtacacaagttttagctacatttaaagcgctagactaa

SEQ ID NO: 406054 - DNA, 1554 bp, Staphylococcus aureus
atgtcagaagaaaaacatgtagttgaacatgaacaacaaaagaaagaaaagacaaaaaagcaatacaagccattttggattgtcatgagttttataatacttatagttgtactattactcccggcaccttcaagtctgccgataatggctaaggcagtactagctattttagcttttgcagttattatgtgggtaacggaagctgtatcatatccggtgtcagcaactttaattattggcttaatgatattacttttaggatttagccctgttcaaaatttaggggagaagctaggtaatccgaaaagtggcagtgctattttagctggaagtgaccttctaggaactaatcatgcattatcattagcgtttagtggatttgcaacttcagctgtagctctcgttgcagctgcattatttttggctgctgctatgcaagaaacgaatttgcataaaagactagctcttttagtgttatcaattgttggtaataaaactagaaatatagttattggagcaattatcgtttcaattgtacttgcatttttcgttccttctgcaacagctagagcaggggcagttgtaccaatcttgctgggtatgattgcggcatttaaagtttccaaagatagcaagttagcgtctttattaataattacttcagtacaagctgtgtcaatttggaatattggtatcaaaacggcggcagcacaaaatatcgtagcgattaattttataaaccatcaattaggatttgatgtttcatggggcgagtggttcttatatgcagcgccttggtccatagttatgtccgtagctttatatttcatcatgattaaagtgatgcctccagaaattaatacaatagaaggtggtaaagatttaataaaagaagaattgcataaacttggccccgttagcccacgtgaatggcgtttaattgttatatcgatgttattattactgttttggtcaactgaaaaagtattacatccgattgactctgcatccattactattattgctttaggtgttatgttaatgccgaaaattggtgtcatgacatggaaacatgttgaaaataaaataccatggggaacaattatcgtgtttggtgtaggtatttcactaggtaacgttcttttgaaaacaggtgcagctcaatggttaagtgatcaaacttttggtgttttaggtttaaaacatttacctattatcgcgacaattgcgcttatcacgctttttaatatattgattcatttgggctttgcgagtgcaacaagtttatcatcagcgttaatacctgtttttatttcgctaacctctacgttacacttaggagaccagtctataggatttgttttaattcaacaatttgttattagttttggtttcttattacctgttagtgcacctcaaaatatgttggcttatggcactggtacttttacggttaaagatttcttgaaggcaggtataccattgacaattgtagggtatattctagtgatagtttttagcatgacttattggaaatggttaggtttgctttaa

SEQ ID NO: 406055 - DNA, 288 bp, Staphylococcus aureus
atgacaaacgaagataaacgtttcgaacaattaagatttgaacgcaaatttatagttattccgtatttaatttatgcagtcattgtattactattaaatattttctattctgatttgaaaataacaatgacattattcggacttttctttgcgtataatgtagtcattttgttcatagcatttgttaaacattataaacgcacattgttactaagtcttatattaacagtgcttagtggcgcggcattctttggaattatttatgtttatggcattaatcatttttaa

SEQ ID NO: 406056 - DNA, 909 bp, Staphylococcus aureus
atggaacaaataatgattaatcactatgttcatttttctaggcttgtacaaggtttttggcgtgcaaatgaatggaagatgactgcgaaagagttaaattattttataaatgaattagttgaacgtggaattacaacgatggatcatgctgatatttatggagattatcaatgtgaatcactgtttggtaatgctttggatttatcacccgaattaagaaataaaattcaaattgttacgaaatgtggtatcattttgccttctaagcaatttgattttacaaatggacatcgttatgatttgagtagtaagcacatcgtgaaatctgttgaacagtcattaatcaatttgaatgtagattatttagatagtctactcattcatcgtccttcaccattgatggatccagaacaagttgctgatgcattaactaaacttgttaaacaaggtaagttgaagtcattcggggtgtcgaattttaatcattcacaataccaattgttaaatcaatatattatgaaagaaagactacatattagcatcaatcaattagaattatcgccatatcacgttgatagtttacaagatggaacaatggattcaatgtatcaaaaccatgttcaaatcatggcttggagtccttttgcaggcggtaaaattttcgacaaggaagatattaaagcgcaacgtattatgaaagttgttcaatcaatagctgacaaatatggtgtgagtgacacagctgtgatgatagcgtggttagtaaaaataccgcatcgtatcatgccgatacttggaacaagtcagttaaagcgtattgatcaagcaatcgaagggctacaacttaatttagatgatcagtcgtggtttgacatttacaccgctattatcggacaagatattccgtaa

SEQ ID NO: 406057 - DNA, 927 bp, Staphylococcus aureus
atgaaaaataataaagatgaaaaaataagaatatccataattaacggatttttgggtagtggtaaaaccacgttactgacacattatattagtgaattattaaaaaatgatgagaaaattaaaatcatcatgaatgaattcggtacttttgatattgatagcaatagtatttcaaatgaaattgaagtccattcattgattaatggttgtgtttgttgcgatcttaaacaagaacttgtctatgaactaaaagccattgctttaaaaggggacgttaatcatgtcatcatagaagcgacaggcattgcgcatcctttggaattactagttgcatgtcaagatccgcaaatcgttaatttctttgaaaagccgattatttatggtgtattagatgcgactcgatttttagaacgtcatcaatataccgaaaatacagtttcgctgatggaagatcagttgaaactaagtgacatgattattattaataaaattgatcttataactgatgacagtcttgagaaaattgataagcaattaggtatgatttgtgcaagtattccaacttataaaacaacctatggaaaagtttcgttggaagaattggacttaactgttaaagacagagagatatcgtctcatcatcaccatcatcatgggattaaaagtatgacttacacgtttacaggtccgattgatcgtcatttgttttatcaatttataatgaaattaccggaatctgttctacgtttgaaaggttatgtgtcatttagagatcaaccaaatgcaatttatgaatttcaatatgcatatggtttaccagactatggaataattggcatgcaattaccattaacgattgttattattggtgaaactttagatacaaatcacatacgtaatcaattggatatgctacaatttacgtaa

SEQ ID NO: 406058 - DNA, 444 bp, Staphylococcus aureus
atgtctgatcaacataatttaaaagaacagctatgctttagtttgtacaatgctcaaagacaagttaatcgctactactctaacaaagtttttaagaagtacaatctaacatacccacaatttcttgtcttaacaattttatgggatgaatctcctgtaaacgtcaagaaagtcgtaactgaattagcactcgatactggtacagtatcaccattattaaaacgaatggaacaagtagacttaattaagcgtgaacgttccgaagtcgatcaacgtgaagtatttattcacttgactgacaaaagtgaaactattagaccagaattaagtaatgcatctgacaaagtcgcttcagcttcttctttatcgcaagatgaagttaaagaacttaatcgcttattaggtaaagtcattcatgcatttgatgaaacaaaggaaaaataa

SEQ ID NO: 406059 - DNA, 1674 bp, Staphylococcus aureus
atgaaaacacgactaaaatttcaagtagataaggatttattgttagctatagttgttggtgtttgtggaagtttagttgcgctcgccatgtttttcttaagtggttatatggtgacacaaagtgcacttggtgcgccactatacgctctgatgattttagtcgttacagtaaaattgtttgggtttttaagagctattactcgatacgtagagcgccttatttctcataaagctacatttacaatgctacgtgatattcgggtacagtttttcggtaaattagtaaatgtcattcctaatgtttaccgtaaactgagttctagtgatttaatttcacgtatgattagtcgtgttgaggcattacaaaatatatatttacgtgtttattatccaccagtcgtcatcggtttgacagcgctagttacagtcatagttttggcgttcatttcaatcggccatgcgctattgattatggttagcatgttgttcactttactcattgttccttggttaagctcaaaaaaagcacgtactttaaagaaacatgcagctaatgaacaggcccgatttttaaatcatttttatgattataaagctggtatggatgaactacgtcgatttaatcaaattaatcattatcgagataatttgatggctaaattaaatcattttgataaattacaacttaaagagcaacgctttttaacgatttatgattttatattaaatattattgctatgctttcgatttttggtagtttagttctaggattaattcaaattaatgcaggccaactaaatattatttatatgacgagtatagttttaatggtcttaactttatttgaacaagctgtaccaatgacaaatgtcgcgtattataaagcggatactgaccaagcattgcacgatattaatgaagtgatatctgtaccttctactaatggaaaaaaacgtcttaatgataagtatgatgcaacgaacatttatgaagttaaggatgctagttttaagtattggaatcagcaaacgtatgtgttgtcggatattaattttaatgttaatagaggcgaaaagattgcgattgtgggtccttctggttcaggaaaaagtacattactacaaattatggcagggttatatcaattagatagtggctctgttcgtttcgaaaatatggatatgtttgaaatagatgacaaagataagtttgaatcgttaaatgtcttgctacaatctcaacaattatttgatggtacaatacgtcaaaatttatttaccgatgaaaaagatgaagcggtgcaagcaatatttaagcaattagatttagaacatttggcactagaacgtcaaattgacttagatggtcatacattatctggcggagaaattcagcgtttagcgattacgaggatgttattaaaagatactgcatcaacatggattttagatgaaccaacaactgcattagataaacaaaatagtttaaaagttatggatttaattgaagcacatgcagaaacattaattgttgctacacacgatttaactttattgtcacgttttgagaccatcattgtgatgataaatggtaaaatagttgaaaagggaaactatcaacaattactagctaatcaaggtgctttatggaatatgattcaatataatgcataa

SEQ ID NO: 406060 - DNA, 1632 bp, Staphylococcus aureus
gtgaaaaaattaacaacaatactgtttcaatataaaatttttccggtactcatgttcttggtcagtactggtctcggcataatcgttataacgcaaaatattttaatagcagattttttagctaaaattataagacatcaatttcaaggtttatggattgtattatttattttattaggtgttttacttttaagagcaactgtgcaatttctaaatcaatggttaggtgatacattagcatttaaagttaagcatatgcttagacagcgggttatttataaaaataatggtcatccaatcggtgaacaaatgactatactcacagaaaacattgatggtctagcacctttttataagagttatttgcctcaagtgttcaaatcaatgatggttccgctcatcataatcattgcaatgtttttcatccatttcaataccgcattaattatgttaataactgcaccatttattcctttgttttatattattttcggtttgaaaacgcgagatgagtcaaaagatcaaatgacttatttgaatcaatttagtcaacggtttttaaatattgctaaaggtttagtgacgttaaagctatttaatcgtacagagcaaacagagaagcatatttacgacgatagtactcagtttagaactttaacaatgcgcattttacgcagtgcttttttatcgggattaatgctcgaatttataagtatgttaggtattggattggttgcattggaagcaacgctaagcttagtagtatttcataatattgattttaaaactgcggcaattgcgattattttagcgcctgaattttataatgcaattaaggacttagggcaagcgttccatactggaaaacaaagtgaaggtgccagtgacgttgtgtttgagtttttagaacaaccgaactataataatgaatttctattaaagtatgaggaaaaccaaaagccatttattcagttaacagacatatcatttcgatatgatgattctgatagattggtattaaatgatttaaatttggaaatatttaaaggtgatcaaattgcacttgtaggtccaagcggggcaggtaaatccactttgacacatcttattgcaggtgtttatcagccaacaataggtactataagtacaaaccagcgtgatttaaatataggaatacttagtcaacagccatatattttcagtgcttctataaaagagaatattacgatgtttaaagatatagaaaataatactattgaagaagtgctagacgaagtaggtttattagacaaagtgcaatctttcacaaaaggcattaacacaataataggtgaaggaggcgaaatgttatctggtggacagatgagacgcatagaactttgccgtcttttagttatgaagccagatctcgttatatttgatgagcctgcaactggtttagatattcaaacagaacacatgattcagaacgttctgtttcaacattttaaagatacaacgatgattgtcattgcacatagagataatacaattcgccatttacaacgacgcttgtatatagaaaatggaagactgattgctgatgatcgcaatatttcagtaaatataacagaaaatggtgatgacttatga

SEQ ID NO: 406061 - DNA, 876 bp, Staphylococcus aureus
atgtttatcattgaattaataaaaggtattatcttaggggtcgtcgaaggattaacagaatttgcacctgtttcctctactggacatatgatcctagttgatgatatgtggttaaaatcatctgaatttttaggttctcagtcagcatttacatttaaaatcgtcatccaattaggatccgtctttgcagcagcatgggtgttccgcgaacgcttcttagagattttacatattggtaaacacaaacatgttgaaggagataacgatcaacaaagacgttcaaagccaagacgtttaaatttattacatgtattagtgggtatggtgccagcaggtattttaggcttactatttgatgatttcatcgaagaacatttatttagtgtgccaactgttatgattggcttattcgtaggtgctatctatatgattattgctgataaatactcagctaaagttaaaaacccacaaacagtagatcaaatcagttatttccaagcatttgtaattggtatttctcaagcagtagctatgtggcctggtttcagccgttcaggctcaacaatttcaactggggtattaatgaaattaaatcataaagcagcatcggactttacatttattatggctgttccaattatgttagcagctagtggtttatctttattaaaacattatcaagatattcagattgctgatatacctttttatattttaggctttttagctgcatttactgttggactaattgcaatcaaaacattcttgcatctaattaacaaaatcaaactaattccatttgccatttacagaattgtattagtaatctttattgctatactttacttcggatttggcattggtaaaggtatttaa

SEQ ID NO: 406062 - DNA, 684 bp, Staphylococcus aureus
atggataagaaaaaagtcatcaaatttatgattaatgtattaccaattgtattggtaccgttaattgttgaacgtaaacgtatcaaacaacatccggacgtacaaaaagttacagatgctacaagtaaagttgcttcaaaaacatctgcagcaatcagtaacacagcgagtgatgttaaagaatatgtcggcgataaaaaacaagattttgaaaataaacgtgaacttaaaaagtttgctagagaacatgatcctgcctatattgagaaaaaaggcgaaaaattagctaaacaaaatcgtaaagacgctgataaaatgaataaaatacttcaaaaaaatatcgaaaagcgtcataaagaagagcaaaaagcccgcgaaaagaatgaaatacaacgtattaaagatatgaaaaaatcacaaaaatacgaagaaaaagcaggcttaacacctaataaattagatgagaaaactgagaaaaaaggcgataaactagctgaaaaaaatcgcaaagaaatcgctaaaatgaataaaaagttacaaaaaaatattgaaaaacgacacaaagaagaacaaaaacgccaacaagaagctgataaagcacgcatcaagtcatttaaaaaatataaagattatgttgccaaaagcgcctctcaacaaaataaagaaaacaatacagaggcataa

SEQ ID NO: 406063 - DNA, 459 bp, Staphylococcus aureus
gtgacacatattattattgatggagatgcttgtcctgttgttgattctattatagatttaacaactgagacaggcatttttgtgacaattattcggagcttcagccatttttcgaaccaattatatcctccacatgtatcaacattatatgttgatgatggaccagatgcagttgattacaaaattgttcaattatcaacgaaggatgatatcgtagtcactcaagattatggactcgcaagtttattagtcgacaaagtcttaattgtcatgcatcataatgggaagatatacaattccaaaaatattcaacaactattagataaacgatatatgaatgcacaaattagaaaacaaggtggtcgccacaaaggtcccccaccttttacaaagcaagatcaaaaagtgtttgaacaatcactattaaaagtcattcatcgaattaaggagctggattaa

SEQ ID NO: 406064 - DNA, 567 bp, Staphylococcus aureus
atgaaacgaatcgcagtttattgtggtgcaagcaaaggtcatgacccttcatatgtacaaaaagcatacgatttaggtaaatattttgctgaacaaggttatgaattagtatttggtgcagggtcaattggcattatgggtgccattcaagatggtgtattagatcatggcggcaaagctattggcgtcatgcctaaaatgttagatgaacatgaaatcacaagccaacgtttaactgaattaattttagttgattctatgcatgaacgtaaaaataaaatggcagaacttgcagatgcatttgtcatggctcctggtggcgcaggttcactagaagaatttttcgaaatgtatagttgggctcaaataggtatccatgaaaagcctattgccatttataatattaatggctttttcaatccactacaaacaatgattgaccatatgattgaggaaggttttattgatcctaagtatcgtgctcttgcaccgttatgcgacactaaggaatcattaattgaatcaatattaaatttcaaacctctgggtactcgttcatacgattaa

SEQ ID NO: 406065 - DNA, 543 bp, Staphylococcus aureus
atgatttattgtgaaacagagcgtttaatattaagagactggcatgaagatgatctgttaccttttcaaaaaatgaatgcgaattatgacgtacgtaaatattttccaagtttattgagttatcgtcgttcagaattagatatgagaactatggatgcggttattaaagattatggcattggattatttgctgtagaagataaagagtcccatcaatggataggctttataggtttgaattatattccagaaacaagcgattatccatttaaagaattaccgctttatgaaataggttggcgcttgttgccagaattttggggaaaaggattagcaactgaaggcgcaaaggcaacattgaagttagcagaagaacatcaaatatacgatgtctatagttttacagcagaagcaaataaagcttcacaacgtgtaatggaaaaaattggcatgacagtgtatgatcatttcgaattacccaatctaagtaagtatcatttattaaaaaggcaagtgcgctattacattaatcttcgaaagtga

SEQ ID NO: 406066 - DNA, 300 bp, Staphylococcus aureus
atgcatgaacaagattttagaattttagagggtcaagatattactttgccagaattaggtagagaattagaaaatattacaggacatacgattgctgattctactggcgaaattaagcgtgtaattgcacatttaccaaactttgagtccgatacagatacttttgttgctacatatcgtttaaaccatcaacaagattttatagatgcaacttttactgcgctgaaatcagatagagcacgtttaaaagaagtgccagttcatgttgaacttataagttatatttctaaatcaaaataa

SEQ ID NO: 406067 - DNA, 396 bp, Staphylococcus aureus
atgaagaaattaatcatcagtattatggcggtcatgctatttttaacaggttgtggtaaaagtcaagagaaagccactctggaaaaggatatcgataatttacaaaaagaaaataaagaattaaaagacaaaaaagaaaagcttcaacaagaaaaagaaaaattagcagataagcaaaaagaccttgaaaaagaagtgaaagatttaaaaccttcaaaagaagataacaaggatgataaaaaagacgaagacaaaaataaagacaaagataaagataaagaggcatcacaagataagcaatcaaaagatcaaactaagtcatcggataaagataatcacaaaaagcctacatcagcagataaagatcaaaaagctaatgacaaacaccaatcataa

SEQ ID NO: 406068 - DNA, 444 bp, Staphylococcus aureus
atgaggacacttaataaagatgaacataattatatcaagcaaatagctaatatacatgagacattattgtcgcaagtagaatccaactataaatgtactaaactgagtattgctcttaggtacgagatgatatgttcaagattagaacatacaaatgataaaatttatatatatgaaaatgaaggtcaattaatagcgtttatttggggacattttagtaatgaaaaaagtatggttaacattgaactgctatatgttgaaccacaatttcgcaaactgggaatagctacgcaactgaagattgcgcttgaaaaatgggcaaaaactatgaatgcaaagcgaataagcaatacaattcataaaaataatttgccaatgatatctttgaataaagatttaggttatcaagtgagtcatgtgaaaatgtataaagatattgattag

SEQ ID NO: 406069 - DNA, 690 bp, Staphylococcus aureus
atgaaaagtactgcgcaattaacaaaagaaaataatgttaaatcattaagattaagcaatactgatagagaaatcttcgagaattatatgacttatatgcgctctgactttcgcgtcaaccctcatgatacagagttaattattaaccgtatactcaaacaattattaagcgcagaacaacatggtttattagccttagattttttcaatcacgacccaaaagcacatgcaataaaagaactaaaagcgatgcctaatgaaacatttaaaaatatttttaaatatatctatcaacacatcgttctattaattgggattgttagttttctcaaaggatttttaggatttttcatggaaaaaaatggaagtaatttatattttgtttcattcccgttttcagtagtcgttggattctttattgtctttttatttatatggtttagttttaaaacaatacaactgcagtgttttaacaattcaaattggatatggatattcacctatttagcaatcattctactaattgtaggatttttctatgtattctttattccacaatcattacttgcctttggaccatatattcaggtaagcaattgggtatttattatattttcatttatagttatgcctattggattacgcattgaaagaaatatttcgaaaaaacattctcatacatttttataa

SEQ ID NO: 406070 - DNA, 489 bp, Staphylococcus aureus
atgacaattattttatggctacttatcatcgctgccttcatgttagcatttgttgggttgattaagccgattattccttctgttttagtattatgggttggctttttaatctatcaatttggctttcataatcagcatttatcatgggtgttttatgtatctatggcattgctaacaatattaattttatgtgccgactttttagctaataaatattttgtgaatcgcttcggtggttctaagtttggagagtatgcagctttaattggtgtggttattggatgttttgttttaccgccatttggaattattattataccttttattttggtattcatagttgaattaatacaaggctattcatttgaaagagcagttaaagtaagtataggttcaatcgtagcatttttaacaagtagtatagctcaagcaatcattatgtttataatgattgtatggttctttatagatgctttattgattaattaa

SEQ ID NO: 406071 - DNA, 1293 bp, Staphylococcus aureus
ttggatgctaacgcaccaacagcaaaagagcccctaattaataaattaaaaggggctctaagaagcggggttatggatatgtttgcagcgttattacaaataaagaattataaactctttgttgctaatatgtttctactaggtatgggtattgcggttacggtcccatatcttgttctttttgcaactaaagatttaggtatgacaacaaatcagtatggattacttctagcatctgcagcgattagccagtttacagtaaattcaattattgctagattttcggatacgcatcactttaatagaaaaattattattattctcgcattattaatgggtgcgcttggtttttcaatatacttttttgtagatacaatctggttattcatattactatatgcgattttccaaggattatttgcaccagcaatgccccaactttacgcatctgctagagaatctatcaatgtttcaagctctaaagatagagctcaatttgccaacacagtattacgttcaatgttctcattgggctttttatttggtccatttattggtgcccaattaatcggattaaaaggctatgctggattgtttggtggaacaataagtatcattttatttactttagtacttcaagtgtttttctataaggatttaaacattaaacaccctattagtacgcaacaacatgttgaaaaaattgctcctaatatgtttaaagacaaaacgcttttattaccatttattgcatttattttattacacattggacaatggatgtatacgatgaatatgcctttatttgttactgattatttaaaagaaaatgaacaacatgtcggttatttagctagtttatgtgctggtttagaagtgccatttatgatcattcttggcgttttatcatctagattacagactcgaacattgttgatttatggagcgatttttggtggtttattctacttcagcattggggtatttaaaaacttctatatgatgttagcaggacaggtgtttttagctattttcttagcggttcttttaggaattggtattagttatttccaagatatcttaccagattttccaggatacgcttcaacactattttctaatgcaatggttattggacagttaggcggtaacctattaggtggtgctatgagtcactgggtaggtttggaaaatgtattttttgtatcagcagcatcaatcatgttaggtatgatacttatattctttactaaaaatcaaaaaattacaaaagaggatgtgatatcaacatga

SEQ ID NO: 406072 - DNA, 867 bp, Staphylococcus aureus
atgaagattgaagactatcgtttactaataacattagacgaaacgaaaacgttacgtaaagcggctgaaattttatatatatctcaacctgctgttacacaaagactaaaagctattgaaaatgcttttggagtagatatttttatcagaacaaaaaaacaattgattacaacaactgaaggaacaatgattattgagcatgctcgtgacatgttgaaaagagagcgattattttttgacaaaatgcaggcacatattggtgaagtgaatggaacaatatcaatcgggtgttcttctttgattggacaaaccttacttcctgaagttttgagcctatataatgcccaatttcctaatgttgaaatacaagtgcaagttggttcaactgaacaaattaaagcaaatcatagagattatcatgttatgataactcgtggaaataaggtaatgaatttagctaacacacatttatttaatgatgatcattattttatttttccaaaaaatagacgagatgatgttacaaagttaccatttatagagtttcaagctgatccgatttatataaatcaaataaaagaatggtataacgataatttagaacaagattaccatgcaactattacagtggatcaagtagcaacttgcaaagaaatgttgattagtggtgtaggtgttacaatcttgccagaaattatgatgaaaaatatcagcaaagaacaatttgagtttgaaaaagtagaaattgataatgaaccgctgattcgttcgacatttatgagttatgatccgagcatgttgcaattgccacaagttgattcttttgtaaatctcatggcgagctttgttgaacaaccaaaggcgtag

SEQ ID NO: 406073 - DNA, 645 bp, Staphylococcus aureus
gtgaaagtaaagtatatagataaacgtcactggcgtcgcctaattgatagggaatacacagaggtaaaagttaataataataggtttaagggtattataggcttagtcacgatgaaaaaggttcgtgatcctttagaggtgacggtagttggacaaaatatcattgtcgcagatgacaattataaatggttgcaaatactacctgaaaagaaacgttatagtataactgtaatgtttgataataaaggcaatccattagaatattattttgatataaatatcaaaaatataacgcaaaaaggtaatgcgcgtacagtagatttatgtttagatgttttagcattaccaagtggtgaatatgagttggtagatgaagatgatttaatgtttgcattagaaagtgagcaaattacaaaaaagcaatttcatgaagcatatatgattgcacatcaaattatggcagagttagaaaatgattttaaaggattccaaaagaaaatcatgtactgctttaataaaattaatgcaaaggctcaaaaaaatcatcaaaagccacaaaataaaactaatattgaaaaaagcaaacaaataaagcctaagcaatataatcaaactaaaaatcaccaacaacaaaagaaaaactaa

SEQ ID NO: 406074 - DNA, 474 bp, Staphylococcus aureus
atgaaatcagcagaacaatggattgatgaattgcaacttgaatcacatcctgaaggtggtttctatagagagacaattcgagaagtattgaaagatggacgcagagcgccgtttagtagtatttattttttacttacagatgacaatatttcgcattttcatcgaattgatgctgatgaagtatggtactatcatgctggcgattctctaacaattcatatgataaatccggatggggaatatacgactgcaacattgggtactgatatccaaaatggagatgtattgcaatatgtagtgcctaaaggaacaatttttgcttcttcaatcgaaatatcaaatacttttagtttagtaggttgtatgtgtcaaccggcatttgagtttaagcagtttgaattgtttaagcaatctgaattaattacgcaatatccgcatcttaaatcagtaatcgaaaaatatgctttaaaataa

SEQ ID NO: 406075 - DNA, 717 bp, Staphylococcus aureus
atgggacgtaaatggaataacattaaagaaaaaaaggcccaaaaagataaaaacacaagtagaatatatgcgaaatttggtaaggagatttatgttgcagcaaaatctggtgaacccaatccagaatctaaccaagctttaaggttggtgcttgaacgcgctaagacatattcagtgccgaatcatattattgaaaaagcaatagataaagctaagggtgctggagacgaaaactttgatcacctaagatatgaaggatttggcccaagcggatcaatgctaattgttgatgcgttaacaaataatgtaaatcgtactgcctctgatgtgcgagctgcttttggtaaaaacggcggtaatatgggtgtatctggatcagttgcttatatgtttgatcatgtggcaacatttggtattgaaggaaagtctgttgacgaaatacttgaaacattaatggaacaagatgtagatgtaaatgatgtgattgacgataatggattgacaatagtctatgctgaaccagatcaatttgcagtcgttcaagatgcgcttcgtgcagcaggtgttgaagaatttaaagttgctgaatttgaaatgttacctcaaacagatattgaactttctgaagcggaccaagtaacatttgaaaaattaatcgatgcattagaagatttagaagatgtacaaaacgtattccataatgtggatttgaaataa

SEQ ID NO: 406076 - DNA, 426 bp, Staphylococcus aureus
atggctgaaaaatttaagataataatgacagaagcattgtctttatatatttgggggtgcaacattttgaatactgagaaattagaaacattgcttggcttctataaacaatataaagcattatctgaatatattgataaaaaatataagttgtcgctaaatgatttagcagtcttagatttaacgatgaagcattgcaaagatgaaaaagtacttatgcaatcatttttaaaaactgcaatggatgagctagatttaagtaggacaaaattattagtttctataagaagactaattgaaaaagaaagacttagtaaagttagatcatctaaagatgagcgtaaaatttatatttatttaaataatgatgatatatctaaatttaatgctttatttgaagatgtagaacaatttttaaatatttaa

SEQ ID NO: 406077 - DNA, 2151 bp, Staphylococcus aureus
atggcaaaatcatgcttgcatatacttactaataatgaatatgcgacaacgcgttgccaagatggcatagtcttattttggccaattgacggggaaatcgaactacaaaaatttcgtaaaagtaaaataattgaagatgatatatatattattaatcatctggatgtatttagtattaagaataataaaaaaacgatcatgttgtatttgagtagcgattggtttgcggaattaggctttactttctttaattaccactatacagcaaagttgattaaatcatcctataatttgaaatgtctactattaaaattgacatatcgataccttgataatcagcctcttaatgacgctgatattagaaaattacaggatattattaaaatcattgcaaaagaagcaagtatggataaaaagattgcacaaaatcaatatcgatatgcgtattatggtgatttgcgtgatgagctcgaatatatttatcaaaatgtaaatcaacgattgacattaaaaagtgtcgctgataaattatttgtctcaaagtcaaatttgtcatcacaattccacttacttatgggcatgggttttaaaaaatatattgatactttgaaaattggtaaatcgattgaaattctacttactactgatagtactattagcaacataagtgaacatttaggttttagtagtagctccacttactctaaaatgtttaaaagttatatggatataacaccgaatgaatatcgtaatttatcaaaatataataaatgtttaatgctaaagccagaaccactagtaggcaaaatggtgcaagaagtaaaagaaatcatattgaattatattgaacattataaaaaccacctaactgatgttatacatattgatgaagacaaatttgaaacacctaaattgtttcaaacggttattcaaataaatacttatacagaaatgaaattagttttcttagaaggaatctttaaaaccttattgaataagaacagtcaagttgtctttttcatcatgccatcgattctaaaaagtaaaaataccatgtccgaagaagaaaaattcacaatcattaaaacaataattgaaagtgatctaaagatagcatttaatataaataatattgaaacaacttattttgttgaagaagcttttatgagtgttttcagacaaatatctccaaacgaattaagtaatcataataattacgaagtgcattttgtttttgatttatcattgatggaaattagaacaatttatcgaatgatattaaaattacataacatcatgttgaatgtgaaattaggattgaacattacctgtttatttgaaaaaccttcagtttttaaatcactagtatcacaaataaagcgacttaaattcgattcgttaataatagataatgcaaatttaagtagcccttatttgatgggggaaagtgatgagttactattgaaaaatattttgcattttaaaaatttaaaacaagtaattaatgaattggatattgaacaagaaaagctgatttttctaaatgttgaaaatcataaactgcttaataataaagaacgagatctaagtaatagtgctccattaatttataagacattaagtgcgctgtatcacaactttgatggctttggattaaacatttttgacaatcatcaagcatttaatgcgatgcatctatatgacaaaaatggatttaaaacaacactaggtcttatattagaaaagtttatcgaatatgtctcgaaaccaaaatacgaaaacagttattattctatttttgatatagagaattattattgtcttgttatttatgattggcgagtgatagagagcgagacaattatgagtaattttgaggatagtcaagtttatataaattttaaaaacaatgttttaaacgataaatatctaattgtaatagaaacattggacgaaaatagtggcaacattaatcatttgatttctaaagaattaagagataaatatgaatggaaccctagtttactatctaaaattgacaactaccttaaaccagcaatagagattaaagagcataattttagtgataattccttgaatattaacgttacttttaatgcgttatacataattaaaataggaaaaaaataa

SEQ ID NO: 406078 - DNA, 645 bp, Staphylococcus aureus
ttgtcgcaaaatacaaatcattcatattatcatcaaaaccagcatgctcaatcaataagtaaagtgtggctttattttatgtattattggattatatttggcataggatgctatctaggtcagtttttaccattaagttggcgacaacccttgtcatttggattactgattattattttagcaacacttgtttttgaaagagcgagacggttcggtttaattatttcacatatttacgctgtagtgattggcttattgtcatacgcaacgtttaccacgtatttacaaaatttaggaccagatattttctataaaaatatcgcattagcaatttttgcatttatagcatttggtattattggttatttcttcgttggagatgcatcgagtataggcaaatatttattcgttacattaataacattaattattgcgagtctaattggtatttttcttcaaaatcctattttttacactattattaccgtcgttagtctgttgttatttctactttatactttgtatgattttaatcgtttaaaaagaggtgactattcaccaagagaaatgggatttaatctatttattaatttgttgaatattattaaggatatactttaccttgctaatatgttcagaagataa

SEQ ID NO: 406079 - DNA, 798 bp, Staphylococcus aureus
ttgaaaaaattagcatttgcaataacagcaacatctggtgcagctgcatttttaacgcatcatgatgcacaagcttctacacaacatacagtacaatctggtgaatcattatggagtattgctcaaaaatacaacacttcagtagagagtattaaacaaaataaccaattagataacaacttggtattccctggtcaagttatctcagtaggtggaagtgatgcacaaaatacgtcaaacacttctccacaagctggttcagcatcatctcatactgtacaagctggtgaatcattaaatatcattgctagcagatatggtgtttcagttgatcaattaatggcagccaataacttacgtggttatttaattatgcctaaccaaacattacaaattcctaatggtggatcaggtggtacaacaccaacagctacaacaggtagcaatggcaatgcatcatcttttaatcaccaaaatttatacactgctggtcaatgtacatggtacgtatttgaccgtcgtgctcaagctggtagtccaattagcacatattggtcagacgctaagtattgggctggtaacgcagctaatgatggttaccaagtaaacaacacaccatcagttggttcaattatgcaaagcacacctggtccatatggtcatgttgcttatgttgaacgtgtcaatggtgatggtagtatcttgatttctgaaatgaattacacatatggtccatacaatatgaactaccgtacaattccagcttcagaagtttctagctatgcattcatccattaa

SEQ ID NO: 406080 - DNA, 1008 bp, Staphylococcus aureus
atgtcatatataatcatcgtcactatagctgtagttattttctcgctgatatttgactttatcaatggattccatgatacagccaatgcagtagctactgctgtatctactagagcgttaacgcctaaaacggcaattttaatggcagcagtgatgaactttataggtgctttaacatttacgggcgttgcaggcaccattactaaagacattgtcgatccatttaaattggaaaatggattagttgttgtgttagctgcaatacttgcggctattatttggaatttagctacttggttttacggaattccaagttcgtcttcacatgcacttataggttcaattgcgggtgcagcaatcgcatctgaaggctcatttggagtgttacattaccaaggtttcacaaaaattattattgtattaatcgtttcaccgattatcgcattttgtgttggtttcttgatgtattcaatttttaaagttatctttaaaaatgcaaatttaacaagagcgaatcgtaactttagatttttccaaattttcacagcagcgttacaatcattctctcacggtacgaatgatgcgcaaaaatcaatgggtattattacgttggcattgattgtcgctaatgtacagaatgatggcagtgttgaaccacagttatgggtaaaatttgcctgtgcgacagcaatggggcttggtactgcaattggtggctggaaaattatcaaaactgtaggtggtaatattatgaaaatacgtccagcaaatggtgctgcggccgatttatcatctgcattaacaatttttgttgcatcatcgctacatttcccattatcaacaactcacgttgtgtcatcatcaatcttaggtgttggtgcttctaaccgagctaaaggtgtaaaatggagcactgcgcaacgaatgatcattacatgggtgattacattacctatttcagcattgttagcaggtttactattctatatacttaacttatttttctaa

SEQ ID NO: 406081 - DNA, 618 bp, Staphylococcus aureus
atgtttagtaagaaaaaagataagtttatggttcaattagaagagatggttttcaatctggatcgtgctgctattgaattcggtaaaatggatttcaatacacatttagatttaaaagcatactcagacaacattaaaacttatgagtcacatggtgacgaattagtacatcaagtaattactgatttaaatcaaacatttatcacaccaattgaacgtgaagatattttatcattatgtgatgcaattgatgatgttttagatgcaattgaagaaacggcagctatgtttgaaatgtattcaatcgaatacacagatgaatatatggctgagtttgttgataacattcaaaaagcagttgcagaaatgaaacttgctgtcggcttattagtcgataaaaaattatcacatatgcgtattcattcaattaatattaaagaatttgaaacaaactgtgatggtattttaagacagtcaattaaacatattttcaatagcgaaacagatccaatcactttaattaaaataaaagatatttatgaaagcatggaagaaatcgctgataaatgtcaaatcgtagcaaataattttgaaactattattatgaaaaatagctaa

SEQ ID NO: 406082 - DNA, 1890 bp, Staphylococcus aureus
atgacctttaacgagataatatttaaaaatttccgtcaaaatttatcacattatgccatctatcttttttcgttaattacgagtgtagtattgtattttagctttgtagcattaaaatacgctcataaactaaacatgacagagtcatatccaattataaaggaaggctcacaagtcggaagctactttctatttttcatcataattgcatttttgttatatgccaatgtgttatttattaaacgacgaagttatgagcttgcattatatcaaacattaggtttatctaaattcaacattatttatatactaatgctcgaacaattactaatatttataattacggcaatattaggtattattattggtatttttggttcgaaactgttattaatgattgtctttacattattaggaattaaagaaaaggttccaattatttttagtttgagggcggtatttgaaacattaatgttaatcggtgtcgcttattttttaacatctgctcaaaattttatattagtgttcaaacaatctatttcacagatgtcaaagaataaccaggttaaagaaacaaatcataataaaattacatttgaagaggttgttttaggcatcttaggtatagtattgattaccacaggatactatctatctttgaacattgttcaatattatgattctatcggtacacttatgtttattttattgtcaactgtgattggggcatacttattttttaaaagctctgtttctctagtttttaaaatggtgaagaagtttagaaaaggtgttataagtgtaaatgatgtcatgttctcatcatctattatgtatcgtattaagaaaaatgctttttcacttacggtcatggcaatcatttcagcgattactgtttcagttctttgctttgctgctataagtagagcgtccttatcaagtgaaataaaatatactgcaccacacgacgttacaattaaagaccaacaaaaagctaatcaattagcaagtgaattaaacaatcaaaaaattcctcatttttataattataaagaagtaattcatacgaaattgtataaagataatttatttgatgtaaaagcgaaagaaccatacaatgtaacaattactagtgataaatacatccctaatactgatttgaaacgtgggcaagctgatttatttgtagcggaaggttctatcaaagatttagtgaaacataagaagcatggtaaggcaattataggaacgaaaaaacatcatgttaatattaagttacgtaaagatattaataaaatctattttatggcagatgttgatttaggtggaccaacgtttgtcttaaatgacaaagactatcaagaaataagaaagtatacaaaggcaaagcatatcgtctctcaatttggattcgatttgaaacataaaaaagatgctttagcattagaaaaagcgaaaaataaagttgataaatctattgaaacaagaagtgaagcgataagctcaatatcaagtttaaccggaatattattatttgtaacatcatttttaggtattacattcttgattgctgtatgttgcattatatacataaagcaaatagatgaaaccgaagatgagttagagaattatagtattttgagaaagcttggatttacacaaaaagatatggcaaggggactaaagtttaaaattatgtttaattttgggttacctttagttattgcactatcacatgcatattttacatcattagcatatatgaaattaatgggtacaacgaatcaaataccggttttcatagtaatgggattatacatttgtatgtatgctgtttttgcagtgacggcttataatcattccaagcgaacaattagacattccatataa

SEQ ID NO: 406083 - DNA, 762 bp, Staphylococcus aureus
gtggcaattttagaagtaaaacaattaacaaaaatatatggaactaaaaaaatggcacaagaagtgttgcgagatatcaatatgtctattgaagaaggcgagtttattgctattatgggtccctctggatctgggaaaacgacattattaaatgttttaagttcaattgattatatttcacaaggttctattacattaaaaggaaaaaaattagaaaagctttcaaacaaggaattatctgatatacgcaagcatgatattggttttatttttcaagagtataatttactgcatacattgactgttaaagaaaacataatgttaccactaacggtacagaagttagataaagaacatatgttaaatcgttatgaaaaagtagcagaagcattaaatatattggatattagtgataaatatccctctgaattgtctggtggacaaaggcaacgaacatcagctgccagagcatttataacattgccttctattatatttgctgacgaaccaacaggtgcactggattctaaaagtactcaagatttattaaaacgattaacaagaatgaatgaagcatttaagtctacaattattatggtaacgcatgatcctgttgcagcaagctatgcaaatcgagtagtgatgctaaaagatggtcaaattttcactgaattataccaaggggatgacgataaacatacctttttcaaagaaataatacgtgtacaaagtgttttaggtggcgttaattatgacctttaa

SEQ ID NO: 406084 - DNA, 1041 bp, Staphylococcus aureus
atgaataatttgaaatgggtagcttattttttgaaatctcgcatgaactggatattttggatattgtttttaaacttccttatgttaggcattagtctaatcgattatgattttccaatagacagtttattttatattgtttctttgaatttaagtttaacaatgatttttcttttattgacatattttaaagaagtaaaattatataagcattttgacaaagataaagaaatagaagaaattaaacataaagatttagcggaaacgccatttcaacgtcatacagttgattatttatatcgtcaaatctcagcgcacaaagaaaaggttgttgagcaacagttgcaattgaacatgcatgaacaaaccattacagaatttgtgcacgacataaaaacacctgtgacagctatgaaattattaattgatcaagaaaaaaatcaagaaagaaaacaagcattactatatgaatggtctcgtataaactcgatgctagatacacagctgtatattactagattagaatctcaacgtaaagatatgtattttgattacgtgtcacttaaacgcatggtcattgatgaaatacaattaacaagacatattagtcaggttaaaggtattggttttgatgttgactttaaagtggatgattatgtttatacagatataaaatggtgtcgtatgattattagacaaattttgtcaaacgcattgaaatatagtgagaattttaatattgaaattgggacagaattaaatgatcaacatgtttcgttatatattaaagactatggcagaggtattagtaaaaaagatatgccgcgaatatttgaacgaggatttacgtcaacggctaacagaaatgaaacgacgtcttcaggtatgggtctatatttagtaaatagtgtaaaggatcaattaggtattcacctgcaagtcacgtcgactgttggtaaggggacaactgtcagattgattttcccattacaaaatgaaattgttgaacgcatgtcggaagtgacaaatttgtcattttaa

SEQ ID NO: 406085 - DNA, 675 bp, Staphylococcus aureus
atgcaaatactactagtagaagatgacaatactttgtttcaagaattgaaaaaagaattagaacaatgggattttaatgttgctggtattgaagatttcggcaaagtaatggatacatttgaaagttttaatcctgaaattgttatattggatgttcaattacctaaatatgatgggttttattggtgcagaaaaatgagagaagtttccaacgtaccaatattatttttatcatctcgtgataatccaatggatcaagtgatgagtatggaacttggcgcagatgattatatgcaaaaaccgttctataccaatgtattaattgctaaattacaagcgatttatcgtcgtgtctatgagtttacagctgaagaaaaacgtacattgacttggcaagatgctgtcgttgatctatcaaaagatagtatacaaaaaggtgatcagacgattttcctgtccaaaacagaaatgattatattagaaattcttattaccaaaaaaaatcaaatcgtttcgagagatacaattatcactgcattatgggatgatgaagcatttgttagtgataatacgttaacagtaaatgtgaatcgtttacgaaaaaaattatctgaaattagtatggatagtgcaatcgaaacaaaagtaggaaaaggatatatggctcatgaataa

SEQ ID NO: 406086 - DNA, 924 bp, Staphylococcus aureus
atgaaacctaaagttttattagcaggtggaacaggatatattggtaagtatttaagtgaagtgattgaaaatgatgctgaactttttgctatatcaaaatatccagacaataaaaaaacagatgatgttgaaatgacttggattcagtgtgatatatttcattacgaacaggttgttgcagcaatgaatcaaatagatattgctgtattctttatcgacccaacaaagaattctgccaaaataacacaatcatcagcaagagatttaacattaatcgcagcagataattttggtcgagcagcggctatcaatcaagtaaaaaaagtaatctacatacctgggagtcgttatgataatgaaacaattgaacgcctaggtgcatatggtacacctgtagaaacaacaaatttagtttttaaacgttctttagttaatgtagaattacaagtttcaaagtatgatgatgttagatcaacgatgaaggtagttttaccaaagggatggacattaaagaacgttgtaaaccattttattgcatggatgggttacactaaaggaacttttgtgaaaacagaaaaatcacatgatcaatttaagatatatattaagaataaggtgcgaccgctcgcagtatttaaaatagaagaaacagctgatggaataataactttaattttattgagtggaagtttagtgaaaaaatatacagttaatcaagggaagttagaatttagattaatcaaagagtcggcagtcgtttatatacatctatacgattatatccctcgattattttggccgatttattactttatacaagcaccaatgcaaaaaatgatgattcatggctttgaagttgactgccggattaaagattttcaaagtcgattaaaatcaggagaaaatatgaaatatactaaatga

SEQ ID NO: 406087 - DNA, 507 bp, Staphylococcus aureus
atggcccatattatacgtagagttagtatcaaagatgtagaaaatttcatttcaatgttagcgaacatatacgacgaatctccgtatatgttctacacaccaggagaatatgatcctagcgtcacatcggctagtaaacaattagaagaatatatcacttctccgcataaagtcatcttcgttgctgaaagtgatgaacaactcgttggctttgcctttgttaatacgacaccatttcaacgcattaaacatgttgctaaaattgatttaggtgtaaagaaattatatcaacatcgtggaattggccaagcacttcttgatgccattatggcttggtgtttaaacaatcaaatacaccgaattgaagcaaatgtaccactcaataaccaacctgccctcgagctttttaaaagtgccgattttcaaatcgaaggcgttttaaaagataagttatttatcgatggtaaatattatgatgactatatgatggctaaaattcttaattaa

SEQ ID NO: 406088 - DNA, 429 bp, Staphylococcus aureus
atgacaaggtcagcattaaaaccatttaaaaataaacgcgttatggttactggacgtatacaacgtgttttgtttaaaaattatttagatagacatagcacatttaagccgaatgtaaggatattattaaaagatgtatttgtttcaggtgtatcaatagatcatttatggttatatgagacaaataaatactatgcattggcaatggaacttattcatcaacgagtaaaatttagtgcgaatgttgtaccgtattacaaaataaatagaaataataatttattcgtacaagattatggaattaagcgtaaaggtaggttaattactgaagaagcttacaatcaaaacaatcagtatcaggataagatatatgaaaaattaccggatatagattttagactcgaagatttttatagtaaggaaaactaa

SEQ ID NO: 406089 - DNA, 1044 bp, Staphylococcus aureus
atgaataaagataataaatggacgatgataactgcgctttttataactgtaatcagtgtattgttagcatttcatctgaaacaacattatgaccaaattacaaatgagaaccatgctaataaagacaaaattaatattaaaaataaaaatgtgcgcatttatcaaaaccttacatacaatagagttttccctaacagtaaattagatattattacacctgttgatatgtcttctaatgccaaactgccagttattttttggatgcacggtggtggttatattgcgggtgataagcagtataaaaacccattattagcgaaaattgctgaacaagggtacattgttgtgaatgtaaattatgcattggcgccacaatataaatatcccacaccattaattcaaatgaatcaagcaactcaattcattaaagaaaataaaatgaatttacctattgattttaatcaagtaattattggcggtgattctgcaggtgctcaattagctagccaatttacggcaatacagacgaatgatcgcttaagagaagccatgaaatttgatcagtcattcaaaccatcgcaaattaaaggtgctatactatttggtggtttttataatatgcaaacagttagagaaactgagtttccaagaatacagttatttatgaaaagttatactggcgaagaagattgggaaaagagttttaaaaacatttcacaaatgtcgacagtaaaacaatcgacaaaaaattatccaccaacatttttatctgttggagatagcgatccattcgaaagtcaaaatatagaattcagtaagaaattacaagaattgaatgtaccagtagatactttgttttatgatggtacgcatcatttacatcatcagtatcaatttcaccttaataaacctgaatcgatagataatatcaaaaaagtgttacttttcttaagtcgtaatacatcctctagtggtattcaaactgaagagaaaccacaaatagaaaatccgagtaatgaattaccgttaaatcctttaaactaa

SEQ ID NO: 406090 - DNA, 1068 bp, Staphylococcus aureus
atgatgatgaataaagaagcaacaaaaattggatttgcctacgtcggcattgtagtgggcgcaggattttcaactggacaagaagttatgcaatttttcactaaatatggcttgtgggcttatttaggtgttattatatctggttttattttagcttttattgggcgccaagtagcaaaaattggtactgcctttgaagcgacaaatcatgaatcaacattacaatacgtattcggtgaaaagtttagtaaagtctttgattatattttaatcttcttcttatttggtatagctgtaaccatgatagctggtgcaggcgcaacatttgaagaaagttataacatacctacatggctaggtgctttaattatgacattagcgatttatattacgttgctattagactttaataaaatagtacgtgcactaggtatcgttacaccatttttaattgttttagttgtattaatcgctggcgtttatttatttaaaggtcatgtttcattagcagaagttaaccaagtagtgcctgaagcaagtatttggaagggaatctggtttggtacaatatatggtggattagctttttctgtaggttttagtaccatcgtagcaatcggtggggatactgaaaagcgtacagtgtcaggtgcaggcgcgatgtatggtggtattatctatactgtattactagcattgatcaactttgcattgcaaagtgaatatccaactattaaaaatgcctcaattcctacattgacgttagcaaataatatccatcctttaatagcaacagtgttatctgttattatgctggcggttatgtataatactattctaggactaatgtattcatttgcagcacgttttacagaaccatacagtaaaaattatcatatctttattattataatgatggtagcaggttatttattaagtttcgtaggatttgctgaattaattaataagttatatacaattatgggatatgtaggcttatttattgtagtagctgtaattattaaatatttcaaacgtaaaaatgcggataaaaaacatattgcttaa

SEQ ID NO: 406091 - DNA, 498 bp, Staphylococcus aureus
atgcaacaccttataaaaaaacatgtattgaatggcgagtttgatttagtacgacaattgatgtccgaaacagattttatggaatttgaagaagcatatatttcaagtgcgcatgaagtagaaagtatgatgttttatacatgtattttagatatgattaagtacgaagaatcatctgaaatgcatgacttagcatttttattgcttgtgtatccactaagtgaatatgaaggtgctttggattctgcttattatcatgcagacgcttccataaaacttactgacggcaaagaagttaaaagtttgttacaaatgttattattgcatgcgataccaacacctgttatttcagataagaaggcttttgatatcgccaagcaaattttaaaattagatcctaataataatgttgctcgtaacgtcttaaaagacactgccaaacgtatggacaacgttgttgttgatataaatgaattacaccaacgtaatgcacgttaa

SEQ ID NO: 406092 - DNA, 363 bp, Staphylococcus aureus
atgcctaaaattatacttgttagccacagtaaagaaattgcaagtggtacaaaatctttgttaaagcaaatggcaggtgacgttgatattataccaatcgggggattaccagatggttcaattggaacttcatttgatatcatccaagaagttttgactaaattagaggatgatgcattgtgtttttacgatattggatcttcagaaatgaatgtagatatggcaattgaaatgtatgatggtaatcatcgtgtgttaaaagttgatgcaccaattgttgaaggcagttttatcgcagcagtaaagctatcaatcggcggttcaattgatgatgcattagcagaaatcaaacaatcattttag

SEQ ID NO: 406093 - DNA, 585 bp, Staphylococcus aureus
atgaaagtgaatgatatgaaagcacgtttattaaatttagaagaaacgtttaaaaaacatgaatctgaattaactgaattagatcgagcaattggtgatggtgaccacggggttaacatggttcgtgggtttagtagtcttaaagacaaacttgatgatagctcaatgcaatcattgttcaaatcaactggtatggcattgatgtcaaatgttgggggtgcatcaggaccactgtatggctttagctttgttaaaatgtctgcagtcaccaaagatgatatggataatcaagatttcattacactaattcaggcatttgccgaagcggttgaatcacgtggtaaagttactttaaatgaaaagacaatgtatgatgtagtagcgcgagcagcagagaagcttaaaaatggtgaaactttaacattcaatgatttacagcaattagcagataatacaaaagatatggtagcaacgaaaggtagagctgcatattttggagaagaatcaaaaggttatattgatccaggtgctcaaagtatggtttatattttaaacgctttgattggagatgaagataatgcctaa

SEQ ID NO: 406094 - DNA, 969 bp, Staphylococcus aureus
atgatgaaaaagttaatcaataaaaaagaaacatttttaactgatatgcttgaaggattgttaattgcgcacccagagttagatctgattgctaatacagttattgtaaaaaaagctaagaaagaacatggtgtagcaatagtctctggaggtggaagcggacatgaacctgcgcatgccggttttgttgcagaaggtatgctagatgcagcggtttgtggcgaagtatttacatcacctacacctgataaaatattagaagctattaaagcagtagatactggtgatggtgtattactagttgtaaaaaactatgcaggtgacgtgatgaatttcgaaatggcacaagagcttgcagaaatggaaggtataaatgttcaaactgttattgttcgtgacgacattgctgtgacaaacgaagtacaacgtcgtggtgttgcaggaacagtgtttgttcataagcttgccggttatcttgctgaaaaaggttattcattaacagagataaaatcgtgtgtagaagcgttgttacctgaaattaaaagtattggtatggcaattgagccaccgcttgttccaactactggaaaatatggctttgatattgaagacgacaaaatggaaatcggtattggtatacatggtgaaaaaggtattcatagggaagaagtaaaggatattgatcatattgttggaacattgttagacgaattgtataaagaagttactgccaatgatgtcatattaatggtaaatggtatgggtggtacgccgttatctgaattaaatatcgtaactaaatatattcaacaaaatttagctgcaagaacggttaatgttgctaaatggtttgttggtgattatatgacatctttagacatgcaaggtttttctataactatcgtgcctaataaaccagaatatttggaagcatttttagcaccaacaacaagtcaatactttaaataa

SEQ ID NO: 406095 - DNA, 1017 bp, Staphylococcus aureus
atgattagttcaaataataaacgcagacaattgatagcactggctgtttttagcattctactatttctaggttgtacttggagtattacctcaggtgaatacaacatacctgttgaaagatttttcaaaactttaattggacaaggtgatgccattgatgagttaatcttattagatttcaggttacctcggatgatgattactattttggctggcgcagcgcttagtattagtggtgcaatagtgcaaagtgtcacaaaaaatccaatagctgaaccaggtatattaggtattaacgcaggtggcggatttgcaatcgcattatttattgcaattggtaaaattaatgctgacaactttgtttatgtactgccgttaataagtatactaggtggtatcaccactgcattgattatttttattttcagttttaataaaaatgaaggtgttacacctgcgagtatggtattaataggtgtaggtttacaaacagcattatatggtggctcaattacaattatgtcaaaatttgatgataagcaatctgatttcatcgctgcttggtttgcaggtaatatttggggtgacgaatggccatttgtcattgcatttttaccgtgggtgttgattattattccttacttactatttaaatcgaatacactaaatattattcatacgggtgataatattgcacgaggtctaggtgtaaggttaagcagagaacgtttaatattattctttatcgcagtgatgttatcatctgctgctgtagcagtagcaggttcaatttcgtttatcggattaatgggtccgcatattgccaaacgtatcgttggaccacgtcaccagttgtttttaccaattgccattttagtaggggcatgtttacttgttatagctgatacaattggcaaaattgtattacaaccaggtggggttccagcaggtattgtcgtagcaattattggtgcaccgtatttcttatatttaatgtacaaaacgaaaaatgtatag

SEQ ID NO: 406096 - DNA, 1005 bp, Staphylococcus aureus
atgacaaatagagagaacccaacgccattgaagtttttatcctatattataggtttaagtatgatactactaatcacactatttatttctacattaataggtgacgccaaaattcaagcctctacaattatagaggctatttttaattataatcctagcaatcaacagcaaaacatcatcaatgagattaggattcccagaaatatagcagcagtaattgtaggtatggcgcttgcagtttctggtgcgattatacaaggtgttactcgtaatggtcttgctgatccggcgctcataggtttaaattcaggtgcttcatttgctttagcattaacatatgcagttttaccaaacacttcatttttaatattgatgtttgctggatttttaggtgctattctaggaggtgctattgtattaatgataggccgatctagacgtgatggatttaatccgatgcgtattattttagcgggtgcagcagtaagtgctatgttaacagcgctaagtcaaggtattgcattagcttttagactaaatcaaacagtaacattttggactgctggaggcgtttcaggcacaacatggtcacaccttaagtgggcaattccattaattggtattgcgttattcattatattaacaattagtaaacaacttaccattttaaatcttggtgaatcattagctaaaggtttaggtcaaaatgtaacaatgatcagaggcatatgtttaattattgctatgattctagcaggtattgcagttgctatcgctggacaagttgcatttgtaggtttgatggtacctcatatagcaagatttttaattggaactgattatgctaaaattctaccattaacagccttgttaggtgggatactcgtgcttgttgccgatgtgatagcacgatatttaggagaagcgcctgttggtgcaatcatttcatttatcggtgttccttactttttatatttagttaaaaaaggaggacgctcaatatga

SEQ ID NO: 406097 - DNA, 798 bp, Staphylococcus aureus
atgaatcgtttgcatggacaacaagttaaaattggttacggggataacacgattataaataaattagatgttgaaataccagatggcaaagtgacgtcaatcattggtcctaacggctgcgggaaatctactttgctaaaggcattgtcacgtttattggcagttaaagaaggcgaagtatttttagatggtgaaaatattcatacacaatctacgaaagagattgcaaaaaaaatagccattttacctcaatcacctgaagtagcagatggcttaactgttggggaattagtttcatatggtcgttttccacatcaaaaaggatttggtagattaactgctgaggataaaaaagaaattgattgggcaatggaagttacaggaactgatacattccgacaccgttcaatcaatgatttaagtggtggtcaaagacaacgtgtttggattgcaatggcattagcacaaagaactgatattatctttttagacgaaccaacaacatatttagatatctgtcatcaattagaaatactagaattagttcagaagctaaatcaggaacaaggttgtacaattgtcatggttcttcatgatatcaaccaagcgattcgtttctcagatcatcttattgcgatgaaagaaggggatatcatcgctacaggttcaacagaagacgtattaacacaggaaatattagaaaaagtttttaatattgatgttgttttaagtaaagatcctaaaactggaaaacctttactggtaacttatgacttatgtcgcagagcttattcttaa

SEQ ID NO: 406098 - DNA, 834 bp, Staphylococcus aureus
gtgaataaaacggttaaagatttaatactagttgtcttaggttcatttatctttgctgcaggtgtaaatgcatttattatttctggtaacttaggtgaaggcggggttacaggtttagcaattattttatattatgcgtttcatatttcaccagccatcactaacttcttggtcaacgcagtattgattgccataggttataaatttttgagtaagagaagtatgtacttaactattcttgtaacaattcttatttcaatatttttgagtttaacagaatcatggcaagtagaaactggaaacagcattgtgaatgccatttttggtggtgtaagcgttggactaggaatcggagtaattatccttgcaggcggtacaacagcaggtacaacaattttggcgagaattgcaacgaaatacctcgatgtaagcacgccatatgctttgcttttcttcgatatgatcgttgttgcaatttcacttacagttattccacttgataaagtattagtaacagtaatatcactttatataggaacaaaagtgatggaatatgtcatagaaggtttaaacactaaaaaagctatgacgattatttcaactaatcccgacaaacttgccaaagcaatagacgagcaaattggaagaggtttaaccattttaaacggacatggctattatacgcgtgaagaaaaagatgtcttatacgttgttatttctaaaacacaagtttcaaaagcaaagcgattaattaaacaaatcgataaagatgcattcctcgtaattcatgatgtaagagatgtctatggtaatggctttcttgcagatgaataa

SEQ ID NO: 406099 - DNA, 1230 bp, Staphylococcus aureus
atgtttttattaatcaacattattggtctaattgtatttcttggtattgcggtattattttcaagagatcgcaaaaatatccaatggcaatcaattgggatcttagttgttttaaacctgtttttagcatggttctttatttattttgattggggtcaaaaagcagtaagaggagcagccaatggtatcgcttgggtagttcagtcagcgcatgctggtacaggttttgcatttgcaagtttgacaaatgttaaaatgatggatatggctgttgcagccttattcccaatattattaatagtgccattatttgatatcttaatgtactttaatattttaccgaaaattattggaggtattggttggttactagctaaagtaacaagacaacctaaattcgagtcattctttgggatagaaatgatgttcttaggaaatactgaagcattagccgtatcaagtgagcaactaaaacgtatgaatgaaatgcgtgtattaacaatcgcaatgatgtcaatgagctctgtatcgggagctattgtaggtgcgtatgtacaaatggtaccaggagaactggtactaacggcaattccactaaatatcgttaacgcgattattgtgtcatgcttgttgaatccagtaagtgttgaagagaaagaagatattatttacagtcttaaaaacaatgaagttgaacgtcaaccattcttctcattccttggagattctgtattagcagcaggtaaattagtattaatcatcatcgcatttgttattagttttgtagcgttagctgatctatttgatcgttttatcaatttgattacaggattgatagcaggatggataggcataaaaggtagtttcggtttaaaccaaattttaggtgtgtttatgtatccatttgcgctattactcggtttaccttatgatgaagcgtggttggtagcacaacaaatggctaagaaaattgttacaaatgaatttgttgttatgggtgaaatttctaaagatattgcatcttatacaccacaccatcgtgcggttattacaacattcttaatttcatttgcaaacttctcaacgattggtatgattatcggtacattgaaaggcattgttgataaaaagacatcagactttgtatctaaatatgtacctatgatgctattatcaggtatcctagtttcattattaacagcagctttcgttggtttatttgcatggtaa

SEQ ID NO: 406100 - DNA, 1728 bp, Staphylococcus aureus
atgaaacgagaaaatccattgtttttcttatttaaaaaactatcatggccagtgggtcttatcgttgcagctatcactatttcatcactagggagcttaagtggactattagtgccactgtttactggacgaattgtagataaattttccgtgagccatatcaattggaatctaatcgcattatttggtggtatctttgtcatcaatgctttattaagcggattaggtttatatttattaagtaaaattggtgaaaagattatttatgcgatacgctcagttttatgggagcatatcatacaattaaaaatgccattctttgacaaaaatgaaagtggtcaattaatgagtcgattaactgacgatacgaaagtgataaatgaatttatttcacaaaagctacctaacttattaccatcaatcgttacattagttgggtcactaatcatgttatttattttagattggaaaatgacattattaacatttataacgataccgatattcgttttaattatgattcctctaggtcgtattatgcaaaagatatcgacaagtacacaatctgaaattgcaaacttcagtggtttgttagggcgtgtcctaactgaaatgcgtcttgttaaaatatcaaatacagagcgtcttgaattagataatgcacataaaaatttgaatgaaatatataaattaggtttaaaacaggctaaaattgcggcagttgtacaaccaatttcaggtatagttatgttgctaacaattgcaattattttaggttttggtgcattagaaattgcgactggtgcaatcactgcaggtacattaattgcaatgatattttatgttattcagttatctatgcctttaatcaatctttccacgttagttacagattataaaaaggcagtcggtgcaagtagtagaatatacgaaatcatgcaagaacctattgaaccgacagaagctcttgaagattctgaaaatgtattaattgatgacggtgtattgtcatttgaacatgtagactttaaatatgatgtgaagaaaatattagatgatgtgtcgttccaaatcccacaaggtcaagtgagtgcttttgtaggcccttctgggtctggtaaaagtacgatatttaatctgatagaacgtatgtatgaaattgagtcaggtgatattaaatatggccttgaaagtgtctatgatatcccgttatctaagtggcgacgcaaaattggatatgttatgcaatcaaattcgatgatgagtggtacaattagagacaatattttatacggaattaatcgtcatgtttcagatgaagaacttattaattatgctaaattagcgaactgtcatgattttatcatgcaatttgatgaaggatatgacacgcttgtaggtgaacgaggattgaaactgtctggcggacaacgtcaacgtattgatattgctagaagttttgttaaaaatcctgatattttgttacttgatgaagcaacagctaatctcgatagtgaaagtgaattgaaaattcaagaagctttagaaacattgatggaaggtagaacaacgattgtcattgcgcatcgtttgtctacaattaaaaaagccggtcaaattatattcttagacaaaggacaggtaacaggtaaaggtacgcattcagaactgatggcatcacatgcgaagtataaaaactttgtagtgtctcaaaaattaacagattaa

SEQ ID NO: 406101 - DNA, 1296 bp, Staphylococcus aureus
atgaaaaatttaatatctattatcatcattttatgtttaacattaagtattatgacaccatatgcacaagctactaacagtgacgtaacccctgtacaagcagcaaatcaatatggttatgcaggtttgtcggctgcatacgaaccgacgagtgctgttaatgtaagtcaaactggacaattactgtatcaatacaatatcgatactaagtggaatccagcgtctatgactaaattaatgacaatgtacttaacattggaagctgtaaataaggggcagctttcacttgatgacacagtcacaatgacgaacaaagaatatattatgtctacactacctgagttgagtaatacgaaactatatcctggacaagtatggacaatcgcagacctattacaaattacagtatctaattctagtaatgccgcggcattaattttagctaagaaggtttcaaaaaacaccagcgatttcgttgatttaatgaataacaaagctaaagctatcggaatgaaaaatacacatttcgtcaatccaacgggtgctgaaaattcaagattacgtacatttgcaccaacaaagtataaagaccaagaacgtactgtaacgactgctagagactatgccattttagatttacacgtgattaaagagacacctaaaatattagactttacaaagcagttagcaccaacaacgcatgcagttacgtattacacattcaacttttcattggaaggtgcaaaaatgagtttgccgggtacagatggtttaaaaactggatcaagtgatacagcaaattacaaccatacgattactaccaaacgaggtaaatttagaattaatcaagttatcatgggtgcaggagactataaaaaccttggtggcgagaagcaacgtaatatgatggggaatgcattaatggaacgctcatttgatcagtataaatatgtaaaaatattgtctaaaggtgagcaaaggataaatggtaagaaatattatgttgaaaatgatctttacgatgttttaccaagtgattttagtaaaaaagattataaacttgtagtcgaagatggtaaagtacacgcggactatccaagagaatttattaataaagattatggacctccaactgtagaagttcatcagccaattattcaaaaggcaaatactgttgctaaaagtatgtgggaagaacatccattattcactatcattggtggtacatgccttgtcgctggattagcacttattgttcatatgataatcaatcgtttatttagaaaaagaaaataa

SEQ ID NO: 406102 - DNA, 399 bp, Staphylococcus aureus
atgaaacgtgtaataacatatggcacatatgacttacttcactatggtcatatcgaattgcttcgtcgtgcaagagagatgggcgattatttaatagtagcattatcaacagatgaatttaatcaaattaaacataaaaaatcttattatgattatgaacaacgaaaaatgatgcttgaatcaatacgctatgtcgatttagtcattccagaaaagggctggggacaaaaagaagacgatgtcgaaaaatttgatgtagatgtttttgttatgggacatgactgggaaggtgaattcgacttcttaaaggataaatgtgaagtcatttatttaaaacgtacagaaggcatttcgacgactaaaatcaaacaagaattatatggtaaagatgctaaataa

SEQ ID NO: 406103 - DNA, 1062 bp, Staphylococcus aureus
atgaggtttacgataatcatacctacatgtaataatgaggcaacaattcgacaattgttaatatctattgagagtaaagaacactatagaatcctttgtattgatggtggttctactgatcaaacaattcctatgattgaacggttacaaagagaactcaagcatatttcattaatacaattacaaaatgcttcgatagctacgtgtattaataaaggtttgatggatatcaaaatgacagatccacatgatagtgacgcatttatggtcataaaaccaacatcaatcgtattgccaggtaaattagataggttaactgctgctttcaaaaataatgataatattgatatggtaatagggcagcgagcttacaattaccatggtgaatggaaattgaaaagtgctgatgagtttattaaagacaatcgaatcgttacattaacggaacaaccagatttgttatcaatgatgtcttttgacggaaagttattcagtgctaaatttgctgaattacagtgtgacgaaactttagctaacacatacaatcacgcaatacttgtcaaggcgatgcaaaaagctacggatatacatttagtttcacagatgattgtcggagataacgatatagatacacatgctacaagtaacgatgaagattttaatagatatatcacagaaattatgaaaataagacaacgagtcatggaaatgttactattacctgaacaaaggctattatatagtgatatggttgatcgtattttattcaataattcattaaaatattatatgaacgaacacccagcagtaacgcacacgacaattcaactcgtaaaagactatattatgtctatgcagcattctgattatgtatcgcaaaacatgtttgacattataaatacagttgaatttattggtgagaattgggatagagaaatatacgaattgtggcgacaaacattaattcaagtgggcattaataggccgacttataaaaaattcttgatacaacttaaagggagaaagtttgcacatcgaacaaaatcaatgttaaaacgataa

SEQ ID NO: 406104 - DNA, 1104 bp, Staphylococcus aureus
atgaacgttttaataaagaaattttatcatttggtagttcgaatactttctaaaatgattacgcctcaagtgattgataaaccgcatatcgtatttatgatgacttttccagaagatattaagcctatcatcaaagcattaaataattcgtcgtatcagaaaactgttttaacaacaccaaaacaagcgccttatttatctgaacttagcgacgatgttgatgtgatagaaatgactaatcgaacattggtaaaacaaattaaggctttgaaaagcgcgcagatgattattatcgataattattacctattactaggtggatataataagacttctaatcaacacattgttcaaacgtggcatgcaagtggtgcattaaaaaactttggcttaacagatcatcaagtcgatgtgtctgacaaggcaatggttcagcagtaccgtaaagtttatcaagcgacggatttttacttagtgggttgtgaacaaatgtcacaatgttttaaacagtctttaggtgcaacagaagagcaaatgctgtattttgggcttccgagaattaataaatattacacagctgatagagcaacggttaaggcagagttaaaggataaatatggaattacaaataagttggtattatatgtaccaacatatagagaagataaagcagataatagggctattgataaagcttattttgaaaaatgtttaccaggatatacactgattaataaattacatccatcaattgaagattcagacattgatgacgtatcttcaatcgacacgtctacattaatgctaatgtcagatataattattagcgactatagttcgctgccaatagaagctagcttgttagatattccaactatattttatgtgtatgatgaaggaacatatgatcaggtgagaggcctgaatcaattttacaaagcaataccggatagctacaaagtgtatactgaagaagatttaataatgacgatacaagaaaaagaacatctattaagtccgttatttaaagattggcataagtataatactgataaaagtttacatcagctcacagaatatatagataagatggtgacaaaatga

SEQ ID NO: 406105 - DNA, 813 bp, Staphylococcus aureus
atgtcagcaataggaacagtttttaaagaacatgtaaagaacttttatttaattcaaagactggctcagtttcaagttaaaattatcaatcatagtaactatttaggtgtggcttgggaattaattaaccctgttatgcaaattatggtttactggatggtttttggattaggaataagaagtaatgcaccaattcatggtgtaccttttgtttattggttattggttggtatcagtatgtggttcttcatcaaccaaggtattttagaaggtactaaagcaattacacaaaagtttaatcaagtatcgaaaatgaacttcccgttatcgataataccgacatatattgtgacaagtagattttatggacatttaggcttacttttacttgtgataattgcatgtatgtttactggtatttatccatcaatacatatcattcaattattgatatatgtaccgttttgtttttttttaactgcctcggtgacgttattaacatcaacactcggtgtgttagttagagatacacaaatgttaatgcaagcaatattaagaatattattttacttttcaccaattttgtggctaccaaagaaccatggtatcagtggtttaattcatgaaatgatgaaatataatccagtttactttattgctgaatcataccgtgcagcaattttatatcacgaatggtatttcatggatcattggaaattaatgttatacaatttcggtattgttgccattttctttgcaattggtgcgtacttacacatgaaatatagagatcaatttgcagacttcttgtaa

SEQ ID NO: 406106 - DNA, 795 bp, Staphylococcus aureus
atgaacgtttcggtaaacattaaaaatgtaacaaaagaatatcgtatttatcgtacaaataaagaacgtatgaaagatgcgctcattcccaaacataaaaacaaaacatttttcgctttagatgacattagtttaaaagcatatgaaggtgacgtcatagggcttgttggcatcaatggttccggcaaatcaacgttgagcaatatcattggcggttctttgtcgcctactgttggcaaagtggatcgtaatggtgaagtcagcgttatcgcaattagtgctggcttgagtggacaacttacagggattgaaaatatcgaatttaaaatgttatgtatgggctttaagcgaaaagaaattaaagcgatgacacctaagattattgaatttagtgaacttggtgagtttatttatcaaccagttaaaaagtattcaagtggtatgcgtgcaaaacttggtttttcaattaatatcacagttaatccagatatcttagtcattgacgaagctttatctgtaggtgaccaaacttttgcacaaaaatgtttagataaaatttacgagtttaaagagcaaaacaaaaccatctttttcgttagtcataacttaggacaagtgagacaattttgtactaagattgcttggattgaaggcggaaagttaaaagattacggtgaacttgatgatgtattacctaaatatgaagctttccttaacgattttaaaaagaaatccaaagccgaacaaaaagaatttagaaacaaactcgatgagtcccgcttcgttattaaataa

SEQ ID NO: 406107 - DNA, 765 bp, Staphylococcus aureus
atgactgttgaagaaagatccaatacagccaaagttgacattttaggggtcgattttgataatacaacaatgttgcaaatggttgaaaatattaaaaccttttttgcaaatcaatcaacgaataatctttttatagtaacagccaaccctgaaatagtgaattacgcgacgacacatcaagcgtatttagagttaataaatcaagcgagctatattgttgctgatgggacaggagtagtcaaagcttcgcatcgtttaaagcaacctctagcgcatcgtatacctggtattgagttgatggatgaatgtttgaaaattgctcatgtaaatcatcaaaaagtatttttgctaggggcaactaatgaagttgtagaagcggcacaatatgcattgcaacaaagatatccaaacatatcgtttgcacatcatcacggttatattgatttagaagatgagacagtagtgaaacgaattaaactgtttaaacctgattacatatttgtaggtatgggattccctaaacaagaagaatggattatgacacatgaaaaccaatttgaatctacagtgatgatgggcgtaggtggttctcttgaagtatttgctggggctaaaaagagagcgccttatatctttagaaaattaaacattgaatggatatatagagcattaatagattggaaacgtattggtagattaaagagtattccaatatttatgtataaaatagccaaagcaaaaagaaaaataaaaaaggcgaaataa

SEQ ID NO: 406108 - DNA, 753 bp, Staphylococcus aureus
atgaattatttatcaaacttttttaatacgacaattcaacttaatatatacattatcgttattgttgcagcttgttatattgctattcatcaatatagacataagcctgttttgaactatttagatgtcattttaaactatatccctgttttaacacatgaatttggtcatgtactgtttaataaactcgctggtggccgtgcaaaagatttagtcattgtaacaagtccacgagagcgacaacagacattacaacaaggattcgcaattacacaatctagacatctagcaggccaatggcttacaacgattggtggttattttatgccacctattatgttattgataggtttagcgtcgagccattatcagatacctagtttctttatatttacctatttattgatatttatttattttttaattttaacatctagaaaaggctcacccattgttgttataactttaatttctatcatgttgtattttatattaaaagatgaaaatatagtagaaattcaactacttgtcacaatgagttatcaatatattttaggtgtattattaggcgaagttctacaatctagttggacgattgctaaattgactttccagcgtccgagtccacagtgggatggtagtgcacttaaagaactcagtcatgtacctatcttcatttatagtacaatctggattatcttcaatctttatgcagtgaatattttactcaaatatactcacttgataaattaa

SEQ ID NO: 406109 - DNA, 645 bp, Staphylococcus aureus
atgttaactgaagaaaaagaggactatttaaaggcaatccttacgaataatggcgataaaaactttgtgacaaataaaatcttatctcaatttttaaatattaagcctccatctgtaagtgaaatggtaggacgtcttgaaaaagcaggctatgttgaaacaaaaccatacaaaggtgttagattaacagaggatggtttaacgcatacgcttgatatcattaagagacatcgactattagaattatttttaatagaaatattgaaatataattgggaagaagtacatcaagaagcagaaattttagaacatcgaatttcagatttatttgttgaaaggctggatagcctgttaaatttcccagaaacttgcccgcacggcggtgtgattcctagaaataatgaatataaagagaaatatataacaacgattttgaattatgaacctggtgatatcgttacaatcaaacgtgtgagagataagaccgatttgctaatatatttgtctagtaaagatatttctattggtaatgaagtggaaattgtatcgaaagatgaaatgaataaagtaattatcattaaacgtaatgataatgtaattattgtcagttacgaaaatgcaatgaacatgtttgctgaaaaataa

SEQ ID NO: 406110 - DNA, 744 bp, Staphylococcus aureus
ttgttagaaacaaaagatttaaatctgtttttaggtaataagcatgtacttaaaaacatttccttatcgataccagtacgcggcgaaataattggtatcatgggcccgaatggtgctggtaaatcttcccttatcaagtctttaattggtgaatttaatgctacaggtactaaattgttatataacaaacctatacaacaacaactgcaacatattacatatattccacaaaaagcacatattgatttagattttcctataagtgtggaacaagtgattttatcaggttgctacaaagaaattggatggtttagacgacctaataaatcagcaagggataaactcaaacagttattaagcgatttagaattagaatctttacgtcatcgacaaatttcagaattaagtggtggacaattacaacgtgtgctagtagcaagagcattgatgtccgaaagtgaagtttattttctagatgagccgtttgtcggaattgattttagtagcgaaaaattaatcatgacaaaaatcgagaacttaaaacaacaaggaaaacttattcttatcatccaccatgatctatcaaaagcaaagcaatactttgatcgcattattctattaaatcaaacattacgatactttggtgatagtgaagaggctatgagtgtcactcgcttaaacgaaacatttatgagtagcactgactgtagtgaccctagtcaaaggagcaatataacatgttag

SEQ ID NO: 406111 - DNA, 837 bp, Staphylococcus aureus
atgttagagtttgtcgaacatttatttacatatcaattcttgaatcgagcattgataacttcaattattgtagggatagtttgtggtacagttggtagtttaattgtattacgtggtctttcattaatgggagatgcaatgagtcacgcagtattacctggtgttgccctatcattcttatttggtattccaatgtttgtaggcgcacttataactggtatgatcgcaagtatttttatcggttatatcacatctagtagtaaaacgaaacctgacgccgctattggaattagttttaccgctttcttagcttcggggattattattattagcttaataaacactacgacagatttgtaccatattctgtttggtaatttactggcaatcacaaatagtgcatttttaacaactattgtgattggttcaatcgtccttattctaatcattattttctatcgtccattaatgatttctacattcgatccaacgtttagtagaatgagtggtctaaatacgacgttattacattactttgtgatgttgttactctcattagtaacagtagcaagtattcaaacggtaggtattattcttgtagttgcattattaattacacctgcatctacagcatttttaattagtaaaaaactatactcaatgatgattatagcaagtttaataagtgtcataagttcaattgtcggactttattacagctatatttacaacattcctagtggtgcgacaatcgtactttgtacgtttgtaatttatatcatcacattatttttcacaaaatttacgaatagaaagaaacgaggaagtttaacatga

SEQ ID NO: 406112 - DNA, 930 bp, Staphylococcus aureus
atgaaaaaattagtacctttattattagccttattacttctagttgctgcatgtggtactggtggtaaacaaagcagtgataagtcaaatggcaaattaaaagtagtaacgacgaattcaattttatatgatatggctaaaaatgttggtggagacaacgtcgatattcatagtattgtacctgttggtcaagatcctcatgaatatgaagttaaacctaaagatattaaaaagttaactgacgctgacgttattttatacaacggattaaatttagagactggtaacggttggtttgaaaaagccttagaacaggctggtaaatcattaaaagataaaaaagttatcgcagtatcaaaagatgttaaacctatctatttaaacggtgaagaaggcaacaaaaataaacaagatccacacgcatggttaagtttagataacggtattaaatacgtaaaaacaattcaacaaacatttatcgataacgacaaaaaacataaagcagattatgaaaagcaaggtaacaaatacattgctcaattggaaaaattaaataatgacagtaaagacaaatttaatgacattccaaaagaacaacgtgccatgattacaagtgaaggtgccttcaagtacttctcaaaacaatacggtattacaccaggttatatttgggaaattaacactgaaaaacaaggtacacctgaacaaatgagacaagctattgagtttgttaaaaagcacaaattaaaacacttattagtagaaacaagtgttgataagaaagcaatggaaagtttatctgaagaaacgaagaaagatatctttggtgaagtgtacacagattcaatcggtaaagaaggcactaaaggtgactcttactacaaaatgatgaaatcaaatattgaaactgtacacggaagcatgaaataa

SEQ ID NO: 406113 - DNA, 2043 bp, Staphylococcus aureus
ttggaaatatttgaaacaattcttatatttatagctgttgtgatactaagttcgtttgtccatactttcatacctaaagtacccctagcatttatacaaattttcttgggcatgttactatttattaccccaatccctgttcaatttaattttgattctgaattgtttatggtaacaatgattgcgcctttgttatttgtagaaggtgttaatgtttctagagtccatttaaggaaatatattaagccagtgatgatgatggcattaggattagtcattactactgtgataggtgtaggtttatttattcattggatttggccagatttacctattggagcagcatttgcaattgctgccattctttgtcctactgatgcagtagcagtgcaagcaatcactaaaggaaaggtcttgccaaaaggagcaatgacaattcttgaaggtgagtcattattgaatgatgctgctggtattatttcatttaaaatagctgttggagtattagttacaggtgctttttcacttgttgatgctgttcagttgtttttaattgcatcaattggtggcgcagtggttggtttacttataggtatggcattagtaaggttccgattaacattgatgcgtcgaggatatgaaaacattaatatgtttacaattattcaattgttaacaccatttgttacgtatttaattgctgaattgtttcacgcatcaggaatcattgcagcagtagttgcaggacttgtacatggtttcgaacgtgacagaattatgcaagtacgtacacaactgcaaatgagttacaatcatacatggaatatactaggttatgttttaaatggctttgttttttcaatattaggatttttagtacctgaagttattattaaaattatcaaaacagaaccgcacaatttaatctttttaataggcatcactattgttgttgctttagctgtctatctatttagatttgtttgggtttatgtcttatatccttatttttatttagccatcagtccattccaaaaaatgatgactaaaaatgatgatgataatccaacgactgagaaaccaccaaagcgaagtttatacgctttaattatgacgttatgtggtgtgcatggaacaatttctttagcaatcgcattaacgttaccgtattttttagcagggcatcatgcttttacgtatagaaacgacttattatttattgcatctggtatggttattattagtttggtagttgcgcaagtattattgccattattaacgaaacctgcacctaaaacagtaattggcaatatgtcgtttaaagttgctagaatttatatattagaacaagttattgattatctaaatcaaaaatctactttcgaaacaagttttaaatatggtaacgtgattaaagaatatcatgataaattagcatttttaaaaactgtagagaaagatgatgaaaactctaaagaattagaacgtctacaaaaaattgcttttaatgtagaaacaaaaacattagagtctttagtagatgaaggacaaataacgaatagtgtacttgaaaactatatgcgttatgctgaaagaacacaggtatatagacaagcatcattaataagaagaatgattgtattattacgaggtgctttattaaaacgaagagtacaaacgagagtgaactccgcatcttcacttagtgttacggataacttaatggaattaaataaaattaataaattagtccattataatgtggttagtcgtttgtctaaggaaacaacaaaagataatacacttgaagttggaatggtttgtgacggttatttaatgcgaattgaaaacttaacaccatcaaatttcttcaactcagcaagtgaagatacgattactaaaattaaattaaatgcattgagagaacaacgtcgcattttacgtgagttgattgatacagatgaagtatcagaaggtacagcgttaaaactaagagaagccatcaattatgatgaaatggttattgtagatagtatgacgtag

SEQ ID NO: 406114 - DNA, 438 bp, Staphylococcus aureus
atggaaataacaaaagaaatctttagtcttattgctgctgtgatgttgttgttaggtagttttattgctcttattagtgcaataggtatcgtgaaattccaagatgttttcttaagaagtcacgctgcgacaaaaagttcaactttatccgtgttattaactttaatcggtgtattaatttattttattgtgaatacaggatttttcagtgtgcgtttattactgtcacttgtttttattaatttaacttcaccagtcggcatgcacttagtcgctcgcgctgcttatcgcaacggcgcttatatgtatcgaaaaaatgatgctcacacacatgcatcaatattattaagttcaaatgaacaaaactctacagaagcattacaattacgtgctgaaaaacgagaagagcatcgtaagaaatggtatcaaaacgattga

SEQ ID NO: 406115 - DNA, 303 bp, Staphylococcus aureus
atgatacaaacaataacacatattatgattattagttcactcattatttttggaattgcattaatcatctgtttatttagattaatcaagggacctacaacagcagatcgtgtcgttacatttgatacaacaagtgctgtcgtaatgtcaattgtgggtgtgttaagtgtacttatgggcaccgtttctttcttagattcaatcatgctcattgccattatatcttttgtaagttctgtttcaatatcacgctttattggtggggggcatgtgtttaatggaaataacaaaagaaatctttag

SEQ ID NO: 406116 - DNA, 483 bp, Staphylococcus aureus
atgaatcaaatagttttaaatattatcattgcattcttatgggtattatttcaagatgaagatcattttaaattctcgactttcttttctggatatctaattggtttaattgtcatttatatattacacaggtttttcagcgatgatttttatgttagaaaaatatgggtagctattaaatttttaggtgtttatttatatcaattaataacatctagcattagcacgattaattatattctttttaaaacaaaagatatgaaccctggattactttcatatgaaacaagactaacaagtgattggtcaataacatttttaacaattttaattattataactccagggtctacagtaatacgaatttctcaagactctaaaaagttttttattcatagtatcgacgtgtcagaaaaagaaaaagatagtttgttaagaagtattaagcattatgaagacttaatattggaggtgtcgcgatga

SEQ ID NO: 406117 - DNA, 1497 bp, Staphylococcus aureus
atgctaagtaacttattgattttaccaatgttattaccattcctttgtgccttaatccttgtatttttaaaaaataatgatcgtatttctaaatatttatacttaggtacaatgactatcaccacaattatttcattaatgctattaatttatgttcagcgtcaccgtccaattacgctagactttggaggatggtcagcgccctttggtatacagtttttaggagattctttaagtttaattatggttacaaccgcttcgtttgtgattactttaattatggcatacggatttgggcgtggcgaacataaagcaaatcgttatcacttgccatcgttcatattatttttaagtgttggcgtgataggctcttttctaacatcagatttatttaatttatacgtcatgtttgaaattatgttactagcgtcatttgtactcattacacttggacaatctgtagaacaattacgtgctgcaattatttatgttgtcttgaatattattggttcatggctattcttattaggtataggtttactttataaaacagtaggtacattaaacttttcacatattgcaatgcgtttgaatgacatgggagataatcgcactgttacaatgatttcattaatcttcttagtcgcatttagtgcgaaagcagcgctggtcctttttatgtggctacccaaagcctacgctgtgttaaatactgagcttgcagcattatttgcagcgttaatgaccaaagtaggggcctatgcattaattcgattcttcactttactatttgatcaacataatgatctcatacatccattgctagcaactatggctgctataactatggtcatcggcgctataggtgtcattgcttataaagatattaaaaagattgcagcttaccaagtcataatctcaataggatttatcattttaggtttaggaacaaacacgtttgcaggtattaatggtgcaatattttatttggtaaatgacattgttgtaaaaacattgctattttttattattggtagtttagtttacattacaggctatcgacaatatcaatatttgaatggcttagctaaaaaagaacctttatttggagttgcgtttattataatgatttttgctattggcggcgtgcctccatttagtggctttccggggaaagtacttattttccaaggtgcattgcaaaatggcaattatattggactagcgttaatgattattactagtctaattgcaatgtacagtttatttaggatacttttttatatgtattttggagataaagatggggaggaagttaattttaagaaaatcccgctatatcgaaaaagaattttaagtattttagtagttgtggttatcgcaatcggaattgctgcacctgttgtgttaaatgttacaagtgatgcaactgagttgaacacgagtgatcaattatatcaaaaacttgtaaatccgcatttgaaaggagaggactaa

SEQ ID NO: 406118 - DNA, 345 bp, Staphylococcus aureus
atgaatttaatattattactagttataggatttttagtgtttataggaacatatatgattttatcaatcaatttaattcgtattgtaatcggaatttcaatatatactcatgctggtaatctcattattatgagtatgggaacgtatggttctagtagatcagaaccactaataactggtggaaaccaattgtttgttgatcccttgttacaagctattgtactaactgcaatagttatagggtttgggatgactgcgtttttacttgtacttgtttatagaacttataaagtaacaaaagaagatgaaattgaaggcctaaggggggaagatgatgctaagtaa

SEQ ID NO: 406119 - DNA, 426 bp, Staphylococcus aureus
atgaaagagaatgatgtcgtgttaagaacggtcacgaaacttgttgtatttattttattgactttcggattctatgtcttcttcgcaggtcataataatcctggtggtgggtttattggtggtttaatatttagttcagcgtttattttaatgtttctggcttttaatgttgaagaggttttagaaagtttaccgattgattttagaattttaatgattattggagcattggtatcatctattactgcgataatacctatgttttttggaaaaccatttttgtctcaatatgaaacaacttggatacttccaattttaggacaaattcatgtaagtacaataacactttttgaattaggtattttattctcagttgttggtgttattgtcacagtgatgttgtcgcttagcggaggtcgatcatga

SEQ ID NO: 406120 - DNA, 2403 bp, Staphylococcus aureus
atgagtttggtttatttattaattgctatacttgtgattatggcgatgatacttctaatgtctaaacgtagagcattggctaaatatgccgggtacatagcgttggttgcacctgtaatttcatctatctattttttgattcaaataccatcagtagctaaactgcaatatctttctacctctattccatggattaagacattagatattaatttagatttacgtttagatggtttaagtttaatgttttctcttattatttcacttattggaattgcagtattcttctatgcaactcaatatttatcctctcgaaaagacaatttaccaaggttttatttttatttaacgttatttatgttcagtatgattggtattgtattatcagacaatacgatattgatgtacattttttgggaattaacgagtgtatcatcatttttattgatttcatattggtataacaatggtgacagtcaatttggtgcgattcaatcatttatgattacagtatttggtggattggcgttattagttggttttattatgctgtatatcatgacaggaacgaataacatcacagagatattaggacaagcagatcatattaagaatcatggattgtttatccctatgatttttatgtttttattaggtgcatttacaaaatcagcacaatttccatttcatatttggctacctagagcaatggctgcacctacacctgtaagtgcttatttacattcagccacgatggtaaaagctggtatctttttattacttcgatttacaccattattaggtcttagcaatatgtacgtatatatcgttacgtttgttggtttaataacaatgttatttggttcaattacagctttaaaacaatgggatttaaaaggtatcctagcgtactctacaatcagtcaacttgggatgattatggctatggtgggtataggtggcggatatgctcaacaccaacaagacgcaatagcatctatttatgtatttgtattatttggtgcgctatttcatctaatgaatcatgccatctttaaatgtgcgcttttcatgggagtaggtattttagatcatgaagcaggttcaagggatatacgaattttaagtggaatgcgtcaactatttcctaaaatgaatctagtcatgacgatagcggctctatctatggctggagtaccatttttaaatggatttttaagtaaagaaatgtttttagatgcattaacacaaactggacaattatcccaatttagtttgatttcaatgatagctatcgtgtttgttggtgttattgcgagtgtttttacattcacatatgcactatacatggtaaaagaagtattttggacaaaatatgattctaaggtttttactaaaaaaaatatccacgaaccatggttgtttagtttaccatctcttatattaatggtgctagtacctgtaatcttttttgtaccaaatatatttgggaaggggattatcgttctagcattaagagctgtatcaggtggtaatcatcaaattgatcaattggcaccacatgtttcgcaatggcatggatttaacataccgcttcttttaaccatcatcattattttattgggtagtgtactagcaatcaaagtagattggaaaaaagtgttcacaggtaaaattagacagatttcagtttcaaaaagctatgagatggtatatcgacattttgaaaagtttgctacgaagcgatttaaacgtgttatgcaagatcgtttaaaccaatacattattatgaccttaggcatatttatgattatcattggatatggttatattcgaattggacttcctaaagtacatcagttacatgtttctgaatttggggcattagaaattatattagcaatcgtaactgtcacaattggtatttctttaatttttatacgtcaacgactgacaatggtcattttaaatggagtcatcggatttgttgtgaccttattctttatagcaatgaaagcccctgatctagcattgactcagctagtagttgaaacaataacgacgatactatttattgtcagtttttcaagattaccaaacgtgccaagatctaacgctaacaaaaaaagagaaataattaaaatttctgtatcactcttgatggcacttattgttgtatcattaatttttattacacaacaaacagatggtttatcatcaatatcagacttttatttaaaagctgacaaactaacaggtggtaaaaatattgtaaatgcgatacttggtgactttagagcattagatacattatttgaaggattagtgttaattattactgggctaggtatttacacattattaaattatcaagatcggaggggacaagatgaaagagaatga

SEQ ID NO: 406121 - DNA, 561 bp, Staphylococcus aureus
atgaataaagtagaagcgattaaatttaatgatgatattgttaaaatgtatgaagcgctcaagataaaatctgaacgtgactatttattctttaagttagctatacatagtggattgaaagtatcagaattattaacaattacagtctctcaagttaagagactaattgaaaagtgtacgttatcagaaatgtgtaaagcacattttcattcgttgattaaaattaggttaccagaaacattatcgaaagaactacttcaatatatagaggacaggagtctttcgaatgaagacgttctttttcaatcactacgaacaaatcaagtattatctagacagcaagcatatcgaataattcaccaagcatcaattgaagctggtatagataatgtaggactaacgacattgcgtaagacatttgcatatcatgcttatcaaaaaggtatacctataccagtcattcaaaagtatttagggcatcaatctgctattgaaacactaaattttatcggtttagaaaatgagtgtgaacatagtatttatatttcattacaattatag

SEQ ID NO: 406122 - DNA, 204 bp, Staphylococcus aureus
atgagtaaaataaaccacatcactattgtattatcatttactaaagtagacgctaacggcaaacaaacagaatttaagcgtcgattcgctaacattaaccctgatgcatcaaacgaccaaattaaaacattcagcaaacttattgagcgacttactggagaaacatatagcaatatcgaactcatcaaatctttatcaatttaa

SEQ ID NO: 406123 - DNA, 225 bp, Staphylococcus aureus
atgactaaaacacttgaattaagttttaaatcttcactagacaagcctgtaaaactgcaattaccacaattaaacaacgtagtgaccgagcaagttgcacgtgatagtatgaatgcattagtagatttaaatattataaagtcaaatagtggtactatcaccaaagtacattctgctcaaattattgataaaacaacaactgttttatttgaagataagaaatag

SEQ ID NO: 406124 - DNA, 930 bp, Staphylococcus aureus
atgcttcttttctatatcattggtgtcctagttggaatgcttattcctatccaaacatctgtcaattcaagactatcactgtatactaaatcgcctttctatacttcattcatttcattttcagttggaacaatttgtttaattattttaaatatcattatcaatccagaagtatttactattcacttttacaataatcaatcatttaactacacatgggtagtcggtggtttgcttggggttagctttttaactggcaatttattgttattgccaaaattaggtgcaacattaactgtaattgcaacagttgcgggtcaaattattatgggtgtcattattgatacatttggattatttggcgctacaattcatgattttaatttaattaaagcaattggagtattgttactcattgtcggcatcgtcataatgaatcaatttaacaagaataatttattactaactgatcaaaagtatttactgttttggcttctattaggatttatttttggtttctttccacctattcaaacgacaattaatagtgctttagctagtcatactcattcaccagcctttgcatcattagtatcatttacaattgggtcaatagcgctattgattttaaccgctatttttaatcgttctttaaaactaaaaacaagtcatttaaaattcggtaaattaaagcctatctattttactggcggtatacttggcatggcttttgtaacagctaacattatcttaatgcctcatatgggtgcagcattaacaacacttattgggatgtttggccagattctaatgggcatattgatagatcactttggattatttggttcacctaaaatagcaatgacatccagaaaaactattggtctattatgtattttgacaggcattatacttttaagattattttaa

SEQ ID NO: 406125 - DNA, 375 bp, Staphylococcus aureus
atggcaattacaaaaatcaatgattgctttgagttgttatcaatggtcacttatgctgacaaattaaaaagtttaattaaaaaggaattttcaattagctttgaagaattcgctgtattgacatacatcagcgaaaacaaagagaaagaatactatcttaaagatattattaatcatttaaactacaaacaaccacaagttgttaaagcagttaaaattttatctcaagaagattacttcgataaaaaacgtaatgagcatgatgaaagaactgtattaattcttgttaatgcacaacaacgtaaaaaaatcgaatcattattgagtcgagtaaataaacgaatcactgaagcaaacaacgaaattgaactataa

SEQ ID NO: 406126 - DNA, 789 bp, Staphylococcus aureus
atgaataaagtcacaattaatcctcaaatccaattaacttatcaaattgaaggtaaaggggatcctataatattacttcatggattggatggtaatttagctggatttgaagatttgcaacatcaactagcatcatcatataaagtacttacttacgatttaagaggtcatggcaagtcttctaaaagtggatcatacgatttaaacgatcacgttgaggatttaaaaattctaatggagaagttaaatattcatgaggcacatattctaggacatgatttaggtggggtagttgctaagttatttacagataaatatgcttatcgtgtaaaatcattaactaccattgcatcgaagaaagatgacttaatacacagctttactcaattgttaatacaatatcaagatgatatagcgggttttaataaatctgaagcgtatattcttttattttctaaattgtttagaaatcaagagaagacgatgaaatggtatcaaaaacaaagaatatatagcattaagtctgaggatgatagtgcggtggcaattcgttcattaattttgcataaagatgaacctatgtatttaaaaaaacgtacatgtgtacctactttgttaattaatggggaaaatgatcctttgattaaagataagaatcattttaaattggaagcgcattttttaaatgttacgaaaaaaatcttcgaacattcaggacatgcaccgcatattgaagaaccagaagcatttatgaattattatttaaaatttttaaaaagcgtatcataa

SEQ ID NO: 406127 - DNA, 717 bp, Staphylococcus aureus
atgcgtattaacgataaaattttactagaaaatatagaagattactttaatcataaaggtttatcaccgcatttgattgatgatattaaagagaaagtaattactgatataaaaaattctgaaaagaaagatcaagattatattgaatataaaagaaaatctccagcacaaatcatattaatgattcaaaggaatttgtttgctttacaaatgaatccagttattttctttattataaacttcattctcatatcctatttatatgataaacagtatgttcagtttcaagctattactggaatgagtctattttattgtttagtgatttttccaatgactattgttgtatacctaagggtgtctcaaaagaattacttgcgtagtaataaaatagaaatgattatgggtacaattatcgctatcatatccttgttattaattatattacaagcatttaatattacttggggcgttataccaattacaaattttggacatcaatttttctttttcattggtattattttagtaattgccggcatattttataagcgacttgagttttcgggaatcgggttattattttgtcaaaaaaccgtcgatgcaatgattcataatccacaatcagcccagattttttcattaattatatggatattattagtagttctagttatatatttcacaattagattatcttcacgtacaagattataa

SEQ ID NO: 406128 - DNA, 507 bp, Staphylococcus aureus
atgaaaaagctactaacggcaagtataattgcatgttctgttgtaatgggagtaggcttagtgaacactagtgccgaagcagcaagtggcaactctattgatactgttaaacaattaattaagggtgatcagtcattagaaaatgtgaaaattggcgaatctattaaagatgttttaactaagtacaaaaatccgatgtattcttacaatgaagatggaactgaacattattacgaattccatactaaaaaaggtatgttattagtaactactgatggtaagaaaaacaatggtaaagtaactcatatttcaatgatgtataatgatgctaatggtccaacatatcaagctgttaaaaattatgttggcaaagcagtaacacatacggaatatagcaaagttgctggtaattttggatatattgaaaaaggcaaaacgacttatcaatttgcctcagcaccaaaagataaaaacataaaattatatcgtattgatttggaaaaataa

SEQ ID NO: 406129 - DNA, 801 bp, Staphylococcus aureus
atggatctatttactagaaaagatggaacatcgatacattacagtacattaggtgaaggctatcctatcgtattgattcatactgtacttgataattattctgtgtttaataaattagcagcagaattagcaaaatcatttcaagttgtgttaattgatttacgtggacatggctattctgataaacctcgtcacattgaaataaaagatttttctgatgacattgttgaattacttaaatatttatatattgaagaagttgcatttgtatgccatgaaatgggtggaatcattggtgcggatatttcagtacgttatcctgaatttacatcatcacttacgttggtaaatccaacatctattgaaggtgaattaccggaagaacgtttatttagaaaatatgcccatattattcgaaactgggatcctgaaaaacaagataaatttttaaataagcgtaagtattatcgtccgagaaaaatgaatcgattcctcaaacatgtcgtagatacaaatgaaatatcaactaaagaagaaattcaagcagttaaagaggtattcaaaaacgctgatatttctcaaacttatagaaatgtcgtagtaccgacaaaaattattgcaggagaattcggtgaaagaacaacaagattagaagctaaagaagtagctgatttaatccaaaatgcggactttgaagtatatcaagaatcaagtgcattcccatttgttgaagagcaagaaagattcgtcgaagatacagctgcatttatcaacaaacatcacgatgaaaagcatgtttaa

SEQ ID NO: 406130 - DNA, 720 bp, Staphylococcus aureus
atggatttgaatcaaattaaagcagttgtatttgatttagaaggtacgttgttggacagagttaaatctcgagagaaatttatcgaagagcaatatgaacgatttcatgactacttaattcatgttcaactggcagattttaaaaaagcatttattgagctagatgacgatgaagataatgataaacctgatttatataaagaaatcattaaacgtttccatgtagataggttaacttggaaagacttatttaatgattttgaaatgcatttttatcgttatgtatttccttattacgatactttgtatacactagaaaagctatcgcaaaaaggctttcaaattggtgttatcgcaaatggtaaatctaagattaaacaatttcgattacattcacttggtttgatgcatgttattaattatttatcaacatcagaaacagttggttttcgtaaaccacatcctaaaatttttgaagatatgattgatcaactaggggtattacctgagcaaattatgtatgttggcgatgatgcgttaaatgatgtagctccagcacgagctatgggcatggttagtgtatggtataaacaagaagatgctgaaattgaaccactcgaagaagaagttgattttacaattacaacagtggaagaattattaaccattttaccaataaaaaatgataataaaggagaaaattatggatctatttactag

SEQ ID NO: 406131 - DNA, 987 bp, Staphylococcus aureus
atgaatgtaattatcgatgaaagaaaagagaatgctatgacatttaataaagtattattgagctggatagtcatattgattataacaactagcatatatctattttggcagttgggcgatatcaatgatgtatttaaccagtctattttaatcaatgttagattaccgagattattagaagcattgttgacaggtatgatattaactgttgcaggccttatatttcaaacagttttaaataatgcattggcagatagctttacattaggattggcaagcggcgctacatttggttcaggattagcattatttttaggtttaacaacgttatggattcctgtattttcaataacatttagtttgataacattaataactgtattagtcattacgtcggtattgagccaaggctatccagttagaatcttaatattaagtggtttaatgattggtgcgttattcaattcacttctatattttttgattttattaaaacctcgcaaattaaatacaattgccaattatctgtttggtggttttggtgatgcagaatactcaaatgtatctataatagcaatcacatttatcattgcattgtttggtatatttatcattcttaatcaactaaagttattgcaattaggagaactaaaaagtcagtcactaggcttaaatgttcaattgattacatatatcgcgttatgtatagcttctatgataacggcgataaatgtcgcatatgttggcatcattggattcattggtatggtgataccgcaactcattagaaaatggcagtggaaacaatcattaggaagacaattggctttaaatattgtaactggaggacaaataatggttatggcagattttattggtagccatatattgtcaccagtacaaataccggcaagtattatcattgcattaattggtataccagtgttattttacatgctaatatctcagtcgaaacggttacactag

SEQ ID NO: 406132 - DNA, 888 bp, Staphylococcus aureus
gtgaagaaatcgttaattgcttttattttgatttttatgcttgtcctgagtggctgtggtatgaaagataatgataaacaaggtagcaatgataatggctcgtctaaatcgccgtaccatagaattgtttcgttaatgcctagtaatactgaaattttatatgaattaggattaggtaaatacatagttggtgtttcaacggttgatgattatccaaaagatgtgaaaaagggtaagaaacaatttgatgctttgaatctaaataaagaggaacttttaaaggcaaagccagatctaattcttgcgcatgagtcgcaaaaggcaactgctaataaagtattgtcatcattagagaaacaaggcatcaaagtagtgtatgttaaagatgcacaatcaattgatgaaacttacaacacatttaagcaaattgggaaattaacgcatcatgataagcaggctgaacaacttgttgaggaaactaaagataatatcgataaagtcatagattcaattcctgctcatcataaaaaatcaaaagtatttattgaggtttcatcaaagcctgaaatatatacagcagggaagcatacattttttaatgatatgttagaaaaattagaagcccaaaatgtgtatagtgacattaatggttggaaccctgtaacgaaggaaagtattattaaaaagaacccagatatattaatttcgacggaagctaagacaagatcagattatatggatatcatcaaaaaaagaggtggattcaataaaattaatgctgtcaagaatacacgtattgaagttgtaaatggtgatgaagtatcaagaccaggtccacgtattgatgaaggattaaaagaattaagagatgcaatttatagaaaataa

SEQ ID NO: 406133 - DNA, 636 bp, Staphylococcus aureus
atgttaggaactgatgaattatataaagttttatatgaacatctcggaccacaattttggtggcctgctgataatgacattgaaatgatgttaggtgcaattttagttcaaaatactagatggcgaaatgcagaaattgcattgaatcagattaaagaacatacgcattttaatccaaatcatatattagaactacctattgaaacgttacaatcattgatacattcaagtggcttttataaaagtaaatcactgacgattaaaacattattaacatggttagcacgacatcatttcaattatcaagagattaatgagcgatataaaggtggattaagaaaagaattattatctttgaaaggtattggaagtgaaacagcagatgtcttacttgtttatatattcggacgtattgaatttattccagatagctatacaagaaaaatatatgataaattaggatatgaaaacactaaaaattatgatcaattaaaaaaagtagtcacattaccaaatcattttacaaatcaagatgctaatgaatttcatgctctgttagatgtatttggtaaacattactttagagacaaagatataaagaattatgattttttagaaccttactttaaaaagtaa

SEQ ID NO: 406134 - DNA, 1662 bp, Staphylococcus aureus
atgaatattattgatcaagtgaaacaaacattagtagaagaaattgcagcaagtattaacaaagcaggattagcagatgagattcctgatattaaaattgaagttcctaaagatacaaaaaatggagattatgctactaatattgcgatggtactgactaagattgcaaagcgtaatcctcgtgaaattgctcaagcgattgttgataacttagatactgaaaaagcacatgtaaaacaaattgacattgctggtccaggattcattaatttttacttagataatcagtatttaacagcaattattcctgaagcaattgaaaaaggtgatcaatttggacatgtaaatgaatcaaaaggtcaaaatgtattgcttgagtatgtttcagctaaccctacaggagatttacatattggtcatgctagaaatgcagcagttggtgatgctttagctaatattttaactgcagctggctataatgtaacacgtgaatattatattaatgatgctggtaatcaaattactaacttagcgcgttcgattgaaacacgtttctttgaagctttaggtgacaatagttattcaatgccagaagatggctataatggaaaagatattattgaaataggtaaagatttagcagagaaacaccctgaaattaaagattattctgaagaagcacgtttgaaagaatttagaaaattaggcgtagaatacgaaatggctaaattgaaaaatgatttagcagagttcaatacgcattttgataattggtttagtgaaacatctttatatgaaaaaggagaaattcttgaagttttagcaaaaatgaaagaattaggttatacgtatgaagctgatggcgctacatggttacgtacaactgattttaaagacgacaaagacagagtattaattaaaaatgacggtacatatacgtatttcttaccagatattgcgtaccacttcgataaagtaaaacgtggtaatgacattttaatcgatttatttggtgctgatcatcatggttatattaatcgtttgaaagcatctcttgaaacgtttggtgtagatagtaatcgtttagaaattcaaatcatgcaaatggttcgtttaatggaaaatggtaaagaagtgaagatgagtaaacgtactggtaatgcgattacattaagagaaattatggacgaagttggcgttgacgctgcacgttatttcttaactatgcgtagtcctgatagtcactttgattttgatatggaattagcgaaagagcaatctcaagacaatccagtttactatgctcaatatgcacatgcgcgtatttgttcaattttaaaacaagcgaaagagcaaggtattgaagtgactgctgcgaatgattttacaacgattactaatgaaaaagcgattgaattgttgaaaaaagtagctgatttcgaacctacaattgaaagtgctgctgagcatagatcggcacatagaattactaattatattcaagatttagcttctcatttccataaattctataatgctgaaaaagtgttaacagatgatattgaaaaaacaaaagcacatgttgctatgattgaagcggtcagaattacattgaaaaatgcattggcaatggtcggtgtaagcgcacctgaatcaatgtaa

SEQ ID NO: 406135 - DNA, 417 bp, Staphylococcus aureus
ttggataaaaaagtaagtattcaaacaaagcaagtgttgaaacagcacaacgaaaaagaaaaatttgaatttactactgaaggaacttggcaacaaaggcaatctaactttattcggtatgtagaacaaattgaggatgcaacagttaatgttacaataaaagtggatgatgatagcgttaagttgattcgtaaaggcgacattaatatgaatttgcattttgttgaaggacaaacgacaacaactttttacgatatatcggctggacgaattccactagaagttaaaacattacgcattttacatttcgtaagtggagacggtggcaagctaaagattcattatgaattatatcaagataatgaaaaaatgggttcttatcaatatgaaattaactataaggagataggcgaatga

SEQ ID NO: 406136 - DNA, 1011 bp, Staphylococcus aureus
atgagagcagcagttgtaacgaaagatcacaaagtaagtattgaggacaaaaagttaagagctttaaaacctggtgaagcgttggtacaaacggaatattgtggcgtttgtcataccgatttacatgttaagaatgctgattttggtgatgttacaggcgttactttaggtcatgaaggtattggtaaagtcatcgaagttgcggaagatgtagaatcattaaaaattggagaccgtgtgtctatcgcttggatgttcgaaagctgtggaagatgtgaatattgtacaacaggtcgtgaaacactttgccgtagtgtgaaaaatgctggttatacagtagatggtgcaatggctgaacaagttattgttactgcagactatgctgtgaaagtacctgaaaaattagatccagcagcagcgtcttctattacatgcgcaggtgtgacaacttataaagctgtaaaagtaagtaatgtaaaacctggacaatggttaggtgtttttggtataggtggtttaggtaacctagctttacaatatgctaaaaacgttatgggggctaaaattgttgccttcgacatcaatgatgataaattagcattcgcgaaagaattaggtgctgatgctattattaattctaaagatgttgatccagttgcagaagttatgaaattaactgataacaaaggattagatgcaacagtggtaacttcagttgctaagacgccatttaaccaagcggttgatgttgtaaaagctggtgcaagagttgttgccgttggtttacctgttgataaaatgaacttagatatcccaagattagtgcttgatggtattgaagtagtaggttcacttgttggtacaagacaagacttacgtgaagcgtttgaatttgctgctgaaaataaagtaacacctaaagttcaattaagaaaattagaagaaatcaatgatatttttgaagaaatggaaaatggtactataactggtagaatggttattaaattttaa

SEQ ID NO: 406137 - DNA, 507 bp, Staphylococcus aureus
ttgtctgagaaaaaaggctttaattttaatatcataaaaaatgaccctctagatggtcataaaggtacaaatattggttcaattagcttagacaatattgcaccagtttttatcgatgttgctaacaaagaagcatttattgatattggaggcatgcatgctcgtgccaaagttgaaaaaggtgtgaaatggattactgataaagctgctgttgaaggcgatgaagctaaagaatattggttgtgttgggtaacaacagaacgtaatgaacaaggaccatattacgctggtttaacagcgtgctatttattagtgaataaagcaattcgtcgtggttataaaagtatgcctgaacatgttaatatgatggataaatcaatgaaacatcatattatcatagatcaaattggtgacgagaataaagctattttaaaagactttttaatgaaccatgatgaaggtatgtggaagcattcttctgatgctttacatcaagcatttaattaa

SEQ ID NO: 406138 - DNA, 1296 bp, Staphylococcus aureus
atgactaacgcatatgtagatttaaaattagtagaagaaaaagtttttaaagacccgatacatcgatatattcatgttgaagatcaattgatatgggatttaattaaaactaaggaattccaaaggttacgtcgaattagacaactaggaacactgtacctatcttttcacacagcagaacatagtcgctttggacattctttaggtgtgtatgaaatagttagacgattaattgatgagtcatttattggtcatgatgcatgggacaataaagatagaccgttggcattatgtgctgcattattacatgatttaggacatggtccattttcacatagttttgaaaaaatatttaatacagaccatgaagcatacacacaagcgattattactggagatactgaggtgaatgctgtattacgtaaagtggcgcctgagtttccaagagaagttgcggaagtaattaataaaacgcatcataataaattggtcatttcgatgatttcgtcacaaatcgatgcggatagaatggattatttacaacgtgatgcgtatttcacaggtgtatcatatggtgcttttgatatggagcgtattttaagattaatgcgaccttctaaagatgaagtactaatcaaagaaagtggtatgcatgcagttgaaaactttattatgagtcgttatcaaatgtattggcaaatttacttccacccagttagtcgtggtggagaagtgctgcttaataattgtttgaaacgcgcaaaacagctttataatgaaggctatgaatttaagttgcatccacatgattttattccattttttgaagagacagttacgattgaacaatatgttgaactcgatgaagcggtagttacgtattatttggaaaaatggacaaaagaagatgatgctattttaagtgatttagcaagtcgatttattaatcgagacttatttaaatatattccatttgatggctcaattattacaatatcagaactgcaagaactgtttgaagcaggtggtattaatccagattattattttgtgagtgaagcattttctgatttgccatatgactatgatcgaccggggtcaaatcgcaaaccgattcatttattaagacaagatggtacgattagagaaataagcaatcaatcattagtcattcatagtattacaggcattaatcgccaagactataaattatattatcctagagaaatggttgcaaagattaaagataagacaattagagaagctattgaaaatttgattaatgagcttaattaa

SEQ ID NO: 406139 - DNA, 477 bp, Staphylococcus aureus
atgttcaaggtaagacaagcaactgaaaaagatgttgttcaaattagagatgtcgcaactaaagcttggtttaatacatacttaaatatatacgctgcgacaacagttaatcacttgttagaagcttcatataatgaacatcatttaaagaaaagacttcaagaacaattattcttagtcgttgaagaaggtaatgacatcgttggctttgctaactttatttacggtgaagaattatatttatcagctcattatgttaaaccagaatcgcaacatacaggttatggtacagcattgttaaatgaaggattatcacgttttgaagataaatttgaaggtgtttacttagaagtagataataaaaatgaagaagcagtagcttactataaagagcaaggttttacaatcttacgctcttatgagccagaaatgtatggcgaaaagttagacttagcacttatgtacaaagcattttaa

SEQ ID NO: 406140 - DNA, 537 bp, Staphylococcus aureus
atgattactgttttgtttggtgggagtagaccaaacggtaatactgcacaattaacaaaattcgctttgcaagatttagagtatcaatggattgacgtgacacaacatcagtttaaaccgatacgtgacgtgagacatacagcagagactattacttcatatgacgatgactatttgccgattctagataaaatattggctagtgatacaattatttttgcatcaccagtgtattggtatagcatttcagcaccattgaaagcatttatcgaacattggtcagaaacattacaagataaacgatatcctaattttaaggcacaaatggccgaaaaggattttagagttattttagttggtggagattgtccaaaaataaaagcgaagccagcaattacgcaaatgaaatatagtttagactttttaggtgccactttaaatggttatattattggaactgctgaaaagcctggtgacatcatgaaagacaactatgccttagcacgtgcaactgagtggaatagtatattgcaataa

SEQ ID NO: 406141 - DNA, 939 bp, Staphylococcus aureus
atgaagcaatttgtaaacttaggtaaatctgatgttgaagtgtttccaatcgcacttgggacgaacgcagtaggtgggcataatttatatccgaacttagatgaagaacaaggaaaagatgttgttcgtcaagccattaatcatggtattaatttattagatacggcatatatttatgggccagaacgatcagaagaattggttggagaagttgttaaagaatatccgcgagagcaaattaaaattgctacgaaagggtctcatgaatttgatgaaaatcaagaagtacatcagaacaatcaaccggaatatttaaaacaacaagttgagaatagtttgaaacgtctacaaactgattatatcgatttatattatattcattttccggataacaacactccgaaagatcaagcagttgcagcattacaagagcttaaggaacaagggaagattaaagcaattggtgtatcaaatttcacattagatcaacttaaagaagcaaataaagatggttacgttgatgttgtacagttagaatataatttattgcatcgcgaaaatgaggcagtattacaatattgtgttgatcaccaaatcacatttattccatatttcccattagcatccggtattttagctggaaaatatgatgagaacactaaatttagtgaccatcgtactacacgtcgtgattttaaaccaggtgtatttgaagaaaatgtgcgtcgcgtaaaagctttggaaagcatagctgcagcacatcaaacttcaattgcgaacattgtattagcattttatttaacgagaccagctatcgatgtgattattcctggtgcaaaacgtgcagaacaagtcgttgaaaatattaaagctgcagatatcgttttatcagatgatgagattcaatatatcgatgaactgtttccgattgaagactaa

SEQ ID NO: 406142 - DNA, 627 bp, Staphylococcus aureus
atgttgctatgcgaatctaaaatcatcaataaaaacccaaaatatagaattattaaatataatgatgaatacttaatggtcgatataataagcacttggattagtttattttttccttttattaattggttcatcccaaaagaatacgtcaaaattagtagagaagagtttgaaaacttaaatattgttaaacctgctaaaaagaatgttttttggccagttgcaggtagctctgctttgctgggagttgcattaagaaaatatacacatttacttgacattcaacttgataaaaaattagttattgccatatgttgcatcacatttatagggattttaatattttatgtacgcctaattaaaaaatcatctttaaatatttataatactaaaaataaaaggtcaaaaatttttttaatacctacactaaaaaatgtttgtttcacattatttggatatgctttttttattttatggacagtgattttctcatatgctctattatcaatgagttatcaaaacataatagtatattttgtttggattgcagttataatgggtttttttctagttaatatagctttaattatagataaaaacattcatgtcatacttaaaaaccaatag

SEQ ID NO: 406143 - DNA, 246 bp, Staphylococcus aureus
atgtattatctaaaactaacacggtggaaaaatgatggtttagctggatttactgcaggttctatttcggcaatacttgtatattggaccaatcaaaaaaatgaatttggaataaaagataaaaacgattggataggacataaactagacgttggtatagatgctgtagaaaaatctgcagaaaaaacagtagatggtgttgaaaatgtcatggtgaagcttcaaaaagtatttctaatcatataa

SEQ ID NO: 406144 - DNA, 636 bp, Staphylococcus aureus
ttgctatgtgaatctaaagttatcaacaaaaatcctaagtatagagttattaaatatggtgatgaatatttaatgattgatttagtaagtacctggttaactttatttcttcctatgattaattggttaattccaaaaaaatatgtcaaaatcagtaaaaaagaatttgacgatttaaacattgtcaaacctgttaaaaataaagctttttggccagttgcaggtagtactattttgttcggagttacgtttagaaaatatattccttcacttaatattcaattagagaaaaacatggtgattgtaatatgttgtgcaatatttctgggtgttttaatactttttttatttctgaatcgtaagctaaggttggaaatttataataataactctagtaaagggaaaataattttatttccttcattaaaaaacttttgtttcacaatattttattattttttatttggcggtctttcaataatggctctaagtatgttattaactttaaatcctcaaaatataataggctttattggttggttggtaatgactgcaggtttctttctgttaaacatgtcatcgattattgacaaaaaaatttatgtattatctaaaactaacacggtggaaaaatga

SEQ ID NO: 406145 - DNA, 642 bp, Staphylococcus aureus
ttgctttgtgaaactgaaaatattaataagaatcccaaatatagaattatcaaatacaaagatgaatatttgatgattgatttagtaagtacatggttagcactctttttcccaatgattaattggctgattccaaaaaagtacgtcaaaatcagcgaaaaagattttgaaactttaaacattgtgaagacagctaaaatcaattctttttggccagtggcaggaagtacggtcttatttggtgttatgttaagaaggtattcccatttatttatcgttaaatatgaatatagtatagtaattttaatttgttgcatcataatactaggtatttttctgttttttttatatttaaatcaaaagttaaagttacaaatctataatgaaaacaaaaataaaagcaataagataatcatatttcccactttaaagagtctttgtttatcaatagttttatatatttatttaggtggtggttcattctttactatttatatgttattgacgattgaagttcaaaatataatattatttataactttgtttgtaatatttttgtttttcttatttttaaatatgtgctcactatatgacaataaagttcatgtattatttaaatcaaatggaattgaaaagttttaa

SEQ ID NO: 406146 - DNA, 606 bp, Staphylococcus aureus
atgttgctttgcgatgtcagagtcatttataaaaatccgaaatacaaagtcattcaacataacggtgaatacttattagtcgatttagtaagcacttggttcgtgtacttttttcctttcattaattggttcattccaaaaaagtacgcgataattagcgaagaagaatttgaaaatttaaatgttgttaaaccaaataaaaataatgttttctggtcagttataggaagttcggttttgtttggagttactttaaggaaatacatacatgtttttgatgttcaattagataagctagttgtaatgatattgtgtgctctcgctttaatttgtgttatagttttttattttaacttaaatagaaagcttaagttaaaagtgtttgatacaaatattgaaaaaaataagagagttatattaataccaacgtttaaacttggctgttttttagttttcggatatattttcgctggaagtttttcaatattttcattaattgcccttatgacaatcgaacctcggattatgatgacaatgcttttctttttgttaaatatgacttcgataggtaatgaaaaagttcgcgttataatgaaaaataattga

SEQ ID NO: 406147 - DNA, 171 bp, Staphylococcus aureus
gtgctttgtgaatctagacaaatttataaaaatcctaaatatcgagttattagatataataatgaatatttcatggtcgatttagtaagtacttggattacttattttttccctatgattaattggtttttgcccaaaaaatacgcaaaaattagcgaaaatgaattttaa

SEQ ID NO: 406148 - DNA, 633 bp, Staphylococcus aureus
ttgctttgcgaatctaaagttattaataaaaaccctaaatatcgaataatcaaatacgatagtgaatatttaatgattgatttggcaagtaattggattgtcttcttctttccatttattaactggctcataccgaaaacatatgtcaaaatcactaagaatgattatgaaaaattaaatattgtcaaaccagttaaaaataaatcgataggatggaccatattcgcgggtattgtgttacttggtggtactgtaagaagaaatacttatttatttgattttcaattagaagaactaattgtttggagcagctgtttcattgggtttttagagattatatttttttattgttatctaaataagaaattaacattaaatatttataatgaaagtaaaaataatgaacttaaattaagattattaccctcctttaaaaatatttgtttcacaattttttattacctatttactggtttcatgtcttatggggcattttacttgttggtatttgaaaatgtgcaaaatttaatcttatatgtttcttggcttttcatgactatgctatttatgtttatgaatatgcattcaattatagataaaaaagtacatatattcttaaagtctaataaatag

SEQ ID NO: 406149 - DNA, 621 bp, Staphylococcus aureus
atgctatgcgaatctaaaatcatcaataaaaaccccaaatatagaattattaaatataatgatgagtacttaatgatcgatataataagcacttggattagtttattttttccttttattaattggttcatccccaaaagatacgtcaaaattagtagagaagagtttgaaaatttaaatattgtgaaacctgctaaaaagaatgttttttggccagttgcaggtatctctactttattcgcagttacattaagaaagtatacacatttacttgacactcaacttgatagaaaattagttattgctatatgttgtatcacatttatagggattttaacattttatgtacgcctaattaaaaaatcatctttaaatatttataatactaaaaataaaaggtcaaaaattatcttaataccaacactaaaaaatttttgtttaacattgtttagatatgctttttttattttatggacagtgattttctcatatgctctattatcaatgagttatcaaaacataatagtatattttgcttggattacagcaataatgggtttttttctagtgaatatagctttaattatagataaaaacattcatgtcatacttaaaaattaa

SEQ ID NO: 406150 - DNA, 630 bp, Staphylococcus aureus
gtgctttgcgaatctagagtcattaatcaaaaccctaaatatagaattattaaatacaataatgaatatttcatggttgatttagtaagtacttggattgcttattttttgcccatgattaattggtttattcccaaaaagtacgcgaaaattagtagagaagaatttgaaagtttaaatattgtcaaacccgctaaaaataatactttctggcctgttgcaggatttgcagtgttattaacaaccttaacaagaaaatatatctatttgcttaacatccatttagaaaaagaaatagttatattaacatgctgtatgatacttctaggtgttttcgcattgtttatatatataaatacaaaattgaagttacatatttttgataaaaataaaagtaataacgaaaagatcatattaatacctacatttaaaaatatttgtttatccttatttgcttatatattatttggtggattgtcaacaatggctctgagtatgttagtaacttcatcccctcaaaatataatagaatttcttgctttaattggcatgactgcatgcttctttctactgaatatgtcatcggttctagataaaaaaattcatgttattttaaaaacaaataagtag

SEQ ID NO: 406151 - DNA, 618 bp, Staphylococcus aureus
ttgctttgtgaaaccgaaattatcaataaaaatccgaaatacagagttattaagtatgatgatgagtatttaatggtcgatgtaataagaacttggcttgtatacttttttccatttattaattggttcattccaaaaaggtgcgccaaaattagtagagaagagtatgaaaaactgaacactgttaagccagttaaaaataaaaatttttggcctgttgtaggaggaacaatcctactaggtgctacttccagaaagtacatacacttacttaatattcaattagaaaaaagatcggttatatttatatgcttcgttgtatttctatgtattttaatcttttttgtgcttctgaatcgaaaattaaaattgaaagttttcgataataaaaaagaagaacaaaaaataattttagtaccaacattaaaaaatgctgttcttatattatatggctatttgttgattggaggcatgtcaatattagctttaagcatgttgctgacattagaaaaccagaatttaataacttttatagcttggggtatggggttaatgttgtttttcttgatgaatataacactcattgtcaataaaacagtcaaagttataaaaaggtga

SEQ ID NO: 406152 - DNA, 642 bp, Staphylococcus aureus
gtggagatattgctttgcgaggttagagttgtaaacaaaaatcccagatatagaattattaaatataaaaacgactatctgatgattgatttagtaagcacctggttagttttgttctttccgtttattaattggttaataccaaaaaaatatgtccaaatcagcagagaagattttgataatttaaatattgtcaaaccagttaaaaataaagctttatggccagctataggtagcatacttttatttggcactatgtttagagataaaatatatatacctgattctcatttagaaaaaaattgcgttattatcatttgttcggttttattattaagtattctagtgttttatatatatttaaatcagaaagtaaagttatctatctataatgatcggagtagcaatggaaaaattatgatttttccatcattcaagaatctttgctttgtactattttcttattttttctgtggtggattatcaatcatgttcttagatgttttgattagtttatctatccaaaatattatagtatttattgcttgggttattatgacaatgctatttttctttataaatatgtcttcaataatagacaaaaagattcatgttatatatttaaggtcatataaatattaa

SEQ ID NO: 406153 - DNA, 627 bp, Staphylococcus aureus
ttgctttttaatattaaggttattaataaaaatccgagatataaagtcgttcaatataatgatgagtatttgttaattgatttagtaagcacttggcttgtatacttttttccttttattaattggttcattcccaaaaggtatgcaaaacttagtgagaaggaacttgaaaatttaaatgttgataaacaaaataaaaataatattttctggccagttactggtagttcgtttttatttgtagttattttacggaaatatgtacatacgtttgaagttcaattagataataagattttaatatctttatgttttataggatttataggtattgcagcattttacatttacttaaataaaaagcttaaactaaagatatatgatgataatctagataatgaaaatagggttatattagtgcctacttttaaagatggaagttttatagttttcacatatctattattaggaggttgttctatattatttttaatatggctaatgactataaaacctcaaaatctactggtatttattatgtggattattattacaatttttttctttctaataagcatgggctcaattagtaataaaaaggtttatgccaaacttaaaaagcaatag

SEQ ID NO: 406154 - DNA, 1410 bp, Staphylococcus aureus
atgagtattgacatgtatttagacagatctcgaaaccaagcttcaagtgtggggaatttgagtcaaacaatgaattcaaattatgatgcgttggaaaaagcaattactcaatttattaatgatgatgcgcttaaagggaaagcgtatacgtcagctaagcaattttttagtacggtgttaattccattatcaacaagtatgaaaacattgagtgatttaacgaagcaagcttgcgataattttgtgtcacgttatacgagtgaggttgatagcatatctttaaaagaatcagagcttgaagaagatatcagatcattaagtcaacaaattacgcgatatgaaaatttgaataacaatttgaaaaagcatgcttccgataatcagcaagccatttcatcgaaccaacaaataatacgaacattaggtcaacaaaaacatgaattagaagagaagctacgcaaattgcgtgagtttaatcaaaaatcaccagaaatatttaaagaagttgaagaatttcaaaaaattgtccaacaaggacttacccaagcgcagaatttttggaacttttcaacaaatcaatttaatattccttcaggtaaagaacttgattgggccaaagcaagtcatgaaaaatatttgaaagttgctatggggaaaattgaacataaagcagagaaagaaactttaaataaagcagactttgctgttataaaggcatatgccaaagaacatccagaagacgatatcccgaaaagtatattgaaatatataaatgacaataaagacagtattaaaagagatataggattagatattacgtcaacacttttagagcaaggcggtataaatgcaagtaaattcggtgtatttatcaatacagcaggtggagtgaaaggcccagcaggtccaaattcatttgtggaagtcaaacgtacatcaggtaatgtgtttatagaaaatggtagtaaatttgcaaaaggcggaaaatacctaggtaaaggtgttgctggtgtaggatttggtataggtatgtatgatgaccttgcaaatgatgataaaacatttggagaggcgttgtcgcataatggtatgacgcttgcagctggatctgcagggacagcagttggagctggattagcgacttttgttttaggaagtaatccagtaggatgggtgattttagcaggtttggctatgagtacagtatttgcattaggaacagatttaatttatcaaaataatatttttggattaaaagataaagtagactgggtagggcataaaatcgataatagtatagatgttgttaaaaaaactacagaaaaatccatggatagtgttgggaatgctgttagtgaagctaaaaatattattagcaatcatataaatccaatgaaatgggcgtggtga

SEQ ID NO: 406155 - DNA, 441 bp, Staphylococcus aureus
ttgaatttagaatttaacattgccgtgcatgtattagcttttttaactaagcatcattcagaaaaattcaatagtagttcattagcagaattaacttgtttaaatcctgttcaattacgacgcgtgacgactcaacttgtcgatttaaaaatgattgacacaatacgaggtaaagatggcggttatttagcaaatgatcaaagtgctgatgtctctctagcaacattatataaacattttgtcttagagaaagaacaccacacacgtctatttactggcgacgaaggcagtcactgtcaaattgctcgtaatattgcaactaccatgtcacattatcagcaagacgaacagaatatcattattaatttttataatggaaaaacaatcaaagatgtcattgaagacattcaaaaggaggatttatgtcatgaaaacatatga

SEQ ID NO: 406156 - DNA, 1323 bp, Staphylococcus aureus
atgaaaacatatgatttaattgtaataggatttgggaaagctggtaaaactttagcgaaatacgctgcatcaacaggtcaacacgtcgcagttatcgaacaatctccgaaaatgtatggaggcacttgtataaacataggatgtataccttcgaagacacttgtacatgatggattagaaggcaaatcttttgaagcaagttataaccgtaaaaacgatgttgtcaatgcgctaaacaataaaaattaccacttattagcagacgataacaacattgatgtactggattttaaagcgcagtttaaatctaatactgaagtgaatttattagatcaacatgacgatatcgtcgatagtattactgcacctcatatcattattaataccggtgctacctctgtcattcctaacattaaaggccttgatcaagctaaacacgtcttcgattcgacaggtttattaaacattagctatcaacctaagcacctcgttattgtaggtggcggttatatcgccttagaatttgcttcaatgtttgcgaatttaggtagtaaggtaacagtattagaacgtggcgaatcatttatgccacgcgaagatcaagatgtcgttgcatatggtattactgacttagaaaataaaggcattgcattgcatacaaatgttgaaacgactgaattgtcatctgacaatcatcatacaacagtccataccaacgttgataactttgaggctgatgcagtacttttggctatcgggcgcaaaccgaatacggatttagctttagaaaatactgatatcgaattaggcgacagaggcgaaattaaagtcaatgctcatcttcaaacaactgtgccgcatatttatgctgcaggtgatgttaaaggcggacttcaatttacgtatatatctttagatgattatcgaattatcaaatcagcgttatatggtaatcagtcacgtacgactgacaatagaggcagcgtgccttatacagtatttatagatccaccattatcacgtgttggattaactagtaaagaagctgccgctcaacattatgattacactgaacatcaacttttagtaagtgctatacctcgtcataaaattaacaatgatccaagaggtttatttaaagtagtcattaataatgaaaataatatgattttaggtgctacattatatggtaagcaatctgaagaattaattaatataattaaacttgcgattgatcaaaacattccatataccgtattacgagataatatttatacgcatcctacgatggccgaatcatttaatgatttatttaatttctag

SEQ ID NO: 406157 - DNA, 342 bp, Staphylococcus aureus
atgaaaaatacattccttatttgtgatgaatgtcaggcagtcaatataagaacgttacaaaagaagttggaaaaattagatcccgatgctgaaatcgtgataggttgtcaatcttattgtggacctggacgccgaaaaacattcacttttgttaataaccgcccactggctgcgcttactgaagaagaattaatcgaaaaagtttctcaacaattaaagaaaccacgtgatcctgaagaagaagagcgtttaagaaaacgacatgaagaacgtaaacgtcgtaaagaagaacaagatagaaagcttaaagaaaaattagaaaagcgaaaagcacaacaataa

SEQ ID NO: 406158 - DNA, 1077 bp, Staphylococcus aureus
atgattcaggtcaaagcacccggaaaactttatattgctggagaatatgctgtaacagaaccaggatataaatctgtacttattgcgttagatcgttttgtaactgctactattgaagaaacagaccaatataaaggtaccattcattcaaaagcattacatcataacccagttacatttagtagagatgaagatagtattgtcatttcagatccacatgcagcaaaacaattaaattatgtggtcacagctattgaaatatttgaacaatacgcgaaaagttgcgatatagcgatgaagcattttcatctgactattgatagtaatttagatgattcaaatggtcataaatatggattaggttcaagtgcagcagtacttgtgtcagttataaaagtattaaatgaattttatgatatgaagttatctaatttatacatttataaactagcagtgattgcaaatatgaagttacaaagtttaagttcatgcggagatattgctgtgagtgtatatagtggatggctagcgtatagtacttttgatcatgaatgggttaagcatcaaattgaagatactacggttgaagaagttttaatcaaaaactggcctggattgcacatcgaaccattacaagcacctgaaaatatggaagtacttatcggttggactggctcaccggcgtcatcaccacactttgttagcgaagtgaaacgtttgaaatcagatccttcattttacggtgacttcttagaagattcacatcgttgtgttgaaaaacttattcatgcttttaaaacaaataacattaaaggtgtgcaaaagatggtgcgtcagaatcgtacaattattcaacgtatggataaagaagctacagttgatatagaaactgaaaagctaaaatatttgtgtgatattgctgaaaagtatcacggcgcatctaaaacatcaggcgctggtggtggagactgtggtattacaattatcaataaagatgtagataaagaaaaaatttatgatgaatggacaaaacatggtattaaaccattaaaatttaatatttatcatgggcaataa

SEQ ID NO: 406159 - DNA, 984 bp, Staphylococcus aureus
ttgattaaaagtggcaaagcacgtgcacatacgaatattgcacttataaaatattggggtaaaaaagatgaagcactaatcattccaatgaataatagcatatctgttacattagaaaaattttacactgaaacgaaagtcacttttaacgaccagttaacacaggatcaattttggttgaatggtgaaaaggttagtggcaaagaattagagaaaatttcaaaatatatggatattgtcagaaatagagctggcatcgattggtatgcagaaattgaaagcgacaattttgtaccaacagcagcagggttggcttcatcggcaagcgcatatgcagctttagcagcagcttgtaatcaagcgctagacatgcagctgtcagataaggatttatcgagattggcgcgaattggttcgggttctgcgtcgcgtagtatttatggtggatttgcagaatgggaaaaagggtatagtgatgagacgtcatatgccgttccacttgaatcgaatcattttgaagatgaccttgccatgatatttgttgtgattaatcaacattctaaaaaggtacctagtcgatatggtatgtcattgacacgaaacacatcaaggttttatcaatattggttagatcatattgatgaagatttagctgaagcaaaagcagcgattcaagacaaagattttaaacgccttggtgaagtaattgaagaaaatggtttgcgtatgcatgccacgaatctaggatcaacaccgccgttcacatatcttgtgcaagaaagttatgatgtcatggcgcttgttcacgaatgccgagaagcggggtatccgtgttattttacaatggatgcgggacctaatgtgaaaatacttgtagaaaagaaaaacaagcaacagattatagataaattattaacacagtttgataataaccaaattattgatagtgacattattgccacaggaattgaaataattgagtaa

SEQ ID NO: 406160 - DNA, 921 bp, Staphylococcus aureus
atgacaagaaaaggatatggggaatcgacaggtaagattattttaataggagaacatgctgttacatttggagagcctgctattgcagtaccgtttaacgcaggtaaaatcaaagttttaatagaagccttagagagcgggaactattcgtctattaaaagcgatgtttacgatggtatgttatatgatgcgcctgaccatcttaagtctttggtgaaccgttttgtagaattaaataatattacagagccgctagcagtaacgatccaaacgaatttaccaccatcacgtggattaggatcgagtgcagctgtcgcggttgcttttgttcgtgcaagttatgattttttagggaaatcattaacgaaagaagaactcattgaaaaggctaattgggcagagcaaattgcacatggtaaaccaagtggtattgatacgcaaacgattgtatcaggcaaaccagtttggttccaaaaaggtcatgctgaaacgttgaaaacgttaagtttagacggctatatggttgttatagatactggtgtgaaaggttcaacaagacaagcagtagaagatgttcataaactttgtgaggaccctcagtacatgtcacatgtaaaacatatcggtaagttagttttacgtgcgagtgatgtgattgaacatcataactttgaagccttagcggatatttttaatgaatgtcatgcggatttaaaggcgttgacagttagtcatgataaaatagaacaattaatgaaaattggtaaagaaaatggtgcgattgctggaaaacttactggcgctggtcgtggtggaagtatgttattgcttgccaaagatttaccaacagcgaaaaatattgtaaaagctgtagaaaaagctggtgcagcacatacttggattgagaatttaggaggttaa

SEQ ID NO: 406161 - DNA, 837 bp, Staphylococcus aureus
atggatttagcgagtaaatattttaatggcgtcaactggcgatatatcgatcattcttctggattagaacctatgcaatctttcgcattcgatgatacattttgcgaaagtgtgggcaaagatatatcagataatgttgtgcgtacttggattcatcaacatactgttattcttggtattcatgattcaagattgccgtttttaaaagatggcattgattatttaacgaatgagattggttataatgccattgttagaaattctggtggcttaggtgtcgttctagatcaaggtgtattaaatatatcgctgatgttcaaaggacaaacagaaacaacgattgatgaagcgtttactgtgatgtacctcttaattagcaaaatgttcgaaaatgagaatgttgatattgatacgatggaaattgaacattcttattgcccaggaaaatttgacttaagtatcgatggtaagaaatttgcaggcatatcgcaacgaagagttagaggcggtattgctgtacaaatttatctttgtgttgaaggctctggttcagaacgtgcattgatgatgcaaacattttatgaacatgctttaaaaggtgaagtgactaaatttaaatatcctgaaattgaaccatcttgtatggcctcattagagacattgcttaacaaaacgattactgttcaagatgtaatgtttttactattatatgcaatcaaagatcttggcggtgtattaaatatgacgccaattactcaagaagaatggcaaagatacgatacgtattttgataaaatgattgaaagaaacaagaaaatgatagatcaaatgcaatag

SEQ ID NO: 406162 - DNA, 987 bp, Staphylococcus aureus
atggctgatttattaaatgtattaaaagacaaactttctggtaaaaacgttaaaatcgtattacctgaaggagaggacgaacgtgttctaacagctgcaacacaattacaagcaacagattatgttacaccaatcgtgttaggtgatgagactaaggttcaatctttagcgcaaaaacttgatcttgatatttctaatattgaattaattaatcctgcgacaagtgaattgaaagctgaattagttcaatcatttgttgaacgacgtaaaggtaaagcgactgaagaacaagcacaagaattattaaacaatgtgaactacttcggtacaatgcttgtttatgctggtaaagcagatggtttagttagtggtgcagcacattcaacaggcgacactgtgcgtccagctttacaaatcatcaaaacgaaaccaggtgtatcaagaacatcaggtatcttctttatgattaaaggtgatgaacaatacatctttggtgattgtgcaatcaatccagaacttgattcacaaggacttgcagaaattgcagtagaaagtgcaaaatcagcattaagctttggcatggatccaaaagttgcaatgttaagcttttcaacaaaagggtctgctaaatcagacgacgtgacaaaagttcaagaagctgtcaaattagcacaacaaaaagctgaagaagaaaaattagaagcaatcattgatggcgaattccaatttgatgctgcgattgtaccaggtgttgctgagaaaaaagcgccaggtgctaaattacaaggtgatgcaaatgtctttgtattcccaagtttagaagctggtaatattggttacaaaattgcacaacgtttaggtggatatgatgcagttggtccagtattacaaggtttaaattctccagtaaatgacttatcacgtggctgctcaattgaagatgtatacaatctttcaattattacagcagcgcaagccttacaataa

SEQ ID NO: 406163 - DNA, 753 bp, Staphylococcus aureus
atgagtcaagcagccgaaacattagatggttggtatagtctacatttattttatgcagttgattgggcatcattacgtatagttccaaaggacgaacgcgatgcacttgtcactgaatttcaatcatttttagaaaatacagcaactgtaagatcatcaaaatctggtgatcaagctatttataatataactggtcaaaaagcagatttgttattatggttcttacgtcctgaaatgaagtctttaaatcatattgaaaatgaatttaacaaattgcgcattgctgacttcctaatccctacatattcatatgtatcagtcattgaattgagcaattatttagctggtaaatctgatgaagatccttatgagaaccctcatatcaaagcaagattatacccagaattaccacattctgattatatttgtttctatccaatgaacaaacgtcgtaatgaaacttataactggtacatgttaactatggaagaacgccaaaaattaatgtatgaccatggtatgattggtagaaaatatgctggcaaaatcaaacaatttattactggttctgtagggtttgatgatttcgaatggggcgtaacattgttctcagatgacgtattacaattcaaaaaaattgtatacgaaatgcgctttgatgaaacaacagcacgatacggtgaattcggtagtttctttgtaggacatattattaacacaaacgaattcgatcaattctttgcgatttcttaa

SEQ ID NO: 406164 - DNA, 765 bp, Staphylococcus aureus
atggacataaattcagaagaatacaaacaagaggtacttatcaaagacgttgtcatgcttgctgctcgcatactattagaatctggtgcagaaggtacgcgtgtagaagataccatgacacgtattgcaaaaaaacttggttacagtgaaagtaacagctttgttacaaacactgtcatccagtttacgttacattcggaatcgtttcctagaatatttagaattacctctcgagatacaaacttaataaaaatttctcaagctaataaaatttcgcgtcaaattacaaacaatgaaatttctttagccgaagcaaaaacgcaacttgaaaaaatatatgttgctaagcgtgacagcagtcttccctttaaaggttttgctgcagcaatgattgcaatgagtttcttatatttacaaggtggtagattgattgatgttttaactgcgatattagcaggtagtctaggatacctagtcactgagattttagatcgtaagttacacgcacagtttatcccagaattcattggttcattagttattgggattatcgccgttattggacatacacttattccaacaggtgacttggcaactattatcattgcggcagtcatgcctattgttcctggtgtattaataacaaacgcaatacaagatttatttggtggacacatgttgatgttcacaacgaaatcattagaagcattggttactgcgtttggcatcggtgctggcgttggtagcgtattaattttagtatag

SEQ ID NO: 406165 - DNA, 453 bp, Staphylococcus aureus
atgttttggatcttaaactttatctttagctttttagcttcaatgttcttctgcgtcatttttgatgcacctagaaaattatatctatcatgtggtttcgttggtacgtgtggatggatggtttacaccttattcttcaacggctttaatgtgcacactatatactctagtttctttggtagtttagcattaggcttgttaagtcattatatggctcgtaaacaaaaagaacctgccatcatttttatggtaacgggtatcattccattagtacctggtggcttagcatacgatgctacaaaaaatttagtcttattaaatttcagtacagcaatcaataccatgctagaggttacacttattgcaggcgccatcgcattaggtttattattcgccgaccaaatttccaaattaattgtttctgggttcgtgaaatcttttaaacgattataa

SEQ ID NO: 406166 - DNA, 1485 bp, Staphylococcus aureus
atggaaaaaaagaataagcaaatagatagaggcgatttaaaacaaaacctatctgaaaagtttgtatgggcgattgcatatggttcatgtatcggatggggcgcattcatcttaccaggagactggattaagcagtcaggtccgattgcagcatcaattggtatagttattggtgcattattaatgatattaattgcggttagttatggcgcattagtagagagatttccagtatcagggggcgcgtttgcctttagtttcttaagtttcggcagatatgtgagtttcttctcatcatggtttttaacttttggttatgtctgtgtcgttgctttaaatgcgaccgcattcagtttactagttaaattcttattgccagatgtcttaaataatgggaaactatacaccattgcgggctgggacgtttatattacggaaatcattattgcgaccgtattactacttgtattcatgctagtaacgattcgtggcgcaagtgtatctggatcattacaatattatttctgtgtggcgatggtaatcgtcgtattattgatgttctttggttcattctttggtaataattttgcacttgaaaatttacaaccgttagctgaacctagcaaaggatggttagtgtctattgtggttattgtatccgtggcaccatgggcatatgttggatttgataatattccacaaacagcagaagagtttaactttgcaccaaacaagacatttaagcttatcgtgtacagtttattagcagcatcattaacttatgttgtcatgattttatacactggttggttatcaacaagtcatcaaagtttaaatgggcagttgtggttaacaggtgctgttacacaaacagcatttggttatattggattaggtgtattagcaattgcaattatgatgggtatatttactggtttaaatggattcttgatgagttcaagtcgcttgttattttctatgggacgttcaggtattatgccaacaatgtttagtaaattacatagtaaatacaaaacaccatatgtcgcaatcatattcctagtaggagtgtcgttaattgcaccttggctaggaagaactgcattgacttggattgtagatatgtcatctactggtgtatccattgcctactttattacatgtttgtctgcagcgaaattattcagttataacaaacaaagtaatacgtatgcaccggtttacaaaacgtttgctattatcggctcatttgtatcattcattttcttagcgttgttattagtgccaggttctcctgcagcactgactgcaccgtcttatattgcattacttggatggttaatcatcggtttaatattctttgtgattcgatatcctaaattgaaaaatatggataatgatgaattaagtcgcttgattttaaatagaagtgaaaatgaagttgatgatatgattgaagaacctgaaaaagaaaaaactaaataa

SEQ ID NO: 406167 - DNA, 369 bp, Staphylococcus aureus
atgaaattatttattattttaggtgcattaaacgcgatgatggctgtcggtacaggtgcatttggtgcgcatggtttacaaggaaaaataagtgatcactatttatcagtatgggaaaaagcaacgacgtatcaaatgtaccatggcttagcattattaattataggtgtaattagtggtacaacttcaatcaatgttaactgggctggctggttaatatttgctggtattattttctttagtggatcattatatattttagtattaactcaaattaaagttttaggtgcgattacgccaattggtggcgtattgttcatcattggatggataatgttaatcattgcgacattcaaatttgctggttaa

SEQ ID NO: 406168 - DNA, 381 bp, Staphylococcus aureus
atgttgaatagagaaactttaatagcacgaattgagcaagaattagtacaagcagagcaggcacagcatgaccatgactttgaaaaacatatgtatgccatacatatattaacatctttatatgcttcaacatcaaatacaccacatattggtgaacaacaaatgaatcgtcgtattgctaaccataatcaaatgccacaatcacaaataacgcagccaactcatcaagtgacagttgctgaaattgaagcgatgggtggtaaagtaaatacgcattcagcacatcatcataataagtcatattcacaaccttcaaaccaacaacaaagattagcgacagatgatgacattggcaatggtgaatccatatttgatttttaa

SEQ ID NO: 406169 - DNA, 657 bp, Staphylococcus aureus
atggaatggtcgcaaatttttcatgacataacaacgaaacatgactttaaagctatgcatgattttttagaaaaagaatattcgactgcaatcgtataccctgatagggaaaatatatatcaagcgtttgatttaacaccgtttgaaaatatcaaagttgttatattaggacaagacccgtatcatggtccaaaccaagcacatggattagcattttcagtgcaacctaacgcaaaattccctccatctttacgtaatatgtataaagaattagcagatgatattggatgcgttagacaaacaccgcatttacaagattgggcaagagaaggcgtcttgttattgaatacagttttaaccgtaagacagggtgaagcaaattctcatcgtgatattggttgggaaacatttactgatgaaattattaaagcagtgtctgattataaagaacatgttgtctttattttgtgggggaaacctgcacagcaaaaaataaagcttatcgatacatctaaacattgtattataaaatcagtgcatcctagtccactgtctgcatatagaggattctttggatcaaaaccgtattccaaagcgaatgcctatttagagtcagtaggaaaatcaccaattaattggtgtgaaagtgaggcgtag

SEQ ID NO: 406170 - DNA, 831 bp, Staphylococcus aureus
atggctttaaagaaagttttaacaattgccggttctgacacaagtgctggcgcaggtatgcaagcagatttgaaaacgttccaagaattagatacgtatggcatggtcgctttaactgccatcgttactatggataaagatacatggtcacacgatgttacaccattaccaatggatgtatttgaaaaacaacttgaaacggctttatcaatcggacctgatgctattaaaacaggtatgttaggtactgaggagataatcaaacgtgctggagaagtatatgaggcatctaatgcacaatattttgtagtagatcctgtcatggtttgtaaaggcgaagatgaagtgcttaatcctggaaatactgaggcgatgattaaatatttactacctaaagcaacggtagtgacaccaaacttatttgaagcgggtcaattatcaggattaggtaaattaaattcaattgaagatatgaaaaaggctgcaacaattatctttgataaaggcgcacagcatgtcatcattaaaggtggcaaagctttagatcaagataaatcgtatgacttatactatgatggtcaaacattttatcaactaacaacagacatgttccaacaaagttataaccatggtgctggttgtacatttgctgcggcaacaactgcatatttagctaacggtaagtcaccgaaagaagctgtgattagcgcgaaagctttcgtcgcttctgctattaaaaacggttggaaaatgaatgattttgttggtcctgtggatcacggtgcatacaaccgtattgaacatatcgatgttgaagtaacagaggtttaa

SEQ ID NO: 406171 - DNA, 168 bp, Staphylococcus aureus
atgattatttatcgacagtatcaccatgaaggcgcaccagtttatgaaattataaccaaaacgtttcagcatgtttcaattaaatgtgacgattcatttagtgatactgaaatattcaaattgctctctttattacaagacgatatagatcatatgaaagttagttaa

SEQ ID NO: 406172 - DNA, 270 bp, Staphylococcus aureus
atgaagtttaatgagatatggataaatgaatatttggcgctcgtaaatgatgataatccaatacataatgagattgtgccaggacaattagtgagtcaaatgatgctgatggctatgtcattagagacaaaccagtgtcaaattaactacgttaaacctattttaataaatgaaaatatcgaattcattgaacaacacgaacacgaaattatagcaattaatgacgatggagagattaaaataaaaatttctttgagcacaaaaaaataa

SEQ ID NO: 406173 - DNA, 366 bp, Staphylococcus aureus
atgcagcattatttactcgattctaaccagcgattaaatgtgtcattttctaaggatagtgtggctgcatattatcagtgttttaaccaaccttatagaaaagaagtaccaccattaatgtgtgcgtcattatggccaaaatttgatttatttaaaaaatatgcaaatagcgaactgattttaacaaaatcagcaattaatcaaactcaaaagatagaagtagacacaatatatgtagggcatttagaagatattgaatgccgacagactcgcaatatcacacgttatacaatggctttaacattaactaaaaatgatcaacatgtcataacggttacacaaacttttattaaggcgatgaagtag

SEQ ID NO: 406174 - DNA, 1140 bp, Staphylococcus aureus
atgaatcaagcagtcatagttgcagctaaacgaactgcatttgggaaatatggtggcactttaaaacatttagagccagaacaattgcttaaacctttattccaacattttaaagagaagtatccagaggtaatatctaaaatagatgatgtagttttaggtaatgttgttgggaatggtggcaatattgcaagaaaagcattgcttgaagcggggcttaaagattcaatacctggcgtcacaatcgatcggcaatgtgggtctggacttgaaagtgttcaatatgcatgtcgcatgatccaagccggagctggcaaggtatatattgcaggtggtgttgaaagtacaagtcgagcaccttggaaaatcaaacgaccgcattctgtgtacgaaacagcattacctgagttttatgagcgtgcatcatttgcacctgaaatgagcgacccatcaatgattcaaggtgctgaaaatgtggccaagatgtatgatgtttcaagagaattacaagatgaatttgcttatcgaagtcatcaattgacagcggaaaatgtaaagaatggaaatatttctcaggaaatattacctataaccgttaaaggagaaatattcaacactgatgaaagtctaaaatcacatattccgaaagataactttggccgatttaagcccgtgatcaaaggtgggaccgttaccgctgcgaatagttgtatgaaaaatgatggtgcagttttattgcttattatggaaaaagatatggcatacgaattaggtttcgagcatggtttattatttaaagatggtgttacggtaggtgttgattctaattttcctggcattggtccagtaccagccatttccaacttactaaaaagaaatcaattaacgatagaaaatattgaagtcattgaaattaacgaagcgttcagtgcacaggtagttgcctgccaacaagctttaaatatttcaaatacgcaattaaatatatggggtggtgcattagcatcaggtcatccatacggtgcaagcggtgcccaattagtgactcgattattttatatgtttgacaaagagactatgattgcatctatggggatagggggaggtctaggaaatgcagcattatttactcgattctaa

SEQ ID NO: 406175 - DNA, 1377 bp, Staphylococcus aureus
atgaacgtaattttagaacagttgaaaacacatactcaaaataaacctaatgacatagcattacatatcgatgatgaaacaattacatatagtcaactaaatgcccgcatcactagcgcagttgaatctttgcagaaatattcacttaaccctgtcgttgctattaatatgaaatcaccggtgcaaagtattatttgttatttagctttgcatcgtttacataaagtgcctatgatgatggaaggtaaatggcaaagtactatacatcgtcaattgattgaaaaatatggtattaaagatgtaattggagatacaggtctcatgcagaatatagactcaccgatgtttattgattcaacgcaattacagcactaccccaatttattacatattggttttacttcagggacaactggactgccaaaagcatattatcgtgatgaagattcatggttggcttcttttgaagttaatgaaatgttgatgttaaaaaatgaaaatgcaatagcagcccctggaccactatcgcactcgttaacattatatgcgttattgtttgctttaagttccggtcgtacttttataggacagaccacttttcatcctgaaaagttacttaatcaatgtcataaaatatcatcatacaaagttgctatgtttcttgttccaacgatgattaaatcattattgttagtttacaacaatgaacatacaatccaatcattttttagcagtggagataagctgcattcttctatttttaaaaagataaaaaatcaagcaaatgacataaatttgattgaattttttggtacatcggaaaccagttttatcagctataacttgaatcagcaagcaccagttgaatcagtaggtgtgctatttccaaatgtggaattgaaaacaacgaatcacgatcacaatggtataggaactatttgtataaaaagtaatatgatgtttagtggctatgtaagtgaacaatgtataaataatgatgaatggtttgttactaatgataatggctatgtaaaagagcagtatttatatttaacgggacgtcaacaggatatgttaattattggtggtcaaaatatatatccagcacatgttgaacgccttttaacgcaatcttcgagcattgatgaagcaattatcatcggtattccaaatgagcgttttggtcaaataggcgtattgctttattctggtgatgtgacacttacacataaaaatgtaaaacaatttttaaaaaagaaagtgaaacgctatgaaattccatcgatgattcatcatgtagaaaagatgtattacactgcaagtggtaaaattgctagagaaaaaatgatgtcgatgtatttgagaggtgaattataa

SEQ ID NO: 406176 - DNA, 1401 bp, Staphylococcus aureus
atggattttaataaagagaatattaacatggtggatgcaaagaaagctaaaaaaaccgttgttgcaaccggtatcggtaatgcaatggaatggttcgattttggtgtctatgcatatacaactgcgtacattggagcgaacttcttctctccagtagagaatgcagacattcgacaaatgttgactttcgcagcattagccattgcgtttttattaagaccaattggtggtgtcgtatttggtattattggtgacaaatatggacgtaaagttgtattaacatctacaattattttaatggcattttcaacattaaccattggattattgccaagctatgatcaaattggactttgggcaccaatactattattgcttgcaagagtactacaagggttttcaacaggtggagagtatgcgggggcaatgacatatgttgccgaatcatctccagataagcgtcgtaactcattaggtagtggactagaaattgggacattatcaggttacatagctgcttcaattatgattgctgtattaacattctttttaacagatgaacaaatggcatcatttggttggagaatcccattcttactcggtttattcctaggattattcggcttatatttacgtcgtaagctggaagaatcaccagttttcgaaaatgatgttgcaacacaaccagaaagagataacattaactttttacaaatcatcagattttattacaaagatatatttgtatgttttgtagctgttgtattcttcaatgttacaaactatatggtaactgcatatttaccaacctatttagaacaagttattaaattagatgcaacgacaacaagtgtattaattacttgtgtcatggcaataatgattccattagcattaatgtttggtaagttagcggataaaataggtgaaaagaaagtatttctaattggtactggtgggctaacattattcagtatcatcgcatttatgttattacattcacaatcatttgttgtaatagtaatcggtatatttatattaggatttttcttatcaacttacgaagcgacaatgccagggtcgttaccaacgatgttttacagtcatataagatatcgaactttatcagtaacatttaatatctctgtttcgatatttggtggtacgacgccattagttgcaacatggttagttacgaaaactggagatccattagcacctgcgtattatttaacagcaatcagtgttattggctttttagttattacattcttacatttaagtacagcaggaaaatctctaaaaggttcgtatccaaatgtagataacgagcaagatagagcttattatgcagaacatccaaaagaagcattatggtgggttaaagaacgtaagaattag

SEQ ID NO: 406177 - DNA, 327 bp, Staphylococcus aureus
gtggtgtctagtaagaagagtgatgtattagaaagaaatttatcggctattggattaaatcacttgattaccgaagctgttggatccgatcaagtaagtgcatataaaccaaatcctgaaggcatacacacaattgtgcaacgctacaatttaaatagccaacaaacggtgtatattggtgattcaacgtttgatgttgagatggcacaacgtgctggtatgcaatctgcagctgtcacttggggtgcacatgatgcaaggtcattacttcattcaaatccggattttattattaatgatccatcagaaattaataccgtattataa

SEQ ID NO: 406178 - DNA, 351 bp, Staphylococcus aureus
ttgaagtttgacaattatatttttgattttgatggtacgttggcagacacgaaaaaatgtggtgaagtagcaacacaaagtgcatttaaagcatgtggcttaacggaaccatcatctaaagaaataacgcattatatgggaatacctattgaagaatcatttttaaaattagcagaccgaccattagatgaagcagcattagcaaagttaatcgatacatttagacatacatatcaatctattgaaaaggactatatttatgaatttgcgggtataactgaagccattacaagtttgtataaccaagggaaaaacttttcgtggtgtctagtaagaagagtgatgtattag

SEQ ID NO: 406179 - DNA, 549 bp, Staphylococcus aureus
atggctaaatttagtgactatcaattaattctagatgaattaaagatgactttgtcacatgttgaagcggatgagttttcaacttttgcatccaaaatactacatgctgaacatatatttgtagctggcaaaggacgttcaggattcgtggcgaatagttttgcaatgcgcttaaatcagctcggcaaacaggcacatgttgttggagaatcaacgacacctgcgattaagtcgaatgatgtatttgtaattatctctggttcaggttccacggaacatttaagattattagcagacaaagcaaaatcagtaggtgctgacatcgtattaattactacaaataaagattctgcaataggcaatctagctgggacgaacatcgttttgcctgcaggtacaaaatatgatgaacaaggctcggcacaaccattaggaagtttgtttgaacaagcatctcaattatttttagatagtgttgtaatgggattgatgactgaaatgaatgttacggaacaaacgatgcaacaaaatcatgctaatttagaataa

SEQ ID NO: 406180 - DNA, 633 bp, Staphylococcus aureus
gtggaattacaattagcaattgatttattaaacaaagaagacgcggctgagttagcaaataaagtaaaagattatgtagatatcgtagaaatcggtacgccaatcatttacaacgaaggtttaccagcagttaaacatatggcagacaacattagtaatgtaaaagtattagcagacatgaaaattatggatgcagctgattatgaagttagccaagcgattaaatttggcgcggatgtaattacaatactaggtgttgcagaagatgcatcaattaaagcagctattgaagaagctcataaaaataataaacaattactagttgatatgattgctgttcaagatttagaaaaacgtgcaaaagaactagatgaaatgggtgctgattatattgcagtacacactggttatgatttacaagcagaagggcaatcaccattagaaagtttaagaaccgttaaatctgttattaaaaattctaaagttgcagtagcaggtggaattaaaccagatacaattaaagatattgtcgctgaaagtcctgatcttgttattgttggtggcggaatcgcaaatgcagatgatccagtagaagctgcaaaacaatgtcgcgctgcaatcgaaggtaagtaa

SEQ ID NO: 406181 - DNA, 759 bp, Staphylococcus aureus
atgaaagtattaaacttaggatcgaaaaaacaagcatcattctatgttgcatgtgagttatataaagagatgacatttaatcagcactgtaaactaggtttagcaactggtggtacaatgacagatttgtatgaacaacttgttaagttattaaataaaaatcagttaaacgtagacaatgtatccacgtttaatttagacgaatatgtaggtttaaccgcatcacatccgcaaagttatcactattatatggatgacatgcttttcaaacaatatccttattttaatagaaagaacattcatattccaaatggagatgccgatgatatgaatgcggaagcgtcaaaatataatgacgttttagaacaacaaggtcaacgtgatattcaaattttaggtattggtgaaaatggtcatattggatttaatgaacctggtacgccgtttgatagcgttactcatatcgttgatttgactgaaagtactattaaggctaatagtcgatattttaaaaacgaagatgatgttccaaagcaagccatttcgatgggacttgctaatattcttcaagccaaacgtatcattttactcgcatttggtgaaaagaaacgtgctgctattacacatttattaaatcaggaaatttctgttgatgttccagccacattacttcacaaacacccgaatgttgagatatatttagacgacgaagcttgcccgaaaaatgttgcgaaaattcatgtcgatgaaatggattga

SEQ ID NO: 406182 - DNA, 363 bp, Staphylococcus aureus
gtgttggaaccaattaaagaacaagaagttatagatttacttgcttcttttgaacataaacctgtgtatctgcatgttgaaacgacaaatggggcctatgcgaaccatttcgatcaacgtgtttttaatgctggtacttttttaagaaacatacaaataacatatacgcatgcacaactaaaaggtggtaataaagaaccttatcgcattggtcttaaactatcaaatggtggttgggtttatgtacaaggtctaacgcattttgaggtcaatgagcatgatgaatttttaattgcaggttttaattacgaaggtcaactcgctgcagcacttcaaattagtgagcgaccatttaatttatag

SEQ ID NO: 406183 - DNA, 666 bp, Staphylococcus aureus
atgactgacgaaagacatgtattagtaatatttccacatcctgatgatgaaaccttctcatctgcaggcacattagcaaattatatccaaaaaggcatacctgtaacatatgcatgtttaaccctaggacaaatgggcagaaatttaggtaatcccccatttgcaacacgcgaatcattaccaagtattcgtgagcgtgaactagaagaagcttgtaaagttatcggtattactgatttaagaaaaatgggtttacgtgacaaaactgtcgaatttgaaccctatgaacatatagatggtatgattaaatctttaatcgatgatacaaatccatcattgattatttcattttatcctggatatgcagtacatcctgatcacgaagcaacagcagacgctgtaattcgaacggttgaacgcatgcctaaagaagaacgccctcgtttaactttagttgcgttcagtaatgatgcaaccgaagctcttggagaacctgatattcaaaatgatattacagattttaaagaacttaaaattaaggcatttgaagcacatgcttctcaaacaggtccatttttaaaacaattagcaagtcctgaaatcgatggtaaacaacacagctttttaacagtcgaaccatattggacatatcactttaaatcttaa

SEQ ID NO: 406184 - DNA, 879 bp, Staphylococcus aureus
atgactgaatttgatttatcgacacgagaaggtcgttggaaacactttggttccgtagatcctattgaaggcacgaaacctactactaagaacgaaatgacagatttacaaagtacacataaagattttttatttgaaatagaagaagttggtattaaaaacttagtgtaccctgtacttgttgaccagtatcaaacagctggcacatttagtttttcaacaagtttaacaaaagacgaaaaaggtattaatatgagccgtataatcgaaagtgttgaaaagcactatgataatggtattgaacttgaatttaatacactttatcaggtgttacgcactttacaaacgaatatgaaacaaaatgcggcaggcgttgatgtttctgggaaatggttctttgatcgctatagtccaaccacaaatattaaagcagttggtaatgccgatgtcacttatggattagcaattgacggtgataaagttacacgtaaagaacttactattgaagcaactgtcacaacgctatgcccttgttcaaaagaaataagtgagtattcagcgcacaaccaacgtggtgttgtcactgttaaaacatatattaataaagatcaagacatagttgatgactataaaaataaaattttagatgcaatggaagctaatgcaagttcaattctataccctattttaaaacgtcctgatgaaaaacgtgtgacagagcgtgcatatgaaaatccacgttttgtcgaagacttaattcgtttaattgccgcggacttagttgaatttgattggttagacggtttcgatatcgaatgtcgtaatgaagagtctatccatcaacatgatgctttcgctaaattaaagtatcgcaaataa

SEQ ID NO: 406185 - DNA, 1491 bp, Staphylococcus aureus
atgaattattttgtaggtaatagtttaggtgttaatttaactgggatagagaaagcaattattaatcgtttaaatttatttaaagaaatgggaagaccagcgcaatgtgtatttctgtcatggaatagatatttatatagaaatgcccaaaattatattactagttctgactatattaatatgtatgatttcttccaagaagcaacatatttagaacgcaatgaaccatttgactggttgtcgtattggactgatgaatgtcattatactttaaaacatgttgaaaatagtcatgactttagaatatatgatcaagagcgtttcttaatgtatgcccattttcaagatcctaaatatcgtatattagattatgtaaatcattttgatagtcaaagacgaaaagtaaaacgtgatttttatgatgtgcgtggctttttaagttgtagtaggattcttgttgataaacaacaaacattatgtgaatttttctataatccagaaggtgacacaaaattagaaaagtatttttcttacaaggatggcaaaccagaagtacaaaaaattattgtttactatgctaacaaacaatatttctttaataatgaaacggaattaggcgcatttttcattaaacaactatatcaacatggggatttatttttcagtgatcgtaatgtgtacacagcacctattttcaacttaacgcctgagtcaatcccagtagtagctgtgcttcacagtacacacattaaaaatattgatgcattagattcatcgccatttaaaaatgtatataaagcgatgtttgaaaatttatctcgatatcgtgcaattatcgtttctactgagcagcaaaaattagatgttgaaaaacgtattaaccatactattccagttgttaatattcctgtcggctatagtgaaacaattgatacaccagtccaaacattagatcagcgcagtgttaaattaatttccgttgctcgttattcacctgaaaaacaattacatcaacaaattgaattaattaaacgcttagtatcgtatgtcccaaaaatagagcttcatatgtatggttttggttctgaaagtaaaaaattaaatgaattgatacaaaaatatggattggaaaatcatgtttacttacgcggctttttaagcaatctagaccaagaatatagcgatgcctatttgagtttaataacaagtaacatggaaggtttctctttagcgctacttgaatctttagcacatggtgttccagttattagttatgatattaaatatggacctaacgaactgattacttcagatttcaatggttatttaattactaaaaatgatgaagatgccctatttgataaagtaaaatatgtgattgatcatcctgaagtacagcaacgactgtcaaaaggtagtttggcaaaagcacaacaatatagtaaagcgtcgttaattaaacaatgggaccaatttgttcgtcttatataa

SEQ ID NO: 406186 - DNA, 1473 bp, Staphylococcus aureus
atgaattacattttaggaacaattttagaaagtaaaattacaggtgtagaaaaagcgcaaataaatagattgaagttgttcaaacaacacggcatatcttcaaaatgtgtatatgttaaatggaatccttattcatacacatatgcgaagcaacatcagattgaaaatgatgtatttacaatgtatgactattttcaaaaagcaatcaattataaaaagacaaagcaagttaactggatacagtattgggaaaagtcatgtaggtacacattgaaatttgtggaaaattcaaatgatgtcagaatatatgatgaagagcaatttgtaatgtatgctcattttttagataaacagtatcatcaattaaattatgtgaattattttgatcataaaagaagaaaagtaaaacgcgaattgtatgatggaagaggctttttaagttgttctcgaattttaggtgaaggacaacggattgtactcgaaaattactatacacctaatggggaaatcgtcatccaaaaatattttgacgatataaaagggaaaaacacgctcacaaaggttatcttaaatgaagaccagcatcaacaattttttgatacagaagatgaattagttcaatattttctccgtcaattatgtaaaaataatgatcaaatcatattagatcgtcctcatgaattaggaaatgttatagcgggattaaatcaaagtattccagttattgttgtactccatagtacacatttatccggtgccggtaatggtataaaaagtttttataaaacagtgtttaataatttaacacgttataaagcgattgttgtatcaacagaaaagcaatgccaagatatttcacaatatattgaaaataaaataccagttatcaatattccggttggctacgtggcaaatttaaagtatcaatttgacatcaatcaaaaggagaaaaatcatatcatatcaattgctcgcctcgttgaaaataaacaaattaaacatcaaattgaagtaatcaagcaattagtaacaaaacatcccaatattcaattgaatatttatggacatggaaatggtttgtcagaatatcgacaacttgtagaagattatcatttatcggaacatgttaaatttcatggttttaagacgcatattaatgaagagattgctaaagcagaactgatgttatcgacaagtaaaatggaaggttttggcttagcaattttagagtcgctttcagtaggtacaccagtgatcagttatgatgtagattatggtccatcagaactgattcaagatggatttaatggctatttagtacctcaaggtgacatcaatcaaatggttgaaaaggtcgaccaattactaaataatactcaaaaattgcaacagttttcaattaatagcatagaatctgcacaacagtacaatgcaactactatcagtacaaagtggcaaaatattttaaactaa

SEQ ID NO: 406187 - DNA, 3357 bp, Staphylococcus aureus
atgattaacagggataataaaaaggcaataacaaaaaagggtatgatttcaaatcgcttaaacaaattttcgattagaaagtatactgtaggaactgcatcgattttagtaggtacgacattgatttttggtctagggaaccaagaagctaaagctgctgaaaacactagtacagaaaatgcaaaacaagatgatgcaacgactagtgataataaagaagtagtgtcggaaactgaaaataattcgacaacagaaaataattcaacaaatccaattaagaaagaaacaaatactgattcacaaccagaagctaaaaaagaatcaacttcatcaagtactcaaaaacagcaaaataacgttacagctacaactgaaactaagcctcaaaacattgaaaaagaaaatgttaaaccttcaactgataaaactgcgacagaagatacatctgttattttagaagagaagaaagcaccaaataatacaaataacgatgtaactacaaaaccatctacaagtgaaccatctacaagtgaaattcaaacaaaaccaactacacctcaagaatctacaaatattgaaaattcacaaccgcaaccaacgccttcaaaagtagacaatcaagttacagatgcaactaatccaaaagaaccagtaaatgtgtcaaaagaagaacttaaaaataatcctgagaaattaaaagaattggttagaaatgatagcaatacagatcattcaactaaaccagttgctacagctccaacaagtgttgcaccaaaacgtgtaaacgcaaaaatgcgctttgcagttgcacaaccagcagcagttgcttcaaacaatgtaaatgatttaattaaagtgacgaagcaaacaatcaaagttggcgatggtaaagataatgtggcagcagcgcatgacggtaaagatattgaatatgatacagagtttacaattgacaataaagtcaaaaaaggcgatacaatgacgattaattatgataagaatgtaattccttcggatttaacagataaaaatgatcctatcgatattactgatccatcaggagaggtcattgctaaaggaacatttgataaagcaactaagcaaatcacatatacatttacagactatgtagataaatatgaagatataaaatcacgcttaactctatattcgtatattgataaaaaaacagttccaaatgagacaagtttgaatttaacatttgctacagcaggtaaagaaacaagccaaaatgtcactgttgattatcaagatccaatggtccatggtgattcaaacattcaatctatctttacaaaattagatgaagataagcaaactattgaacaacaaatttatgttaacccattgaaaaaatcagcaaccaacactaaagttgatatagctggtagtcaagtagatgattatggaaatattaaactaggaaatggtagcaccattattgaccaaaatacagaaataaaggtttataaagttaactctgatcaacaattgcctcaaagtaatagaatctatgattttagtcaatacgaagatgtaacaagtcaatttgataataaaaaatcatttagtaataatgtagcaacattggattttggtgatattaattcagcctatattatcaaagttgttagtaaatatacacctacatcagatggcgaactagatattgcccaaggtactagtatgagaacaactgataaatatggttattataattatgcaggatattcaaacttcatcgtaacttctaatgacactggcggtggcgacggtactgttaaacctgaagaaaagttatacaaaattggtgactatgtatgggaagacgttgataaagacggtgttcaaggtacagattcaaaagaaaaaccaatggcaaacgttttagttacattaacttacccggacggtactacaaaatcagtaagaacagatgctaatggtcattatgaattcggtggtttgaaagacggagaaacttatacagttaaattcgaaacgccaactggatatcttccaacaaaagtaaatggaacaactgatggtgaaaaagactcaaatggtagttcggttactgttaaaattaatggtaaagatgatatgtctttagatactggtttttacaaagaacctaaatacaacttaggtgactatgtatgggaagatactaataaagatggtatccaagatgcaaatgagccaggaatcaaagatgttaaggttacattaaaagatagtactggaaaagttattggtacaactactactgatgcctcgggtaaatataaatttacagatttagataatggtaactatacagtagaatttgaaacaccagcaggttacacgccaacggttaaaaatactacagctgatgataaagattctaatggtttaacaacaacaggtgtcattaaagatgcagataatatgacattagacagtggtttctataaaacaccaaaatacagtttaggtgattatgtttggtacgacagtaataaagacggcaaacaagattcaactgaaaaaggtatcaaagatgtgacagttacattgcaaaacgaaaaaggcgaagtaattggaacaactaaaacagatgaaaatggtaaatatcgtttcgataatttagatagcggtaaatacaaagttatttttgaaaagcctgctggcttaacacaaacagttacaaatacaactgaagatgataaagatgcagatggtggcgaagttgacgtaacaattacggatcatgatgatttcacacttgataacggatacttcgaagaagatacatcagacagcgattcagactcagatagtgactcagacagcgactcagactcagacagcgactcagactcagacagtgattcagattcagacagcgactcagattcagatagcgactcagattcggacagcgattcagactcagatagcgactcagattcagatagcgattcagactcagacagcgactcagattcagatagcgattcggactcagatagcgactcagattcagacagcgattcagactcagatagcgactcagactcagacagtgattcagattcagacagcgactcagactcagatagcgactcagactcagacagtgattcagacagcgattcagactcggatgcaggaaaacatacacctgttaaaccaatgagtactactaaagaccatcacaataaagcaaaagcattaccagaaacaggtagtgaaaataacggctcaaataacgcaacgttatttggtggattatttgcagcattaggttcattattgttattcggtcgtcgcaaaaaacaaaacaaataa

SEQ ID NO: 406188 - DNA, 177 bp, Staphylococcus aureus
atgattcaaaataccttcggttatttaccggagtatattgtagctgatgcaggttatggtagtgagcaaaactatatggctattatagatgattttaataaaacgccacttattacgtatggcatgtttattaaagataaaactagaaagtttaaaagtgacattttcaacacttaa

SEQ ID NO: 406189 - DNA, 510 bp, Staphylococcus aureus
atgactgtagataacaataaagcaaaacaagcatacgacaatcaaactggtgttaacgaaaaagaaagagaagagcgtcaaaaacaacaagaacaaaatcaggagcctcaattcaaaaacaaattaacattctctgatgaagttgttgaaaaaattgctggtatcgctgcacgtgaagttaaaggtatcttagatatgaaaggtggcttaactgatacattcactaatgcattctcaagtggcaacaatgttactcaaggtgtatctgttgaagttggtgaaaaacaagctgctgtagacttaaaagtaatcttagaatatggtgaatcagcaccaaaaatcttccgtaaagtaactgaattagttaaagaacaagttaaatatattactggtttagatgtagttgaagttaacatgcaagttgacgatgtaatgactcaaaaagagtggaaacaaaaacacgaaaaaaataacgaaaacaataaccaagaaagacaaggtttacaataa

SEQ ID NO: 406190 - DNA, 240 bp, Staphylococcus aureus
atggctaacaatcataaccaaaacggacaagactctacacaacaagtgattaattttttaaaagtatttaaatggagaatcgttggtttcctagcgtttctattaatcgcgatattattcttaacgttaggtttttggaaaacagtacttatcatcgttttatgtttaattggtgtaggtattgggtatatgaaagaccgtaagcaagattttatgaattttttaaatcgatggagttaa

SEQ ID NO: 406191 - DNA, 537 bp, Staphylococcus aureus
gtgaaacgacttaaaaactttatccttggcttattaatagtagtaatcgtggggttcctgttattcatgtatatccaagatggacgtataactgaatatcaagactacttccttcaatttgaatggttccaaccattacttatttcacttgctgcactattgatattaataggtcttatattagtatttagtatcttcaaacctacgcatcgaaaacctggattatacaaagacttcgatgatggtcatgtttacgtatctcgtaaagctgttgaaaagacggcattcgatacggttgcaaaatatgatcaagtaagacaaccaaatgtagttgcgaaactatataacaaaaaaaataaatcttatatcgacattaaaactgactttttcgtaccaaataatgttcaagttcaatctttaactgaagcaattcgttcggatattaaaaagaatgtagaatatttcacagaaatgccagtacgtaagttagaagttaatgtgagagatcagaaaacttctggtccacgagtgttgtaa

SEQ ID NO: 406192 - DNA, 1563 bp, Staphylococcus aureus
atgaaaaataaatcagtaagtctagtgttttgggtatctttagtgatatgtacgatatttgttgcttttggagcaatatttccgaaacagttagaaaaactcacgcaaaacattactacatttattgcgctacatttttcttggtattatttattgctcgttttagttattttatttgtctgtgtgtatattttattttcgagatacgcaaacattacattaggtgaagaaggcgaagatcctgaattctcattgccgtcttggtttgctatgttatttagtgctggtatgggaataggacttgtgttctggacaacggcagaaccaatcagtcatgccttcaaattaacgcctattcataaagctggcacgcaatctgcaattaatgatgcaatgcagttttcatttttccattgggggattcatgcatgggcagtctatggtattgtcgcgctagtgtttgcatattttagctttcataaaggatatcctggcttagtcagcgctacattgacgcctttattaggtgaaaaggcaatgcgtggacctttaggtggtgccattgatgtattggcagtcatagctacagtaacaggcgttgctgcaacattaggtttcggtgcattgcaaataaacgaaggtttacattttttatttaatgtaccgagtaacttcacgatgcaagtaatcttgattgtcattgcaaccatattatttacttggtcagcatggtcaggtatcgataaaggtatcaaaacgttgagtaatatcaacatgttacttgcttttgtagtacttattggtctttttattgttgggccaacgctatacattttaaatacatttacgaatggtctaggtaattatattgcaaatttctttagtatgagtttacgcattccgacaggtggtcaaaaattccaatggttacaaaattggacaatcttttactgggcatggtggatatcttgggcaccatttgtaggtatatttattgcacgtgtgtcaaaaggacgtacgattaaagaatttattctaggtgtactttttgtcccggcgttagtttgctttatattctttgcggtattcggcgcgtcagcaatttacttacaagataatcatattgccgatattgctaaagctgcgacagaaacagcaacttttgcgacgctacaacattatccgctaggttttgtattaagcttaattactttacttgttattatgattttctttgttacatcagcggattcggcaacttatgttttaggtatgttgagttcaagtggtgatattaatccgaagtcatttgtcaaagtgagttggggtatcattatggcattatttgcaatcatcatgatttacacaggtggtactcaagcaattcaaaatttattaatcattgctgcgttaccattttccgtggtcattatagcgatgatatggtcgcttataaaatctttgagtgaggagaaaccgagaaatagtaataaggttttaattaaacatcgtgacccagatattttagaatatcgttcttcaaaacatattgacgaaaattaa

SEQ ID NO: 406193 - DNA, 1002 bp, Staphylococcus aureus
atgaaaatgataggatttgagaagccctttaaattggaagaaggaaatttatttaaagtatacgaacaaagaaagccaacgccagaaaacgatgatatcttagtcaaagtaaatagcattagtgtaaatcctgtagatacaaagcaacgacaaatggaagtcactcaagcacctcgtgtacttgggtttgatgctattggtactgttgaagctatcggaccagacgttacattatttagtccgggtgacgttgtattttatgctggatcgccaaatagacaaggatcaaatgcgacatatcaattggtgtcagaagctatagttgcaaaagcaccacacaacataagtgctaatgaagcggttagtctaccgctaactggtattacggcatatgaaacgttttttgatacatttaaaatttctacgaatcctgctgaaaacgaagggaagtctgtcttaatcattaatggtgccggtggtgtaggcagtatagccactcaaattgctaaacggtatggtttaactgtcattacaacagcatcacgacaagaaacaacagagtggtgtgaaaagatgggcgcagatatcgtattgaatcataaagaggatttagtgcgtcaatttaaagaaattccattagtagattatatattttgcacctataatacagacttgtattacaatactatgattgaactgataaaaccattagggcatattacgactatcgtagcttttaatgaagatcaagatttaaatgcattaaaattaaaaagtataacatttacacatgaatttatgtttgcgcgtccaattcatcgaacgcctgatatgattaaacaacatgagtatttagaagatattacgaaaaatatagaatcagggcattaccaaccaacaacgacacaagtttttgaaggtttatcacctgaaaacttatatcaagcacatcaattgttggaaaaacaatcaatgattggaaaattagtaattaatatatag

SEQ ID NO: 406194 - DNA, 1005 bp, Staphylococcus aureus
atgatgcaaaataaacaaattctttttaacaaaataccagaaggcatgcctcaagaggatacattcaaaattgaagagattgacacgcctaaacttgagagcgatggtgtacttgtacaaacgctgtatatttcagtggatccatatatgagaggacgtatgactaaggcagattcgtatgtacagccttttgaaattggtaaaccgattgttagccatgtcgttgcaaaagtaattgattcgacactcgcagattataaaaaaggagatgtcgttgtaggtatgttgccttggcgaatcattaatcatgtccaagcggatcaaattactaaagttccaacgacagatgtaccacttgatttatatttaagtgttttaggaatgccaggacaaacagcatatcatggtctgcttgatattggacaacctaaagccggtgatactgttgtggtttcagctgcatctggtgctgtaggttcagttgtaggtcaaattgctaagattaaaggttgccgtgtagtaggtattgcgggtggcgacaaaaaagtaaattatttaacagagacactgggctttgacgctggtattgattataagaaagaggattttgcagaagcgttagcacaagcagtaccagatggtattgatgtttattttgaaaatgttggtggaacagttggcgatgaagtatttaagcatttaaatcgttttgcacgtgtaccagtatgtggcgcaatttcgtcatataatcatcctgaagccgatatcggaccacgtattcaaggtacgcttattaagaagcaagtaatgatgagaggcttcttggtaagtgaattcgctaatgcttttaaagaagctagtgaacagcttgcaacatgggttcaagaaggtaaaattcagtcacaagtaaccattgaagatggttttgaaaatgcgccacatgcatttaaaaatttatttactggcgataactttggtaaacaagttattaaagtaacggaataa

SEQ ID NO: 406195 - DNA, 870 bp, Staphylococcus aureus
gtgaagaaaatttttgtaattattacgacattgttagcggtcgctattattataggctctattattatggtggtgtttagtcaacgacaggcacaaacatttaaaatacaacaacagcaatttgttaaaaagccaattccaacattgttcttacatggatttggtggtagtgccaattctgaaaagtttatggtgaagcaagcagaaaaaagaggggtaactaaagatatcatcactgcttacgtttcaaaggatggtgcagtgacatttaaagggaaactaagaaaagatgcagtgaatcctattgtgaaaattgaacttgaaaataacagacaaggctatttggataagaatgctgcgtggtttaaaaatgtactgactaagttacaatctgaatacaatttcgataaattcaactttgtcggtcactcaatggggaacttaacatttgcacaatatatgatgacatatggtaacgacaagtcactgccacagttaaacaaacaagtgaatattgcagggacatttaatggtgttttaaatatgaatgaagatgtcaatgaaattacagttgataaagatggtaaaccaagtcgaatgaatcaaccttatcagcaattacgcgtgctaaaagatatttataaaggtaaaggtatcgaagtgctaaatatttatggggatttgaaagatggtacacattcagacggcagagtgtctaatagttcttcgaaatcattaaaatatttactgggaaatagtccgaaaagttatcgagaatctaaatatgaaggtgagcctgcacaacatagtcagcttcatgagaatgaaaatgttgctaatgagttaatcgacttcttatggaaaaaataa

SEQ ID NO: 406196 - DNA, 1413 bp, Staphylococcus aureus
atgactaaaacattacctgaagattttatttttggtggagcaacagcagcatatcaagcagaaggtgcgacaaatacggatggtaaaggtcgcgtagcatgggatacgtatttagaagaaaactattggtacactgcagaaccagcgagtgatttttataacagatatccagtggatttagaattaagtgaaaaattcggtgttaatggtatccgaatttcaattgcatggtctcgtatcttcccaaatggatatggcgaagttaaccctaaaggtgttgagtattaccataagttatttgcagagtgtcataaacgtcatgttgaaccatttgtaacattgcatcattttgatacaccagaagtgttacacaaagatggcgattttctaaatcgtaaaacgattgactactttgtagattatgctgaatattgttttaaagaattcccagaagtaaaatattggactacattcaatgaaattggacctattggtgatggtcaatatttagtaggtaaattccctccaggtattaaatatgattttgaaaaagtattccaatcacatcataacatgatggtggctcatgctagagcagtaaaattatttaaagatggcggatacaaaggagaaattggtgttgtacacgcattgccaacaaaatatccgttcgatccatcaaatcctgaagatgttcgtgcagcagaattagaagatatcatccataataaattcatcttagatgcaacatatttaggtaagtattctcgtgaaacgatggaaggtgtgcaacatatcttatctgttaatggcggtaaattaaacattacagatgaagattatgccattttagatgcagccaaagatttaaacgacttcttaggtatcaattactacatgagtgattggatgagaggttacgatggagaatctgaaatcacgcataatgcgacaggtgataaaggcggttctaaataccaacttaaaggtgtcggacaacgtgaatttgatgtcgacgtacctcgcacagactgggactggatgatctatcctcaaggtttatatgatcaaatcatgcgtgttgttaaagattatcctaactatcataagatttatatcactgaaaatggtttaggatataaagatgaatttattgaatctgaaaaaacagttcatgatgatgcacgtattgattatgtaagacaacatttgaacgttattgcagatgctattatagatggtgcaaatgttaaaggttactttatttggtcattaatggatgtgttctcttggtcaaatggttatgaaaaacgatatggtttattctatgtcgattttgagactcaagaacgttatcctaagaaaagtgcttattggtacaaagagttagccgaaacaaaagaaattaaataa

SEQ ID NO: 406197 - DNA, 1713 bp, Staphylococcus aureus
atgatgcaaaaattgatcgcacaaattgaaaaagggaagccatttttcgagaaattatcacgtaacatatatttaagagccatccgtgatggatttatttctgcaatgcctgtcatcttattctcaagtatctttctattaattgcatatgtgccaaatatatttggttttaaatgggataaaggcatggaagccattttaatgaaaccatataactatacgatggggcttgtagcatttttagtagcaggaacgacagcgaaatctttaacagattcatttaaccgtaagctagaaagtacaaatcaaattaactttatttctacaatgctagcagcgatgtgtggattcttgttcttagcttctgatccagccaaagatggtggattcttaagtgcatttatgggaactaaaggtttattaacagcattcttatcagcatttgtaactgttattgtttataacttctgtgtgaagcgcaatattacaattaaaatgccgaaagaagtaccgccgaatatttcacaagtatttaaggacttaattccattttcagcggtaatcatcattctttatgcattagatttagtcattcgcaacagctttaaatcaaatgtagcggaaggtattttaaaattattcgaaccattatttacagcagcagatggatggattggtgtcacaattatctttggtgcctttgcattattctggtttgtaggtattcatggtccgtcaattgtagagccagcaattgcagccattacatatgcgaatatcgaagcgaacttcaagttgcttcaagctggagaacacgcagataaaattattacatcaggtacacaaatgtttatcgttacatttggaggtacgggtgcaacattggtcgtcccgttcatgtttatgtggatgacgaaatctaaacgaaacaaagcgattggacgtgcatcagttgtaccaacattctttggtgtaaacgaaccaattttatttggtgcaccactagtattgaatcctgtgttctttattccatttgtattagcaccaattgttaacgtatggattttcaaacttttcgttgaagtgttaggaatgaatagttttagtgtgaatttaccttggacaacaccaggtccattgggcattatcatgggtacaggttttggtttatggtcattcgtactagctattactttgattgttgtagatattattatttactacccattcctaaaagtttatgatagtgaaattcttgatgaagaagaaggacgtaaagaaagtaattcagatttaaaagaaaaagttgcagcaaactttgatacgaaaaaagctgattcaattttagcggcaagtggtgtatcagacgatgcagctaaagcttcaaatatcacagaacaaacaaatgtcttagtactttgtgccggtggtggtacaagtggattattagccaatgcacttaataaagcagctgaagaatatcatgtgccagtgaaagcggcagctggcggatatggcgcacatatggacattatgaaagagtaccaattaatcattttagcgccacaagttgcgtctaactatgaagatattaagcaagatacagatagattaggtattaaattagcgaagactcaaggtgctgaatatatcaaattgacacgagatggccaagcagcccttgatttcgttcaacaacaatttgaaaattaa

SEQ ID NO: 406198 - DNA, 312 bp, Staphylococcus aureus
atgaatagagaagaagtccaattattaggttttgaaattgttgcatttgcaggggatgcacgttctaagtttttagaagcattaacagcagctcaagctggagattttgcaaaagcagatgcactgattgaagaaggaaacaattgcattgcggaagcgcatagagcacaaacaagcctgttggctaaagaagcgcaaggtgatgatattgcatacagtgtaacgatgatgcatggtcaagatcatttaatgacaacaattttactgaaagatttaatgaagcatttattagaattttataaaagagggtga

SEQ ID NO: 406199 - DNA, 981 bp, Staphylococcus aureus
atgtcaaaatcgaatcaaaaaatcgcatcaattgaacaattaagtaacaacgaaggtatcatttctgcattagcatttgaccaacgtggtgctttaaaacgcatgatggcaaaacatcaaactgaagaaccaactgtagctcaaattgaacaattaaaagtattagttgcggaagaattaacacaatatgcatcttcaattttattagatcctgaatatggtttaccagcttcagatgcacgtaacaaagattgtggattattacttgcttatgaaaaaactggatatgacgtaaacgctaaaggtcgtttacctgactgtttagtagagtggtctgcaaaacgtttaaaagaacaaggcgcaaatgctgttaaattcttactttactatgatgttgatgatgctgaagaaattaacattcaaaagaaagcatacattgaaagaatcggttcagaatgtgttgcagaagatattccattctttttagaagtattaacatacgatgacaacattcctgataacggtagtgttgaattcgcaaaagttaagcctagaaaggttaacgaagcaatgaaattattctcagaaccacgctttaacgttgatgtattgaaagttgaagtaccagtaaacatgaaatatgtagaaggctttgctgaaggtgaagtggtttatacaaaagaggaagcggcacaacactttaaagatcaagatgcagcaactcatttaccatacatttacttaagtgctggtgtttctgcggaattattccaagaaactttaaaatttgctcacgaagctggtgctaaattcaacggggtactttgtggccgtgctacatggtctggtgctgttcaagtatacattgaacaaggtgaagatgctgctcgtgaatggttacgtacaactggtttcaaaaatattgatgacttaaataaagtattaaaagatactgcgacatcttggaaacaaagaaaataa

SEQ ID NO: 406200 - DNA, 933 bp, Staphylococcus aureus
atgattttaactttaacattaaatccatccgttgatatttcatacccattaacagcattgaaattagatgatgttaatcgtgttcaagaagtaagtaaaacagctggtggtaaaggtttaaatgtaacaagagtacttgcgcaagtaggtgagccagtccttgcgagtggttttattggcggtgaattaggtcaatttattgctaaaaaattagatcatgccgacatcaagcatgcattttataacattaagggtgaaacacgaaactgcattgcaattttacatgaagggcaacaaacagaaattttagagcagggaccggagattgataatcaagaggctgcaggatttattaaacattttgaacaattattagaaaaagttgaagcagttgctatttcaggtagcttacctaaaggattaaatcaagattattatgcacaaatcattgaacgatgccaaaacaaaggtgtgcctgtgatattagattgctcgggtgcaactttgcaaacagttttggaaaatccatacaaacctacagtcattaaaccaaacatttctgaactatatcaattgcttaaccagccacttgatgaaagtttagaaagtttgaaacaggcagtgtcacaacccttattcgaagggattgagtggattattgtgtctttaggtgcacaaggtgcattcgctaagcacaatcatacattctatagagtgaatattccgacaataagtgtattaaatccggttggttcaggtgattctacagttgctggaattacttcagcaattcttaatcatgaaaacgaccacgatttactaaaaaaagccaatactttaggcatgctgaatgcacaagaagcacaaacaggttatgtcaatttaaataattatgatgatttattcaatcaaattgaagttttagaggtgtaa

SEQ ID NO: 406201 - DNA, 516 bp, Staphylococcus aureus
atgaagattgcattaggatgcgaccatattgttacagatacaaaaatgcgtgtatctgaatttttaaaatcaaaaggacatgaagtcattgacgtaggaacatacgatttcacaagaacacattatccaatttttggtaaaaaagttggcgaacaagttgttagcggtaatgcagacttaggtgtttgtatttgtggaacaggtgttggtattaacaatgctgtaaataaagtacctggcgttcgttcagcactagtacgtgatatgacatcagcgttatacgctaaagaagaattaaatgcgaacgttattggcttcggtggacgtattataggtgagttattaatgtgcgatattatcgatgcatttattaatgctgaatataaaccaactgaagagaacaaaaaattaatcgctaaaattaaacatttagaaacaagcaatgcagatcaagctgatccacatttctttgatgaattcttagaaaaatgggacagaggcgaataccacgattaa

SEQ ID NO: 406202 - DNA, 429 bp, Staphylococcus aureus
atggcgattattattggttcagatgaagctggcaaacgattaaaagaagtcatcaaatcatacttattagacaataaatatgatgttgttgacgtaacagaaggacaggaagttgactttgttgatgcaactttggctgtagcaaaagatgttcaaagtcaagaaggtaacttaggtattgttatcgatgcatttggtgcaggtagctttatggttgctacaaaaatcaaaggcatgattgctgctgaagtatcagatgaacgctctggatatatgactagaggccataacaattcaagaatgatcactatgggatctgaaattgttggagacacattagcgaaaaatgtcgttaaaggttttgttgaaggtaaatacgatggtggtagacaccaaatccgcgtagatatgcttaataaaatgtgctaa

SEQ ID NO: 406203 - DNA, 756 bp, Staphylococcus aureus
ttgaataaacatgaacgtttggacgaaattgctaaactagtgaataaaaagggcacgataagaacgaatgaaatcgtcgaaggtttaaatgtgtctgatatgacagttcgaagagatttaattgaattggaaaataaagggattttaacgaagattcatggtggtgcacgcagtaattcaacatttcagtataaagaaatatcgcataaagaaaaacatacccgtcaaattgcagaaaaacgatttatagctaaaaaagctgcatcattaattgaagatggggatactttgtttttcggaccaggaacaacagtggaactattagcagaagaagtcaatcatcatacgctcacaattattacgaattgtttgccggtgtataaaattttgttagaaaaacaaacagcacattttcgtgtctatttaattggtggtgaaatgcgccatattacagaagcatttgtaggtgaaatggcgaacgccatgttggaaaaactaagatttagcaagatgttctttagtagtaacgcagtaaataaaggtgctgtgatgacatctacattagatgaagcctatacgcaacaactggcactaagtaattcaattgaaaaatacttgttaatcgatcatacgaaagttggcaaagaagattttacatcattttgtcagttaaacgaattgactgcagtggtcatggactatgaagatgaagaaaaagtagaaacgattaaaacatatattgaagtagtcgactaa

SEQ ID NO: 406204 - DNA, 741 bp, Staphylococcus aureus
gtgtttaacttgaaacatgatttagagacactaaaacatattatagatagttcgaatcgtattacattttttacaggtgctggtgtatctgtcgcaagtggcgttccagatttccgttcaatgggtggcttatttgatgaaatttcaaaagatgggctttcgccagaatacttgttaagccgtgattatttagaagatgatcctgaaggttttatcaatttctgccataagcgcttactatttgtcgatacgatgcccaatatcgttcatgattggattgcaaaattagaacgtaatcaacaatctttaggtgtcatcacgcaaaatatcgatggtttgcactcagacgctggaagtcaacatgttgatgaattacatggcacgttaaatcgtttttattgtaatgtatgtcataaatcttatacgaagtcagatgttattgatagaactttgaaacattgtgataattgtggtggtgccattcgaccggacatcgtattatacggtgaaatgttagatcaacctaccatcataagggcattaaataaaattgaacatgctgacacccttgttgtactaggttcatcactcgttgtacaacctgccgcaggattaatatcacattttaaaggcgacaatttaattattatcaataaagatcgaacaccttatgatagcgacgctactttggtcatacatgacgacatggtttccgttgtaaaatcattaatgacagagtaa

SEQ ID NO: 406205 - DNA, 609 bp, Staphylococcus aureus
atgtgctttgatataaataatttggatataaaaaagttgaattttagaaaggtaaaaaacgcaattcatttaagtttaagtggcgataaataccagtttttggaggacggtaaaactatcaataatacttattttttagctgtatatgataatgcaataaacatttttgaagatttgttttcgccttctgattctataaatttggttcatgtagtatatgtttatagtgaaccttataagaaaacaaatgttataaaaaaatttacatcgttaacaatagatgaattgtattactttaaagaatataaaaaggagaaggatgataatattttgtgcgaggagttttcatataagtgttccataaaagatataaaatataaaaaattattaaaagctatatccaatcaagactttaaagggttagttccaaatatcaatcagaatgataattattctgaaatatatataattaacaatactaaaaacttaatatatcatttatatgatgatagaggtctatggctagcttttaataataatgaagattatgcaagatattctgaaaaatataatgatttaatatcggaatttgataatgaagatatctaa

SEQ ID NO: 406206 - DNA, 126 bp, Staphylococcus aureus
atgagatatatacacttttctattattacattaattacaggtatcattatgcatattacaatgtactttgtaccatttgaatctcggaaaatgccactatttatgacgataatttttacaatctaa

SEQ ID NO: 406207 - DNA, 849 bp, Staphylococcus aureus
atgaatcatattgaaataagtaaagatgtaaagataccagtattaggtttcggagtatttcaaattcctcaagaacaaacagcagaagcggttaaagaagcaattaaagcgggttatagacatattgatacagcacaaagttatttaaatgaaactgaagtaggtcaaggtattgaagcttcaggtattgatagaagtgaactattcattacgactaaagtatggattgaaaatgttaactatgaagatactatcaaatcaatcgaacgatcattacaacgattaaatttggactatcttgatctagtgcttattcaccaaccttacaatgacgtatatggctcatggcgtgcattagaagagttaaaagaaaatggtaaaattaaagcaatcggtgtatctaacttcggcgttgatcgaattgtagatttaggtattcacaatcaaattcaaccacaagtgaaccaaatagaaattaatccattccatcaacaagaagaacaagttgcagcacttcaacaagaaaatgttgtggtagaagcttgggcaccatttgcagaaggtaaaaatcaattattccaaaatcaattgttgcaggccattgcagataaatacaacaaatcaattgcacaagttattttacgctggttagtagaacgtgacattgttgtactcgcaaaatcagtgaatccagaacgtatggctcaaaacttagatatatttgattttgaacttacagaagaagataaacaacaaattgcgacattagaagaaagtaatagccaatttttctcacatgctgatccagagatgattaaagcacttacaagcagagaattagatgtttaa

SEQ ID NO: 406208 - DNA, 417 bp, Staphylococcus aureus
atgaaaactaaagaagtcgtagcgctcatgaatatatctcaagacactttaagatattatgaaaaggttggtgtgattccaccagttaatcgagatgaaaatggatatagaatatataatgatagtgatttaaattggatttatttagtgaaaaatttgcgaaatgcaggcgtcagtattgaatcgcttatcgaattttgcaggttagcgcagcttcctaaaaatgaaaatattcaagcacagcaaaagcaaattttaaataagcaactcgaagaattaaatgaaaacttaaagacaattcatgatgcgagagatttactacaatataaaattgataattatgataatcatattgctaaaatcaatgctagtgataattatgatgacaatgttgaacgtctttgggagagaaagtaa

SEQ ID NO: 406209 - DNA, 2424 bp, Staphylococcus aureus
atgacatatagaataaagaaatggcaaaaattatccaccattacgttattaatggctggtgtgattactttgaatggtggtgaattcagaagtgttgataaacatcaaatcgctgtggctgatacgaatgttcaaacgccagattatgaaaaattgaggaacacatggctggacgttaactatggttatgataagtatgatgagaataatccagatatgaagaagaagtttgatgctacagagaaagaggcgacgaatttactcaaggaaatgaaaactgaaagtggtaggaaatacttgtggtcaggagcggaaacccttgaaactaattcttctcatatgactcgtacctatcgtaatattgagaaaatcgcagaagcgatgaggaatcctaaaaccactttaaatactgacgaaaataagaagaaagtgaaagatgcccttgagtggctgcataaaaatgcatatggaaaagaaccagataaaaaagtaaaagaattaagtgagaattttactaaaacaactggcaagaataccaacttaaattggtgggattatgaaattggaacacctaaatcattaacaaatacgcttatattgctgaatgatcaattttcaaatgaagaaaagaaaaaattcactgcccctattaaaactttcgccccagatagtgacaaaatattatcttctgtaggaaaagctgaacttgctaaaggcggaaatctagtagacatttctaaggtgaaacttttagaatgtattatcgaagaagataaagatatgatgaaaaagtctatagattcatttaataaagtcttcacttacgttcaagattctgccactggtaaagaacgtaatggattttataaagatggctcttacattgatcatcaagacgttccatacactggtgcttatggcgttgtactcttagaggggatttctcaaatgatgccgatgataaaagaaacaccttttaatgataaaacccaaaatgatacaaccttaaagtcatggattgacgacggatttatgccactcatttataaaggtgaaatgatggatttatcacgaggtagagctatcagtcgtgaaaatgaaaccagtcactcagcatctgcaacagtaatgaaatcattgttgagattaagtgatgccatggatgattcaacaaaagctaagtataaaaagattgtcaaatcttcagtagagtcagattcaagttataaacaaaatgattatttaaattcatattcggacatagataaaatgaagtctttaatgacagataacagtatttctaaaaacggattaacacaacaacttaaaatatataatgacatggatcgtgtcacctatcataacaaagacttagactttgcatttggtttaagtatgacgtcgaaaaacgtagcacgctatgaaagtatcaacggagagaatttaaaaggttggcacactggtgctggaatgtcttatttatataacagcgatgtcaaacactatcatgataacttctgggtgacagccgatatgaaacgtttatcaggtacaacaactttagacaatgaaatattaaaagatacggatgataaaaagtcgagtaaaacttttgttggcggaacaaaagttgatgaccaacatgctagtatcggaatggattttgaaaatcaggacaaaactttaactgccaaaaaatcatatttcatattaaacgataaaattgtcttcttaggaactggcattaaaagtactgattcatcaaagaatccagttacaacgattgaaaatcgcaaagcgaatgggtatacgttatatacagacgataaacaaacaaccaattctgataatcaggaaaacaattcagtctttttagagtccacagataccaaaaagaacatcggttatcattttttaaacaaaccgaaaataactgtaaaaaaagaaagtcatactggtaagtggaaagaaataaataaaagtcaaaaggatacacaaaaaactgatgagtattatgaagtaactcaaaagcattctaattctgacaataaatatggatatgtgttgtatccaggcttatctaaagatgtctttaagacaaaaaaagatgaagtaactgtcgttaagcaagaagatgacttccacgttgtgaaagataatgaatcggtttgggctggtgttaattatagtaatagcactcaaacttttgacattaacaacactaaagtcgaagttaaagccaaaggtatgtttatacttaaaaagaaagatgataacacttatgaatgtagcttctataatcctgaatctacaaattccgcttcagatattgaatctaaaatttcaatgaccggttactctattacaaacaaaaatacgtcgacttctaatgaatccggcgtgcactttgaattaactaaataa

SEQ ID NO: 406210 - DNA, 855 bp, Staphylococcus aureus
atgaataaaacaaactttggggcttatttaaataaaagtaagagcaggaaaatatataagatttttgatcaaaatttgaagcgagagtttagttattggcagtttaggaaacttttcaaatcttatacaaggcagtctgatgtacatgaattaaaagtgtgtactcaaaatgatggtactattgagcaaatatggatagatgaagcaaatcaatttggagtgtcagtgacttggaaagataatagtattatcggatttgttatgcgtccgttaattaattatgatgcgattaagaatgaaacgactttaaaatacgcagtgccgacaacagattgctatgagattttttggggtggagataatgaattatataattatcactatttatacccacatcaaaggtatgctattgatttagttattaaagaaaatcataaaacatataagaatcaaggaaaagtaaatactgattatttttgttttggaaaagatatcattgcgccagcaaatggtacagttgaaaaagtagtgaatggggttcaagacaacagtattggaagtacgaatgaatcacagtttttaggaaattatattgtaattaagcacgcagaaaatgagtatagcttaatagctcatttacaccaatattcaatcattgtgaatgaggggcaaaatgttaaatatggtgatatcattgggaaggttgggaattctggcaattctactgaacctcatatacattttcaagtaatgaatgataagaatattgaagcatgtacatctttaaaaattcgatttataaataatcgagaacttatcaaaggggatgtggtctgcggattacaagctgaatga

SEQ ID NO: 406211 - DNA, 816 bp, Staphylococcus aureus
atgtcaaagcgtctattattgtttgattttgatgaaacatattttaaacataatacaaatgaagaagatttaagtcatttaagagaaatggaaaaattgttggaaaaactaactaataataatgaagtgatcactgctgtattgacaggaagtacatttcaaagtgtcatggataaaatggatcaagttaatatgacgtttaaaccattacatatcttttctgatttgagttctaaaatgttcacttggaataatggcgaatatgttgaatcagaaacatataaaaagaaagtcttgagcgaaccatttttatttgaagatattgaagatatattacgtcatatttctgcgcaatataatgtcgaatttattccacaaagagcatttgaaggtaatgaaacacattataatttttattttcattcaacaggtaatcacaacaatgatagtcgtatcctagaagcacttgtcagatacgcaaatgaccaaaactatacagcgagatttagtcgaagcaatccattagctggtgatcctgaaaatgcgtatgatattgacttcacaccgtcaaatgctggaaaattatatgctactcaatttctgatgaggaaatataatataccagtaaaatcaatattaggttttggagatagcggcaatgacgaagcatatttaagctatcttgaacatgcatatttgatgtcgaatagtagagatgaagcattaaagcagaaatttagattaacaaaatatccatattatcaagggataacactgcatgttaaagaatttgttgaaggtaagtatgattattga

SEQ ID NO: 406212 - DNA, 426 bp, Staphylococcus aureus
atgaaactaaaatcatttgttactgccactttagcattgggattattatcaacggtcggagctgcattaccgagtcacgaagcatctgcagatagtaataacggctataaagaaatgactgtggatggttatcacactgttccttacacaatttcagtagatggtattactgcattacatcgaacttactttatcttcccagaaaataaaaatgttctttatcaagaaattgacagtaaagtaaaaaatgaattagcttctcaacgtggtgttacaacagaaaaaattaataatgcccaaacagcaacttatacgcttactttgaatgatggtaataaaaaagtagtgaatctaaagaaaaatgacgacgctaaaaattcaattgatccaagtacaatcaaacagatacaaattgtagttaaataa

SEQ ID NO: 406213 - DNA, 705 bp, Staphylococcus aureus
atgactaatgttttataccaacatggtacattaggcacattaatggcaggattattaaaaggaactgcatcaataaatgaattattgcaacatggtgacttaggtatcgctacactaacaggttcaaacggtgaggtaatctttttagatggaaaagcttaccatgcaaatgaacataaagaatttgtagaattaaaaggtgacgagttaacaccatatgcaactgtaactaaatttgtagcagatacaagctatgaaacgaaagataaatcttcagaagcagtttttgcagaaattaaggaaaagatgttgagtgaaaatttattttcagcagtaaaaatttcaggcttatttaaaaaaatgcatgtacgtatgatgccggctcaagaaccaccttatacacgtttaatcgattcagctagaagacaacctgaacaaactgaaacgtatgtcaaaggttcagtcgttggtttctttacaccagaattattccatggtatcggatcagcaggatttcatgtacactttgcgaatgatgatcgtaactttggtggacatgtcttagattttgaagtagaagatgttaaagtagaaatccaaaatatagaaacatttgaacagcattttccaattcaagataaagatttcactaaagcaaatattgactataaagatattgcagacgaaattagagaagctgaataa

SEQ ID NO: 406214 - DNA, 1665 bp, Staphylococcus aureus
atgactgataaaaagtacactgcagccgatatggttattgatactttgaaaaataatggggtagaatatgtttttggtattccgggtgcaaagattgactatctatttaatgctttaattgatgatggtcctgaacttattgtcactcgtcatgaacaaaacgccgcaatgatggcgcaaggtattggaagattaacaggcaaaccgggtgtagtacttgttacaagtggtcctggtgtaagtaatttaactactggattattaaccgcaacatctgaaggggatcctgtattagcgttaggtggccaagtgaaacgtaatgatttattacgattaacgcatcaaagtattgataatgctgcgctattaaaatattcatcaaaatatagtgaagaagtacaagatcctgaatcattatcagaagttatgacaaatgcaattcgaattgctacttcaggaaaaaatggcgcaagttttattagtattccgcaagacgttatttcttcaccagttgaatctaaagctatatcactttgccaaaaaccaaatttaggagtaccgagtgaacaagatattaatgatgtcattgaagcgattaaaaatgcatcatttcctgttttattagctggtatgagaagttcaagtgcagaagaaacaaatgccattcgcaaattagttgagcgcacgaatttaccagttgtagaaacattccaaggtgcaggtgtaattagtcgtgaattagaaaatcatttcttcggtcgtgtgggcttattccgcaatcaagttggtgatgaattattacgtaaaagtgatttagttgttacaatcggttatgatccaattgaatacgaagctagtaactggaataaagaattagaaacacaaattatcaatattgacgaagttcaagctgaaattactaattatatgcaaccgaaaaaagagttgattggtaatattgctaaaacgattgaaatgatttctgaaaaagtggatgagccatttataaatcaacaacatttagacgaattagaacaattaagaacacatattgatgaagaaactggtattaaagcgacgcatgaagaaggaattctacatccagtggaaattattgaatctatgcaaaaggtattaactgatgatactactgtaacagttgatgttggaagtcactatatttggatggcacgtaatttcagaagttacaatccaagacatttattatttagcaatggtatgcaaacgcttggtgtagcattaccgtgggcaatttcagctgcacttgtgcgccctaatacgcaagttgtgtccgttgctggcgatggtggctttttattttcatcacaagatttagaaacggccgtacgtaaaaatttaaatatcatccagcttatttggaatgatggaaaatataacatggttgaattccaagaagaaatgaaatataaacgttcgtcaggtgtagacttcggtcctgtagattttgtaaaatatgcagaatcatttggcgcgaaaggtttacgagttactaatcaagaagaattagaagcggcaattaaagagggctatgaaacagatggtccagtattaattgatatacctgtaaattacaaagataatatcaaactttcaacaaatatgttacctgacgtatttaactaa

SEQ ID NO: 406215 - DNA, 1344 bp, Staphylococcus aureus
atgaataatagtaattttttaaatgtagagttaataggtactaaaataataacaatggaagacttttataaaatgaaggaagaagaatttttcttaaaatctaagctacctttatatttatattccttcaactatgtagatgaatatacaatgaaattacttgatagaggaagaatatctatattaaatacgaaaacaaataaagattgtatatttgacatttcaaagtatatacatgagaatattatattcagaagagatatatttgaattaaatgatataagagatgatgatttgaagtataaaattaatggttacaatattgaggtatacttaagtggtgaattggagaaaattgtaaaacatttattcgaaaacaagtttgatgtagagtatggtttttatattttatttattaaaccaatatttgaaattgttttttcttctaactatgttaaagaagaattcaatacaaaaatcgaatcatcagaatatagagagagcttagatagttttaatgaaattttaatgaaatatctagaaaatgaaataaatttcaaagaagtatggaaaaaatatattgatgaattatttaaaaaattaaatgttcaaaaattgttaattcataaaaaaatagaaagtttaatatcctcgtatgataaaaaaatatctgatgattgtagtatgtactcaaaagtatttgaacaatataaaaaaaacgttgtattggataaaatatattactctgaagtttataaatatagtgataatttgataaaagtattctctgaagacgtttggaacataatggggtataaaaaatataatgaatattttacaaacagagatgatactacattaaaaattactaatttatatattgggcaatcttttggtacagagggtaatagaaatgtcattgatagaatagggaaaggtcatgaaaaattacaagaaattatgacttatcagccagaaaatagaaagactgtcttaatattttacaagatacagcctgacaatatttatattacaaaccaatatggtaaagaggctgtgtctcgattaaaaagaattttagagcaaagtatacctaataaagaatatattgatttatcagagatatcattaattacattttttaaaccagaatataataaacaacatgtgaatgaggagtttaattctttatcttcttcgaaaataaagaatttagccaaagaaaatgatggtattattatttatttaaattttaaggatgttaattatcaactgataagtgaaggcaatactttttttctgcaaaaccatatttgcattgtgtgttcaataaagatattttaa

SEQ ID NO: 406216 - DNA, 1137 bp, Staphylococcus aureus
atggaaattcatgtttatacgggaccgctttgtggatttaatgaatatattaattctgaagttaaagaatatcaccgcttcatggaattaatcagagaatacaatatcatagtgcgagcaagtgatacatttggaactcatgatgttgatggtatttttgatactgagatagaaaatcttgtgatattttcaaacgactttgcttctgtaacaactcatgttattactaattttataaatatcgttactttaggtagaaatattaagaaaatctatattcagaatcctccaaaaagagtatttcaatcactaaatagttttcacgattctgaaataatagaaataaactatgaatatacaacattaaaaaaagatgatgtaataaatttttataaagagcagatggctggttctaaaataataggtcaaacagacgctaaaaaacaaatgagcatagatttatataaacatacttccttagaaaataataaaccgaccgtaatgctttactatggtccatcaggtgttggaaaaacagaattagccaaagaaatagcaaaaaaatataaaggtaatatcactagaatacaattttctatgatgcagaatgatgaatcttttaattatatctttggagatgaacatgccaaagtatcattgtcaaaagatttagtagatcgtgaaactaatgttgttttaattgatgaatttgataaggtattaccaatctattacaatgttttctatcaaatgtttgatgaaggtattattgaagatgccaattataaagtagacgtttcaaattgtattttcattctaacatctaattttaatagtattgaagaagcaatagttaatattggagaaccggtattttctagaatagattcctgtattaaatttttatatttaacacaggaagaaaagcagaaagtaatagaaaataaattaaatgaaatactatcatctctaaatgaaaaagaaaaaagaatagttaccgcatataacttgttagagaaatataaagagacagaaatagatatcgataacattaggtatttaaagaaaataataacaaatgatatttatacaataatttttgaagatgaattatttaatacggatattatagattaa

SEQ ID NO: 406217 - DNA, 792 bp, Staphylococcus aureus
ttgacaaatactatcaaaaaaataatttattttgatgaactatcagcaatggatttattacagatagagaagaaaggtaaccttactaaaacagttcagttgatgcatgatgaaaaaggtagtgcaagtggtgaatctaaagtgaacatggaatttggtaagcaaagcgctgtaaaacaaatttttgattctttacttgggatgtcagcgagtgcttcggctagtgcaggtataaatggaaatataactggagagcgagtagccaaaacaattttagagaatacattaatatatgattttttggatacagtagagtttagaaagaaaaaaactattattgatatttcagaggggtttaaactaaatattcaacaagatacgatgacatatttcgcgactattacccccatagcaagtatgtttgaaggatctaaacatctagacgaggaggagctatcatttgatgtttcaaaaatgaatgaagcgattagaagtattaaaggctattttgaattaataggaacaagagggaatgaaaacagagtttttagatttaatatagaatcttttaaaaataactatagaatacaagatttaaaatttatgaatttaacactctactcagtacttgttggtgaaataagcaaagaaaatctaaattacgataaagagtttgatctaaatcaaggtgccaaacctagtggaattggaaagtttaagggaattagatcagaagcaactaaagaagataaatatcaagtgtatgatgttattcttgcaggagtgaaataa

SEQ ID NO: 406218 - DNA, 294 bp, Staphylococcus aureus
atgaagcaccctaaaaagggcgtgttggatacagtaatatacaataccgatattacagttactaacattccaaataaagtatataattatattgtgaatggcaagcctgctattgaatggattatagatcagtacaacgtaagcatcgacaagaaatctggaatattagatgatcctaatgaatttagtgaagatccgaattacattttaaatctgcttttatcagttattactgtaagtatgaaaactcttggattaatagataaattaccagattttgaagtattagattaa

SEQ ID NO: 406219 - DNA, 1098 bp, Staphylococcus aureus
ttgagaggcgaccaacgaacacagggtgaaaaatcaagaaaagaaggtggaaaaatatttggatcaggaagtagagcaccgatagctatatctattttagttaaagatggaagttacaatcacgatatctattataatgacattggtgaatatttaactagagagcaaaaattagatactttaatgaaacatcaatcaattgtgaatttgaaaagtttgaatgttttacccgataaaaacaatgattggattaatcaacgagacataaactatgagaattatttaccaatgtatgattccaaggatattgaaaattctatatatttagatcaatttaatggagtaaattcagcaagagataattgggtaacaaatttttcgaatgaaaaagcattagtaaatgcaaaattacttgtagataactataattctgaaatagatagattaattgatatcttagattcaagagaacgtataaatttagtgaacaaagatgaaacatttattagttggacacgaggacttacccaaaaattttctaaaggaaaaaatatttcaattaatccagagagaattgttaaatttatgcatagaccatttacaaaaaaatggatagtgtacgacaaaaatattatggaaatgccaagtagatattataatataatggagaatactggacaggtgatttatatacaaggacagggaatgaataaagaattctcggctatgatcacgaacatattacctaatttccaatttattggtaatggcaaaggctttgctacatacaaaggtaaagatagtttgaggcttgtagataatatttctaattcttttaaaaagaaaataaatcttaattcagaagagatagtatattatatatatgcaattttgcatcataaatattatgtgaacaaatattcaagtgatttgagtaaaggttttccgcgaataccgatattaaaggatgtatatggatttgttgaaattggtagggagttagtggaattacatttaaattatgaaaaacaactcaattgggatggtgtagaaataatttataataatatgaatccgaattataaagttgaaaaatga

SEQ ID NO: 406220 - DNA, 399 bp, Staphylococcus aureus
atgactttggcacaagttgaatatagaggcacaggccgtcgtaaaaactcagtagcacgtgtacgtttagtaccaggtgaaggtaacatcacagttaataaccgtgacgtacgcgaatacttaccattcgaatcattaattttagacttaaaccaaccatttgatgtaactgaaactaaaggtaactatgatgttttagttaacgttcatggtggtggtttcactggacaagctcaagctatccgtcacggaatcgctcgtgcattattagaagcagatcctgaatacagaggttctttaaaacgcgctggattacttactcgtgacccacgtatgaaagaacgtaaaaaaccaggtcttaaagcagctcgtcgttcacctcaattctcaaaacgttaa

SEQ ID NO: 406221 - DNA, 438 bp, Staphylococcus aureus
atgcgtcaaacatttatggcaaatgaatcaaacattgagcgcaaatggtatgttatcgatgctgaaggccaaacattaggtcgtttatcatcagaagtagcatctatcttacgcggtaaaaataaagtaacttacacaccacacgttgatactggtgattatgtaatcgttattaatgcatcaaaaatcgaatttactggtaacaaagaaactgacaaagtttactaccgtcactcaaatcacccaggtggtatcaaatcaatcactgctggtgaattaagaagaactaacccagaacgtttaattgaaaactcaattaaaggtatgttaccaagcactcgtttaggcgaaaaacaaggtaaaaaattatttgtatatggtggcgctgaacatccacacgctgcacaacaaccagaaaactacgaattacgtggttaa

SEQ ID NO: 406222 - DNA, 804 bp, Staphylococcus aureus
atgcgtatattagtagaaattgcgtatcaaggaaataattttctaggttttcaaattcaacaaaatggtcgaacggtacagcaacaatttgaaaagctattacaacgcatgcataaaagacatgtgagaatccatccttcaagtaggactgatagaggtgtacatgcgatacagcaatactttcatttcgacacagagctgaatatacctatgtcacaatggcaatatgcaatgaaccgaacgttacctgatgatatttatgtcaacaatgtagttacagtcgatgacgattttcattgtcgttatgattgtgtaggtaaacgttatcgctacaaagtatatcaagcacaacaccgcgatccatttcaaagtggtttgaaaacatttattcctgaaacgttggatttaggtaaaatgaacagagcggcgcaacaattcataggtacacatgattttacgggattttgttcgcaaaaaactgaagtagaaagcaaagttagaacattataccaaagtgaaatcgtaaagacagatgatggctttgattatattgtcactggatctggatttttatataacatggtgcgtgtcttagttgcatttttaatagaagttggaaaagggcgacatgaagtatctgatgtaccaaaacttcttgaatcaaagaatcgtaagaatgtacctttcactgcaccggctgaaggattatatttagagaaaatttatttagatgaaaatgagttattaaaagactttggtaacgatatcaaaatacatcgtaaaaaatcattacaaaatgactga

SEQ ID NO: 406223 - DNA, 807 bp, Staphylococcus aureus
atgaaaaataaattgattatagggcgatatttaccaattaattcttttgttcatcatcttgatccaagagcaaagttaatgtttgtttttctttttattatattaatatttttctgtcattcaccattaacatatctttgggtgtttgcacttatcttattcattatgagattagcaaaaattcaattatggttcctaatcaaaggtttaacaccaatatttttctttttaatcttcacattaatgatgcatatatttttaactaaaggtggatatgtattagttgaatggcatggcatcacgattgaaactaatggtattttagaagggctatatatatcactgcgtttaattgggattgtaatgattgcaacaattatgacactatctacaagtccaattgatttaacagatgcgtttgaaagattacttgcaccactaaagatgtttaaattaccagttcatcaattaagtatgataatgtccattgcgttacgattcatcccgacgttaatggatgagttagataaaatcattttggcgcaaaagtcgcgtggttctgaaataagttcagggaacattgcaacacgtattaaatcatttattccattactagtgccactattcatctcagctttccaacgcgccgaagaattagcggtcgcaatggaagttaggggttatgatgccaatgttaagagaacgagctacagacagcttaaatggcaattgagagatacgatatctttaaccatgattatcccaattgcaattattttattcgtattaaaatattcaggagtgtaa

SEQ ID NO: 406224 - DNA, 861 bp, Staphylococcus aureus
atgactatacggtttgacaatgtaagttatacctatcaaaaagggacaccatatcagcatcaagctattcatgatgttaatacagaatttgaacaaggtaaatattacgccatcgttggacaaacgggtagtggtaaatcaacgttgatacaaaatattaatgcgctgttaaagccgactactgggacagttacagttgatgacattactattacacataagaccaaagataaatatattagacctgtaagaaaaagaattggaatggtatttcaatttcccgaatctcaattatttgaggacacagtagagcgtgaaatgatatttggacctaaaaactttaaaatgaatttagatgaagccaaaaactatgcccatcgtctgttgatggatttaggcttttcaagagatgtaatgtcacaatcaccatttcaaatgtcaggtggacaaatgcgtaaaatagcgattgtatcgatattggcaatgaatcctgatattatcgtggttgatgaacctacagcaggacttgatccacaaagtaaacgacaagtaatgagattactaaagtcactacaaacagatgaaaataaggcaattatcctaatttcacatgatatgaatgaagtcgcgcgttatgcagatgaagtcatcgttatgaaagaaggtagtatagtgtcgcaaacatcaccaaaagagctcttcaaagataaaaaaaaattggcggattggcatattggtttgccagaaattgttcagttacaatatgactttgaacaaaaatatcaaacaaaattaaaagatattgccttaactgaagaagcatttgtaagcttgtataaggagtggcaacatgaaaaataa

SEQ ID NO: 406225 - DNA, 810 bp, Staphylococcus aureus
gtggaggataagaattcagttattgtatttaaaaatgtttcatttcaatatcaaagtgatgcatccttcacattgaaagatgtttcttttaatatacctaaaggtcagtggacatctattgttggtcataacggttctggaaaatctacaattgccaagttaatgattggcatagagaaagttaaatctggagaaattttttataataatcaagctataactgatgataattttgaaaagttaagaaaagacataggaattgtatttcagaatccggataatcaatttgttggttcaattgtaaaatacgatgtggcatttggactcgaaaatcatgcggttccatatgacgaaatgcatagaagagtcagcgaagcacttaaacaagttgatatgttagaacgtgcagattatgaacctaatgcattatcggggggacagaagcagcgtgtggctatagcaagtgtattagcacttaacccctctgtcattatattagatgaggcgacttctatgttagatcctgatgcacgtcaaaatttattggatttagtgagaaaagttaaatcagaacataatattacaatcatttctattacgcatgatttatctgaggcgatggaagcagatcatgttatcgttatgaataaagggactgtctataaagaaggcacagcgactgaaattttcgacaatgcagaagagttaacaagaataggtctagatttgccattcccaatcaaaataaatcaaatgctgggacaccaaacatcattcttaacttatgaagggctggtggatcaactatga

SEQ ID NO: 406226 - DNA, 369 bp, Staphylococcus aureus
atgggttacagaaaattaggtcgtacttctgatcaacgtaaagctatgttacgtgacttagctacatcacttattattagtgaacgtattgaaactacagaagctcgtgcaaaagaagttcgcagtgttgttgagaaattaatcactttaggtaaaaaaggagatttagcttctcgtcgtaatgcagctaaaactttacgtaatgttgaaatcttaaacgaagatgaaactacacaaactgcacttcaaaaattatttggtgaaatcgcagagcgttacacagaacgtcaaggtggttacactcgtatccttaaacaaggccctcgtcgcggtgacggtgctgaatcagtaattatcgaattagtataa

SEQ ID NO: 406227 - DNA, 945 bp, Staphylococcus aureus
atgatagaaatcgaaaaacctagaattgagacaattgaaattagtgaagatgctaaattcggtaagttcgttgttgaaccactagaacgtggctacggtaatacactaggaaactccttacgtcgtatcctactatcttcattaccaggtgcagccgttaagtatattgaaattgagggagttttacatgaattctcagcagtagacaatgtagttgaagatgtttctacaattattatgaacattaaacaattagcattgaaaatttactctgaagaagataaaactttagaaattgatgtacgtgatgaaggcgaagtaacagcaagcgacattacacatgatagtgatgttgaaattttaaacccagagcttaaaattgcaacagtatctaaaggtggtcacttaaaaattcgtctagttgctaacaagggtagaggttacgcattagcagaacaaaataatactagtgatttaccaattggtgtaatccctgttgattcattgtattcacctgttgaacgtgtgaactatactgttgaaaatacacgtgtaggtcaaagcagtgattttgataaattaacattggatgtttggactaatggttcaatcacaccacaagaatcagtttcattagcagcaaaaataatgactgaacacttgaatatcttcgttggtcttactgatgaagcgcaaaacgctgaaatcatgattgaaaaagaagaagatcaaaaagaaaaagtattagaaatgtctattgaagaattagacttatctgtacgttcatataactgcttaaaacgcgcaggaatcaattctgttcaagagttagctgacaaatctgaagctgacatgatgaaagtgcgtaatttaggtcgtaaatctttagaagaagttaaatacaaattagaagatttaggattaggattaagaaaagaagattga

SEQ ID NO: 406228 - DNA, 390 bp, Staphylococcus aureus
atggcacgtaaacaagtatctcgtaaacgtagagtgaaaaagaatattgaaaatggtgtagcacacatccgttcaacattcaacaacactattgtaactatcactgatgagttcggtaatgctttatcatggtcatcagctggtgcattaggattcaaaggatctaaaaaatcaacaccatttgcagcacaaatggcttctgaaactgcatctaaatcagctatggagcatggtttaaaaacagttgaagtaacagttaaaggacctggtccaggtcgtgaatcagctattcgtgcattacaatctgcaggtttagaagtaactgcgatcagagacgttactccagtacctcataacggttgtcgtccaccaaaacgtcgtcgtgtataa

SEQ ID NO: 406229 - DNA, 366 bp, Staphylococcus aureus
atggcacgtattgcaggagtagatattccacgtgaaaaacgcgtagttatctcattaacttatatatacggtatcggtacgtcaactgctcaaaaaattcttgaagaagctaacgtatcagctgatactcgtgtgaaagatttaactgatgacgaattaggtcgcatccgtgaagttgtagacggttataaagtcgaaggtgacttacgtcgtgaaactaacttaaatatcaaacgtttaatggaaatttcatcataccgtggtatccgtcaccgtcgtggtttaccagttcgtggtcaaaaaacgaaaaacaacgcgcgtactcgtaaaggaccagttaaaacggtagctaacaagaaaaaataa

SEQ ID NO: 406230 - DNA, 219 bp, Staphylococcus aureus
atggctaaacaagatgtaattgaattagaaggtactgtattagatactttaccgaacgcaatgtttaaagtagaattagaaaatggtcatgagattttagctcacgtaagtggtaaaatcagaatgaattacattcgtattctacctggcgacaaagtaactgttgagatgtctccgtacgatttaacacgcggaagaattacttatcgttataaataa

SEQ ID NO: 406231 - DNA, 648 bp, Staphylococcus aureus
atgaatatcattttgatgggtttacctggcgcaggtaaaggaactcaagcaagtgaaattgtcaagaaattcccaataccccacatttcaactggtgacatgttcagaaaagctataaaagaagaaactgaattaggtaaagaagctaagtcttatatggaccgtggcgaattagttcctgatgaagtgactgtaggtatcgttaaggaaagaatttctgaagacgatgcaaaaaaaggctttttattagatggcttcccaagaacaatcgagcaagctgaggcattaaataatattatgtctgagcttgacagaaacattgatgctgtcatcaatatcgaagttccggaagaagaattaatgaaccgtcttacaggtcgtcgaatctgtgagtcatgtggtacaacgtatcatcttgtatttaatcctccgaaggtcgaaggtatttgtgatatcgatggtggtaaattgtatcaacgagaagatgataatcctgaaacggtagctaatcgtttgagtgttaatattaaacaatctaagcctattttagatttctatgatcaaaaaggtgtattgaaaaatattgatggttcaaaagatattagcgacgttaccaaagatgtcattgatattttagatcatttgtaa

SEQ ID NO: 406232 - DNA, 1293 bp, Staphylococcus aureus
atgattcaaacccttgtgaacttctttagaacaaaagaggttcgtaacaagattttcttcacactagcaatgttagtaatttttaaaatagggacttatataccagctccaggagtaaatcctgcagcttttgataatccccaaggttctcaaggtgccactgagttattaaatacttttggtggcggagccttgaaacgattttctatttttgcaatgggtattgtaccctacatcactgcatcaatcgtaatgcaattattacaaatggatattgtccctaaattctcagaatgggcaaaacaaggtgaagtaggtagaagaaagttaaataacgttactcgttatttagcaatttctttagcatttatccaatctataggtatggcattccaatttaataattatctcaaaggtgcgctgattatcaatcagtcaattatgagttatttattaatagcactagttttgacagcaggaactgctttcttaatatggcttggtgatcaaatcactcagttcggtgttggtaatggtatttctattatcatatttgcgggtattttatcaacgttgccagccagtctaattcaatttggacaaactgcgttcgttgggcaagaagatacatcattagcatggttgaaagtattaggacttttagtgtcactgatactattaactgtaggtgctatttatgtacttgaagccgttcgtaaaattccgattcaatatgctaagaaacaaactgctcaaagattaggttcacaggcaacttatctacctttaaaagtgaactcagccggtgttattcctgtaatctttgcaatggcgttcttcttactgcctagaacattaacgttgttctatccagataaagaatgggcacaaaacattgcgaatgctgcaaatccttcaagtaatgttggtatggttgtatatattgtactaattatactattcacatacttctatgcatttgtacaagttaatccggaaaaaatggctgataaccttaagaaacaaggtagctatgttccaggtattagacctggtgaacaaaccaaaaaatatattactaaagttttatatcgtttaacttttgtaggttctatcttcttagccgttatttcaattctaccgatattagcaactaagtttatgggattaccacaatcaattcagattggtggtacaagtttacttatcgttattggtgtagcgattgaaacaatgaaatctttagaagctcaagtatctcaaaaagaatataaaggctttggtggtagataa

SEQ ID NO: 406233 - DNA, 441 bp, Staphylococcus aureus
atgaaattacatgagttaaaaccggcagaaggttcacgtaaagaacgcaatcgtgttggacgtggtgttgcgacaggtaacggtaaaacaagtggtcgcggacacaaaggtcaaaaagctcgttcaggcggtggtgtaagaccaggatttgaaggtggtcaattaccattattccgtcgtttaccaaaacgtggttttactaacataaatcgtaaagaatatgctattgttaacttagaccaacttaataaatttgaagatggtactgaagtaactccagctttattagtagaatctggtgttgttaagaatgaaaaatctggtatcaaaatactaggtaatggttcacttgataagaaattgacagtgaaagctcataaattctcagcttcagcagcagaagctattgatgctaaaggtggagcacacgaggtgatctaa

SEQ ID NO: 406234 - DNA, 180 bp, Staphylococcus aureus
atggctaaattacaaattaccctcactcgtagtgttattggtcgtcctgaaacacaacgtaaaactgttgaagctttaggtcttaaaaagactaacagttcagtagttgttgaagataaccctgctattcgtgggcaaatcaacaaagttaagcacttagtaacagtagaagaaaaataa

SEQ ID NO: 406235 - DNA, 501 bp, Staphylococcus aureus
atggctcgtagagaagaagagacgaaagaatttgaagaacgcgttgttacaatcaaccgtgtagcaaaagttgtaaaaggtggtcgtcgtttccgtttcactgcattagttgtagttggagacaaaaatggtcgtgtaggtttcggtactggtaaagctcaagaggtaccagaagcaatcaaaaaagctgttgaagcagctaaaaaagatttagtagttgttccacgtgttgaaggtacaactccacacacaattactggccgttacggttcaggaagcgtatttatgaaaccggctgcacctggtacaggagttatcgctggtggtcctgttcgtgccgtacttgaattagcaggtatcactgatatcttaagtaaatcattaggatcaaacacaccaatcaacatggttcgtgctacaatcgatggtttacaaaaccttaaaaatgctgaagatgttgcgaaattacgtggcaaaacagtagaagaattatacaattaa

SEQ ID NO: 406236 - DNA, 360 bp, Staphylococcus aureus
atgatcagtaaaattgataaaaataaagtgcgtttaaaaagacatgctcgtgttcgtactaacttaacaggtacagctgaaaagccacgtttaaacgtatatcgttcaaacaagcatatctacgctcaaattattgatgataataaaggcgtaacattagctcaagcttcttcaaaagacagcgacattgctactacagcaactaaagttgaattagcaactaaagtcggtgaagcaattgctaaaaaagctgctgacaaaggcattaaagaaatcgtatttgaccgtggaggatatttatatcacggacgtgttaaagcattagctgaagcagcaagagaaagcggattagaattttaa

SEQ ID NO: 406237 - DNA, 537 bp, Staphylococcus aureus
atgagtcgtgttggtaagaaaattattgacatccctagtgacgtaacagtaacttttgatggaaatcatgtaactgttaaaggtcctaaaggtgaattatcaagaactttaaatgaaagaatgacattcaaacaagaagaaaacacaattgaagttgtaagaccatctgattctaaagaagatagaacaaaccatggtacaactcgtgctttattaaacaatatggtacaaggtgtttctcaaggatacgtaaaagtacttgaacttgttggtgtaggttaccgtgctcaaatgcaaggtaaagacttaatccttaacgttggttattctcacccagtagaaattaaagctgaagaaaacattactttctcagttgagaaaaacacagtcgttaaagttgaaggtatttcaaaagaacaagttggagcattagcatctaacatccgttcagtaagacctccagagccttacaaaggtaaaggtattcgttaccaaggtgaatacgttcgccgtaaagaaggtaaaactggtaaataa

SEQ ID NO: 406238 - DNA, 399 bp, Staphylococcus aureus
atgacaatgacagatccaatcgcagatatgcttactcgtgtaagaaacgcaaacatggtgcgtcacgagaagttagaattacctgcatcaaatattaaaaaagaaattgctgaaatcttaaagagtgaaggtttcattaaaaatgttgaatacgtagaagatgataaacaaggtgtacttcgtttattcttaaaatatggtcaaaacgatgagcgtgttatcacaggattaaaacgtatttcaaaaccaggtttacgtgtttatgcaaaagctagcgaaatgcctaaagtattaaatggtttaggtattgcattagtatcaacttctgaaggtgtaatcactgacaaagaagcaagaaaacgtaatgttggtggagaaattatcgcatacgtttggtaa

SEQ ID NO: 406239 - DNA, 186 bp, Staphylococcus aureus
gtggctaaaacttcaatggttgctaagcaacaaaaaaaacaaaaatatgcagttcgtgaatacactcgttgtgaacgttgtggccgtccacattctgtatatcgtaaatttaaattatgccgtatttgtttccgtgaattagcttacaaaggccaaatccctggcgttcgtaaagctagctggtaa

SEQ ID NO: 406240 - DNA, 540 bp, Staphylococcus aureus
ttgaaccgtttaaaagaaaagtttaacactgaagttactgaaaacttaatgaaaaaattcaattatagttcagtaatggaagtaccaaaaatagataaaatcgttgtgaacatgggtgtaggtgacgcagtacaaaattctaaagtattagacaatgctgttgaagaattagaattgatcactggtcaaaaaccattagtaactaaagctaaaaaatcaatcgcgactttccgtttacgtgaaggtatgccaatcggtgcgaaagtaacacttcgcggtgaaagaatgtatgaattcttagacaaattaatttcagtatcattaccacgtgtacgtgacttccaaggtgtttctaaaaaagcatttgacggacgcggtaactacactttaggtgttaaagaacaattaattttcccagaaatcgactatgataaagtaagtaaagttagaggaatggatattgttatcgtaacgactgctaacactgatgaagaagctcgtgaattgttagctaacttcggtatgccattccgtaaataa

SEQ ID NO: 406241 - DNA, 318 bp, Staphylococcus aureus
atgcatatcaaaaaaggtgacaacgttaaagttatcgcaggtaaagacaaaggtaaagaaggtaaagtaattgctactctacctaaaaaagaccgtgtcgttgtggaaggtgttaacattatgaaaaaacaccaaaaaccaactcaattaaatcctgaaggtggaatcttagaaacagaggcagcaatccatgtttctaatgtacaattattggaccctaaaacaaacgaaccaactcgtgtaggttacaaatttgttgatggtaaaaaagttcgtatcgctaaaaaatctggcgaagaaattaaatctaataattaa

SEQ ID NO: 406242 - DNA, 369 bp, Staphylococcus aureus
atgatccaacaagaaacacgcttgaaagtagcagacaactctggtgctcgtgaagttcttacaatcaaagtattaggtggatctggtcgtaaaacagcaaacatcggcgatgttatcgtatgtactgttaaaaatgcaacaccaggtggcgttgttaaaaaaggtgacgttgtcaaagctgtaatcgtacgtactaagtcaggtgttcgtcgtaatgacggttcatacatcaaatttgatgaaaatgcatgtgttatcatccgtgatgacaaaggcccacgtggtactcgtatcttcggacctgttgctcgtgaattacgtgaaggtaacttcatgaaaatcgtatcattagcaccagaagtactttaa

SEQ ID NO: 406243 - DNA, 264 bp, Staphylococcus aureus
gtgagcgaaagaaacgatcgtaaagtttatgtaggtaaagttgtttcagacaaaatggacaagactattacagtacttgttgaaacttacaaaacacacaaattatacggtaaacgagtaaaatactctaaaaaatacaaaactcatgatgaaaacaattcagctaaattaggagacattgttaaaattcaagaaactcgtcctttatcagcaacaaaacgttttcgtttagtagagattgttgaagagtcagtaattatttaa

SEQ ID NO: 406244 - DNA, 210 bp, Staphylococcus aureus
atgaaagctaaggaaattagagacttaaccacttcagaaatcgaagaacaaatcaaatcttcaaaagaagagctttttaacctacgctttcagttagctacaggtcaattagaagaaactgcacgtattcgtacagtaagaaaaacgattgcacgtctaaaaactgttgctcgtgaaagagaaattgaacaaagtaaggctaatcaataa

SEQ ID NO: 406245 - DNA, 435 bp, Staphylococcus aureus
atgttactaccaaaacgtgtaaaatatcgtcgtcaacatcgtcctaaaacaactggtcgttctaaaggcggtaactacgtaacatttggtgagtttggtttacaagctacaacaacgtcttggatcacatctcgtcaaatcgaatctgctcgtatagcaatgacacgttacatgaaacgtggcgggaaagtttggattaaaatcttcccacatacaccatatactaaaaaacctttagaagtacgtatgggtgctggtaaaggtgcggttgaaggctggatcgcagttgttaaaccaggtagaattttattcgaagttgctggcgtttctgaagaagttgcgcgtgaagcactacgtttagcaagtcacaaacttccagtaaaaactaagtttgtaaaacgtgaggaattgggtggtgaaacaaatgaaagctaa

SEQ ID NO: 406246 - DNA, 654 bp, Staphylococcus aureus
gtgggtcaaaaaattaatccaatcggacttcgtgttggtattatccgtgattgggaagctaaatggtatgctgaaaaagacttcgcttcacttttacacgaagatttaaaaatccgtaaatttattgataatgaattaaaagaagcatcagtttctcacgtagagattgaacgtgctgcaaaccgtatcaacattgcaattcatactggtaaacctggtatggtaattggtaaaggcggttcagaaatcgaaaaattacgcaacaaattaaatgcgttaactgataaaaaagtacacatcaacgtaattgaaatcaaaaaagttgatcttgacgctcgtttagtagctgaaaacatcgcacgtcaattagaaaaccgtgcttcattccgtcgtgtacaaaaacaagcaatcactagagctatgaaacttggtgctaaaggtatcaaaactcaagtatctggtcgtttaggcggagctgacatcgctcgtgctgaacaatattcagaaggaactgttccacttcatacgttacgtgctgacatcgattatgcacacgctgaagctgacactacttacggtaaattaggcgttaaagtatggatttatcgtggagaagttcttcctactaagaacactagtggaggaggaaaataa

SEQ ID NO: 406247 - DNA, 354 bp, Staphylococcus aureus
atggaagcaaaagcggttgctagaacaataagaatcgcacctcgtaaagtaagactagttcttgacttaatcagaggtaaaaatgctgctgaagctattgcaattttaaaattaacaaacaaagcttcatcaccagtaattgaaaaagtattaatgtccgctttagctaatgctgaacataactatgacatgaacacagatgaattagtagttaaagaagcatatgctaacgaaggaccaacattaaaacgtttccgtccacgtgcgcaaggtcgtgcaagtgcgattaacaaacgtacaagccacattacaatcgtcgtaagtgacggtaaagaagaagctaaagaagcttaa

SEQ ID NO: 406248 - DNA, 279 bp, Staphylococcus aureus
atggctcgtagtattaaaaaaggacctttcgtcgatgagcatttaatgaaaaaagttgaagctcaagaaggaagcgaaaagaaacaagtaatcaaaacatggtcacgtcgttctacaattttccctaatttcatcggacatacttttgcagtatacgacggacgtaaacacgtacctgtatatgtaactgaagatatggtaggtcataaattaggtgagtttgctcctactcgtacattcaaaggacacgttgcagacgacaagaaaacaagaagataa

SEQ ID NO: 406249 - DNA, 834 bp, Staphylococcus aureus
atggctattaaaaagtataagccaataacaaatggtcgtcgtaatatgacttcgttagatttcgcagaaatcacgaaaactacacctgaaaagtcattattaaaaccgctaccgaaaaaagcgggacgtaacaaccaaggtaaattgactgtaagacaccatggtggtggacacaaacgtcaataccgtgttatcgatttcaaacgtaacaaagatggtatcaatgcaaaagttgattctattcaatatgatccaaaccgctcagcaaacatcgctttagttgtatatgcagacggtgaaaaacgatatatcattgctcctaaaggattagaagtaggtcaaatcgttgaaagtggtgctgaagctgacatcaaagttggtaacgcattaccattacaaaacattccggttggtacagtagtacacaacatcgagcttaaacctggtaaaggtggacaaatcgctcgttcagctggtgcaagtgctcaagtacttggtaaagaaggtaaatacgtattaatcagattaagatctggtgaagttcgtatgatcttatctacttgccgtgctacaatcggtcaagttggtaacctacaacacgaattagttaacgttggtaaagccggacgttcaagatggaaaggtatccgtccaacagttcgtggttctgtaatgaaccctaacgatcacccacacggtggtggtgaaggtcgtgctcctatcggtagaccatctccaatgtcaccatggggtaaacctacgcttggtaagaaaactcgtcgtggtaaaaaatcatcagacaaacttatcgttcgtggacgtaagaaaaaataa

SEQ ID NO: 406250 - DNA, 276 bp, Staphylococcus aureus
atggaagcaagagatattcttaagcgccccgtaatcactgagaaatcttctgaagcaatggctgaagacaaatacactttcgacgttgatactcgtgttaacaaaacacaagtaaaaatggcagttgaagaaatcttcaacgtaaaagttgcaagtgttaatatcatgaattacaaacctaagaaaaaacgtatgggccgttaccaaggctatacaaacaaaagaagaaaagcgattgtaactcttaaagaaggatcaatcgacttatttaactaa

SEQ ID NO: 406251 - DNA, 624 bp, Staphylococcus aureus
atggctaattatgatgttttaaaattagacggaactaaatcaggttcaatcgaattaagcgatgcagtattcggtattgagccaaataatagcgttttattcgaagctattaatttacaacgtgcttcattacgtcaaggtacgcatgctgttaagaatcgttcagcagtaagcggtggcggacgtaaaccatggaagcaaaaaggaacaggtcgtgctcgtcaaggtacaatccgtgctccacaatggcgtggcggtggtatcgtattcggaccaactccaagaagttatgcatacaaaatgcctaagaaaatgcgtcgtttagctttacgctcagcattatctttcaaagctcaagagaatggcttaactgtagttgacgcattcaacttcgaagctccaaaaactaaagaattcaaaaatgtattatctacattagaacaacctaaaaaagtattagtagttactgaaaacgaagatgtaaatgttgaattatcagcacgcaacatccctggcgttcaagtgacaactgctcaaggtttaaatgttttagatatcactaatgctgacagcttagtaattactgaagctgctgctaaaaaagttgaggaggtgctcggataa

SEQ ID NO: 406252 - DNA, 663 bp, Staphylococcus aureus
atgaccaaaggaatcttaggaagaaaaattgggatgacacaagtattcggagaaaacggtgaattaatccctgtaacagtagtagaagctaaagaaaatgttgtattacaaaagaaaactgtagaagttgatggatacaacgcaatccaagttggatttgaagacaaaaaagcatacaaaaaagatgcaaaatctaataaatatgctaataaaccagctgaaggtcacgctaaaaaagctgacgcagcacctaagcgcttcattcgtgaattccgcaatgtagacgtggatgcttacgaagtaggtcaagaagtctcagtagatacttttgtagctggcgacgttattgacgtaacaggcgtatcaaaaggtaaaggtttccaaggtgcaattaaacgccacggacaatctcgtggacctatgtcacacggttctcatttccacagagcaccaggttctgtaggtatggcttcagatgcttctagagtatttaaaggccaaaaaatgccaggacgtatgggtggaaacactgtaactgttcaaaacttagaagtagttcaagttgacacagaaaacaaagttatcttagtaaaaggtaacgtacctggacctaaaaaaggtttagtagaaatcagaacttcaattaaaaaaggtaataaataa

SEQ ID NO: 406253 - DNA, 309 bp, Staphylococcus aureus
atggcaaaacaaaaaatcagaatcagattaaaagcttatgatcaccgcgtaattgatcaatcagcagagaagattgtagaaacagcgaaacgttctggtgcagatgtttctggaccaattccgttaccaactgagaaatcagtttacacaatcatccgtgccgtgcataagtataaagattcacgtgaacaattcgaacaacgtacacacaaacgtttaatcgatattgtaaacccaacaccaaaaacagttgacgctttaatgggcttaaacttaccatctggtgtagacatcgaaatcaaattataa

SEQ ID NO: 406254 - DNA, 390 bp, Staphylococcus aureus
atgaaaaatggaccaaaattatctttagcacttataggtatctttttaatactttgtgagtttttctatggcattccttttttaggtgcaacgtttattttaagttttggatggcagcctttactctttaatgcattactttatctaattcttactattatattattagtgaatagacaaaatgcgattagacctatagcgattattccaatatttggtatagtaggtagttttttagctattatccccttcttaggaattttgattcattggattttatttttcctaatgattctatttgtcctagttgtattatcagcgccaacctatatacctaataaaaatgctcgtgtcatttacatacaatacaaagatggacatagagaataa

SEQ ID NO: 406255 - DNA, 1335 bp, Staphylococcus aureus
gtgaaaaactatttccagttcgataaatatggaacaaactttaaaagagaaatcttaggcggtatcacaactttcttatctatggcctatattttagcagttaacccgcaagttttaagtttagcaggtgttaaaggcgtatcagaagatatgaaaatggaccaaggtgccatttttgtagcgactgcattagcagcatttgtaggctcgctattcatggggctaatagctaaatatccaattgcgttagcaccaggtatgggattaaatgcattctttgcatttactgttgtgttaaccatgggtattccttggcaagttggtttaacaggcgttttattctcaggtatattctttgcgatattaaccgtcacagggtttagggaagttattattaatgcaattccttatcaaatgaagatggctgtttcagcaggtataggattattcattacatttgtaggtttacaaagttcgggtattatagttaaaaatgaatctacattagtaacattgggacatttaactgatccaccagtacttttggcgatattcggtatcgttattacagttattttatatgcaattaaattgccgggttctatctttatcggtatgatcatcacagcaatcgttggtatgttcactggattgattcaaatgccatctggtattgtgggtaagattccaagtattgaaccaacgttcggtgctgcatttgaagcgtttaaagacccaagtcaattattaacgatacagttcttaattgttattttaacgttcttatttattgatttctttgatacagctggtacattagtagctgttgctactcaagcaggtattatgaaagataataaattaccaagagctggtagagcattgttctcagattctttagctacgattgtaggatcagtttttggaacaactacaacaacttcttatatcgaatcaacttcaggtgttgctgtaggtgctagaacaggatttgctagtatcgtaacaggttgttgtttcctattagcgctgttctttagtccgttaatcgctgttgtaacaagtgcagttacgacaccagccttagtggtggtaggtgtattaatggctgcaaactttgctgagataaactggaaaagttttgaagttgcagtgccagccttcattacaatcattatgatgcctttatcatattcaattgcaactggtattgcgtgtggatttattttctatccaattacaatgcttatctctaaaaaacataaagaagtacatccgataatgtatgtattaatggtactattcattctgtacttcatatttgttcatggttaa

SEQ ID NO: 406256 - DNA, 2136 bp, Staphylococcus aureus
atgaaatctttaatattagctgaaaaaccatcagtcgcaagagatattgctgatgctttacaaataaatcagaagcgtaatggttactttgaaaataaccaatatattgtcacgtgggcgttaggtcatctagtgacaaatgcgacacctgaacaatacgataaaaatttaaaggaatggcgattagaagaccttccaattatacctaaatatatgaaaactgttgttattggtaaaacaagcaaacaatttaaaacagtaaaagcgttaattttagataataaagtgaaagatattattattgcaacagatgctggacgagaaggtgaactagttgcaagattgattttggataaagttggtaacaaaaagccaatccgtcgattatggattagctcagttactaaaaaagctattcaacaaggttttaaaaatttaaaagacggtcgtcaatataacgatttgtattatgcagcgttagcgagaagtgaggcagattggattgttgggattaatgcaacgcgtgcactaacaacaaagtatgatgcacagctatccctgggacgtgttcagacaccaacgattcaattagtaaatacacgacaacaagagattaatcagttcaaaccacaacaatactttacattatcattaacggtaaaagggtttgattttcagctagaatcaaatcagcgatataccaataaagaaactttagaacagatggttaataatttgaaaaatgtcgatggtaagattaaatctgttgctactaaacataagaagtcgtatccgcaatcactgtacaatttaacagatttacaacaagatatgtatagacgttataaaattggacctaaagaaacattgaatacacttcaaagcttatatgagagacataaagtcgtaacctatccaagaacagattcaaactatttaacaactgatatggtagatactatgaaagaacgtattcaggcgacgatggcaacagcatataaagaccaagcacgcccattaatgtctaaaacattttcatcaaaaatgtcgatatttaataatcaaaaagtatctgatcaccatgcaattattcctacagaagtgagacctgtcatgtcagacttaagtaatagagaattaaagttatacgatatgattgtcgagcgttttttagaagctttaatgcctccgcacgagtatgacgcgataactgtaactttagaggttgcagggcacacatttgttttgaaagagaatgtaacaactgttttaggttttaaatctattagacaaggtgaatctattacagagatgcaacagcctttttcagaaggcgatgaagtgaagatttcaaaaacaaatattagagaacatgaaacaacacctccagaatattttaatgaaggttcgttattaaaagcgatggagaaccctcagaactttattcaattgaaggataaaaaatatgcgcaaactttaaaacaaacaggtggtatcggcacagttgcaacaagggccgacattatcgataaattatttaatatgaatgccattgaatcaagagacggtaaaattaaagtaacgtcaaaaggtaaacaaatattagaattagcaccagaagaattaacgtcgccacttttaactgcacaatgggaagaaaaattacttttaattgaacgtggtaaatatcaggcgaaaacatttattaatgaaatgaaagattttacgaaagatgttgtaaatgggattaaaaatagtgatcgtaaatataaacacgataatttaacaaccacagaatgcccaacgtgtggtaaattcatgattaaagttaaaactaaaaatggtcagatgcttgtgtgccaagatccatcttgtaagacgaaaaagaatgtacagcgcaaaacaaatgcaagatgtccaaactgtaaaaagaaattaacgttgtttggtaaagggaaagaagcggtatatcgttgtgtttgtggacattctgaaacgcaagcacatatggatcagcgtatgaagtctaaatcctctggtaaagtatctcgtaaagaaatgaaaaagtatatgaataaaaatgaaggtttagacaataatccgtttaaagatgcattaaagaacttgaatttatag

SEQ ID NO: 406257 - DNA, 888 bp, Staphylococcus aureus
atgagcatagttcagttatatgatattacacaaataaaatcgttcattgaacattcgaattatgaatcagcatcatacttatataaacttcctcaacagtacaatgaaatagatgtattaataaccgatgcgattgaatcacctggtgtattttcgattaaagaaaacgattcaatcaaagcaatcatattgtcttttgcatacgataaaaataaattcaaagtcataggccctttcgtggctgacaattatgtattatctgtcgatacgtttgaaacgctatttaaagcaatgacttcgaaccaacctgacgatgccgtctttaacttttcttttgaagaaggcattcaacaatacaaaccattaatgaaagttattcaagcaagttataacttcactgactattacatagaagcccgtacaagattagaagaagatatgcaccaaccaaatatcattccttatcacaaagggttttatcgtgctttcagcaaattacacacaactacatttaaatatcaggcacagtcaccacaagatatcattgatagtttagacgaccatcatcatttgtttttatttgttagcgaaggtttacttaaaggttatttataccttgaaattgattcacaacagtcaatcgccgagattaaatacttcagttctcatgtagattaccgtttgaaaggtatcgctttcgagttgcttgcgtatgcattgcaatatgcttttgataattttgatattagaaaagtttattttaaaattcgtaataaaaataataaactcatcgaacgatttaatggtctaggtttccatatcaactatgagtacattaaattcaaattcgaatcacgtaacgtaaaagatcaaacaatccctgaataa

SEQ ID NO: 406258 - DNA, 864 bp, Staphylococcus aureus
ttgcaatttcttgatttcttaatcgcacttttacctgctttattctggggaagtgtcgttcttattaatgtgttcgtcggcggtggaccttacaaccaaattcgtggtacgacgctaggcgcactcattgttggattaggtttacttattactggtttcgcaaaattcaataatcctactgtaattattgtcggtcttatttctggtgcattatgggcgtttggacaagcgaatcagcttaaatctattagtttaatcggtgtatcaaatactatgccagtttctacaggtatgcaattagttggtacaacattattcagcgttatctttttaggtgaatggtcttcaatgactcaaattatctttggtttaatcgccatgatattattagttactggtgtagcacttacttcacttaaagctaaaaatgaacgtcaatcagataatcctgaatttaaaaaagcaatgggtattttaattgtatctacagttggatatgtaggtttcgttgtacttggtgacatctttggtgttggtggaactgatgcattgttcttccaatctgtcggtatggcaattggtggctttatcctatccatgaatcataaaacatcacttaaatcaacagcacttaatctattgccaggtgtgatttggggaattggtaacttgttcatgttctattctcaaccaaaagttggtgtagctacaagtttctcattatcacagttacttgttatcgtttcaaccttaggcggtattttcattttaggagaaagaaaagatcgtcgtcagatgacgggtatttgggcaggtattattattatcgtgatagctgctataattctaggtaatttgaaatag

SEQ ID NO: 406259 - DNA, 909 bp, Staphylococcus aureus
gtgacagaacaatttactatgattattttattaattgcgcttggttactttttgaagcgcattaattttataaaagcaacagatagtcaagtcattgctacattagttcttaatgtcacactcccatctttagttattgtgaatttaaacagtgcagaattaaaattgtcattctccattttaccaattttaatgattatatatggtattgtggcgaaaatgattgctgtctggttttttagaaaatatgataatcacatgcgtggatcagtaggtatgatgactggtgctatgaatattggattgtttgcatatccactaattgaagtgatatggcctaaaacgggacttatttattttgttatggctgatataggtggtgcctttgtgatgtttggaattacttactttgtaggtagctactttagtgaaggtagtgatcaattcgattttaaatatttaggtaagaaattattacaatcagtgccactcgttacatacattgtaatgtttatattgaatataagtcacatccatttaccacatgtggcaatcgatttctttagcatactttcccatgcaaatatgccgttatcaatgattttgctaggtgtcatgttgaattttactctggaaagaaagtatatacctgctactattaaatatttatgtttgcattatggattagcattagttgcgggattgttagtatatgtgttgttaccagtatcagatgatatgattaagacgacattgttggtcacttggatgttcccggtaggtgttgcaattatttcttatggtattcagtttaaatatcgaacactgacatttataggtatgacgaccaatttgacaatcattattagtatcattattttgtacgtgtatcaggcagtgtttgtctag

SEQ ID NO: 406260 - DNA, 165 bp, Staphylococcus aureus
atgtctttagaaaaccaactagccgaacttaaatatgattatgttcgtcttcaaggtgacatagaaaaacgggaatctttgaatttagatacttccgcacttgttcgtcaacttaaagatattgaaaatgaaattagaaacgttcgtgctcaaatgcaagattaa

SEQ ID NO: 406261 - DNA, 318 bp, Staphylococcus aureus
atgcaattttatctgattttactagcaatactttatctaattgttagttttattagtatttttaaaatggaagttgtatttactcgcattttgagaattattatgggtgtgttgttattattcgtcttagcattaacgacgatgagttttccaaaagagaattggtgggtatttatcgtcttattactcttagtcggtaatgtcgaagtgacaggatttaaaatgcttaaaaaagatctaaaaggcgtaaacatcttgaatttaatgtcattatttatctttgtcatatatttcatcttaaccatcgtattattctaa

SEQ ID NO: 406262 - DNA, 3168 bp, Staphylococcus aureus
gtgataaaaaagctattacaattttctttagggaataagtttgctatctttttaatggttgttttagttgtcttgggcggtgtatatgcgagtgctaaattgaaattagaattactaccaaatgtacaaaatccagttatttcagttacaacaacaatgccgggtgcaacgccacaaagtacccaagatgaaataagtagtaaaattgacaatcaagtaagatcattggcatatgtgaaaaatgttaaaacgcaatccatacaaaatgcttcaattgtaacagttgaatatgaaaataatacagatatggataaagcagaagaacagcttaaaaaagaaatcgataaaattaaatttaaagatgaagttggtcaaccagaattaagacgtaattcgatggatgcttttccggttttagcatattcattttcaaataaagagaatgacttgaaaaaagtaacgaaagtactgaatgaacaattaataccaaaattgcaaacggtagatggtgtgcaaaatgcgcaattaaatgggcagacgaaccgtgaaatcacccttaaatttaagcaaaatgaacttgaaaaatatgggttgactgctgatgatgtagaaaactatctaaaaacggcaacaagaacaacgccacttggattgttccaatttggtgataaagataaatcaattgttgttgatggtcaatatcaatctgttgatgcttttaaaaacataaatattccattaacgttggcaggaggacaagggcaatctcaatcccaaagtgacaataaacaaaattcagccatgtcagacgttaatcaggcatcaccacagcaaaattcaaaagcgtcagcaccaaataatataagtggtatgccgacagcgaaactaggagatttagctgatattacagttggtgatgtgcgtacttctatttctaaaacgaatggaaaggatgcggttaatctacaaataactaaagctcaagatgccaatacagttcaagtagccaaagatgtacaacgtaaaattgatacattcgttgatgaaaataaagattttaatgtcacaaaaacaatggatactgcaaagcctgttgagaaatcactttatacgatggttgaaaaagcatcattaggtacaatcgtggcaattatagttattttgctgtttttaagaaacattcgtacgacggcaatttctattatatcgattccgttatcacttcttatggcgcttattgctctgaaattgagtgatgtttcattgaatatactaacgttaggtgcattaacagtagcgattggacgtgtgatagacgattcgattgtagttgttgaaaatatttatcgacgcttaacagattcagaagaacaactaaaaggtgaaaatttaattatcagtgcgacaactgaagtatttaaaccaataatgtcatcgacactagttactattatcgtcttcttaccacttgtgtttgtatcaggttcagtaggcgaaatgtttagaccttttgcattggctattgcatttagtttattagcatcgttattagtgtcaattacactcgttccagcgttggcagctacactatttaaaaaaggcgttaaacgtcgtaataaacaacatcaagaaggattaggtgttgttagtacaacttataaaaaagtattacattggtcattaaatcataagtggattgtaattatattaagtacattaattttggttgcaactattgtatttggaggaccgagactaggcactagctttatttcagcaggtgacgataaatttttagctattacttatacaccgaagcctggtgaaacggagcaagcagtgttgaatcatgcgaaagatgttgaaaaatatttaaaacagaaaaagcatgtaaaaacaattcaatactcagttggcggtagtagtccagtagatccaacgggtagtacaaatagtatggcaatcatggttgaatatgataatgacacgcctaattttgatgtagaagcggataaggttattaaacatgcagatggctttaaacatcctggagagtggaaaaatcaagatttaggaacaggtgcaggtaataaatctgtagaggttactgtaaaaggtccatcaatggatgccataaaatcaactgtaaaagatattgaacagaaaatgaaacaggttaaaggactagccaatgtcaaatctgatttatcgcaaacatatgatcagtatgaaattaaagtcgatcaaaataaagcggcagaaaatggtatttctgcaagtcaacttgcaatgcacttgaatgaaaacttaccagaaaaaacagttacgactgttaaagaaaatggtaaaactgttgatgttaaagtcaaacaaaataagcaaacagactggtcagaagataagttgaataatataactttgaaaaagccgactggtggtacgattaaattgggagatatcgctacgttagttaaaacaacgacaccaagtaaattgacgcaagaacaaggagattatgcaacgacggtatctgctaaagtaacaaataaagatgtgggtggcacaacacgacaagtgatgtctaaaataaataatttggacaaaccgaataatgtaaaggttaatatcggtggtgcatcagatgatattaacaatgcaatgacacaattagcctttgcaatgttagctgcaatcattatcgtatatttaatcctagttattacatttaaaggtggcctagcaccatttacaattttattctctttaccatttacagttatcggtgtaattattgcactattaatcacaggagaaacaatatcagtaccaagtttaattggtatgctaatgttaattggaatcgtagtaacaaatgccattgtgttaatagaccgtgttattaataatgagcaacagggcatggagatgaaagaagcattaatcgaagcaggcggtactagaattagaccgatattaatgacggcgattgcaacaattggtgcattagttcctttgttatttggtcaagatagctcgattcttatttcgaaaggattagctgctacagttattggtggtttaatttcatcaactttattaacacttgtagttgtaccagtaatatatgaaattctctttactttaaaaaaacgattcactaaacgatag

SEQ ID NO: 406263 - DNA, 1266 bp, Staphylococcus aureus
atggaaaagatgcatatcactaatcaggaacatgacgcatttgttaaatcccacccaaatggagatttattacaattaacgaaatgggcagaaacaaagaaattaactggatggtacgcgcgaagaatcgctgtaggtcgtgacggtgaagttcagggtgttgcgcagttactttttaaaaaagtacctaaattaccttatacgctatgttatatttcgcgtggttttgttgttgattatagtaataaagaagcgttaaatgcattgttagacagtgcaaaagaaattgctaaagctgagaaagcgtatgcaattaaaatcgatcctgatgttgaagttgataaaggtacagatgctttgcaaaatttgaaagcgcttggttttaaacataaaggatttaaagaaggtttatcaaaagactacatccaaccacgtatgactatgattacaccaattgataaaaatgatgatgagttattaaatagttttgaacgccgaaatcgttcaaaagtgcgcttggctttaaagcgaggtacgacagtagaacgatctgatagagaaggtttaaaaacatttgctgagttaatgaaaatcactggggaacgcgatggcttcttaacgcgtgatattagttactttgaaaatatttatgatgcgttgcatgaagatggagatgctgaactatttttagtaaagttggatccaaaagaaaatatagcgaaagtaaatcaagaattgaatgaacttcatgccgaaattgctaaatggcagcagaagatgaaaacatctgaaaagcaagctaaaaaagcgcaaaatatgattaatgatgcgcaaaataaaattgctaaaaatgaagatttaaaacgagacctagaagctttagaaaaggaacatcctgaaggtatttatctttctggtgcactattaatgtttgctggctcaaaatcatattacttatatggtgcgtcttctaatgaatttagagattttttaccaaatcatcatatgcagtatacgatgatgaagtatgcacgtgaacatggtgcaacaacttacgatttcggtggtacagataatgatccagataaagactcagaacattatggattatgggcatttaaaaaagtgtggggaacatacttaagtgaaaagattggtgaatttgattatgtattgaatcagccattgtaccaattaattgagcaagttaaaccgcgtttaacaaaagctaaaattaaaatatctcgtaaattaaaacgaaaatag

SEQ ID NO: 406264 - DNA, 252 bp, Staphylococcus aureus
atgagaacaattattttaagtctatttataattatgaacatcgttgcaatcattatgacattgagtcaacctctcaccgtgaattactttagtttacgggttatacttatctttttcacatttatattatcaatctttttcattttaattaagtcatcacgattaaataatatattaacgattctttccattgtgcttgtcattattcatatgggcattctcgctcatagcacttacgtatatttatactaa

SEQ ID NO: 406265 - DNA, 765 bp, Staphylococcus aureus
atgatattgaaatttgatcacatcattcattatatagatcagttagatcggtttagttttccaggagatgttataaaattacattcaggtgggtatcatcataaatatggaacattcaataaattaggttatatcaatgaaaattatattgagctactagatgtagaaaataatgaaaagttgaaaaagatggcaaaaacgatagaaggcggagtcgcttttgctactcaaattgttcaagagaagtatgagcaaggctttaaaaatatttgtttgcgtacaaatgatatagaggcagttaaaaataaactacaaagtgagcaggttgaagtagtagggccgattcaaatggaaagagatacacataaagatggtaaggtaaagtggcaattgctttatataatgaatcaggatgatgatgaaattaagccaccattttttattcaatgggaagaaagtgattccatgcgtactaaaaaattgcaaaaatattttcaaaaacaattttcaattgaaactgttattgtgaaaagtaaaaaccgatcacaaacagtatcgaattggttgaaatggtttgatatggacattgtagaagagaatgaccattacacagatttgattttaaaaaatgatgatatttattttagaattgaagatggtaaagtttcaaaatatcattcggttatcataaaagacgcacaagcaacttcaccatattcaatttttatcagaggtgctatttatcgctttgaaccattagtataa

SEQ ID NO: 406266 - DNA, 441 bp, Staphylococcus aureus
atgctatcacaagaatttttcaatagttttataacaatatatcgcccctatttaaaattagccgagccgattttagaaaaacacaatatatattatggccaatggttaatcttacgcgatatcgctaaacatcagcccactactctcattgaaatttcacatagacgtgcaattgaaaagcctactgcaagaaaaactttaaaagctctaatagaaaatgaccttataacagtagaaaacagtttagaggataaacgacaaaagtttttaactttaacacctaaagggcatgaattatatgagattgtttgtcttgatgtacaaaagctccaacaagcagtagttgccaaaacaaacatttcgcaagatcaaatgcaagaaaccataaatgtgatgaatcaaattcatgaaatattattaaaggaggcacacaatgactaa

SEQ ID NO: 406267 - DNA, 1212 bp, Staphylococcus aureus
atgactaatcaaggctcattaaataaatcacctattttcaccaaaagttttacaattaactttttagtcaactttatcgtatacctatgcatgtatttgttacttgtagttattgctggctatagtaagcaagctttcgacgcttccgattcattagccggattagttgtaggactatttattgtcgggtctttaattggtcgatttgctacaggtaaatttgtaaatcaaatcggacctaaacgattattatttattggtttaattgctttaattatcacgcaattactttattttattgatggatctttagcttttttaatctttgtacgtctcataaacggtatcgcaactgcagttgtgacaactgcaacaggtactattgcggcatacgttacccctgttaatagaaaaagtgaaggcatcagtttattttccttaagtttagtattaggtacagcgattggcccatttctaggcatgttacttattacaaaatacgcaattgacttactgtttattatttgtgtcatattaggcatactcggactcattatctcattatttataaaagttgatttcgaagtaacaaataacaaaactgaaactaatgtcattgataaaccaagatttagtattcatcaatttattgcaaaagaggccattcctgttgctgtaattatgcttttaattggcgttacctatgcgtccatcctaacttatttacaagcatttgctttagagcgacacctagtcactgcagcaagctatttctttatttgctatgctatagcatcgttaattactagacctattgctggtagattgatggatgataaaaatgaaaatattattgtctacccagcatttatcatgcttttcctttcatttgtatgcttaatttcaagctatcaaagctggttaatattacttgctggtgcttgcctaggtttagggtatggaaatttatcatctgcaatgcaatctattgcgataaaagtctcacccccgattaaatatggtatcgcgacatctactttttacgttggtctagatgcaggtgtcggcttcggtccatcattccttgggttatttactcatatgttttcatatagtgaaatcttcggctttatggccgctttagcaatcattactatgcttgtttacttcttaattcatggacgtcatgtaactagaaatgccatgaactaa

SEQ ID NO: 406268 - DNA, 351 bp, Staphylococcus aureus
atgagtaataaagttcaacgttttatagaagcagaaagggagttaagtcagttaaagcactggttaaaaacaacacataagatttcaattgaagaatttgtagtcctttttaaagtgtatgaagctgaaaagattagcggtaaagaattgagggatacattacattttgaaatgctatgggatacaagtaaaatcgatgtgattatccgtaaaatctataaaaaagagcttatttctaaattgcgttctgaaacggatgaaagacaagtattctatttctatagtacttctcaaaagaaattgttagataaaattactaaagaaatagaagtgttaagcgttacaaactaa

SEQ ID NO: 406269 - DNA, 1023 bp, Staphylococcus aureus
atggtagaacaaataaaagataaactaggacgtcccatccgtgacttacggttatctgtgacagatcggtgtaactttaggtgtgattattgcatgcctaaagaggtatttggagatgatttcgtatttttacctaaaaatgaacttttaacgtttgatgaaatggctagaatcgctaaggtatatgcagaattaggtgtaaaaaaaatacgcattacaggtggagaaccattgatgcgacgggatttagatgtacttatagctaaattaaatcaaatcgatggtattgaagatattggtttgactacaaatggtttgttattaaaaaagcatggacaaaagttatatgatgctgggctgcgcagaattaatgtcagtttggatgctattgatgatacgctatttcaatcaatcaataatcgtaatattaaagcgactacgattttagaacaaattgattatgcgacgtctattggtttgaatgtaaaagtaaatgttgttatacaaaaaggtattaacgatgatcaaatcataccaatgcttgaatattttaaagataaacatatagagattcgatttatagaatttatggatgttggtaatgataatggatgggatttcagtaaagttgtaactaaagatgaaatgcttacaatgatagagcagcactttgaaatcgatcctgtagaaccaaaatattttggggaagtagcaaaatattatcgccataaggataatggtgttcaatttggtttgattacaagtgtttcacaatcattttgttctacatgtacacgcgcaaggctgtcatcagatgggaagttttacggatgtttatttgcaactgtcgatggatttaacgttaaagcgtttattcgttctggcgtgaccgacgaagaattaaaagaacaatttaaagctttatggcaaataagagatgatcgatattcagatgagagaactgctcaaacagttgccaatcgtcaacgtaaaaagataaacatgaattatattggtggttaa

SEQ ID NO: 406270 - DNA, 600 bp, Staphylococcus aureus
atgaaagcaataattcttgcaggtggtcattcagtgcgatttggtaagcccaaagcttttgcggaagtgaacggtgagaccttttatagtagagtaattaagacattagaatcaacaaatatgttcaatgaaattattattagtacaaatgcgcaattggcaacgcaatttaaatatccaaatgttgttatagatgatgagaatcataatgataaaggtccattagcaggaatttatacaatcatgaagcaacatcctgaagaagaattgttttttgtcgtttctgttgatacaccaatgattactggtaaagctgtaagcacgttgtatcagtttttagtttctcatcttattgaaaatcatttagatgtcgcagcttttaaagaagatggacgttttattccaacaattgcattttatagtccgaatgcattaggcgctataactaaagcactacattctgataattacagttttaaaaatgtatatcatgaattatcaacggattatttggatgtaagggatgtagatgcgccctcatattggtacaaaaatataaattatcagcatgatttggacgctttaattcaaaaattgtaa

SEQ ID NO: 406271 - DNA, 234 bp, Staphylococcus aureus
atgaaggtactttacttcgcagaaattaaagatatattacaaaaagcacaggaagatattgtgcttgaacaagcattgactgtacaacaatttgaagatttattgtttgaacgttatccgcaaatcaataataaaaagtttcaagttgctgtaaatgaggaatttgtacaaaaatcggatttcattcaacctaatgatactgttgcattaattccaccggttagtggaggttaa

SEQ ID NO: 406272 - DNA, 447 bp, Staphylococcus aureus
atgaaacaatttgaaatcgtgacagaaccgatacaaacagaacaatatcgtgaattcactataaatgaatatcaaggtgcagtagttgtttttaccggtcatgttcgcgaatggactaaaggcgtcaaaacggaatatttagaatatgaagcgtatattccaatggctgaaaagaaattggcacaaattggagatgaaataaatgaaaaatggcctggaacgataacgagtattgttcatagaatagggccattacaaatttcagatatcgctgtattaattgcggtttcttcaccgcatcgtaaagatgcctatcgagcaaatgaatatgcaattgagcgtataaaagaaattgttccgatttggaaaaaagaaatttgggaagatggttcaaaatggcaagggcatcaaaaagggaattatgaagaagcgaagagggaggaataa

SEQ ID NO: 406273 - DNA, 486 bp, Staphylococcus aureus
atgattttacaaattgtaggttacaaaaagtctggtaagacaacattgatgaggcatattgtctctttcttaaagtcacatggttatacagttgctactattaaacatcatgggcatggtaaggaagatattcaattacaggattcagacgtcgatcacatgaagcattttgaagcgggggcagatcaaagtattgtacaaggttttcaatatcagcaaactgtaacacgtgtagataatcaaaatcttactcaaattattgaaaaatctgttacaattgacaccaatatcgtattagttgaaggctttaaaaatgctgattttgaaaaagtcgtagtctatcgaaatgaagaagagttgcaagtattacaacaattgtcgaatgtttgttatagcattaatgtaagggagcatgaagattttacagcatttgagcaatggttattaaataaaattaaaaatgattgtgatacacaattaacatag

SEQ ID NO: 406274 - DNA, 1260 bp, Staphylococcus aureus
atggtagtagaaaaaagaaacccaatcccagttaaagaagcaattcaacgtatcgttaatcagcagagttcaatgccggcaattacggtagcacttgaaaaaagtctaaatcatatcttagcagaagatattgtagctacttatgatataccaaggtttgataaatcaccttatgatggttttgcaattcgcagtgttgattcacaaggggcaagtggtcagaatcgcattgagtttaaagtgattgatcatattggtgcaggttcagtttctgataaattagttggggatcacgaagcggtgcgtattatgactggagcacaaatacctaatggcgcagatgctgttgttatgtttgaacaaacgattgaactagaagatacatttacaattcgtaaaccattttcaaaaaatgaaaatatatctttaaaaggtgaagaaacaaagacaggcgatgttgttctaaaaaaaggacaagtaattaatccaggggctatcgcggtccttgcaacatatggctatgcagaggttaaagttattaagcaaccgagtgtcgctgttattgcaacaggaagcgaattattagatgttaatgatgtattagaagatggaaaaattcgtaactctaatggcccaatgattcgtgccttagcagaaaaattaggtcttgaagttggtatttacaaaacacaaaaagatgatttagatagtggcatccaagtcgttaaagaagctatggaaaaacatgatatcgttattacaacgggcggagtttctgttggagattttgactatttacctgagatttataaggctgtaaaggcggaagtgttatttaataaagtagcaatgcgtcctggtagcgtaacaacggttgcatttgtagatggaaagtatttgtttggattatctggaaatccatcagcttgttttacaggatttgaactatttgtgaaaccagctgttaaacatatgtgtggcgcactagaagtcttcccgcaaataattaaagcaacattaatggaagattttaccaaggcaaacccattcacacgatttatacgtgctaaagcaacgttaacaagtgctggagctactgtagtaccttcaggattcaataaatcaggtgcggttgtagcgattgcacatgctaactgtatggtcatgttaccaggagggtcacgtggttttaaagcggggcatacagtagatattatattgactgaatctgacgctgctgaagaggaacttcttttatga

SEQ ID NO: 406275 - DNA, 507 bp, Staphylococcus aureus
atgggcgaacatcaaaacgttaaattgaatcgtacagttaaagcagccgtactaacggtatcagatactagagactttgatacagataaaggtggtcaatgcgtgcgccaactattacaagcagatgacgttgaagtgagtgacgcacattatacaattgtgaaagatgaaaaagtagccatcacgacgcaggtgaagaagtggttagaagaagatattgatgtcatcattacgactggtggaacaggtattgcacaacgtgatgtgacgattgaagcagtaaaaccacttttaactaaagagatagatggctttggggaattgtttagatatttgagttatgttgaagatgttggcacgcgtgcattattgtctcgtgctgtagcaggtacagttaataataaattgatattttcgattccaggatcaacaggcgcagttaaattagcattagaaaagctcattaaaccagaattaaatcatctgattcatgagcttacaaaataa

SEQ ID NO: 406276 - DNA, 1005 bp, Staphylococcus aureus
gtgagtcaagaacgttattcaaggcaaattttatttaaacaaataggtgaaataggtcaaagcaaaataaatcaaaaatgtgcgttgattattggtatgggcgcattaggtacacatgtggccgaaggacttgttagagcaggcattgccaaactaatcattgttgatagagattatattgaatttagtaatttacaaagacaaacattgtttactgaagaagatgctttgaaaatgatgcctaaggtggttgcagctaaaaagcatttgctagcgttacgtagtgatgttgatattgatgattatattgcccatgtggattattattttttggaaacacatggacaggacgttgacgttattattgatgcaaccgataactttgaaacacgacaactgattaatgattttgcatataaatatcgtataccttggatttatggtggtgttgtacagagtacatatacagaagctgcatttatacctggtaaaacaccttgctttaactgtttggtaccacaattgccagcattaaatttaacatgtgatacagtaggggtcattcaacctgccgtgacgatggcaacaagtttacaattaagagatgcgatgaaagtattaacggaacaaccaattgacacaaaaataacttatggcgatatttgggaaggtagtcattattcatttggtttcagtaaaatgcaacgttcagactgtacaacttgtggagatgtaccaagttatccgtatttaaacaagaatgaacaacgttatgcaacattgtgtggtagagacactgtacagtatgaaaatgcatcaattacacacgacattcttgttcaatttttaaaacaacatcagttaaattatcgcagtaattcgtatatggttatgtttgaatttaaaggacaccgcattgttgcttttaaaggtggaaggtttttaatacatggcatgacacgcacatcagatgccacacatctaatgaatttattgtttggataa

SEQ ID NO: 406277 - DNA, 606 bp, Staphylococcus aureus
atgcttaaaatcaatgtgaaatatcaattaaagaacactttaattcgcatcaatatagatgatactgaaccaaaaatttatgcagttcgtggtccatctggcattggtaaaactactgttttaaatatgattgccggattacgtaaagcagatgaagctattatcgaagtgaatgggcaattacttactgatacggcaaaaaacgtgaatgttaaaattcaacaacgacgtattggatatctgtttcaagactaccaattgtttcctaatatgacggtctataaaaatattacttttatggctgaaccatctgaacacatcgatcaattaattcaaactttaaacattgatcatttgatgaaacaatatcctatgacattgtcaggtggagaggcacaacgtgtagcacttgcacgtgcacttagcacgaaaccagatttaattttattagatgaacctttttctagtttggatgatactacaaaagatgagagtattacattagttaaacgtattttcaacgaatggcaaataccaatcatatttgtgacacattcaaactatgaagcagaacaaatggctcatgaaattattacaattgggtaa

SEQ ID NO: 406278 - DNA, 672 bp, Staphylococcus aureus
atgcctgacttaacacctttttggatatcaatacgagttgctgtaatcagtacgattattgtaacggttttaggtatttttatatctaaatggttgtatcgtcgtaagggttcgtgggttaaattattggaaagtttattgatattacctattgttttgccgccaacggtattaggttttattctattaatcatcttctcgccaagaggaccaatcggtcaattctttgcgaatgtactacatttacctgtagtgttcactttgacaggtgctgtgatagcatctgtcattgttagttttccactaatgtatcaacatactgtgcaaggcttcagaggtatagacacgaaaatgattaatacagctagaacgatgggagcaagtgaaacgaaaattttcctcaaattaattttaccattagctaaacgctctattttagcaggtataatgatgagttttgctcgtgcattaggtgagtttggtgctacattaatggttgcaggatatattccaaataaaacgaatacactacctttagaaatatacttcttagtggaacaaggtagagaaaatgaagcgtggttatgggtattagtgctagtcgcattctctattgtggttatatctacaattaatttattgaataaagataaatataaggaggtcgactag

SEQ ID NO: 406279 - DNA, 783 bp, Staphylococcus aureus
atgaaattgaaacgtttatttgctgttgtgattgcaatgcttttagtattagctggttgctctaattctaacgataataatgaaagtaaaaaagatgacgcagacaatggtaagaaaaaagagattcaagttgcagcggcagcaagtttaacagatgtaaccaagaaattagcttcagaatttaaaaaagagcataaaaatgctgatattaaatttaactatggtggatcaggggcattaagaaaacaaattgaatcaggcgcacctgttgacgtatttatgtctgcaaatactaaagatgtagatgcattaaaagacaagaataaagcgcatgatacatataaatatgcgaaaaatagtctagtattaattggtgataaagattcaaattacacttcagtaaaagacttaaaagacaatgataaattagcattaggtgaagtgaaaactgtaccagcaggaaaatatgcgaaacagtatttagataacaataacttatttaaagaagtcgaaagtaaaatcgtttatgctaaagatgtaaaacaagtattaaattatgttgaaaagggtaatgcgaaacaaggttttgtgtataaaactgacttatataaacaaaataaaaaaattgatactgtaaaagtaattaaagaagtagaacttaagaagccaatcacatacgaagctggtgctacatcagatagtaaattagcaaaagagtggatggaattcttaaaatcagataaagctaaagaaatactaaaagaataccactttgcagcataa

SEQ ID NO: 406280 - DNA, 798 bp, Staphylococcus aureus
atgaacaaagatgtatctttaggtcaaccaattgttagatatgaagatggaaaattattcaatacaacagatcaatatgtgacagaatttccacttacaattatggtgaatggtgaagaatttgcgactgttatatgcagtccaacaaaccttgaggagttagtcattggatttctggcttcggaaggtgccattttaaagcgagatgaattaaaatctgtactgattgatgatagtaaaggttttgcccatgttgaacttaataaagatttaggcgatcgctttcaatattccacaaaacgaatgattgcatcttgttgcggaaagagtcgtgagttttattttcaaaatgatgctgctatcgctaaaacatctatgtctaaaatcactttaactccaatgcaaattattaacatgatgactcgattacaaagtgcaagtcatatttaccaagaaacaggtggcttacataatgctgctataagcgatggtttgacattttttgtacatcgacaagacattggtagacataacgctctagataaattatatggattttgtattcagcgacatattactgtccgagataaagtattaatttttagtggacgtatttcatcagaaattttaattaaagccgcaaaaattggtgttggcgtcattttatctaaatcagctccgacaacgcttgctgtaaccttagctaatgacctaaatattacggcagttggatttattcgaaatggtggctttaatatatacagtcatccagaacgtatcattgattctgaacaataa

SEQ ID NO: 406281 - DNA, 771 bp, Staphylococcus aureus
atggctagtataagtatgtcagatatatattgtaacggcactatatttgaaaatgacgacgagcagttgatttatttaacgccttcttttccacaacgatacacaagtaacacatggatatataaaaagacgcctacccaagagcgatggctgaaagacttagaacgtcaacatcaattacatacaaatcaaggttcaaatcattatgcgtttagtttcccggaaaatgaacaacttgataatcattggatggctatgtttaaagatatgaattttgaactaggtattatggaattgtatgccatagaaagtgatgcgcttgccaatttgccgcgtaactctgacgttgaaattgccatcgttgacgagtcgcatatagatgcctatttaaaagttgcatatcagtttagtttgccatttggaaaagactatgcagatgcacatgaagaaatggtaagggaacattatcaaaaagatgtgattaaacgcttagtagcttatttaaataatgaacctattggcgttgtagatgtcattgaaagtgaaaattacattgaattagatggatttggtgtattagaacaatttcggcaccaaggaattggatctacaattcaatcgttgataggtgaatacgccatatcaaaaaatcacaaaccaatcatattagttgcagatggtgaagatacagcaaaagatatgtatgcaaagcaaggttatgtctatcaatcgttttgttatcaaatattaaaagaagatattggaaattaa

SEQ ID NO: 406282 - DNA, 555 bp, Staphylococcus aureus
atgacaacaaaacagttagtatatacagctttaatgacagcgattatcgctattttaggattggtaccggtaattccactaccattttcttcagtaccaattgtacttcaaaacattggtattttcttagcaggtgtgattttaggacgtaaatatggcacattaagtgttatcgtctttttattattagtagttgctggcttgccattgttatcaggtggtcgcggtggcatcggtgtattcgcaggtccttcagcagggtttttactattatatccagttgtagcattcatgattggggcgattcgagatagattcatcaatgaaattaatttctggattttattcgttggtattttagtttttggtgttatagcattagatgttattggtacattgattatgggcatgattattaacataccatttacgaaagctatttcaatttcattagcttatttgcctggtgatatattaaaagcaattgtagcaagtttgattggtacagctttacttaatcactcgcagtttcgtcaaattatgggaataaaataa

SEQ ID NO: 406283 - DNA, 942 bp, Staphylococcus aureus
gtgactaagaaaggttattttaaccacgatggtggtgtagatgatttagtatctctatttttattattacaaatggaaaacgttcaattgataggggtcagtacaattggtgctgattgttatttagagccatctttgagcgcatcagtaaaaattattaatcgtttttcaaatgaagatattcaagttgcgccatcatatgaacgaggaaaaaatccatttcctaaagaatggcgtatgcatgccttttttatggacgcattgccaattttaaatgagccagtcaaacatgttgcttcaaatgtgagcgacaaagaagcctttgaagacattattcaaactttaaagagacaatcagaaaaagtaacattattatttacaggcccgcttacagatttagcaaaagcactacaaaaagattcatctatcgttcagtatatagaaaaattagtttggatgggtggcacctttttaccaaaaggaaatgttgaagaacctgagcatgatggttctgcagaatggaatgcatattgggatccagaagcggttaaaattgtttttgatagcgatatagagattgatatggttgctttagaaagtacgaatcaagtaccgctaacgttagatgttagacaaagatgggcgaatgaacgccaatatacgggcattgattttttaggagtaagttatgcagcggtaccaccattaacacactttataacaaattctacttactttttatgggatgttttaacgactgcttatattggtaacaaggacttggttcattcaattgagaaaaaagtcgatgtaataagttatggaccaagtcaaggtaagacatttgagtgtaaagatgggcgcaaaattaatgtcataaatcatgtagataacaacgcattttttgattatataactgcacttgctaaaaaagtaaattaa

SEQ ID NO: 406284 - DNA, 909 bp, Staphylococcus aureus
atgaaaaaactattattaccattaataattatgttattagtgttagctgcgtgtgggaaccaaggtgaaaaaaataacaaagctgaaactaaatcttataaaatggacgatggcaaaacggtagatattccgaaagaccctaaacgcattgcagtagttgcgccaacatatgctggtggacttaaaaaattaggtgcaaacattgtagctgtaaatcaacaagtcgatcaaagcaaagtattaaaagataaatttaaaggtgttacaaaaattggtgatggcgatgtagaaaaagttgctaaagaaaagccagatttaattattgtatactctactgacaaagatattaaaaaatatcaaaaagtagcaccaacagtagttgttgactataataagcataaatatttagaacaacaagaaatgttagggaaaattgttggtaaagaagataaagtaaaagcttggaagaaagattgggaagaaacaactgctaaagacggtaaagaaattaaaaaagcaattggacaagatgcaacagtgtcattgtttgatgaatttgataaaaaattatacacttacggcgataactggggtcgtggtggagaagtattatatcaagcatttggtttgaaaatgcaaccagaacaacaaaagttaactgcaaaagcaggttgggctgaagtgaaacaagaagaaattgaaaaatatgctggtgattacattgtgagtacaagtgaaggtaaacctacaccaggatacgaatcaacaaacatgtggaagaatttgaaagctactaaagaaggacatattgttaaagttgatgctggtacatactggtacaacgatccttatacattagatttcatgcgtaaagatttaaaagaaaaattaattaaagctgcaaaataa

SEQ ID NO: 406285 - DNA, 1185 bp, Staphylococcus aureus
ttgtattgtgtgttgtgtggggtgactaatatgaatgatatggataattcctttttaataacaacggaaattcaaagaaaatggattgaaaaattcaaagtaattagagatacatttaaggctaaagctgaatataatgatcaacatagccaatttccatataaaaatattgaatggttaattaaagaaggttatggaaaattaacgttaccaaaagcatatggtggtgaaggtgcgaccatagaagacatggttattttgcaatcatttttaggcgaacttgatggtgccacagcattatctattggttggcatgtgagtgtcgtaggacaaatttatgaacagaaattatggtctcaagatatgttggagcaatttgctgttgaaattaataatggtgcattagttaatagagcagttagtgaagctgaaatgggtagtccaacaagagggggaagaccaagtacacatgctgttaaagctgatgatgggtatattttaaatggtgtgaagacatatacatcaatgagtaaagcactaacacatattattgttgctgcttatatagaagaattagaaagtgttggttttttcttagtagacaggaatttgcctggtgttgaaattgccgataattgggacgtattaggtatgcgagcgacagaaagtcatgatttaatattaaatgatgtaaaagtaccattaaaacatttagtggaaacagagaaaagtaaagcgccaaatggttggatattgcatataccaagctgttatttaggtatagcacaagctgctagaaattatgctgtagactttgcaatccaacatagccctaatagtattgaaggaacgattgcaacattgccaactgtgcaacaaaatttagggaaaatggaaacgctattgttatgtgcgagacaatttttatggagtacagcaaaagggtatcaacaatataaagatgacagtcagataagaaatccaacaagtgcgagtaaagtgatggtaatgaatcaagggcttgaagtgattgatttagcgatgagaatagttggtgctaaaagcttagaaatgaatcgaccattacaacgttactatcgtgacatgcgtgcaggattacacaatccacctatggaagatgcagcatatacaaatattgctaagagtattacagatacattttaa

SEQ ID NO: 406286 - DNA, 906 bp, Staphylococcus aureus
ttgaagataatagatgtgcttttgaaaaatatatctcaggttgtgttaattagtaataaatggacaggattatttatcttaataggattatttgtagccgattggacaattggattagcggctattgtaggtagcatcatcgcctatacttttgcgcgttttataaattatagtgaggcagagattaatgatgggttagctggatttaatccagtgctaactgccattgcgttaacaatctttttagataagtcaggattagatattgttataacaatgatagcaactttattaacgttaccagttgctgctgcagtgagagaagttttaagaccatataaagttccgatgctgacgatgccttttgtcattgtgacttggtttacaattttactttcaggacaggttaaatttgtagatacatcgttaaagttaatgcctcaaaacattgaaacggttaattttagcaacaatgatagaatacatttcattcagtcattatttgaaggattcagtcaagtatttatcgaagcgagtgtaattggtggcgtatgtattttaatcggcatattgatagcatcaagaaaagcaacactcttagctgttatagctagtttgttaagctttatcattgtagctctattaggtggtaattatgatgatattaatcagggattattcggttataactttgtattaatggcaatcgcactaggatatacatttaaaacagcgattaacccttatatttcgacttttttaggtgtgttattaacagtagtggtgcaactaggtacaacaacattgcttgaaccgtttggcttacctgcattaacattgccatttattatcgtgacatggattttattatttgctggtattaaacatgacaaagtagatgcttga

SEQ ID NO: 406287 - DNA, 303 bp, Staphylococcus aureus
ttgcattttacacaacgagagcaagacaaattaatgattgtagtggcggcggaagttgcacgtcgtcgtaaagcacgtggtttgaaactaaatcatcctgaggcattagctttaatcagcgatgaattattagaaggtgcacgcgatggtaagaccgttgcagagttaatgagttatggtagacaaattctaaacaaagaagatgtcatggatggtgtcgaacacatgattacagatatcgaaatcgaggctacgttccccgatggtactaagttaatcacagtacatcaccctattgtttaa

SEQ ID NO: 406288 - DNA, 411 bp, Staphylococcus aureus
atgataccaggagaaattattacaaaaagtacagaggttgaaattaataaccatcatcctgaaacagttatcgaagttgaaaatacaggagatcgaccaattcaagtgggctcacattttcatttttatgaagcaaatgcagcattagatttcgaacgtgaaatggcatatggaaaacatttagatattccagctggagcagctgttcgatttgaacctggggataaaaaagaagttcaattagttgaatatgctggcaaacgtaaaatttttggttttcgtggtatggtcaatggtcctatcgatgagtcacgtgtctatcgcccaactgatgaaaatgatgaatatgcaggtgtattcggagataacggtgctgaaaacgtgaataaaaaaggaggaaaaagatcatga

SEQ ID NO: 406289 - DNA, 1716 bp, Staphylococcus aureus
atgagctttaaaatgacgcaaaatcaatatacgagcttatacggtccaactgttggagattccattcgtttaggtgatacgaatctatttgctcaaatagaaaaagactatgcggtttatggtgaagaagctacttttggtggtggtaaatctattagagacggtatggcgcaaaatcctcgtgtaacacgtgatgacgtgaacgttgcagaccttgtcatttctaatgccgttattatcgattacgataaagtggttaaagctgatataggcattaaaaatggttatattttcgccataggtaatgccggcaacccagatataatggataatgtcgacattattataggttcaacaacagatatcattgccgctgaaggtaaaatcgtcactgctggtggtattgatactcatgttcattttattaatcctgaacaagcagaggtcgcattagaaagtggtattacgactcatattggtggtggtactggtgcttcagaaggttctaaagcaacaactgtaactccaggtccatggcatattcatagaatgttagaagctgccgaaggtttaccgattaatgtcggttttacaggtaaaggacaagcaacaaatccaactgcactcattgaacaaatcaatgccggagcaattggattaaaagtacatgaagactggggtgcaacaccatctgctttgagtcatgcattagatgttgctgatgaatttgatgttcaaattgcattacatgcagatactttaaatgaagcaggatttatggaagacacaatggctgctgttaaagaccgtgtacttcatatgtaccatactgaaggtgctggtggcggtcatgcgcctgatttaattaaatccgctgcattttcaaatattttaccttcatctacaaatccaactttgccttatacacataatactgtagatgaacatttagatatggtaatgattactcaccatttaaatgcggctattcctgaagatatcgcattcgcagattcacgtattcgtaaagaaacgattgcagcagaagatgttctgcaagatatgggtgtattcagtatgattagttccgattcacaagcaatgggccgtgtaggtgaagtaattacacgaacatggcaagtagcacatcgcatgaaagaacaacgtggtcctttagatggtgattttgaacataatgataataatcgcatcaaacgttatatcgctaaatatacaattaacccagcaattacacatggtatttctgaatatgtaggatctatcgagccgggcaaactagctgacattgtcttatgggacccaattttctttggggttaaacctgaattagttgtaaagggcggattaattaactctgccgtaaatggcgatgcaaatggttctatacctacatctgaaccgatgaagtaccgtaaaatgtatggtcaatacggcggaaaccttacaagtacgtcaatgacattcgtgtctaaaactgcttatgaaaatggtatcaatcgtgcattaaatttaaaacgcatggtgcgtccagttaaaaatattagacaattatctaaagcagatatgaaaaataacagtgcaacacctaaattagacgttgatccacaaacatatgaagtatatgtagatggagaaaaaattacaagtaatgcagcaactgagttaccattaactcaaagatacttcttattctag

SEQ ID NO: 406290 - DNA, 453 bp, Staphylococcus aureus
atgattgttgaagaaatccaaggcaatattgccaatttgtcaaattcagaaaaacaaaagcacgtcgaaaaagtataccttgaaaattcagatcttgttaaacgtattcaaagagtcgttacagaccatggcactgaaataggcattcgtttaaaacaacctattgacttacaatatggagatattttatacgcagatgaccataatatgattattgtggatgttaattcagaagatcttttagtgattcaaccaagaacattgcaagaaatgggagatatagcccatcaattaggaaatcgtcatttgccagcacaatttacagagactgaaatgctagtacaatatgattatttagttgaagatttattaaaaagtttaggcatcccatatgttcgagaagaccgtaaagttaataaggctttcagacatatagggcattctcatgattga

SEQ ID NO: 406291 - DNA, 690 bp, Staphylococcus aureus
atgattgatcatacacacttaagattatttcagttctgtgattcacagtttccaacaggtgctttcagtcattcatttggtcttgaaacatatattcaacgaaatataattcatgacgatcatacttttattgcttggttaaaaatgtttttacaagagcaacttacctattctgatggtttagccatgcgtttagtttatgatgcattggaaaatgatgatacacaaaaagtattacacatagataaactgatgtttgttcaaaacttacctaaagaaacacgtgttggtgcaaaacaaatggggactcgcatggttaaattggctttagaactttataatagcccatggattgcttggtatcatcaacaaatgcaagataagaaagcaaagttaaatccagctatttgttttactatgctaggccatcatttaggtgtagatattgaaacgattattgattactatttatatcaaaatgtttcaagtttaactcaaaatgctgttcgtgctattccacttggacaaactgctggtcaaaagatagttactcacatgattccttatatagaaggaacaagaaagcagattttcgaattaaaagaagcagattttggcatgacagcgcctggtttagaactaaatcaaatggcgcatgagaacgtcaatgttagaattttcatatcatag

SEQ ID NO: 406292 - DNA, 615 bp, Staphylococcus aureus
gtggcaaatccgattaaaattggtattggtggtcctgtaggtgcaggtaaaacacaattaattgaaaaagttgtaaaacgtctttcaaaagaaatgagtatcggcgttattacaaatgatatatatacaaaagaagacgaaaagatattagtaaattcaggagttctacctgaaagtcgtatcattggtgttgaaactggtggatgtcctcatactgcgattcgtgaagatgcatctatgaactttgcagcaatagacgaattattagaacgtcatgacgatatagaactaattttcatagaatctggtggcgataacttagcagcaacatttagtccagaacttgttgacttttcaatatatattatcgatgttgctcaaggtgaaaagattccacgtaaaggtggtcaaggtatgattaagtcagatttctttgtaattaacaaaactgatttagctccctatgtaggtgcatcattagaacaaatggctgaagatactaaagtatttcgtggtaaacgtccatttacttttactaacttaaaaaccgacgaaggtttggatgaagttatcgattggattgaacgcgacactttactcaaaggattatcataa

SEQ ID NO: 406293 - DNA, 837 bp, Staphylococcus aureus
atggatgaacaacaatggactgggcaacttgatttaacagtgtttttcgatggcaatcgatcagtatcaagagatattttctttgaaaaagcacttaaagtgatacgtccagtttatctaaatcaatctaccattcctacattttatatagtaaatgtaggtggtggctatttagatggagatcgttaccgtatgaatgtgaatgtcgaagataacgctaaagtgacattgacatctcaaggtgcaacaaaaatatacaagacaccttccaatcatgttgagcagtatcaaacttttaatttgaaagataacgcatatttagaatatgtcgctgatccaatcatcgcatatgaaaatgctaaattttatcaacacaatacgttcaatctcaataattctagttcattattttatactgatattttaactcctggttattcaaaaactggcgaagccttcaagtatcaatatatgcatttaataaatgaaatttatattgaagatgagttagtcacatatgataatttattattgaatcctaataaacaatcgatcaatgaaataggttatatggaacattactctcattatggctctgcttacttcatacacgaagatgttaaccaaaaactaatcgattcagtttatgaaaccattagttcttatagcaatacattcgattgtcgtgttgctatttctcaattgcctacacatggttttgcagttagaatttttgcttatcgcacacaaattatagagaaaatacttggaaccatccaaagctatatcgcagaaaatatttatgatcgtaaacttgattttctaagaaaatattaa

SEQ ID NO: 406294 - DNA, 348 bp, Staphylococcus aureus
atgagtaaaattaatgacattaatgatttagtcaacgcaacatttcaagttaagaagtttttcagagatacaaaaaagaagttcaatttgaactatgaagaaatttatattttaaatcatattttaagaagtgagtctaacgaaatctcatctaaagagattgctaagtgctcagagttcaaaccttactatttaactaaagctttacaaaagctaaaagatttaaaattgttatcaaagaaaagaagtttacaagacgaaagaacagttattgtttatgttacagatacacaaaaagcaaatattcaaaaactgatttcagaattagaagaatacattaaaaattaa

SEQ ID NO: 406295 - DNA, 327 bp, Staphylococcus aureus
atgattttagataatgtgaatccaaatgatttatttccaactgaaaaaaagggtccgtcagtgctaggaataattgagtatcaagttcaaggtgagaatgaatttgaaggggcatttatagcaacaaatgaaagattaattatgaatgtagatatgaatggccaattttattatagaagtattagttataatgaaatagagaagatagattatgatggtcaaactataatgttcaaatttaatattggtaatgtcccaatgcatgatattaaaagtgctaacgttgaaatgtttgttgaatatgtaaaacaacatatgatagtataa

SEQ ID NO: 406296 - DNA, 744 bp, Staphylococcus aureus
atgtctaaatttaaagttaagcgtttaactgcacacatactaatgttgaaagtcattaatgatatgttgaaatattcatttcatctcactttgactcaagtgaaactattaaatctattagttaaatatgataattctgattccaatagcgcttcaatagatagtttattaaaaatgaaagaaatccaatctaagatggcccttcttcaaatgttaagttatttaaacaatcatcaatggctattgaaaggaagagatcaaagggatcaacgtaaattgactatttcgattaataaaatgcatatagataaaatagaatatatgaataatgagcttagtgactatattgaacgttattttggtcaatatacatttgattttagttgtgactatgtatcgtatttattgtcgtcacaagaattattgcggaatctaaagtgttatttaaatatgtgtcaattatcattagaagagttatacgttttaggaatattaaatctgcataaaggtcaattgacggttaaagaattacagggtgaattccatcacccgatatttgcggttagcccgattttaaagtgtttaattttgaagggattagttaaaaaagagagatgtgaattagatgaaaggcgtgttattgtaacaatcaagcgagaaaagttttctaaagtcactatgcttattcaagcatgttataattatcttgaaaagggaatacaagttaatcttaataataaatag

SEQ ID NO: 406297 - DNA, 1956 bp, Staphylococcus aureus
atgacagataattattcactacatatttataaaagtatgaaaatgagtagtgtgaaggaagcgaacttaaaaattatatattggctacaaggtacaggtgtagtttcaatcaatctacaacaatatgatgtaaaaagaaatgatgtcaccattattatgttgaatgatttgtatcaaattgatggtaatgatgatagtgtatgttgtgttgttgaagtaagtgcaaagacatttttgaagtttatgaatgcaaactatatgatgcgtggcaagatattaacaaatgaggttgctagcacttttagaatcttgattaagtatttaatctacagcaaaattaaacaacagtcttataatgctaatgataagattattaattacatgtgtgttgaattaatgtcattaaatacatacgatggtagtcgtcatttagtagccgaagaagtgcacgattatttaacaaacaaccaccataaaaagataaataggaaagatgtcattaatcaagttagtattacaaacaaagctttaagtgacatgtttaaagcgacaccttatagtaattttattcaatatttaaatcatattagactggagcattgcttaattgatattttaacttctaagaagcctattgaagaaatcgcaagtagtcatggttttaatcattattctcgttttatacacctctttaaagaaacgtatggtaacactcctaaattaattagaaaaagatatagtccaacatctcattcaattaaccattcccaattagttgaaattgataaaaatataattgaattatttgatgatactaatcaaagttcttcaagtatgcgcgagattgatataccttttgagcctacaaaaaggagtcaaatgtatcaacctaaaaacatttatattaaaggaagtaatttttattggatggattattatactattaaacaaatcattcaaagattaggtgttaatcctgaaaacttgcatataattgttacaatcgacacaagcaatgagctatcgattgaacaaatcactttattacttcaaaagatagtgaattacaatgtaaatgtagtgtttcgtattaaacatgaatataaggaattgttaacgagtgctgaaagaggcaagatagaaaagctagtagctacaatttttaatatgacttttgagagtaatagatgtaagattgcatttttaattaacgacttaaatactactgcaattcaaaaactgaaacgtttaatagataattatataggagtatttgaattaatatatcatctggaaccaaaagagttgaatacgcgctatgataaagaaattgatcatctaatagactattttatcttaccgctaagacaaatagaacaggtgtctattgcacgttctaaaattatatgtgatgtagatttgattaatgagaataatgacttaaaagaaaaaatcacaatgtctgatattaataaggtttctgaacttttgacaaattatacaaaatttcgaggacttattatgcacatgtcaattataagtgaatcgagcaaagaaataaatttaactagattatcaatattcatttttatcataaatatacttaatcaattacgagggattgttatttatcaaaatgacacgatgattgtaacgaagttcaaacatgaagtacaatgtgtcatttgtttgccagccgcattgttaaatgagaattcagacgctatacgtttatcgtgtaagggtcttcaacaatttagccatgctaaaactaaacaaattgttttaagtatagataaagataatcatacttccgaaaatggtgtacttgtgaatgatattatgcaacaacacagttattggaaagctaattttatagaaagaaatatttatgatcattcattaatggtctcaagcaatagtattgttcatttgaaatatcatcttgagatatag

SEQ ID NO: 406298 - DNA, 804 bp, Staphylococcus aureus
atgaagaaaatcgctacagctactatcgcaactgcaggattcgctacaatcgcaattgcatcaggaaatcaagctcatgcttctgagcaagataactacggttataatccaaacgacccaacatcatatagctatacttacactattgatgcacaaggtaactaccattacacatggaaaggtaactggcatccaagtcaattaaaccaagataatggctactacagctattactactacaatggttacaataactataacaattacaacaacggttatagctacaataactacagccgttacaacaactactcaaataataatcaatcatataactacaataactataatagttacaacacaaacagctaccgtactggtggtttaggtgcaagctacagcacttcaagcaacaatgttcaagtaactacaactatggctccatcatcaaatggccgttcaatctcaagtggttatacttcaggacgtaacttatacacttctggtcaatgtacatactacgtatttgatcgtgtaggtggtaaaatcggttcaacttggggcaatgcaagtaactgggctaacgcagctgcaagagctggttacacagtgaacaatacaccaaaagctggtgcaattatgcaaacaactcaaggtgcatacggtcacgttgcatacgttgaaagtgttaacagcaatggttcagtaagagtttcagaaatgaactatggttatggcccaggtgttgtaacttcacgtacaatctcagctagccaagctgctggttataacttcattcactaa

SEQ ID NO: 406299 - DNA, 1401 bp, Staphylococcus aureus
atgatgaaaagaaaacccacctttttagaatcaatttcgacaatgattgtaatggttattgttgttgtaacaggctttgtgttttttgatattccaattcaagtattattaattattgcctcagcatatgccacatggattgcaaaacgtgtaggcttaacatggcaagatttagaaaaaggcattgcagaacgtttaaatactgcaatgcctgcaattttaattatactagcggtaggaattatagtaggcagttggatgttttctggcacagtgccagccttgatttattatggcttagatttattgaatccaagctattttttaatatcagccttttttataagtgctgttacatctgtagcaactggtacagcatggggctctgcatcaactgcagggattgcacttatttctattggtaatcaattggggattcctccagggatggcagcgggtgctattatagcaggggctgtgtttggcgataaaatgtcaccattatcagatacaactaatttagcggcgcttgttactaaagttaatatatttaaacatatacattcgatgatgtggacgacgatacctgcatcaatcataggtttattagtatggtttattgctggatttcaatttaaagggcattcaaatgataaacagattcaaactttgttatcagagcttgcacagatttatcaaattaacatatgggtctgggttcccttaattgtgatcattgtttgtttgctatttaaaatggctacagtgccagctatgctaatatcaagcttttctgccattatagtggggacttttaatcatcatttcaaaatgacagatggtttcaaagcaacatttagtggttttaacgaatcaatgatacatcagtctcatatttcatccagtgtgaaaagcttgttagaacagggtggtatgatgagtatgacccaaatattagtaacgatattttgcggatatgcatttgcaggtattgtagaaaaagcaggatgtttagaagtcttattaactactatttctaaaggcatccattctgtaggaagtttaatatgtattactgttatttgttgtattgcgcttgtattcgctgcaggtgttgcttcgattgtaattattatggtcggtgtgttaatgaaagatttgttcgaaaaataccaagtctctcgttccgttttatcaagaacacttgaagactcaagtacgatggtcttacctttaataccatggggaacatcaggtatttactatacgaatcaacttcatgtctctgttgaagaatttttcatatggacagtaccatgttatttatgcgcaattatagcaattatctatggttttacagggataggtattaaaaagtcatcgaattcacgtttaacttaa

SEQ ID NO: 406300 - DNA, 1083 bp, Staphylococcus aureus
atgaaaatagcaattgtaggatcaggaaatggcgcagttacggcagcagtagatatggtgagcaaaggccacgatgttaaattatattgtcgtaatcaatctataagtaagtttcaaaacgcaatcgaaaagggcggatttgattttaataatgaaggtgatgaacgtttcgtaaaattcactgatattagtgatgatatggaatatgttttaaaagatgctgaaattgttcaagtgattattccatcttcatacatagagtattatgctgatgtaatggcagagcatgtaactgataatcagttgatattcttcaacatggctgcagcaatggggtcaattcgttttatgaatgttttagaagatagacatattgaaacaaaaccacaactagcggaagctaatacgttgacgtatggtacgcgtgtcgattttgaaaatgcagcagttgatttatctctaaatgtacgtcgtatcttcttttcaacatatgatagaagctgtctaaatgattgttatgacaaagtttcaagtatttatgatcatttagtaaaagaggaaagcttaattaaaacaaatcttgaaaatggtaatcctgaagtgcatccaggaccaacattattgaatgtcggtcgcattgattatgctggcgagttcgctttatataaagaaggaattactaaacatacagttagattacttcatgcaatcgaattagaacgtttgaatttaggccgtagattaggttttgaattatcaacagctaaagaatcacgtattgaacgtggttatttagaacgtgataaagaagatgaaccattaaatcgtttgtttaatacaagcccagtattttcacaaattccaggaccaaatcatgtagaaagcagatatttaactgaagatattgcatatggtttagtactatggtcaagcttaggtcgtgttattgatgtaccgacaccaaatatagatgcagtaattgtaattgcatcaaccattttagagagagacttctttgaggaaggcttaacagttgaagaaattggtttagataagcttgatttagaaaaatatttaaaataa

SEQ ID NO: 406301 - DNA, 423 bp, Staphylococcus aureus
atgacaactgaaatgaacgacgtaacaaatcatcaaccgaatcgcaaatccaatgatgagaacattatggcgatgcttatctatttattaagtttattcacatctattattggtccactgataatatggttattgaaaaaagatgaatcgaaactagttgatcgtgctggaaaaaattatcttaactatacgatttcttatattatttggtctatcgttttagtcgttatcactttaataggcgttttcctaattgctacagatattgatttcattattattataggtttcatcattacgtttatcggtattttatccatattcgctttctcaatattatcttttgtattcacaattattgcgtgtgtcaaatattataatggccaagaatatataatacctttaacaattcgatttatttaa

SEQ ID NO: 406302 - DNA, 501 bp, Staphylococcus aureus
atgaaaaaattagtaacagcaactacgttaacagcaggaatcggcacagcattagtaggtcaagcacatcatgcagatgctgctgaaaattatacaaattacaacaactataactacaacacgactcaaactacaacgactacgacaactacgacaactacatcatcaatttcacattctggtaacttatacactgcaggacaatgtacttggtatgtatatgataaagttggcggagaaatcggttctacttggggaaatgctaataattgggctgctgctgcacaaggtgctggattcacagtaaatcatacaccttctaaaggcgctatcctacaatcttctgaaggaccatttggtcacgttgcatatgtagaaagtgtaaacagtgatggttcagttacaatttcagaaatgaattatagtggcggacctttctcagtaagttctagaactatttctgcaagtgaagcaggtaactacaactacatccatatttaa

SEQ ID NO: 406303 - DNA, 954 bp, Staphylococcus aureus
atggaaaaagtttatgttgctggtgcaataccagaagtaggtttaaaacttttacaagaacattttgaagttgaaatgtatgaaggtaaaggattagtcgataaagacactttaattaaaggtgttaaaaacgcgactgccttaattagtttattatctacaaacgttgataaagatgttatcgatgctggtaaagacttaaaaatcattgccaactatggcgctggttttaataatattgatatcgagtatgcccgagaaaaaagtatagatgttacaaacacacctaaagcatcaacaaacgcgactgctgatttaacaattggattagtacttgcagtagcgcgtcgtattgttgaaggggaccaattatcacgtacaactggatttgatggatgggcacctttatttttcagaggtagagaagtatctgggaaaacaatcggcattatcggtttaggtgaaattggtagtgcagtagctcgtcgtgcaagagcatttgacatggatgtgctatacactggacctaatcgcaaagaagaaaaagaacgagaaatcggtgcaaaatatgtagatttagatacactattaaagaatgcagattttatcactatcaacgctgcttataatcctaaaatgcatcatttaattgatacagaacaatttaaaatgatgaaatctacggcgtatttaatcaatgcctctcgtggtccaatcgtgcacgaacaagcactagtgcaagcattgaaagataatgaaattgaaggtgctgcacttgatgtatatgaatttgaaccagatattaccgatgacttaaaatcacttaataatgtagtattaacaccgcatattggtaatgctacatttgaagcacgtgacatgatgtctaaaattgttgctaatgctgcaattagtgccgttcaaggtgagaaaccacaatttgtcgttaactaa

SEQ ID NO: 406304 - DNA, 1125 bp, Staphylococcus aureus
atgaagatagcaattataggtgcaggcatcggtggattaacagctgctgcattattacaagaacaaggtcatactattaaagtctttgaaaaaaatgagtcagttaaagaaattggcgctgggattggtatcggagataatgtgcttaaaaaactaggtaatcatgacttagctaaaggtattaaaaatgctgggcaaatcttatctacaatgacagtgttagatgacaaagatcgcctgttaactactgttaaattaaaaagtaatacattgaatgtgacgttaccacgccaaacattaattgacattattaaatcttatgtaaaagatgacgcaatatttacaaatcatgaagtcacgcatatagataatgagacagataaagttaccatacatttcgcggaacaagaaagtgaagcatttgatttatgtattggtgctgatggaattcattctaaagtgagacaatctgtaaatgctgacagtaaagtattatatcaagggtatacatgctttagaggtttaattgatgatattgatttaaagcatccagattgtgcaaaagaatactggggaagaaaaggaagagtaggtattgttccgttattaaataatcaagcatattggttcattacaattaactcgaaggaaaacaatcataaatatagttcgtttggtaaacctcatttgcaagcatactttaatcactatccaaatgaagttagagagatcttagacaaacaaagtgaaacaggtatcttattgcataatatttatgatttgaaaccactcaaatcttttgtttatggtcgtactattttactaggagatgcagcacatgcgacaacgcctaatatggggcaaggtgctggacaagcaatggaagatgctatcgtattagtaaattgttttaacgcatacgactttgaaaaagcattacagcgttatgataaaatacgtgtcaaacatactgcaaaagtaattaagcgttctagaaaaatcggtaaaattgcccaatatcgtagtcgtttatttgttgcagttagaaatcgtattatgaaaatgatgccaaatgcattagcagctggacaaactaaattcttatataaatcgaaagaaaaataa

SEQ ID NO: 406305 - DNA, 777 bp, Staphylococcus aureus
atgaagaagaatttcaagttacgcatttcaacgctactattgatagttattttagttgtttttgctgtattactcatcgtgaatgaaactaaattgtttaaaaatgatgtgaattactcttttgatgaggctgtttcaatgcaacaagggaaaggtattgtacagacaaaagaagaggatggtaaatttgttgaagcaaataataatgaaattgctaaagcaatgactatttcacataaagacaatgatatgaagtatatggatatcacagaaaaagtgccaatgtcggaatctgaagttaaccaattgctaaaaggtaaggggattttagaaaatcgagggaaagtttttctagaagctcaagaaaaatatgaggttaatgtcatttatcttgttagccatgcattagtagaaacaggtaacggcaaatcagaattagcaaaaggcattaaagatgggaaaaaacgctattacaacttttttggtataggagcattcgatagtagtgctgttcgtagtgggaaaagttatgctgaaaaggaacaatggacatcaccagataaggcgattattggtggtgcaaagttcattcgtaatgaatattttgaaaacaatcaactgaatttatatcaaatgcgatggaatccagaaaatcctgcgcaacatcaatatgcgagtgacattcgctgggcagataaaattgccaaattaatggataaatcctataagcagtttggtataaagaaagatgatattagacaaacatattataaataa

SEQ ID NO: 406306 - DNA, 234 bp, Staphylococcus aureus
atgttaaaaacgtcagctgtaatttctaatacattattagtcataggtttagtctgtctatttatgatgaaattagtgttagctattactttttttgctgtttcattatcaattagtctagttgtctttaatatgatgttcagagatagaacaacgatgaaagtaatcgttaacgcttcttttttaatcgtaatattagcgattgtagtggcatattttttattgtctaagtaa

SEQ ID NO: 406307 - DNA, 474 bp, Staphylococcus aureus
atggctgagagaatatcttctaaaattagacgcttagaaaaatcagaagaacaaattaagttagaaagtttaaatgaagttacagaggcaattgcagcgaataaagatagtatattaaaagcaatcaagcttattaaaacattagatgatgcaaaactattagatgctttaaatggtgcaattcgaggacgtcaagtcatcataaataaatttgcagttgaacttaataaagatatttatacagggctattatctaatatggcttcaatggtatttttattaggtgaactcaatgtatcagatttaagcgacttcctaaataaagttaataaaggattacacgttgccaatcaagcgagtccaaatgctaagacaactataagaagtctattgggcgtattgaaagatgacgacatgaaccgtagtttaacatacatgcttaatatgctaaaaggtatgtctcgagaagaataa

SEQ ID NO: 406308 - DNA, 3039 bp, Staphylococcus aureus
gtgtggggcatcgttattttaggtggatatgagcaatttattaaaagtcatttacggaaaatatatatagacggggtgagtaatatgcaagaacatttggtggttacacttgatggaaaagattatcttgtagaaccaggtacgaatttacttgaatttattaaatcacaagatacttttgtaccttcaatttgttataacgagtcgatgggaccaattcaaacatgtgatacatgtactgttgagattgacggtaaaattgaacgttcatgtagtacggtgattgatcgtccaatgactgtaaatactgtgaacaatgatgtgaaagatgctcaaaaagaagcgcttgatcgaattttagaaaagcatatgctgtattgtacagtatgtgattataataatggtgattgtgaaattcataatacgatggatgcatgggggcttcagcatcaaacgtatgaatataaagagaagccatacgaaaaagattacggcccattttatcgttatgatccaaatcaatgtatcttatgtgggcgttgtgtagaagcatgtcaagatatcgaagtgaatgaaactattagaattgattgggatcgtgaacatccacgtgttatttgggataatgatgtaccgattaatgagtcttcatgtgtatcttgtggtcaatgtgcgacggtatgtccatgtaatgccatgatggaagtgaatatggaaggtaatgcgggttatatgactgatacggaacctggttcattagcagcaatgattgatttaactaaaaaagcagaacctggttatggtccactatttgcaatctcagattcagaagcagaaatgcgtaaagagcgtattaagaaaactaaaacagtgtgtacttattgtggtgtgggttgttcatttgaagtttggactaaagatagagaaattttaaaagtacaaccatcacatgattctccagcaaataaaattgcgacttgtgttaaaggtaagttttcatggggacatattaattcagatcaacgattaactaaaccactagtaaggaaaaatggtgagttccatgaagtagaatgggatgaagctttaaacgtcattgcagataattttacagctattaaagaaaagcatggcccagatgcactatcattcatttcttcttctaaagcgacgaatgaagaatcgtatttaatgcaaaaattagcaagacaagttattggcacaaataacgttgataactgttcaagatattgccaagcacctgcaacaaaaggcttatttagaacggttggacacggcggtgactcaggtagtattgaagatttagaaaaagcggcaatgtctgtattgataggtactaatacagccgaagctcatccagttatcgcatcacgcatgaaacgtgcacaaaaattatttggtcaaaaaatacatgtatttgatattagaaaacatgaaatggcagaacgtgcggatcgtttttatcaacctaaaccaggtacggatttagcgtggttaagtgcagtgactaagtatattattgatcatgatttacacgataaagcatttattgatgagtgggtagatgattttgatgaatattacaaatcattagaaacatttacaatggcttttgctgaagaagcaacaggtattcctgaatcagaattgattaaatttgctgaagaatgtgctaaagctgaatctgttgtaatttgttgggcaatgggtattacacaacaagacattggtagtgactcaagtacagcgatttcaaacttattattagtaacaggtaattatcgtcgtcctggtactggtgcgtatccattacgtggacataataatgttcaaggatgtagtgatatgggaagtatgcctgataagattactggttatcaaagtattgaagcggatgatattcgcgctaaatttgaaaaagaatatggcgttaaattgaatccaaaagctggtaaagataatcatgaaatggtagaaggtatacatgacggagaagtacactcattgtacttatatggtgaagatacgggtattgtggattcaaatattaattttgtacaagctgcgtttgaaaaattagatttcatggtagtccaagatgaatttttaacattcacagcaacatacgcagatgttgtattgccagcaagtccttcacttgaaaaagacggtacttttacaaataccgaacgtcgtattcaacgtttataccaagcattagaacctcttggtgattcaaaacctgactggaaaattttccaagcaattgctaatagattaggatttgattggaattacaagcatcctagtgaaattatggatgaagtagcacgcttaacacctctatatgctggggtaagttatgatcgtttagaaggattcaatagtttacaatggccagtacaacctgatggtactgatgagcctattctatacttagaaggattcaattttgataatggtaaagcaaaattattcccattatcatttgataattactttaagcaagatgaaatttatgatattcatgtaaacaatggtcgattgttagagcacttccatgaaggtaatatgacttatcaaacaccaatgattaaatacaaagtgccacgtgcatttgttgaaatttctccagagcttgctgaagatagaggcattcatgaaggtgcagaagttaagctgatttctgaaacaggagaagcggtattacaagttcacgtgacagatcgtgttaaaggtaaagaaatctatattccattaaataatgatgcgatggaaaatggagatctaggtgcaattaacttattaactaatagtgatgttgatcaatacacggatacaccatcttataaacgtactagctgtcgtttggaggtaattacgaaacgtggtaagtcaccgttgaaccctaataatttccgtgtcaataaaaaacgtcaaccgcagtacagtgttcaagtacagaaaaaatgggaacgttcagattatgttttcccgggaaatcaggtggataaataa

SEQ ID NO: 406309 - DNA, 948 bp, Staphylococcus aureus
ttgaaacgttcgtctaaaagtaaaatgagcctaccgaaaaaaatatttttatgggtattcggtattttagtaatcttagcgattgtagctgttgtgtatgtagctgctaaaatttttattactggtaataagatacacaatccgttagatcgcaatcattcagaattaagagataaaaaagtgagtttaaacgatggtgatccattcacaatcgctttatttggtgtcgattcagatgctgatcgtaagaaaaagggtggcggagagcgtagtgatagtattatgattttatctatcaaccctaaaacgaagaaaactgaaatagtaagtataccgcgtgatacaagagcggaaattgttggccgtggtactactgaaaaaattgcacatgcctatgcatatggtggaccaaatatggctgttaaatcacttgaaaaattaatgaatgtgccaattgatcattatgcgacaatcgatatggatggtttgcataatatgatagatagcatcggcggtgttgatgtagtaagtaatgatacattcactgttgatggtgttcgttttacaaaaggacagcagacacatgtaaatggtgatcaagcattgaagtttattagaagtcgtaaagaagaaggtgctggtggtgactttggtcgacaacaacgtcagcaaattgtgcttgaagcgatggccaataagattgcaagcccatcatcgattacacattttaatagtctaatgaatgaaattcaaaataatgttaaaacagatttaacattaggtgatttgaatacgattagaagcaattataaagatgctaatgacacgattaataaacatcaattgagtggtcaaggcggcattcaaagtgacggattgtactacttcattcctagtgagcagtcaaaagctgaaagtactaagttattaaaagataatctagagtag

SEQ ID NO: 406310 - DNA, 798 bp, Staphylococcus aureus
atgacagataaaacattacagcaaatagataagttaatatgttcgtggttgaaacaaatagacaatgttattccgcaattaattatggaaatgactacagaaactaagcgtcatcgatttgatttagttacaaatgtagataaacagattcaacaacaattccaacaatttttagcaacacattttccggaacaccaactattagcggaagaaaaaagtaatgaaatgattacgaatgaaattaatcatttatggattatggatcccattgatggaactgccaatttagtaaaacagcaagaagattattgtattatattggcgtatttttatgaaggtaaaccaatgttatcgtacgtatatgattatccgcataaaaagctttataaagcaatacgaggagaaggtgctttttgtaatggaattaagatggaagaaccaccatcgttaaaattggaagacgctattatatcgtttaatgcacaagtgatgaatctagatacggtgcaagatttatttgacgcctcatttagttatcgtttagttggtgcttgcggattagattctatgcgagtggcaaaaggtcaatttggggcacatattaatacaaatcctaaaccttgggacattgctgcacagtttttatttgcagaactattgaatctaaaaatgacgactttagatggtaaggcaattgatcatttaaagggtgcaccttttattataagtaataaagcatgtcatgaaacggtacttaaaattttaaatgcaaatggtggttatcaaaaatacagatag

SEQ ID NO: 406311 - DNA, 693 bp, Staphylococcus aureus
atgaataaagctgaaaggcaaaatttaataattactgcaattcaacaaaataaaaaaatgaccgctttagaattagctaaatattgcaacgtatccaaacgcacaattttaagagatattgatgatttagaaaatcaaggtgttaaaatttatgcgcattatgggaaaaatggtggttaccaaatacaacaagcacaatctaaaattgcattaaacttatctgaaacacaattatcagccttatttttagtgcttaatgaaagtcagtcgtactcgacattaccatataaaagcgaaatcaacgcaattataaaacaatgtttaagtcttccacaaacacgcttaagaaaattgcttaaacgcatggacttttatattaaatttgatgacacacaacatatgacactcccaatgctgttttccgacattttaatttattgtacagaacgaaatgtgatgttagtagatcatagggttgatgataatattaaagctgaaaacgttatatttattggccttttgtgtaaacatggacattggcatgcagtcatttatgacattgctcaagacaaaactgccgaactcgaaattgaaaatattatagatatttcgtattcattcggtaagacgattcaaaccagagacatatccattgataactatcatcaatttttaaaccccatcgattcctaa

SEQ ID NO: 406312 - DNA, 738 bp, Staphylococcus aureus
gtggaaaatgaaaaaaagaaatacacgtttaaagatatagcatggagagatttgcttataattccaattataggtgttatattttatgcactcacaattgcagcttacataggaccaattttgtttggttattatgaaatcgatagtaatctgatatttgtagcgactatcacacaagctttagcatatacgattgggattggcgcattttatttatttcatttaaaagtgatgccatcaaggcttcgagctggttttgcgtatatcaaaaaatattggcttagattgtcaataacgtatattattgctctcatcttaatttatacatatgaatatatgacacagtttctacctaaacatttgcaatatagtgaaacagccaatgaacttgagctaaataaaatgtttgaagtgcctgcatttttacctgtagcattcttattaattgtgattgtaggtccaatagttgaagaaatcgtatttagacatattttaattggagaattaggtaagaagtttaattttatagctatgagtattgtttcggtgttcttatttgcatttattcatgtgactgatgcaaagtcgccgtttgagtttggtccatatctcatactatccatcatattagttttcacttatttaaaatctggaagaaacctaggttcaacaattgcattacatatagcaaataattttgtttctttcgttatatcagtaataagtatttatgcgtag

SEQ ID NO: 406313 - DNA, 330 bp, Staphylococcus aureus
atgataaacgaaactaagtatatgagacaacaaattactaatttgattcaaatcattgatacgattaaatataatactttaatgacagattggaacattcaaacgcatatttataaatttaaccaaatagttactaatgaattgaataagttcaaaggctttgaaacatcatatataataaacgaaaatcaagtttcctattatgaaattataacactacttaataaacgtcccctccgacaagtcgactatggtaacaaaattcaatatcttaatttttatcatacagaactatctaacgcattatttgcaattaaatttgcccattaa

SEQ ID NO: 406314 - DNA, 885 bp, Staphylococcus aureus
atgtcaaacgtactaacagaaatagatagtcaatatccatatatgactaaaaatgaaaaaaagatagctaaatttatactaaattcacctcaaaaggtgattaaaatgaggtctcaagacttagcaagcttattagatattagtacatcatcagtcattcgattcagcaagaaaattactgatggcggttttcacgacttgaaaataaatatatctaaatatgttcctaaagcatcatcaatttacaatgttgaattaatgaataacgaaagcacagaatctttaagaactaaactccatacacgtactacacgcgcacttaatcatgcaaataacgaattaaataacgaattaaatgataaaactattgatcaaatatgtcattgtttaaaacgttctgagacgatttttatatatggttttggcgcatcttttgtagttgctaccgacttataccaaaagttatcaagaataggtcttaatattcaacttgttcaagaaacacatatttttgctacattattagcaactcacaattcgaacgacagtgttattcttattactaacaatggtacgcaaagtgaaatgcaatcaatggttaaagttattgatgactaccatatacctataattacaattactagtacaagggataatcccgtagcacaggcatcaaatattgttttaacttatgggaaaactgatgaaaatgagatgcatatgggagcaacaacttcattatttgctcaaatgttcactattgatattttatattatcgttatgttgcattaaattatcacgcatcattagatttcataacacaatctaaaatggctttagataactatcgtaaacatttatcaaatattaactttaaacattaa

SEQ ID NO: 406315 - DNA, 1380 bp, Staphylococcus aureus
atggagaacaatgaactacaaaggggattgagtgcccgtcaaattcaaatgattgcacttggtggtacgattggcgtggggcttttcatgggtgcgacaagtacaattaaatggacaggcccatcagttatccttgcatatttaattgcgggtatctttttatttttaatcatgagagcaatgggggaaatgatttatttaaaccctacaacaggatcatttgcaacatttgcaagtgattatatacatcctgcagcaggttatatgacagcatggagtaatatattccaatggattgtagttggtatgagtgaggtcatcgcagtaggagaatatatgaagttttggttcccggaattgccaacttggattcctggtgttattgctattttattattaatggcagcgaatttattctcggtaaaagcgtttggagaatttgaattttggtttgctttaattaaagttgtaacaattattttaatgattattgctggttttggtcttattttctttggttttggaaatggtggccatgcggtaggtatttctaatctatggacaaatggcggatttatgccaaatggtattgttggtttcttctttgcattatcaattgtaattggttcataccaaggtgtggaactgataggtattacggcaggtgaaactaaagatcctcagaaaaatatcgttaaagcagtgaatggtgttatctggagaattttaattttctatttaggcgctatttttgttattgtttcagtgtatccttggaatcaattaggagacattggaagtccgtttgttgcaacatttgctaaaatcggtattacatttgcagctggattaattaactttgttgtattaactgcagcaatgtcaggatgtaactcaggtattttcagtgcgagtcgtatgatttatacacttgctcataaaggtgaaatgccgaaaatatttactaaaatcatgagaaatggtgtaccattgtacactgttgtagcagtatctcttggtattttaattggtgctttattaaacgtaattttacctttatatatcgatggagcgaagagtattttcgtatacgtttatagtgcgtctattttaccaggtatgattccttggtttatgattttattcagtcatttacgttttagaaaattacaccctgaagaattggaaggtcacccattcaaaatgcctggtggcgcagtaactaactatttaacaatcttattcttaatattagtattggttggtatggtatttaatgttgaaactagaatatcagtgcttattggtgtcatcttcttaacgattgtaacgatttattattttattagatataataaaaataatgtaaaagcaaaatag

SEQ ID NO: 406316 - DNA, 357 bp, Staphylococcus aureus
atgttaaaacaaatactgctacgtgctacaaaaatatcggtactctttgctgtagcatttttcatcataaattatatcggtatggaaaaacctgacatcctatatttagttggaagaactattattgcaacacttgctttcatactcatttgtcttacagtatttactattattaattctccagagcgcaagattaaactcggtacgactttaccgattgcattaattattggtatcattttcggcgccatatttttaacggtacaaatcggtgtcatcactgggttaatcatcggtgtgattgctacgtttatttgggaattgattgaaaaaaataaaggaggtcgttcatcatga

SEQ ID NO: 406317 - DNA, 186 bp, Staphylococcus aureus
atgacaacagcattaattggtgtaattgtattaatcttactaattattagctttgtgccaaactaccgtgctatgaaatcagcaaaagaacaaggaagtaatgcaacaagagctacaattatggtaggcatagatattatcttaattgtacttatcatcgtgacgttattattaaaatatatgtaa

SEQ ID NO: 406318 - DNA, 192 bp, Staphylococcus aureus
atgatgggttacattatattgttttttctagctggtccagtaattttaggcgttggaaatttggtgattggtcctatatttaacaaacagacaccatttcgcgtgcaagtaagatcttttgttgttggttcaatgatttacttaatactcgcaacaattggctattttttactattacaaggtaaactttaa

SEQ ID NO: 406319 - DNA, 636 bp, Staphylococcus aureus
atgtatagagcagttatatttgatttcgatggaacaataatagatacggaacaacatttatttaatgttattaataaacatttagagatgcataatgccgatcctataagcattgatttttatcgttcttctattggaggagcagctacagatttgcatgaccatttaattaaagcgattggttcggaaaataaagataaactttatgaagaacatcatcttactagtacaacattaccgatgattgatacgattaaatcattgatggcatttttaaagcaacgtcacattcctatggcaattgccacaagtagtgtgaaagcggaaataatgcccacctttaaagcattaggtctagacgattatatagaggtagttgttggtagagaagatgttgaacaagttaaacctgaccctgaattatatttatctgcagtacaacaattaaattatatgccgacacaatgtttggctattgaagattctgtaaatggtgcaacagccgcgattgcagctggattagatgttattgttaatacgaataaaatgacaagcgcacaggacttttctaatgtagattatgtagcaaaagatattgattacgatcaaattgtagcgcgtttctttacgaaatag

SEQ ID NO: 406320 - DNA, 918 bp, Staphylococcus aureus
atgtttcaaaaattgagtatatttgccacgaagagttttttggtatggatgttagtagcagctgttattggatttattttcccacaacatgttgcgacattaggtaaatgggtaccttatttacttggtattgttatgttaggtatgggattaacaattacacctaatgatttcaaaatggtctttaaagcacctagagcagtaattattggtgtctgtctacaattcagtattatgcccacattagcatttataattgcaaagtcttttcatttaccacctgatattgctgttggcgtaatattagttggatgttgtccgggtgggacatcaagtaatgtaatgagttatttagccaaagctaacgtagcactttctgtttctattacgacggtctctacgttgctagcgccattcgttacacctgcgttaatatatctatttgcaaatgaatggttggaagtatctttcgtgagtatgttgtggtcagttgttcaagttgtattaatttcaattgctttaggtattgttttgcaaattattaatcgtaaaattgctgaaaaagcttctacagctttgccaattatatcagttgttgctatttcattaattttagcaatagttgtaggtggcagtaagcaccaaatcttaactacaggattattaatatttttagtagttattttacataacgtattagggtatacgattggatattggttagctcgtcttttaaaattagatcgacaagatcaaaaagcagtcagtattgaagttggaatgcagaactctggtttagctgtgtcattagcagcattgcattttaatccaattgcagcagtaccaggcgcagtgtttagtttcattcataatataacagggcctattttagcaaagtattggtcaaaaaagttataa

SEQ ID NO: 406321 - DNA, 531 bp, Staphylococcus aureus
atgttaattgataaattcgaaacatacatcatcaacatcgccggtttaaatgaccgtactactagaaaaaaattaagtaagttatgcaaaagtgtacaattttgtgatgcgttgcaattctcaataaacaaacagtttaatcagtatgtattagaaattagcttaccaaagcaacaacttccatacttcatttcatttttaagttttcatcagtatagtattttccaagtactttcaccaaagaaaataaatgaattacttgattctgataatttatatcaatctgcaaagcgtttcgatatcaatattgatggcttgcaagatgctttcattaaagacaaagtcatcgatattatgaatatgttccaaaatcacactgatatcacttatacgttgaataagtctcatgcacatattatatgtacgccagaaatatttgctaaattgttacatacgattgcaactagaaatatcgacattctatctgccaattatagatcgtcatctatgagcaaagctcgtatatcataa

SEQ ID NO: 406322 - DNA, 1605 bp, Staphylococcus aureus
atgaatgcgataaagcgtttcggtagtgcaatgattgtaccggtattaatgttcgctttctttgggatagtgcttggctttgcgacattatttaaaaatcctacaatcatggggagtttagcagatcaacatacgttttggtttaaattttggtcagtaatagaatctggtggctgggttatttttacgcatatggaagttgtatttgttgtaggtctaccactttctttagctaaaaaagcaccaggtcatgcagcacttgcagcattgatgggttacttaatgtttaatacatttataaatgccattttaacacaatggccacatacgtttggcgctaatttagaaaaaggcgttgaaaatgtacctggtttaaaatcaattgcaggtattgccacattggatacgaatattctaggtggtattattatttcagctattattacttggattcacaatagatactatagtaaacgattaccagaaatggttggtgtattccaaggtttaacatttgtagttacgatttcattttttgtgatgttaccattagcagcaattacttgtgttatttggccaactgttcagcacggtattggttcaatgcaacactttatcattgcttcaggctatatcggtgtatggttgtatcacttcttagaacgtgtattaataccaacaggattacatcactttatttatgcaccaattgaagttggaccagtagtagtcaatcacggcttgaaagctgaatggttacaacatttaaatgagtttgctaagagtactaagccattaaaagagcaattcccttatggctttatgcttcaaggaaatgggaaagtatttggatgtttaggtattgctttagcaatgtatgctacgacacctaaagaaaatcgtaaaaaggtggcggcactacttattcctgccacattaacagcagtcgttgtaggtattactgagccattagagtttacattcttattcatcgcaccatacttatttgttttacacgcagttttagcagcatcaatggatactttaatgtacgcatttggtgttgtaggtaacatgggtggtggcttgttagactttatttcaacaaactggttgccattaggtaaagaacattggggtacttatgttgcacaagttattatcggtctgatatttgtagcgatttacttcttcttattcagattcttaattttgaaatttgatattccattacctggacgtaagaaaacagaagaggaagttaaattattttctaagcaagattacaaaaataaaaaaggtgatagcgtagattctaaacgtgcttcatctggtaatgaatacgaagacaaagctgcatattacctcgacggtttaggcggcaaagaaaatatcaaagatgttactaactgtacaacaagattacgcttaactgtttatgatgaaagtaaagttgcagatacggaatatttcacgcatcaacaaatggcacacggattagtaaagagtggtaagagtatccaagttgtagtaggtatgacagtaccacaagttcgtgaagcatttgaacaaatggttgaggatcaatcgtccgaagataaataa

SEQ ID NO: 406323 - DNA, 765 bp, Staphylococcus aureus
atgtttttagatgaacacattaatcgaaactttgataaacttaatgataatgatttacatatcgctcactttatcaatacacatatagatgaatgtaaaaatatgaaaatacaagatttagcgcaattcacacatgcctcgaatgcaaccattcacagatttacacgcaaattaggttttgacggttatagtgattttaaatcgtaccttaaatttgaaagtaataagacacaccaattaccttctaactctatcgatagtttcaaacaagaaatcgatagtacattcagttatttagaacgcgttgattaccagcttcttactaaaaaaatgcatacagcttcaacaatatatttgtatggtacagggcgtgcacagttaaacgttgcttcagaggcacagcgtatattgttaacgttacataatcatgtcattgtacttcatgatgaacatgaacttaaaatgattttgaacaagagtgaacctaatgatttattctttattatttcattatcaggtgaaacacatgaattattagaagtaacaaacttgcttcaacttagacaaaaatactttatttctgttactacaatgaaagataatacccttgctcaaaaagcaaattacaacgtctatgtatccagtaacacattctacttaactgatggtacagactattctagcttcatcagttatcatatattctttgaaacacttgtaagaaaatataatgagtatttactacataatgatatttcaaattag

SEQ ID NO: 406324 - DNA, 507 bp, Staphylococcus aureus
gtggcaaaatttaatgtagagaatgaacatgtcgaagttgaaattgaaaagctttataaattttctccagagttagtatacgaagcttggacaaagaaagatttgttgaaacaatggtttatgacatcagccagaacgaataaagagattgaagcggacgttaaagaaggcggtaaatatcgtattgtagatcaacaacgtaatggcaaagtaaatgtgattgaaggcatttatgaatctttagttatggatgaatacgttaagatgactatcggtatgcctggactaagtgaaacgcaagatgtcattgaggtagaattttttgaacgtgaaacaggtggcacccaaatgctattttattatcgttcattagttgaaaaagaaagacgatttactaatttagaatacaagcaaaagaaaaaagaatatcatgatgccatggtgcatggtttcgaattgatgtttgataagatgtaccacgttatcgaaacatcaacacaacaataa

SEQ ID NO: 406325 - DNA, 1314 bp, Staphylococcus aureus
atggaagtacataaaaagagcaatgcttgggcattattccccttgttattatttgtggcgttgtttttaggcgtaggtattatcacaggtgattttacttcaatgccattaaatgttgcaattacgataacggtaattgtggcgttattaatgaatcgaaaagaatcatttgctaaaaaagttgaggtcttcacgaaaggtgcaggccattcaaacattgttttaatgatgttgatttttattttagcaggtgcattttcaaatacagctgaaaaaatgggtggcgtaaagtcgacagttaatttaggactatcattaatcccagaaaatttaattattgtaggattgtttgtgatttgtatgtttgtttctatatctatggggacgtctgtaggaactgttgctgcaatagcacctgttggttacggatttgcacaagcgacagatgtaccaactgcgctagcaatggctacagttgttggaggtgcaatgttcggcgataatctatcaatgatttcagatacaacaattgctgcggttagaacacaacatacgaaaatgaaagataaattcagagtaaactttaaaattgtattgccaggtgctattttaacgattattattctgtatttcttaacgaatggcatttctttaaatcatgctaaaaactatgattataatctaattaaagttgtaccgtatatcttagtattggtattagcattattaggtgtaaatgtcattatcgtattgattggcggaacattattagccggaatcattggtctcatagatggttcattcggttggatggggctactagatgcagtgtccaaaggtattataagcatggaagatattgctatgattgcgttgctaattggtggtttagtcggtattattcaacacaatggtggtattgaatggttgttgcaatttgttcgctctaaagtgaaatcaaagcgtggcgcagaattaggaattgctagtttggtaagtgtcgcagatattgccacggcaaacaacaccatctctattattatgtcaggtcctttagctaaaaatattgcagatgaatatgatgtagattcaaggaaatcagcaagtattcttgatatatttggaggctgcttccaaggtttattaccatatagcccgcaagtcatttcagcggctggtgtagctggtatttcaccgttaatgttattcccatacagcatttatcctatattattaggtgtatgcggacttattgcgattttatttaattttccaaagctaaaaaagaacactagtcaagaaatgaaacattaa

SEQ ID NO: 406326 - DNA, 570 bp, Staphylococcus aureus
atggcattaatagtatctagagctatattatttttgattttagcattagcttttggaatagcgactgtttttcctgaacaaaaattaccattatatatagtattcacattatttgtagcagttgcgatcgtttcgaatgtatggtttacacatcaaaacgttaaaaagcatatcattaagtttaacaaatacgtcgcatactttttatcctttgtctcagggttactttacattggatttgtaatttatacattaactatagggagctatgatgttttaccaattattatatttgcaataagtatcgtattggttcaaatattagaaaatatactgggaatcagtataaaaaatacgcgtctatcaaacaaacagttgaaagtcatctccaagcaacgtgttcagcaatttaaagtcatatcattaatattagtaagtgtgtctatcgtgttcatttttattgcattaatgcttaaatggtggcttttactcgttattagcattattgttttgattattattacagtagcaatgattgtttatgaaaaatattatacgactcctgattaa

SEQ ID NO: 406327 - DNA, 882 bp, Staphylococcus aureus
atggcagctcaagatcctagaacaaaatttaaaacaacggattatgaaaaacaagaacaagaggtaccgggtttacaatctgaaatgacgccagcacccgattgtggcgaaacgtcttaccaaggtcatcaacgcttacaaggctataaaatattagtcacaggtggtgactcagcaatagggcgtgcagcagcaattgcgtatgctaaagaaggtgcagatgtagcgattaactatcttccgagtgaagaacaagatgcacaagaagtacgccaagtgattgaagaaagtggtcaaaaggcagtgttaattcctggtgatataagagatgaacagttcaactatgaccttgttgaacaagcatatcaacaattaggtggcttagataatgttactttagttgctggacatcaacagtatcatgatgatattcatggatttacaactgaggcatttacagaaacatttgaaacgaatgtctatccgctattttggacagttcaaaaagcattggaatatttaaaaccgggtgcgtcaattacaacgacatcatctgtacaaggttataatcctagtcctattcttcatgattatgccgcttcaaaagcagcaattatttcattaactaaaagtttttcagaagaattaggaccaaaaggaattagagtgaactgtgtagcgcctggtccattctggtcaccattacaaatttctggtggacaacctcaaagtaaaatcccaacatttggtcaaaaaacacctttaggtcgtgcaggtcaacctgttgagttatgtggaacttatgtgctattagcgtcagaagaatcaagttatacaaccggacaagtgttcggtgttagcggtggagtgcaaatagattag

SEQ ID NO: 406328 - DNA, 1122 bp, Staphylococcus aureus
atgggattaaaagatcaagctgttacctggagaaggtattttcatcaatttccagaactatccgataaagaatttaagactacacaaaaaattaaagatattttaacagaacatcatattagaatattagacttaccacttgcgactgggcttgttgctgaagtgggacaaggtctgagttgtatagctgttcgggctgacattgatgctttaccgattcaagagcttgttgaacaggattttaaatctgaaaatgaaggtgttatgcatgcgtgtggtcatgatattcacatggctagtattttggctacagctgtaaaattaaaagaaattgagggcactcttactgggcgtgttaaattcatttttcaatcagcagaagaactaggacatggcgcttttaaaattattgaaacacatgcattaaaagatgtacaagcagtattgggttttcataatgacccatcgcgttcggtaggtacatttgcaatcaaaacaggggcaattacatcagcagtagatcgttttgagtttcatattaaaggcgtgggtggtcatgctgcaaagccagaacaatgcaacgatccagttattgtgttggcgcaattgattaatagtattcaatccatagttagtagaaatctatctgcgtttgatgaagcggtagtaacaattggacaaatatcatgtggtaatacttggaatgtcattgctgatcatgcgtatgtacaaggcacagtgcgtagttttgatcctgtggtacgaaagcttgtagaaacacgattacaagatattgcggacggattggctcaagcatataatatgaaaattaatttaaattatacgcatttacctggcgctgtgatgaatgatgaggcattgacgcataaagcaattgcagtagcccaacatgttggatataaggtggaaatgatggaacagccgcttacgattggagaagatttttcaggttatagtcaacattttccaagtgtatttgcgttaattggttctcatagtgaatatgatttacatcatcctcaatataaaccggatgaaaggattctggaaaaagtacctgagtattttgttgaatttgtaaagagactattgcatgaataa

SEQ ID NO: 406329 - DNA, 1239 bp, Staphylococcus aureus
atgaatgatttaataattaatcatatagcagaattaattttaccgagatcaacagataaacctttgaagggtaaggaattagatgaattaaatgttgtgaaaaatggtacagttgtcattaaagatggcaaaattgtatatgctggaacacatacagatgactacgatgcgactgagacgattgatgctagtgggaaggtagtgtccccagcattagtagatgcacatacccatttaacatttggtggatctcgagaacatgagatgtcattaaaacgtcaaggtaagtcttaccttgaaatattagaaatgggtggtggcatattatctaccgttaatgctactagagaaacatccgaagatgacttgtttaaaaaagcagagcatgatttgcttactatgattaaacacggcgtgcttgcagttgaaagtaagagtggttatggattagatagagaaaatgaactgaagcaattgaaagtgtctaatcgtttagctgagaaatatgatttagacatgaaacatactttcctagggcctcatgctgtacctaaagaggcaagttcaaatgaggcatttttagaagaaatgattgcgttacttccggaagtaaaacaatatgcagactttgcggatattttctgtgaaacaggtgtatttacaatagaacaatcgcaacattatatgcaaaaagccaaagaagcaggttttaaagtgaaaatacatgcggatgaaattgatccgttaggcggactggaattagcaattgatgaacaagcaatatcagcagaccacttagtagcttctagtgataaaggaaaagaaaagttgcgaaatagtgatactgtagctgtcctcttacctgcaacgacgttctatttaggtaaagaagattatgcagatgcaagaggcatgcttgacaataacggtgcgattgcattagcaactgattataaccctggtagtagtgtcacaaacaacttacaacttgttatggcgattgcagccttgaaattaaagctatcacctaatgaagtttggaatgctgttacggtcaatgctgctaaagcaatagacattaacgcgggtacaattaacacaggtgataaggctaatttagtaatttgggatgcaccaaatcatgaatatattccatatcattttggtatcaatcacgcagaaaaagttattaaagacggtaaggtcatcgtagataacacagtatcttttaaagcataa

SEQ ID NO: 406330 - DNA, 1662 bp, Staphylococcus aureus
atgagaaaaattcaagcaaaaaaaggtttgagtattgagtgtaaaggttgggaacaagaagcagtacttagaatgttatacaacaatttagacccagaagttgctgaaagaccagaagatttagttgtttatggtggtattggaaaagcagcacgtaattgggaagcttttgaagcaatagagaaaacgttacgagaattagaatcagatgagacaatgttagtacaatcaggaaagccagttgctgtatttaaaacacatgaagaagcgccacgtgtattaatttcaaattcagtattagtgcctgaatgggcaaactgggatcattttaatgaattagataaaaaaggtttaatcatgtatggacagatgacagccggtagttggatatatattggttctcaaggtattgtgcaaggtacttatgagacatttgccgagctaggtaatcaacactttaatggagatttagcaggcactgttacactgacagcaggtttaggtggtatgggtggtgcgcaaccgttagcaattactatgaatcatggggtagcaatttgcgtggatgttgatgaaacacgtgttgataagcgaattgatacgaaatactgtgatgttaaaacagctgatttagatgaagcattaaaattagcagaagaggcgaaagaacgtggagaaggattatcaatcgggttagttggaaatgctgtagacatccatcaagcgattctagaaaaaggatttaaaattgacattattactgaccaaacaagtgcacatgatccgctaaatggatatgtgccacaaggatactctgtagaagaagcgaaagtattgcgtgaaaaagatccgaaaaaatatgttgaactgtcacaagcttcaatggcaaagcatgttgaattaatgcttgaattccaaaaacgtggcgctgtagcatttgattatggtaacaatattcgtcaagtagccttcaataacggagtgaaaaatgcttttgacttcccaggctttgtaccagcttacattagaccattattctgtgaaggtaaagggccattccgctttgctgcgttgagtggtgatccaaaagatatcgagcgtgcggatgaagaaatgcgcaaacttttcccagaaaatgaaaagttattaagatggcttgatttagctgaagaaaaaatttcatatcaaggactaccatcacgtattgcttggttaggctatggagaaagagcgaaaatgggcttagctttaaatcgtcttgtacgtgacggtgaaatttcagcaccaattgttattggacgagaccatttagatgctggttcagttgctagtcctaaccgtgaaacagaaagtatgaaagatggtagtgacgcggttggtgattgggctgtattgaatgcactcattaacacagctgcaggtggttcatggatttcattccatcacggtggcggtgttggcatgggatattcacttcatgcgggtatggttgttgtagcagatggatcagagcgtgctgaaagaagattggaacgtgtattgacgactgacccaggtatgggtgttgcccgacatgttgatgctggctatgacatcgctattcaaacagctaaagaaaaaggtattcatattccaatgattgataaagcaggtgataagtaa

SEQ ID NO: 406331 - DNA, 885 bp, Staphylococcus aureus
atgaaaattattcagttagaatacttcttggctatcgtgaaatataatagttttactaaagctgcacaatttttacatattagccagccatctttaactgctacgattaaaaaaatggaagcagatttaggttatgacttatttacacgttcaacaaaagacatcaagattaccgaaaaaggaatacagttttatcgttatgcgagcgaattagttcaacaatatcgatccacgatggaaaaaatgtatgatttaagcgttacatcagaaccaaggataaaaattgggactcttgaatctacgaatcaatggattgcgaatttaattcgaaagcaccattccgactaccctgaacagcaatatcgtttatatgaaatacatgataaacatcaatctatagagcaattactgaattttaatattcatttagctataacaaatgaaaaaataacccacgaagatataagatccattcctttatatgaggaatcttacattttattagcacccaaggaaacatttaaaaatcaaaattgggtagatgttgaaaatttgccactcatattaccaaacaaaaattctcaagtgcgcaaacacttagatgactattttaatagaagaaatattcgtccaaatgtcgttgtagaaacagatcgattcgaatcagcagttggatttgttcatctcggcttaggttacgctatcattccgagattttattaccaatcatttcacacgtctaatttagaatataaaaaaattcgtccaaacttaggccgaaaaatttatatcaattaccataaaaaacgcaaacactccgaacaagtacatacattcgtacaacaatgccaagattatttatatggacttttagaggctctttaa

SEQ ID NO: 406332 - DNA, 420 bp, Staphylococcus aureus
atgttaaaatctattaatcatatatgcttttcagtcagaaatttaaacgattcaatacatttttatagagatattttacttgggaaattgctattgactggtaaaaaaactgcttattttgagcttgcaggcctatggattgctttaaatgaagaaaaagatataccacgtaatgaaattcacttttcatatacacatatagctttcactatagatgacagcgaatttaaatattggcatcagaggttaaaagataataacgtgaatattttagaaggaagagttagagatattagagatagacaatcaatttactttaccgaccctgatggtcataagctagaattacatactggcacacttgagaacagattaaattattataaagaggctaaaccacatatgacattttacaaataa

SEQ ID NO: 406333 - DNA, 936 bp, Staphylococcus aureus
gtgtacaagcaaggtgaaccaaatttatggactggaaggttagatagtgaaacagacccgaaaaaatttagacattttcaaacagtaacatttgaagatttgtctaagctggaaaagagtagtatgccatcaggggtcggtatattaggctatgctgttgacaaaggtgttgctttaaacaaggggcgcattggtgcaaaagaaggaccagatgcgattaaacaagcatttgcaggtttgccggatttgaatcaatgtgaaactttagtcgattacggaaatgtttatcatgatcatgaggaattaattgatactcaaaaagaatttgctatgcttgcagcgaagtcaattgctaatcatagacaaacatttttattaggtggtggacatgatattgcgtatgctcaatatttagcaacacgtaaagtctatccaacacaatctattggtgtgataaatattgatgcgcattttgatacacgtgctgaacaacaatctacatctggaacgagctttagacaaattttagaagaagatgaaaacacagattatttagtgcttggtattgctcaaggtggtaatacgcaaagtttatttgattatgctaaagagaaaaagattgattatgtctttgcagatgaattattgagtcacgtatcaccaacaattaaagatatgattgaacgttttgtacatgaacatgatgtcattatgtttacgatttgtatggatgtcattgatagtgcgtttgcgcctggggtaagtgcgccggcagtgttaggtttgtatccacatactgttcttgaattagcaaaacgtattattccaagtgataaggtgtcttcagttagtattgctgagatgaatccaacatatgacgctgacaatagaactgctaagctcgttgctaatttagtgcatcattttttaaaataa

SEQ ID NO: 406334 - DNA, 1260 bp, Staphylococcus aureus
atgaagaacaataaaatttctggttttcaatgggcaatgacgattttcgtcttctttgtcattacaatggcgttatccattatgctcagagatttccagtctataattggtgtcaaacactttatatttgaagttacagatctagcaccattaattgctgcaatcatttgtatactcgttttcaaatataaaaaggtccaacttgcaggtttaaaattctcaatcagcctgaaagtaattgaacgtctattgctagctttaattttacctttaattattctaattattggtatgtacagctttaatacatttgcagatagctttattttattacaatcaacaggcttatcagtacctattacacacattctgattggacatattctgatggcgttcgtagtagaattcggattccgttcatacttacaaaatattgttgaaacgaaaatgaacacgttctttgcaagtattgttgttggtttgatgtattcagttttctcagcaaatacaacttatggtacagaatttgctgcttataacttcctttatacattctcattctctatgattcttggtgaattaattagagcgactaaaggacgtacaatttatattgcaacgacattccatgcttcaatgacattcggacttattttcttgtttagcgaagaaatcggcgatctattttcaatcaaagtcatcgccatttcaacagcaatcgttgcagtaggatacattggtttaagcttaattatccgaggtattgcatatttaacaacaagacgaaaccttgaagaacttgagcctaataattatttagaccatgtcaatgacgatgaagaaactaatcatactgaggctgaaaaatcttcttcaaatattaaagatgctgaaaaaacaggtgtagctactgcatcaacggttggtgttgctaaaaatgatactgaaaatacagtggctgacgaaccaagcattcatgaaggtactgaaaaaacagaacctcaacatcacataggtaatcaaactgaatctaatcatgatgaagatcatgacatcacttcggagtcagtagaatcagcagaatcagttaaacaagcaccacaaagtgacgatttaacaaacgattcaaatgaagatgaaatagagcaatcattaaaagaacctgcgacttataaagaagacagacgttcatcagttgtaattgatgcagaaaaacatatcgaaaaaactgaagaacaatcttcagataaaaacaaataa

SEQ ID NO: 406335 - DNA, 687 bp, Staphylococcus aureus
atgaaagatgtcaaagcactcaagttaatgacattaaatgatgttttaagtcaaatcaatggtgacatgacgctgggaattggtacaggaagtacaatggaattactcttacctcaaatggcgcaactaattaaagaacgtggttacaatattacaggtgtatgcacttctaataaaattgcatttttagcaaaagaattaggtattaaaatatgtgaaatcaatgatgttgatcatatcgacttagcaattgatggtgctgatgaagtagatccatctttaaatataattaaaggtggcggtggtgcgctgttcagagagaaagttatagatgaaatggcatcgcgttttgttgtggttgtcgatgaaacgaaaatagttcaatacttaggtgagacgtttaagttaccagtagaggtggataaatttaactggtatcacatattacgtaaaattgaatcatacgctgatataaaagtagaacgtcgtgtaaacgaagatgtcgcatttataactgataatggcaattatattttagattgtaagttaccaaaaggaattgacccatataagttccatgagtatttaattcatctgacaggtgtgtttgagacaggatacttcttagatatggcagatcaagttattgtaggcactcaagagggtgttaaaattttagaaaaataa

SEQ ID NO: 406336 - DNA, 654 bp, Staphylococcus aureus
atgatatcaattcacgcaatttcgacaggaaaaatccaagatttgccttatagctcgaaaagaccgatgcgctctgctttagataaaactaagatttcacaaacaacatggttatcttcaactggtttcactggtgatgaacaggcttataaagatcatggtggaccacataaagcagtttgtgggtttagtaagcataattatgcactgtatcaagatgatttacctacactacctactcatgcgatgtttggagagaatttaacatttgattatttagacgaatctgatgtttactttggtaatcaatatcgtttaggtgaagcgttaattgaggtttctgaaattagagaaccatgctggaaaattcaagcaaaatataatattcctgatttagtgaagcgcatgtctacatctggtaaaacaggtttctatttccgggtattaaaacaaggctatgtatctccaaatgatcagctttacttaatacaagaagcaccaatcgaacatcgtttatctgtacaacagcttaatgacctttattataatgatagacaaaatcaagatatgttacgatatgcactaaacaatccatttctgtcaccaacaagacgcgataaacttcaaaaaatgtataacagaacattgaaataa

SEQ ID NO: 406337 - DNA, 1020 bp, Staphylococcus aureus
atgatagttgaagttgagcaccaaagacaaggtgtagatttaatcaaaattgataatgatgaaactaaaattatttttacgaattatggagcaagagtagtgtcttggaaatatcatgataataatattgttcttggaaatgttgttgaagcggatgaattttatcatagtaatccttttaaatttggtgcttctataggaagatatagcggtagaattgataatgctaaatttaagttgaaaggtaaagaatatcagttagaaaaaaacaacggtgaacatcatttacatggtggatgtcatggtttggacaataagttatttgattatgaaattagaaatgaaattgctcaaattaaagttatatttaagacggtgttgaaatcagctgatgatcatttcccgggtgatatcgatgtgacgattacacatatttatgatgcggatcaccaatggtcgattgaatacgaagcagttgcatcagaagacacattgtttagtcctacgaatcatgtgtacttcaatttgaatcgagataataatgtcgttgataatcatcgcatttcaagtaatcaattagatatgtatgtattagatgagcgaaatattgttacaggtgatattctagatttacatgaagtgtttgaagataacaagataaaattgagtgatatttttacatcacaacatgcgcaattaagccaacaaatgacacgttttggtggtctcgatcacccatttacagttggtgaacataaaatgtatgttgaaaatcatgaatttatgttagaggtcgatacagatatgcctcatgttgtgttctttacttttaaccagcctgatgagtgggatagtccatttaatatttataaaccacattctggctttacattagaaacacaatttttaccaaatgatattaatttatatggtgaaaaagcaccgtcaattttaaaagctggtgaagtgttcaattcgaaaacaagtttccgtatcgaagaaaaagtagaaaatgattaa

SEQ ID NO: 406338 - DNA, 327 bp, Staphylococcus aureus
atgttatatccgatttttatatttatattagctggcttatgtgaaataggtgggggatacctgatttggctgtggcttagggaaggacagtcttcacttgttgggctaataggcggtgcgatactcatgttatatggtgtcattgcgacatttcaatcatttccatcattcggaagagtatatgcagcatatggtggcgtatttatcatcatgagtttgatttttgcgatggtcgtagataaacaaatgccagataaatatgatgttatcggtgcaatcatttgtattgtaggtgttttagtaatgttgctacccagcagagcttga

SEQ ID NO: 406339 - DNA, 1233 bp, Staphylococcus aureus
atgcataagttttgggcgacatttactttgacatatatcaaaaaaattaaagctaaatcatttgtaatttttatgattattattgctgccttaatgattggcctatctaacattgataagattattaacatgtttgatgatggtccagataaaattggtgtagcagcaccgaatgaacaaatctataaggttttcaagcaacaggcgaatacatttcatagtgatgctaagtttactaaagtttctatagaagatgctgaaaaagaagtaaaaaaacataaacttgataaagcttatattatcaaggtgaatcaaaatcgcacgttacaagggacaatcattagtgagaagcgagtaagtcatgaagattcacaaaaagtacaagcactgcttacagctattcaaacaaatatagtagccggggaattaaatatcaacaaagaagacttacaaaaattacaagcacaaagtaaagttgataataaggtgatttctaatgatgaagtcgataaagtatcagaaggacaaaagattttcaactatgctttagcttatggcattatctttctaatgttcttcattgttttaaattatgcatctcaaatagctatggaaattgctagtgagaaaacatcgcgtgtcattgaaatgattattacaagtatttcaccaatccaacatatttttgctaaaattttaggcgttatagcagttgccgtgactcagattattttaattgtattgatggcagttatatgcatttttgcctttgacttaaaagacttgctacaaggttttaacgtggaaatgaatcaattgtcttggcaaattattattgtcggaattataagtagtattgttggaattacggcgtatgtattacttgcagccatcctcggatcattaacatctagaatagaagatttaaatcaatctttgatgccactgacattacttggtatgattgcattttatatcgcgatattcacgataaataatcctgatggacaacttgctttaatcacaagttatattccgtttttagcgccatttcaattagttgtacgcgctcaaacttcagggcttcaaatatatgaggtcatcttaagttctttaatctcaattgtaatggtagctgtcttgatatggattgcaattaaaacatataaagattcagtacttacatttgaacgtggcttatttaattcaatgaaacgtgtatttaaaaaataa

SEQ ID NO: 406340 - DNA, 900 bp, Staphylococcus aureus
atgggacttgtaattgaacatgttacgaaacgttttggcaagatgacggcagtaaatgatatttcattaaagttagaatcaggtaaaatgttaggttttctaggaagaaatggtgcaggtaaaacaacgacatttcgtatgattttaggcttaagtgaaccaactgaaggacacattacgtataacggtaaaaaactagataaaacaatgtacaatcgtattggttatttaccggaagaacgcggtttacatgggaaattgacagttgaagaagaattgaaatatttggcaactttaaagggaatgtcaaaaacagaaatacaacagcaaatatcgtattggcttgagcgttttgatattactgaaaaccgcaaaaaacgaattgatagtctatcaaaagggaatcaacaaaaaattcagctgttagcaagtatgttacataaaccagaattactaatattagatgagcctttcagtggtctagacccagttaatgttgagttattaaaagaagcagttaaagacttaaatgattggggcagtacaatcgtttatagttctcaccgtatggagcatgttgaagaattatgtgatgatgtttgtattttagataaaggtcaacttgttgtttctggtgatatcaatcatgtacgtgcatctaatggtaacaagaaagttgtcattgaatcagaaacaacactaccagatttaacaaacattagaggcatcattcatagtgaaaacatgaagcaaggtcttcagttgacgattgagaatgaagacgtagccaaagatatttatcaagttgtggcacatcaaggttatgttaaacgattccaagttgtagaaccatcattacaagatatattcattgagaaggttggtggcaaggatgcataa

SEQ ID NO: 406341 - DNA, 648 bp, Staphylococcus aureus
atggaacaattacctcaagtaggttttatgaaatcattcgttttattttggaaaaattatgtaaattttaaggggagatcaagacgtagtgaatattggtatatggcactatggcatttgatacttatggttccagctgtgtgtgtgctaataataaacctatttctattctttatttctatagcggcggataacgaaacattaatagttatgagtatattgatgattatccttacatctgtgtatacttttgtctatagtttggcaacgtttattccaaatttagcgttgtgcgttcgaagatttcacgatatatcaagaacaatgttatttccaatgattatgacagtattcagtattatattttatatagtattacagattatcgatagttattatgacagtgattttacattaatgccgatgggtcttaatattttgttagtacttctttattttgtttatttaggcctaacaattgttatgatagtattcctatgctttgacagtaagccggcaaataaatatggcgaaagcccaaaatacccgtctacaattaaaaatcaaccagtgacatctgaaacaccggaaaaagcgtgtacatctgaaacaccgaaaacaccggaagaaacagataatcaattgtaa

SEQ ID NO: 406342 - DNA, 609 bp, Staphylococcus aureus
atggatttcgttaataatgatacaagacaaattgctaaaaacttattaggtgtcaaagtgatttatcaggataccactcaaacgtatacaggctacatcgtggaaacggaagcttacttaggtttgaatgatcgtgcggctcatggctatggcggtaaaataacacctaaagtcacgtcattatataaacgtggtggtacaatttatgcacatgtcatgcatacgcatttactcattaattttgtaacaaaatctgaaggtatacctgaaggcgtacttatccgcgcaattgaaccagaagaaggtttatccgctatgttccgtaacagaggtaagaaaggctacgaggtaacgaatggcccaggaaaatggactaaggcatttaacattccacgggctatcgatggcgctacgttaaatgactgtagattgtctattgatactaagaatcgtaaatatcctaaagatattattgctagtccacgaatcggtattccaaataaaggtgattggacacataaatctttacgttacacagtgaaaggtaatccatttgtgtctcgcatgcgtaaatcagattgtatgtttcccgaagatacttggaaataa

SEQ ID NO: 406343 - DNA, 1209 bp, Staphylococcus aureus
atgatagaacttaatgcaattacaacattatgtttagcttgtatcctttatttacttggtaaggctatcgttaatcacgttaattttttaaaacgtatttgtataccagcaccagtgattggcggcttaatctttgctattttagttgcggctttggattcatttggcatggttaagattaaattagatgcttcattcattcaagatttcttcatgttagcattctttacgacaatcggtcttggtgcatcattgaaattatttaaattaggtggcaaagtcttgctattatactttatgttttgtgctatcatttcagtcattcaaaacatagttggtgtatcactagcaaaagtattaaatattaaacctttgttaggattaacagcaggttccatgtctatggaaggcggtcatggtaatgctgctgcttatggtaagacaattcaagatttaggtattgattcggcactgacagcggctcttgcagctgcaactttaggtcttgtatttggagggcttatcggtggtccagttgtaaaatttttaatcaaacgttataacttaaagcctcaacatagtgacgatacatttaaagattatagccaagtagcatataacgaacatttacatagtaaatttaatgccactgaagtattcttcattcaatttacaatcgttgtattctgtatggcagttggaagttatttcagtcatttgtttacagctcaaacagggattaatgttccaatttacgttggctcattatttgtagctgttattgtccgaaatatctctgaaagttttaattttaatattgtagatttaaaaattactaatcaaattggcgatgtcgcattaggtattttcttatctcttgcgctaatgagcattcaattaatcgaaatttataaacttgctatacctcttattattatcgttttagttcaagttgtcgttatgattttatttgctgttttaattttatttagaggtttaggaaaagattatgatgctgcagtaatggtaggtggttttatcggtcatgggcttggtgcaacgccaaatgccatggcaaatttagatgttattactaaaaaatatggaaactcacctaaagcatatttagttgtacctattgttggtgcattcttaatcgatttaattggtgttatagtcattatgggattcatacaatggtttagttaa

SEQ ID NO: 406344 - DNA, 1050 bp, Staphylococcus aureus
atgagtgattttcaaagagaacagagaaaaaatgaacatgttgaaatagcaatggcccaatctgacgcaatgcattcagattttgataagatgcgttttgtgcatcattctatcccatcaattaatgtaaatgatatcgatttgacatcacagacgcctgacttaacgatggcatatccggtttatattaatgcaatgacgggtggtagcgagtggacgaaaaacatcaatgaaaagctagctgtagttgcaagagaaactggcttagcgatggcagttggatcaacacatgcggcattgagaaatccacgcatggctgagacgtttacgattgcgcgaaaaatgaatcctgaaggcatgatttttagcaatgttggtgcggacgtaccagtagaaaaggctttggaagcagttgaattacttgaggcacaagcgttacaaatccatgttaattctcctcaagaattagttatgcctgaagggaatcgtgaatttgtgacttggttagataatatagcgtcgattgtatcacgagtgtctgttccagtcattataaaagaagttggatttggtatgagcaaagaattaatgcatgacttacaacaaataggcgtcaagtatgtcgatgttagtggcaaaggtggtactaactttgtagatattgaaaatgaacgtcgtgcaaataaagatatggattacttatcatcatggggacagtctacagttgagtcattacttgaaacaacggcttatcaaagcgaaatttcagttttcgcgagtggtggtttacgtacaccactcgatgcaattaaaagtttagcacttggtgcaaaggcaactggtatgtcacgtccgtttttaaatcaagttgaaaataatggcattgcacatacagtagcttatgtagaatcatttattgaacacatgaaatcaataatgacgatgttagatgctaaaaatattgacgacttaacacaaaaacaaatcgtatttagtccggaaatattgtcatggatagaacaacgtaacttgaatatacatcgaggataa

SEQ ID NO: 406345 - DNA, 948 bp, Staphylococcus aureus
atggctttaaagatacggtatcaaactacatatgaaccgtttaaagtagttgatgatatcaaagagataccaaaagatgcgactattgtttggtatgattttgatgaaccgaatgaacaagaaaatgaatggtttaaagcacattttaattttaatgatttagaagtggatgatgcaattaacggtatgccacgagctaaatataaatcttataaagattatcaatacttagtattccatagtattatggggtcaaactattcaccaatagcactaaatatttttatacaagacaatgtattagtaacatatcatcatcaaacgttggaatcattaaataaagtagtctataagtatatgaatacattagatgcagaattagattgtgcagatgtcgtcatattaattttagatatgatggttgataaaaatttcaactttgtatatgcacttgaagatagtgtttatcattttgaagaccgccatgtagatgatcgctttaataaaatggtcatggatagtgtctttaagttacgttcggatttgattaaagtaaaacgtgtactgtttcctatgcaagagctaattgatacaatgaaacaaaatggtgatttgattatagataataaacattcgctatacattcaacatatcgatgaccacttgattaagcaacgtaatatcattcgtactgctcaagaaatgacaaacgaaatacgagaaaattttgagtcatacacgtcatttagaatgaatagtattatgcaagtactgacattagtatcagttatattttcaccgttaacattcatagctgggatttatggtatgaactttgtaaatatgccggcattacatttacattatggatattatatttgcttagctgtaatgtttgttatagctgtcgtattaatcatctttttcagacgtaaaaaatggttttaa

SEQ ID NO: 406346 - DNA, 492 bp, Staphylococcus aureus
atggttattatcaaacaactttttacacatactcaaaccgtaacatctgaattcattgaccataacaatcatatgcatgatgcaaattataatatcatttttagtgacgtcgtgaatcgttttaattacagccacggtctttctttaaaagaacgcgaaaatttagcatatacgctatttacactagaagaacatacgacatacctctcagaattgtctcttggcgatgtatttactgttactttatatatttatgattacgattataagcggttgcatttatttttaacattaactaaagaagatggtacactagcatcaacaaatgaagtaatgatgatgggaattaatcagcacacacgtcgttctgatgcttttcctgaatcattttcaacacaaatagcacactattataaaaatcaatcaactatcacttggcctgaacaattaggacataaaatagcaattccacacaaaggagcattaaaatga

SEQ ID NO: 406347 - DNA, 420 bp, Staphylococcus aureus
atgacagatgcattacaacaaaagattcatatcgaattactagatttattagatgatgttaagtttgaattaacagaattaaatgcacaaaaagggttatacattaacggaccagcaaatcagctacttaagcgtggcgtgcatatggcttatgttcaaggacaaaagcaagccatcgataatattatgactattgtggaacaacagcttgaagatcaacatttcctagaacattatgataaatttcaaaatgaggttgctcatcgcaattatgataaaacagctaactttgcagaacttagtgatattccacgtcaattcgataattttttagatcaattttatcaaattaaagggcaatactttatcatcacacatatcaatacacttattggtgattttcactcagaagctcattaa

SEQ ID NO: 406348 - DNA, 921 bp, Staphylococcus aureus
ttgattagaaaccgtgttatgaatagcgttgtcaataaatatttgcttcacaatcgctcgattatgtttaaaaatgatcaagatgttgaaagatttttttataaaagagaaattgaaaatagaaaaaaacataagcagccttcaacattaaatgttaaagcaaatttagaaaaattgtcattagatgatatgcaagtctttcgctttaatttcagacatcaaattgataagaaaattttatatattcacggtggattcaatgcactacaaccatcaccgttccattggagattgttggataaaatcactttaagtacattatatgaggttgtactgcctatctatccaaagacaccagagtttcatattgacgatactttccaagcgatacaacgtgtttatgatcaattagtatctgaagtaggacatcaaaatgtcgtagtcatgggtgatggttcaggtggtgcactggcattatcctttgtacaatctcttttagataatcaacagccattaccgaataaattgtatttaatctcaccaattttagatgcaacactatctaataaagatatttcggacgccttaatcgaacaagatgcggttctaagtcagtttggtgtcaatgagattatgaaaaaatgggcgaatggcctaccattaacagataagcgcatatcgccaattaatggcacaatagaaggattgccaccagtttatatgtttggtggtggacgtgaaatgacacatcctgatatgaagctatttgaacaaatgatgttgcaacatcatcaatacattgagttttatgattatcctaagatggtacatgattttccaatttatccaattagacaatcacataaagctattaaacaaattgccaaatcgatagatgaggatgtaacacaaaataactaa

SEQ ID NO: 406349 - DNA, 639 bp, Staphylococcus aureus
atgacaaatccaaatcaacgattagaaccatttgatgagacatttcaacaaccgaatattcatcgtggtaagcgatatggtaagaaaaaacgttcattggtaagcatgattattcaaatcattgttgttatattaaccgcaatcgctggatacagcatgtggaaacaacccatttttaatattgtcttcaccaaagaatctgtagattttgatggcattaaaaattttaacgagacaattggaaaaatgcatcaattaaatattaatttgggtaatatcaatgatttacaacaaggaatcgatcgcttaattttagtctttaacggtttctttattttatgtatcgttagcctagtcataacaatactgacaattgtatttaatcgcacagttctaaaagtagtaaatattttagtgttaacaattatgttagtcattacattgtatttcagttatattattaaagcactcgcacaagaaattgcagatgttttcaaaaaatattatttaaatgtaccaccagatcaagtgattacagaagctgacgctattcataacggcatcattttacttggctgtagcatcggtttacttgttataagcttattcttccgtaatcgcatgcctcgtttaaaataa

SEQ ID NO: 406350 - DNA, 1932 bp, Staphylococcus aureus
atgactacgaccttcattattagctacattattttagcgctcattattgttggggttatcaatttatttttaataagatcaagaaaaaaaggcaaacgccaacaaaaggaacaacaatttacgacacgtcaatcaaatcaatctaaatttaaagctagtgatttagacaaaacaactgatcaatcgacacaacgtatgacgcatgaagagttgcgtgttgacaatcaagatgatcatagccaagttagtctaaatggttacacaaaggggtctgagaaagatcaagaagcattcactaataataaggatgaggaagcagttgctgctaaaaatcctgaatcagaagaatataaagtgaatgaaaaaataaaaaaagaacataaaaactttatttttggtgaaggtgtttcacgcggtaaaatattagcggcattattattcggtatgtttattgcgattttaaaccaaacattattaaatgttgctttaccaaaaattaatacggaatttaatatttctgcgtcaacagggcaatggttgatgacgggattcatgttagtaaacggtattttaataccaattacggcgtatctatttaataaatattcatatcgaaaattatttttagttgcgttagtactctttacaattggttcattaatctgtgcgatttcaatgaatttcccaatcatgatggttggacgtgtattacaagccattggtgcaggtgtactaatgccattaggttcaattgttattattacaatttatccacctgaaaaacgtggtgctgccatgggtacaatgggtatcgcaatgattttagcacctgcaattggtccaacattatcaggttatattgtacaaaattaccattggaatgtgatgttttacggtatgttcattatcgggattatcgctattttaattggttttgtatggtttaagttatatcaatatacaacaaaccctaaagctgatatcccaggtatcatttttagtacgattggttttggtgctttgttatatggtttctcagaagctggcaacaaaggttggggttcagtagagatagaaacaatgtttgcgattggtattatctttattattctattcgttattagagaattaagaatgaaatcaccaatgttgaatttagaagtattgcaattcccaacatttacattaacaacaattattaatatggttgtaatgttaagtttatatggtggtatgattttattaccgatttatttacaaaatttacgcggattctcagcattagattccggattgttattattacctggttctctaattatgggtctactaggaccatttgcaggtaaattgttagatactattggtttaaaaccattagctatctttggtattgctgtaatgacttatgcaacatgggaattaactaaattaaatatggatacaccatatatgacaatcatgggtatctatgtacttcgttcatttggtatggcatttataatgatgccaatggtaactgcagctattaatgcgttaccgggacgacttgcctctcatggtaatgctttcttaaatacgatgcgtcaattagcaggctctataggtacagcaatcttagttactgtaatgacaacacaaactacacaacacttatcagcttttggggaagagttagataaaacgaatcctgttgtacaagatcatatgcgtgaattagcatcacaatatggcggacaagaaggcgcaatgaaagtgttactacaatttgtaaataaactagcaacggttgaaggtattaatgatgcatttatagttgcaacgatatttagcatcatcgccttaattttatgtttatttttacaaagtaataaaaaagcaaaagctacagctcaaaagttagatgcagataatagtatcaatcatgaataa

SEQ ID NO: 406351 - DNA, 648 bp, Staphylococcus aureus
atgaaaaagatgatattaattaatgtcattacggttgttgtactgttagcaattgggattgctggcttttatttttggaataaaacaacaagctatgtaacaactgataatgcaaaagtaaatggcgatcaaattaaaatagcaagtcctgcatctggacaaattaaatcacttaatgttaaacaaggtgacaaactcgataaaggtgacaaagtagcaattgttactgtacaaggtcaagatggcgaaacgaaagatatggatcttaaaatgcctcaaaaaggtacaattgccaaattagatggtatggaaggttcaatggtgcaagctggtaacccaatcgcttatgcatacaatttagatgatttatatgtaacagcaaatattgacgaaaaagatattaaagatgttgaagtaggtaaagatgttgatgtgactattgacggtcaaaaagcttctattaaaggtaaagttgatagtattggaaaagcaactgctgcaagcttttcattaatgccatcatcaaatagtgatggtaactacactaaagtttctcaagtaatacctgttaaaatcactctagaatcagaaccgtctaaacaagttgttcctggaatgaacgctgaagtaaaaatccataaaaattaa

SEQ ID NO: 406352 - DNA, 552 bp, Staphylococcus aureus
atgaaacgacaagccaaaatagaaattcaaaacgcacttgttgatttgatggctgaatatccttttcaagaaatatccactaaaatgatttgcgcgtattgtaatattaatcgttctactttttatgattattacaaagataaatttgatttattggataccatcaactcaaagcataaggaaaaattccaatttcttctaagcgcgctacatcataatttcgaaaatattaaacaggataagcttaaactttataaattcttcattattattgctaagtatatcaagcacaatgagcagtttttcaaagacattttagttacctatccaatgaaaacattattcatagactatataaatttagcgagagattactatcaacaaattatgaatgactatagtactacagtaaccaataaacagctttatgttacatatatcataggcggtcaagctggggtgtttattaattggctttcgaatggttgtaatgaatcacctgaagaagttgctgacattttattggctaatacgattaaacttcaaaactaa

SEQ ID NO: 406353 - DNA, 1209 bp, Staphylococcus aureus
atgaatgatttaacgcattttaacaagcgttcaccgatatttattattattttaggatctttgacggccattggagcattatcgatagatatgtttttgcctggattaccagatattagacatgattttcaaacaacgacgtctaacgcacaattaacattatcgatgtttatgattggtttagcgtttggtaatttgtttgctggtccaatttcagattcaactgggcgcagaaagccgcttattatagctatgattatttttacattagcaagtttaggtattgtttttgtacataatatttggctgatggttgcattaagatttcttcaaggagtgacaggtggcgcagcagcagttatttcaagagctatagcaagtgatatgtatagtggtaatgaactaactaagtttatggcattattgatgcttgttaatggtattgcaccagttgttgcgccaacaatagggggcataattttaaattattctgtctggcgtatggtctttgtcattctgactatctttggcttcgtcatggtcataggttctttattaaaagtacctgaatcattaacagtgacaaatcgtgagtcaagtagtggattaaagacaatgtttaaaaacttcaaaatattattgaagacgccacgttttgtattaccaatgctcattcaaggtatgacatttgtaatattatttacttatatttctgcgtctccgtttattattcaaaaaatttatggcatgactgcaatacaatttagttggatgtttgcaggaattggtattacgctcattatatcaagtcaacttactgggtaccttgttgattttatagactcacaaaaattgatgagaggcatgacgatgattcagattatcggtgtaattttagtgacgattgtattgcttaatcattggaacttttggattttagcgataggatttatcattttaatagcaccagtgacaggtgttgcgacacttggttttacaatagctatggatgaaagtagtagtggtagagggagttcatcaagtttattaggtttagtacagtttttatttggtggtgttgcatcgccattagtgggggtaaaaggtgaagataatcctataccttacataattattattatagctacagcagttatattaattattttacagatttataatatgaaggtatttaaaacaaatcgatga

SEQ ID NO: 406354 - DNA, 1383 bp, Staphylococcus aureus
atgaaatcttgcccgaagtgcggacaacaagcacaagatgatgtacagatatgtacacaatgtggacataaatttgatagtcgtcaagcattatatagaaagtcaaccgatgaagatatacaaactaataacatcaagatgagaaaaatggtgccttgggcaattggttttttcattttaatcttaattattatattgttctttttactaagaaacttcaattcacctgaagcgcaaactaaaatattagtgaatgcgattgagaataatgataaacaaaaagtagcaacattattaagtactaaagataataaagtagattctgaagaagcaaaagtatacattaactatatcaaagatgaagttgggcttaagcaatttgtcagcgaccttaaaaatacggtacataaattgaataagagtaagaccagcgtagcttcttatattcaaaccagatctggtcaaaatatattacgtgtaagtaaaaatggcacacgttatatctttttcgataatatgagctttactgcacctaccaagcaaccaattgttaaaccgaaagaaaaaacaaaatatgagtttaaatctggtggtaagaaaaagatggttatagctgaagcaaataaagtgacgccaataggtaattttataccggggacatatagaattccagctatgaaatcaactgagaacggtgattttgcaggccatttaaaatttgattttagacaaagtaattctgaaacggtagatgttactgaagattttgaagaagcaaatatatctgtaactttaaaaggcgatacaaaattaaatgatagttctaaaaaagtaactataaatgaccatgaaatggcattttcaagttccaaaacgtatggtccatatccacaaaataaagatattaccatttcagcttcaggtaaagcgaaagataaaacatttacaacacagacgaagacgattaaagctagcgatttaaaatacaatacagagataactttgaattttgacagtgaagatatcgaagactatgttgaaaagaaagaaaaagaagaaaacagcttgaagaacaaattgatagaattctttgctggatattctttagcgaataatgctgcgtttaatcagtcggattttgattttgtatcatcatatataaaaaaaggatcatctttttatgatgatgtaaagaagcgtgtatctaaaggaagtttaatgatgattagttcaccacaaattatagatgctgaaaaacatggtgataagattaccgcaaccgtaagattaataaatgaaaacggtaagcaagtagataaagaatatgagcttgaacaaggctcgcaagaccgcttgcaattaatcaagacatcagaaaaatag

SEQ ID NO: 406355 - DNA, 456 bp, Staphylococcus aureus
atggtaaaacatttacaagaccatattcaatttttagagcagtttataaataacgttaacgcattaactgcaaaaatgttgaaagatttacaaaatgaatatgaaatttcattagagcagtctaacgtattaggtatgttaaataaagaacctttgacaattagtgaaatcacgcaaagacaaggtgtaaataaggccgcagtaagccgacgaattaaaaagttaatcgatgctaaattagttaagttagataaaccaaatttaaatattgatcaacgtttgaaattcataaccttaactgacaaaggtagagcatatttgaaagaacgtaatgcgattatgacagatattgcgcaagatattactaatgatttaaattctgaagatattgaaaatgtaaggcaagtattagaagtcatcaatcatcgcattaaaacatatagcaatcataaatag

SEQ ID NO: 406356 - DNA, 969 bp, Staphylococcus aureus
atgttattgaatttattattaatatttatacttatcgttatttgtccgttaattttcaactatactctgacgttaaatttaacatgctacatcttagttgtcatatcgatatttttgtcactcatctatagcatcatgacctatactttcccttggtctatgtttgtaacatttataataatcagtattatcatgctattcaaacatagatatttattttctcatacttctagtcgcttatttattaaaaaattattatctttttcatataaatttgtactctacacatcagcacttctatttataagtacgattcagtcacctattgtgaaaggtttgtctatgtggttagctatattatgtctttccctgttactaacctttatttgttatctcgtttggacagtatcatatagacatagatcatacaacaaagaagttgatatcataattgtgttaggtgctggtatttttaccgaatttgtcacaccaatgcttgcagcgcgtttagatcgtgcacttgatatctatcaacaacaagcatcagcaacaaagatcattgtatctggcggacaaggaccagacgaaccaatttctgaagctttagctatgcaacgttatttgattgcacatggtgttgataaaacagatatactaatggaatctcactctataaatacatacacaaactttttatattctaaacaaatcatcaacaatttgtatcatgaagcagttaaaattgtttgtgtaacaagtcagtttcatgtattgcgcgccttacgactagcccaaaaattaggtttatctatcgatggtgtcggaagtcatacaccatatcactttttcttacatgtgctcatcaaagattatctaggcgtaatgtatcagtatagattgttattaacgttatattgttcaagtagttggtttatatgtctttacgccgcttttatttataatagttaa

SEQ ID NO: 406357 - DNA, 201 bp, Staphylococcus aureus
atgtggattgtcatttcaattgttttatctatatttttattgatcttgttaagtagcatttctcataagatgaaaaccatagaagcattggagtatatgaatgcttatcttttcaagcagttagtaaaaaataatggtgttgaaggtttagaagattatgaaaatgaagttgaacgaattagaaaaagattcaaaagctaa

SEQ ID NO: 406358 - DNA, 2448 bp, Staphylococcus aureus
atgttagacaaagtcactcaaatagaaacaattaaatatgatcgtgatgtctcatattcttatgctgctagtcgtttatctacacattggactaatcacaatatggcttggtctgactttatgcagaagctagcacaaacagttagaactaaagaagatttaactgagtacaataaaatgtctaagtctgaacaagccgatataaaagatgttggcggatttgtcggtggatatttaaaagaaggcaaacggcgtgctggtcaagtcatgaatcgttcaatgctaacacttgatatcgattatgcagcccaagatatgactgacatattatctatgttttatgattttgcatattgtttatattcaacacataagcatagagagataagtccaagactgcgtttagtgattcctttaaaacgaaatgtaaatgcagatgagtatgaagctattgggcgtaaagtcgcagatatcgttggcatggattacttcgatgatacaacttatcaaccacataggttaatgtattggccttcaactagtaacgatgcggaatttttctttacctatgaagatttacctttgttagacccagataaaatattaaatgaatatgttgattggactgacacattagaatggccaacgtcttcaagggaagagagtaagactaaaagattagcagataagcaaggcgacccagaagaaaagtcgggaattgttggtgcattttgtagagcctatacgatagaagaagctatagaaacttttattcctgatttatacgaaaaacattctactaaccgttatacctatcatgaaggttcaactgcaggtggattggtgttatacgaaaataacaagtttgcctattctcatcataatacggatcccgtaagcggtatgcttgtgaacagttttgatttagtacgcatacacttatatggtgctcaagatgaagaaactaaaacagatactccggttaatcgactacctagttataaagcaatgcagcaaagagcgcaaaatgatgaggttgttaaaaagcaattaattaatgacaaaatgtctgatgcaatgcaggatttcgatgaaatagaaaatagcgatgatgcatggtctgagacgttagaaattacttcgaaaggtactttcaaagctagtatcccaaatatagaaattatattgcgtaatgatccaaatttaaaaggaaaaatagcctttaacgaatttacgaaacaaattgaatgtttagggaaagtgccatggaatactaattttaagacacgtcaatggcaagacggtgatgatagcagtttaagaagttatatcgaaaagatttatgacatacaccattcaggtaaaacaaaagatgccattataagcgtagcaatgcaaaatgcttatcatccagtaagggattatctaaataaaatatcgtgggatggacataaacgccttgaaaagttatttatcaaatacttaggtgttgaagacactgaagtgaatagaacaactaccaaaaaagcattgactgctggaatcgctagagtaatggagcctggatgtaaatttgactatatgcttacactttatggtcctcaaggtgtaggtaaatctgctttgctaaaaaaattaggtggtgcatggttttctgacagtttagtttctgttacaggtaaagaagcttatgaggccttacaaggcgtttggctaatggaaatggcagaacttgcagctacaagaaaagctgaagttgaagctattaagcatttcatatctaaacaagttgaccgatttcgtgttgcttatgggcattatattgaagattttccaaggcaatgtattttcattggtacaactaataaagttgatttcttaagagatgaaactggtggaagacgtttttggccaatgactgtaaatccagagagagttgaagtgaactggtctaaactaaccaaagatgagattgaccaaatttgggcagaagctaaacactattatgaacaaggagaagatttattccttaaccctgaactagaagaagaaatgcgttcaatacaaagcaaacatactgaggaatctccatatacaggcattattgatgaatatcttaacacaccaattcctagcaattgggatgacttaactatctttgaacgaagacgattttatcaaggtgatgttgatatgttaccaacaggaaatgtagattacgttaaaagaaataaagtctgtgcgcttgaagtgtttgttgaatgttttggtaaagataagggagatagtagaggatctatggaaattagaaagatttcaaacatcttaagacaattagacaattggtctgtatatgatggtaataaaagtgggaaaattcgatttggaaaagattatggtgtacagatagcttatgtaagagatgaaagtttagaggatttaatataa

SEQ ID NO: 406359 - DNA, 291 bp, Staphylococcus aureus
atgaaagaatcgacattagaaaaatatttagtgaaagagataacaaagctaaacggtttatgtttaaaatgggtcgcacctggaacaagaggtgtgccagatagaattattattatgccagaaggaaaaacatattttgtagaaatgaagcaagaaaaaggaaagttgcatcctttacaaaaatatgtgcatagacaatttgaaaatagagatcataaagtatatgtgttatggaataaagaacaagtaaatacttttatcagaatggtaggtggaacatttggcgattga

SEQ ID NO: 406360 - DNA, 1359 bp, Staphylococcus aureus
ttggcgattgacttcaaaccacatagctatcaaaagtatgcaatagataaagttattgataatgagaaatacggtttgtttttagatatggggctagggaaaacagtatcaacacttacagcatttagtgaattgcagttgttagacactaaaaaaatgttagtcatagcacctaaacaagttgctaaagatacatgggttgatgaagttgataagtggaaccatttaaatcatctgaaagtgtctttagtcttaggaacacctaaagaaagaaatgatgcattaaacacagaggctgatatctatgtaaccaataaagaaaatactaaatggttatgcgatcaatataaaaaagaatggccatttgatatggttgtaattgatgaactgtctacatttaaaagtcctaagagtcaaaggtttaaatctattaaaaagaaattaccactcattaatagatttataggattaacaggaacacctagcccaaatagtttacaggatttatgggctcaagtttatttgatagacagaggcgaaagacttgagtcttcattcagtcgttatcgagaaaggtactttaaaccaacacatcaagttagcgaacatgtttttaactgggagctaagagacggatctgaagaaaagatatatgaacgaatagaagatatatgtttaagcatgaaagcgaaagattatctagatatgcctgacagagttgatactaaacaaacagtagtcttatctgaaaaagaaagaaaagtatatgcagaattagaaaaaaactatattttagaatcggaagaagaaggaacagttgtagctcagaatggggcatcattaagtcaaaaactacttcaactatctaacggtgcagtttatacagatgatgaagatgtaagacttatacatgataagaagttagataagttagaggaaattatagaggagtctcaaggccaaccaatattattgttttataacttcaaacatgataaagaaagaatacttcaaaggtttaaggaagcaaccacattagaggattcaaactataaagaacgttggaatagtggagacattaagctgcttatagcacatccagcaagtgcagggcatggattaaacttacaacaaggtgggcacattattgtttggtttggacttacatggtcattggaattataccaacaagcaaatgcaagattatatagacaaggacaaaatcatacgactattattcatcacattatgaccgataacacaatagatcaaagagtatataaagctttacaaaataaagaactaacgcaagaagaattgatgaaagctattaaagcaagaatagctaagcataagtaa

SEQ ID NO: 406361 - DNA, 438 bp, Staphylococcus aureus
atgggaaaggcatcatacgatattaagccaggtacatttaaatatattgagtcagagatatataacctacaagagaacaagaaagagataaatagattgagaatggagatacttaacccaacgaaagagctagacactaacattgtgtatggaccgttgcaaaaaggtgaaccagttagaacaactgaactaatggcaacaaggttattgactaataagatgttacgaaacctagaagaaatggtcgaagcagttgaaagtgaatacttaaagttacctgaagatcataagaaagtaattaggctaaagtattggaatagagataagaagctaaagatagagcaaataggagatgcatgtcacatgcatcgtaatacagttactactatacgaaagaactttgttaaagcggtagcgtatcatgcaggtatcaaataa

SEQ ID NO: 406362 - DNA, 315 bp, Staphylococcus aureus
atgaccaagcataataacatttataagcatggtcgtaagtcatatcaatacgattggttctatcattcaaaagcatggaagaagttaagagagatagcattagatagggataatcatctttgtcaaatgtgtttacgtgaagacatagtaacagatgcaaacatagtgcatcatattatttatgttgatgaagattttaataaagctttagacttagataatttgatgtcagtttgttatagctgtcataacaaaattcatgcaaatgataatgacaaaagtaatcttaagaaaattagagtattaaaaatttaa

SEQ ID NO: 406363 - DNA, 306 bp, Staphylococcus aureus
atgaaattaacaaaaaaacagctgaaagaatatatagaggattataaaaaatctgatgacatattaattaatttgtatatagaaacgtatgaattttattgtcggttaagagatgaacttaaaaatagtgatttgatgatagagcatacaaacaaggctggtgcgagcaatattgttaagaatccattaagcatagaactgacaaaaacagttcaaacactaaataacttactcaagtctatgggtttaactgcagcacaaagaaaaaagatagttcaagaagaaggtggattcggtgactattaa

SEQ ID NO: 406364 - DNA, 1692 bp, Staphylococcus aureus
gtgactattaaagttttaaatgaaccttcaccaaaactattaacaacatggtatgcagagcaagtcactcaagggaaaataaaaacaagcaaatatgttaaaaaagaatgtgagagacaccttagatatctagaaaatggaggtaaatgggtatttgatgaagaattagcgcaccgtcctattcgattcatagaaaagttttgtaaaccttccaaaggacctaaacgtcaacttgtattacaaccatggcaacattttattattggcagtttgtttggttgggttcataaagaaacaaaactgcgcaggtttaaagaagctttgatatttatggggcgaaaaaatggtaaaacaactactatatctggtgttgctaactatgctgtttctcaagatggagaaaacggcgctgaaatccatcttttagcaaacgtaatgaaacaagctaggattctatttgatgaatctaaggcgatgattaaagctagcccaaagcttagagaaaattttagacctttgagagatgaaattcattacgatgcaactatatctaaaattatgccacaggcttcagacagtgataagttggatggtttaaatacacatatgggcatttttgatgaaattcatgaatttaaagattataaattgatttcagttataaaaaactcaagagcggcaaggttacaaccccttcttatctacattacgacagcagggtaccaactagatggaccacttgttaatatggtagaagcgggaagagacaccttagatcgaatcatcgaagatgaaagaactttttactatttagcttctctcgatgatgacgatgatataaatgattcgtcgaattggattaaagcaaatcctaacctaggtgtttctatcgatttagatgaaatgaaagaagagtgggaaaaggctaagagaacaccagatgaacgtggagattttataaccaaaaggtttaacatctttgctaataatgatgagatgagttttattgattatccaacacttcaaaaaaataatgacattatttccttagatgagttggaaggtagaccatgtactataggttatgatttatcagaaacagaggactttacagccgcatgtgccacttttgcattagataatggcaaagttgctgtcttaacacattcttggattcctaagcataaagttgaatattctaacgaaaagataccctatatagaatgggaagaagacggattactaacaatacaagataatccttatatagactaccaagatgttttaaattggataataaagatgaatgagcattatgttgtcgaaaaaatcacttatgatagggcgaatgcttttaaattaaatcaagagttaaagaattatggctttgaaacagaagaaacaagacaaggggctttgaccttgagccctgcattgaaggatctaaaagaaatgtttttagatgggaaaataatatttaataataatcctttaatgaaatggtatatcaataatgttcagctgaaactagacagaaatgggaactggctgccatctaaacaaagcagatatcgtaaaatagatggttttgcagcatttttaaacacatatacagatattatgaataaagttgtttctgacaagggtgaaggaaacatagaatttattagtattaaagatataatgcgttaa

SEQ ID NO: 406365 - DNA, 1239 bp, Staphylococcus aureus
gtgaatgttatcgcaaaagagaatattgtcacacgcataaagaaaaaattgatagacaattggattgatcagtcagcttctaagctttatgactttagcccatggaaaaataaatctttttggggtgtaatcaataatacgcttgaaactaatgaaacgatattttcagctattacaaagttatctaattcgatggctagtttgcccttgaaaatgtatgaagattataaagtagttaatacagaagtatctgatttacttacagtgtcaccgaataattctctgagcagttttgattttattaatcaaattgaaacaatcagaaatgaaaaaggtaatgcatatgtgctaattgaacgagacatctatcatcaaccatcaaagcttttcttattaaatccagatgttgttgaaatgttaattgaaaaccaatcacgtgaactttattattccattcatgctgcaactggaaataaattgattgttcataatatggacatgttgcattttaaacacatcgtggcatctaatatggttcaaggtattagtccgattgatgtgttgaagaatacaactgattttgacaatgcagtaagaacctttaatcttacagaaatgcaaaaaccagattcttttatgcttaaatatggttccaatgtaagtacagaaaaaaggcaacaagtgttagaagatttcaaacagtactatgaagaaaacggtggaatattattccaagagcctggtgttgaaatcgaacctttacctaaaaaatatgtctctgaagatatagtggcaagcgagaatttaacaagagaaagagtagctaacgtttttcaattgccctcaatattcttaaatgcaagatcaaatacaaatttcgcgaaaaatgaagagttaaacagattttacttgcagcataccttattgccaatcgtcaaacagtatgaagaagaatttaatcggaaactacttactaaaacagacagagaaaaaaataggtattttaaatttaacgttaaatcttatttaagggctgatagtgcaacacaagcagaagtgtactttaaagcagttcgtagtggttactacactataaatgacattagagagtgggaagatttaccaccagttgaaggtggagataagccgctaataagcggtgatttatacccaattgacacgccacttgaattaagaaaatctttgaaaggtggtgataaaaatgtcaatgaaagctaa

SEQ ID NO: 406366 - DNA, 774 bp, Staphylococcus aureus
atgtcaatgaaagctaagtattttcaaatgaaaagaaaatcaaaaagtaaaggtgaaatattcatttatggtgatattgtaagtgataaatggtttgaaagtgatgtaactgctacagatttcaaaaataaactagatgaactaggagacatcagtgaaatagatgttcatataaattcatctggaggcagtgtatttgaaggacatgcaatatacaatatgctaaaaatgcatcctgcaaaaattaatatctatgtcgatgccttagcggcatcaattgctagtgttatcgctatgagtggtgacactatttttatgcacaaaaatagttttttaatgattcataattcatgggttatgactgtaggtaatgcagaagaattaagaaagacagcggatttacttgaaaaaacagatgctgttagtaattcagcttatttagataaagcaaaagatttagatcaagaacacttaaaacagatgttagatgcagaaacttggcttactgcagaagaagccttgtctttcggcttgatagatgaaattttaggagctaatgaaatagctgctagtatctctaaagagcaatataagcgtttcgagaacgtcccagaagatttaaagaaagatgtagacaaaatcactaaaattgatgatgtagatacatctgaattggttgaaacacctaaagaaagtatgtcactagaagaaaaagaaaaaagagaaaaaattaaacgcgaatgcgaaattttaaaaatgacaatgaattattag

SEQ ID NO: 406367 - DNA, 1164 bp, Staphylococcus aureus
atgccgacattatatgaattaaaacaatccttaggtatgattggacaacaattaaaaaataaaaatgatgaattgagtcagaaagcaacagatccaaatattgatatggaagacatcaaacaactagaaacagaaaaagcaggtttacaacaaagatttaacattgttgaaagacaagtgcaagacattgaagaaaaagaaaaagcgaaagttaaagataaaggagaagcttatcaatctttaagtgataatgagaagatggttaaagctaaggcagagttttatcgtcacgcgattttaccaaatgaatttgaaaaaccttcaatggaggcacaacgtttattacacgctttaccaacaggaaatgattcaggtggagataagctcttaccaaaaacactttctaaagaaattgtttcagaaccatttgctaaaaaccaattacgtgaaaaagctcgtctaactaacattaaaggtttagagattccaagagtttcatacactttagacgatgatgatttcattacagacgtagaaacagcaaaagaattaaaagcaaaaggtgatacagtcaagttcactactaataaattcaaagtatttgctgcaatttcagatactgtaattcatggatcagatgtagatttagtaaactgggttgaaaacgcactacaatcaggattagcagctaaagagcgtaaagatgccttagcagtaagtcctaaatctggattagaacacatgtcattttataatggatctgttaaagaagttgagggagcagacatgtatgatgctattattaacgctttagcagatttacatgaagattatcgtgataacgcaacaatttatatgcgatatgcagattatgtcaaaattattagtgttctttcaaatggaacaacaaatttctttgacacaccagcagaaaaagtatttggcaaaccagtagtatttacagatgcagcagttaaacctattgtgggagatttcaattattttggaattaactatgatggaacaacttatgacactgataaagatgttaaaaaaggcgaatatttgtttgtattaacagcatggtatgatcagcaacgtacattagacagtgcattcagaattgcaaaagcaaaagaaaatacaggtccattacccagctaa

SEQ ID NO: 406368 - DNA, 279 bp, Staphylococcus aureus
atgagtttagaagaaattaaattgtggttgagaattgactataatttcgaaaatgatttaattgaaggtctcattcaatcggctaagtctgaattactattaagtggggttccagattatgacaaagatgacttggaatacccgcttttttgtacagcgattaaatatatcattgcaagagattatgaaagtcgtggatactcaaatgaccaatctagaagcaaggtgtttaatgaaaaaggattgcaaaaaatgattttgaaattaaaaaagtggtag

SEQ ID NO: 406369 - DNA, 333 bp, Staphylococcus aureus
atggaatttaatgaatttaaagatcgcgcgtatttttttcaatatataaacaaaggaccatatccagatgaagaggaaaaaatgaaattgtatagttgcttttgtaaaatttataatccttctatgaaagatagagaaattttaaaagcgactgaatcaaaatcaggattaaccataattgtcaggtcttctaaaactgaatatctaccacaaacaaatcacttagttaaaattgacagtgcattatattccgataaattattcaacattgtagaaataagaattgatacaccagatattggctataatacagtggttttatcagaaaaatga

SEQ ID NO: 406370 - DNA, 402 bp, Staphylococcus aureus
atgagtgtagaaattaaagggatacctgaagtgttgaataaattagaatcggtatacggtaaacaagcaatgcaggctaagagtgataaagctttaaatgaagcatctgaattttttataaaggctttaaagaaagagttcgagagctttaaagatacgggtgccagtatagaagaaatgactaaatctaagccttatacaaaagttggtagtcaagaaagggctgttttaattgaatgggtaggtcctatgaatcgcaaaaacattattcacttgaatgaacatggttatacaagagatggaaaaaaatatacaccaagaggttttggagttattgcaaaaacattagctgctagcgaacgtaagtatagagaaattataaaaaaggagttggccagataa

SEQ ID NO: 406371 - DNA, 396 bp, Staphylococcus aureus
atgaatatattaaacaccataaaaggaattttattatctgatgcagagctcaaaacacatataaattctagaatatactattacaaagtcactgaaaacgctgaaacttccaaaccctttgttgttattacacctgtttatgatttgccttcagactttatgtctgataaatatctcagtgaagaatacttaattcaaatagatgtagaatcttcaaataatcagaaaacaattgatataacaaaacgaataagatacctgttatatcaacaaaatttaattcaagcatctagtcagttagatgcttattttgaagaaactaaacgttatgtgatgtcgagacgatatcaaggcatacccaaaaatatatattataaaaatcagcgcatcgaatag

SEQ ID NO: 406372 - DNA, 642 bp, Staphylococcus aureus
atggcagaaggacaaggttcttataaagtaggttttaaaagattatacgttggagtttttaacccagaagcaacaaaagtagttaaacgcatgacatgggaagatgaaaaaggtggtacagttgacctaaatatcacaggtttagcaccagatttagtagatatgtttgcatctaacaaacgtgtatggatgaaaaaacaaggtactaatgaagttaagtctgacatgagtattttcaatattccaagtgatgatttaaacacagttattggacgtactaaagataaaaatggtacatcttgggtaggagagaatacaagagcaccgtatgtaacagtaattggcgaatcggaagatggtttaacaggtcagccggtatatgtagccttacttaaaggtacttttagtttagattcaattgaatttaaaacacgaggtgaaaaagcagaagccccagaacctacaaaattaacaggtgactggatgaatagaaaagttgatgttgatggaacgtcacaaggtattgtatacggttatcatgaaggtaaagaaggagaagcagaattcttcaaaaaagtattcgttggatacacggacagtgaagatcattcagaggattctgcaggttcgttacccagctaa

SEQ ID NO: 406373 - DNA, 456 bp, Staphylococcus aureus
atgactaaaactttaaaggtttataaaggagacgacgtcgtagcttctgaacaaggtgaaggcaaagtgtcagtaactttatctaatttagaagcggatacaacttatccaaaaggtacttaccaagtggcatgggaagaaaatggtaaagaatctagtaaagttgatgtacctcaattcaaaaccaatccaattctagtctcaggcgtatcatttacaccagaaactaaatcaattatggtaaataccgatgacaatgttgagccaaacattgcaccaagcacagcaacgaataaaatattgaaatatacaagtgaacatccagaatttgttactgtagatgaaaatacaggagcaattcacggtgtagctgaaggtacttcagtaatcactgctacgtctactgatggaagcgataagtcaggacaaatttcagtgacagtaacaaacggatag

SEQ ID NO: 406374 - DNA, 351 bp, Staphylococcus aureus
atgattaaatttgaaattaaagatcgtaaaacaggaaaaacagagagctatacaaaagaagatgtaacaatgggcgaagcagaaaaatgctatgagtatttagaattagtaaatcaagagaataaaaaagaagcacctaacgcaacaaaaatgagacaaaaagagcgacagttattagtagatttatttaaagatgaaggattgactgaagaagatgttctgaacaagatgagtactaaaacttatacaaaagccttacaagatatatttcgagaaatcaatggtgaagatgaagaagattcagaaactgaaccagaagagatgggaaagacagaagaacaatctcaataa

SEQ ID NO: 406375 - DNA, 159 bp, Staphylococcus aureus
atggagcagtatgggtggacattaactgaagtcagaaaacagccgtatgtaaaacttttagaaatacttaatgaagagaataaagaagagactgaagaaaaacaaagtgaacaaaaagtcattacaggtacggatttaagaaaactttttggaagctag

SEQ ID NO: 406376 - DNA, 6201 bp, Staphylococcus aureus
atgaatgaaaaagtagaaggcatgaccttggagctgaaattagaccatttaggtgtccaagaaggcatgaaaggtttaaagcgacaattaggtgttgttaatagtgaaatgaaagctaatctgtcagcatttgataagtctgaaaaatcaatggaaaaatatcaggcgagaattaaggggttaaatgataggcttaaagttcaaaaaaagatgtattctcaagtagaagatgagcttaaacaagttaacgctaattaccaaaaagctaaatccagtgtaaaagatgttgagaaagcatatttaaagttagtagaagccaataaaaaagaaaaattagctcttgataaatctaaagaagccttaaaatcatcgaatacagaacttaaaaaagctgaaaatcaatataaacgtacaaatcaacgtaaacaagatgcgtatcaaaaacttaaacagttgagagatgcagaacaaaagcttaagaatagtaaccaagctactactgcacaactaaaaagagcaagtgacgcagtacagaagcagtctgctaagcataaagcacttgttgaacaatataaacaagaaggcaatcaagttcaaaaactaaaagtgcaaaatgacaatctttcaaaatcaaatgataaaattgaaagttcttacgctaaaactaatactaaattaaagcaaacagaaaaagaatttaatgatttaaacaatactattaagaatcatagcgctaatgtcgcaaaagctgaaacagctgttaataaagaaaaagctgctttaaataatttggagcgttcaatagataaagcttcatccgaaatgaagacttttaacaaagaacaaatgatagctcaaagtcatttcggtaaacttgcaagtcaagcggatgtcatgtcaaagaaatttagttctattggagacaaaatgacttccctgggacgtacaatgacgatgggcgtatctacaccgattactttaggtttaggtgcagcattaaaaacgagtgcagactttgaagggcaaatgtctcgagttggagcgattgcacaagcaagcagtaaagacttaaaaagcatgtctaatcaagcggttgacttaggagctaaaacaagtaaaagtgctaacgaagttgctaaaggtatggaagaattggcagctttaggctttaatgccaaacaaacaatggaggctatgccaggtgttatcagcgcagcagaagcaagtggtgcagaaatggctacaactgcaactgtaatggcttcagcgattaactctttcggtttaaaagcatctgatgcaaatcatgttgctgatttacttgcgagatcagcaaatgatagtgctgcagatattcaatatatgggagatgcattaaaatatgcaggtactccagcaaaagcattaggagtttcaatagaggacacttctgcagcaattgaagttttatctaactcaggtttagaggggtctcaagcaggtactgcattaagagcttcgtttattaggctagctaatccaagtaaaagtacagctaaggaaatgaaaaaattaggtattcatttgtctgatgctaaaggtgagtttgttggaatgggcgaattgattagacagttccaagataacatgaaaggcatgatgagagaacaaaaattagcaacagtggctacaatagttggcactgaagcagcaagtggatttttagccttgattgaagcgggtccagataaaattaatagctatagcaaatcattgaagaactctaatggtgaaagtaaaaaagcagctgatttgatgaaagataacctcaaaggtgctctggaacaattaggtggcgcttttgaatcgttagcaattgaagttggtaaagatttaacgcctatgattagagcaggtgcggaaggattaacaaaattagttgatggatttacacatcttcctggttgggttagaaaggcttcggtaggcttagcaatttttggtgcatctattggtcctgctgttcttgctggtggcttattaatacgtgcagttgggagcgcggctaaaggctatgcatcattaaatagacgcattgctgaaaatacaattctttctaataccaattcaaaagcaatgaaatctttaggtcttcaaacattatttcttggttctacaacaggaaaaacgtcaaaaggctttaaaggattagccggagctatgttgtttaatttaaaacctataaatgttttgaaaaattctgcaaagctagcaattttaccgttcaaacttttgaaaaacggtttaggattagccgcaaaatccttatttgcagtaagtggaggcgcaagatttgctggtgtagctttaaagtttttaacaggacctataggtgctacaataactgctattacaattgcatataaagtttttaaaaccgcatatgatcgtgtggaatggttcagaaacggtattaacggtttaggagaaactataaagttttttggtggcaaaattattggcggtgctgttaggaagctaggagagtttaaaaattatcttggaagtataggcaaaagcttcaaagaaaagttttcaaaggatatgaaagatggttataaatctttgagtgacgatgaccttctgaaagtaggagtcaacaagtttaaaggatttatgcaaaccatgggcacagcttctaaaaaagcatctgatactgtaaaagtgttggggaaaggtgtttcaaaagaaacagaaaaagctttagaaaaatacgtacactattctgaagagaacaacagaatcatggaaaaagtacgtttaaactcgggtcaaataacagaagacaaagcaaaaaaacttttgaaaattgaagcggatttatctaataaccttatagctgaaatagaaaaaagaaataaaaaggaactcgaaaaaactcaagaacttattgataagtatagtgcattcgatgaacaagaaaagcaaaacattttaactagaactaaagaaaaaaatgacttgcgaattaaaaaagagcaagaactcaatcagaaaatcaaagaattgaaagaaaaagctttaagtgatggtcagatttcagaaaatgaaagaaaagaaattgaaaagcttgaaaatcaaagacgtgacatcactgttaaagaattgagtaagactgaaaaagagcaagagcgtattttagtaagaatgcaaagaaacagaaatgcttattcaatagacgaagcgagcaaagcaattaaagaagcagaaaaagcaagaaaagcaagaaaaaaagaagtggataagcagtatgaagatgatgtcattgctataaaaaataacgtcaacctttctaagtctgaaaaagataaattgttagctattgctgatcaaagacataaggatgaagtaagaaaggcaaaatctaaaaaagatgctgtagtagacgttgttaaaaagcaaaataaagatattgataaagaaatggatttatccagtggacgtgtatataaaaatactgaaaagtggtggaatggtcttaaaagttggtggtctaactttagagaagaccaaaagaagaaaagtgataaatacgctaaagaacaagaagaaacagctcgtagaaacagagaaaatataaagaaatggtttggaaatgcttgggacggcgtaaaaactaaaactggtgaagcctttagtaaaatgggcagaaatgctaatcattttggcggcgaaatgaaaaaaatgtggagtggaatcaaaggaattccaagcaaattaagttcaagttggagctcagccaaaagttctgtaggatatcacactaaggctatagctaatagtactggtaaatggtttggaaaagcttggcaatctgttaaatcgactacaggaagtatttacaatcaaactaagcaaaagtattcagatgcctcagataaagcttgggcgcattcaaaatctatttggagaggcacatcaaaatggtttagcaacgcatataaaagtgcaaagggttggctaatagatatggctaataaatcgcgctcgaaatgggataatatttctagtacagcatggtcgaatgcaaaatccgtttggaaaggaacatcgaaatggtttagtaactcatacaaatctttaaaaggttggactggggatatgtattcaagagcccacgatcgttttgatgcaatttcaagttcggcatggtctaacgctaaatcagtatttaatggttttagaaaatggctatcaaaaacatatgattggattagagatattggtaaagacatgggaagagctgcggctgatttaggtaaaaatgttgctaataaagctattggcggtttgaatagcatgattggcggtattaataaaatatctaaagccattactgataaaaatctcatcaagccaatacctacattgtctactggtactttagcaggaaagggtgtagctaccgataattcaggagcattaacgcaaccgacatttgctgtattaaatgatagaggttctggaaacgccccaggtggtggagttcaagaaataattcacagggctgacggaacattccatgcaccccaaggacgagatgtggttgttccactaggagttggagatagtgtaataaatgccaatgacactctgaagttacagcggatgggtgttttgccaaaattccatggtggtacgaaaaagaaaaaatggatggaacaagttactgaaaatcttggtaaaaaagcaggggacttcggttctaaagctaaaaacacagctcataatatcaaaaaaggtgcagaagaaatggttgaagcggcaggcgataaaatcaaagatggtgcatcttggttaggcgataaaatcggcgatgtgtgggattatgtacaacatccagggaaactagtaaataaagtaatgtcaggtttaaatattaattttggaggcggagctaacgctacagtaaaaattgctaaaggcgcgtactcattgctcaaaaagaaattagtagacaaagtaaaatcgtggtttgaagattttggtggcggaggcgatggaagctatctatttgaccatccaatttggcaaaggtttgggagttacacaggtggacttaactttaatggcggtcgtcactatggtatcgactttggtatgcctacaggaacgaacatttatgctgttaaaggcggtatagctgataaagtatggactgattacggtggcggtaattctatacaaattaagaccggtgctaacgaatggaactggtatatgcatttatctaagcaattagcaagacaaggccaacgtattaaagctggtcaactgatagggaaatcaggtgctacaggtaatttcgttagaggagcacacttacatttccaattgatgcaagggtcgcatccagggaatgatacagctaaagatccagaaaaatggttgaagtcacttaaaggtagtggcgttcgaagtggttcaggtgttaataaggctgcatctgcttgggcaggcgatatacgtcgtgcagcaaaacgaatgggtgttaatgttacttcggctgacgtaggaaatatcattagcttgattcaacacgaatcaggaggaaatgcaggtataactcaatctagttcgcttagagacatcaacgttttacagggcaatccagcaaaaggattgcttcaatatatcccacaaacatttagacattatgctgttagaggtcacaacaatatatatagtggttacgatcagttattagcgttctttaacaacagatattggcgctcacagtttaacccaagaggtggttggtctccaagtggtccaagaagatatgcgaatggtggtttgattacaaagcatcaacttgctgaagtgggtgaaggagataaacaggagatggttatccctttaactagacgtaaacgagcaattcaattaactgaacaggttatgcgcatcatcggtatggatggcaagccaaataacatcactgtaaataatgatagttctacagttgaaaaattgttgaaacaaattgttatgttaagtgataaaggaaataaattaacagatgcgttgattcaaactgtttcttctcaggataataacttaggttctaatgatgcaattagaggtttagaaaaaatattgtcaaaacaaagtgggcatagagcaaatgcaaataattatatgggaggtttgactaattaa

SEQ ID NO: 406377 - DNA, 825 bp, Staphylococcus aureus
atgcaatcttttgtaaaaatcatagatggttacaaggaagaagtaataacagattttaatcagcttatatttttagatgcaagggctgaaagtccaaacaccaatgataacagtgtaactattaacggagtagatggtattttaccgggcgcaattagttttgcgcctttttcattagtattaaggtttggctatgatggtatagatgttatagatttaaatttatttgagcattggtttagatctgtgtttaatcgcagacatccttattatgttattacttctcaaatgcctggtgttaaatatgcagtgaatacagctaatgttacatctaatttaaaagatggttcttcaactgaaattgaagtaagtttaaatgtttataaagggtattctgaatcagttaattggaccgatagcgagttcttattcgactctaattggatgtttgaaaatggaattcctcttgatttcacacctaaatatactcatacatcaaatcaatttactatttggaacggttctactgatacgataaatccacgattcaagcacgatttgaaaatattaattaatttaaatgcgagtggaggatttgaactggttaattatacaacaggtgatatttttaagtacaacaaaagtatagataaaaacactgattttgttttagatggtgtgtatgcatatcgagatataaacagagtgggaattgatacaaatagaggcattataacattagcgccaggtaaaaatgaatttaagattaaaggagacgtcagtgatattaaaactacatttaagtttccttttatttataggtag

SEQ ID NO: 406378 - DNA, 1584 bp, Staphylococcus aureus
atggattatcatgatcatttatcagtaatggattttaatgaattgatttgtgaaaatttactagatgtagattacggttcttttaaagaatattatgaactgaatgaagctaggtacatcacctttacagtttatagaactactcataatagttttgtttttgatttattgatttgtgaaaacttcataatttatcatggtgaaaaatacacaattaagcagacagcgccaaaggttgaaggtgataaaatttttattgaagttacggcatatcacataatgtatgaatttcaaaatcactcagtggaatcaaataagcttgatgacgacagtagcgaaactggtaaaacgccagaatactctttagatgagtacttaagatatggatttgcaaatcaaaaaacgtcagtcaagatgacctataaaataattggagattttaaaagaaaaataccaattgatgaattaggtaataaaaatggcttagaatattgtaaagaagcagtagatttgtttggttgtattatttatccaaatgatacggagatatgtttttattctcctgaaacattctatcaaagaagcgaaaaagtaataaggtatcaatataatactgatactgtgtctgctactgtcagtacgttggaattaagaacagctataaaagtttttgggaaaaagtacacagccgaggaaaagaaaaattataatcctattagaacaactgacattaaatattcaaatggttttataaaagaaggtacttatcgtaccgcaacaattgggtctaaagctactattaactttgattgcaagtatggtaatgaaacagttagatttacaataaaaaagggctctcaaggtggaatatataagttgattttagacggcaagcaaattaagcaaatttcttgttttgctaagtcggttcagtctgaaacaatagatttaataaaaaatattgataaaggcaagcacgttttagaaatgatatttttaggagaagaccccaaaaatagaattgatatatcttcaaataaaaaagctaagccttgtatgtatgttggaactgaaaaatcaacagtcttaaatttaattgctgacaactcaggtcgcaatcaatacaaagcaattgttgactacgtcgcagatagtgcaaagcagtttgggattcgatatgctaatacgcaaacaaatgaagatatcgaaacacaggataagctgttagaatttgcaaaaaagcaaataaatgatactcctaagactgaattagatgttaattatataggttatgaaaaaatagagccaagagatagcgtattctttgttcatgaattaatgggatataacactgaattaaaggttgttaaacttgataggtcacatccatttgtaaacgcaatagatgaagtgtctttcagcaatgaaataaaggatatggtacaaattcaacaagcgcttaacagacgagttattgcacaagataatagatataactatcaagcaaatcgtataaatcatttatacactagtactttgaatgctcctttcgagacaatggatatagggagtgtattaatataa

SEQ ID NO: 406379 - DNA, 291 bp, Staphylococcus aureus
atggcaacagaagaagttaaaatcaaagcgctacttgaaaacgataaacagtactttccagctacacattggaaagctataaatgggataccttatgcaggcagtagtgatattgatggattgcctcaagacggtatcatttcggtaaatgataaaaataaattagataatttaaaaataggcgaagcaggaattattcaaaatagcattgtacagaaatccccaaacggtaaattgtggaaaataacagttgacgatagtgggaaacttggtacagtgctattttattag

SEQ ID NO: 406380 - DNA, 1911 bp, Staphylococcus aureus
atggaaaatttgtatttaataaaggatttgggagctttagcaggtcgagattatagagctaaggaaatacaaaacttacaaagaatagagcaatttgcgcttggcttgacaacagagtttaagttgcatcagaaagctaaaacaattcaacacttcgctgagcaaatttattataatggtagatcgcaagcagcagtaaacaaatctttacaaagtcaaattaacgcacttgttgtggcaccacgtaataacagtgctaatgagattgttcaagctcgagttaatgtaaacggcgaaacctttgacacattaaaagaacatttagacgattgggaaaccaaaactcaaattaataaagaggaaactataagagaattaaataagaccaaacaagaaattcttgatatcgagtatcgttttgaacctgataagcaagaatttttatttgtgacagaacttgcacctcttacaaatgcagtaatgcaatccttctggtttgataatagaacaggcatagtatacatgacacaagctagaaataatggctatatgctaagtcgtctaagacctaatggtcaatttatagacagctcattgattgtaggtgggggtcatggtacacataacggttatagatatattgatgatgagttatggatttatagttttatcttaaatggtaataatgagaatacattagttcgtttcaagtatacgcctaatgtggaaattagctatggcaagtatggtatgcaagatgtatttacaggacacccagaaaaaccctacatcacccctgtcataaatgaaaaagaaaataaaattctatacagaattgagagacctagaagtcagtgggaacttgaaaactcaatgaattatatagagataagaagtttagacgatgttgataaaaatattgataaagttttgcataaaatcagtatccctatgagactaacaaacgaaacccaaccaatgcagggtgtgacttttgatgaaaaatacttgtattggtatacaggagacagtaatccaaataatagaaactatttaacggctttcgatttagaaacaggagaagaagcgtatcaggttaatgctgactatggtggaacactagattcatttcctggcgaatttgcggaagcagaaggtttgcaaatatactatgacaaagatagtggtaaaaaagctttgatgctaggtgttactgtcggtggtgatggaaatagaacacatcgtattttcatgattgggcaaagaggtattttagaaatacttcactcaagaggcgttccttttatcatgagtgacacaggtggtagagttaaacctttaccaatgaggcctgataaacttaagaatcttgggatgttaacagagccaggtctttactatttatacactgatcatacagttcaaatcgatgatttcccattaccaagagaatggcgtgatgcaggttggttcttggaagttaagccaccacaaattggcggtgatgtaattcagatattgacgcgtaatagttatgcaaggaatatgatgacttttgaaagggtgctttctggaagaactggagacatttcggactggaattatgtgcctaaaaatagtggtaaatgggagagagtaccttcattcatcacaaaaatgtcagatattaacatagtaggcatgtcgttttatttaactacggatgatacaaaacgttttacagattttccaactgaacgtaaaggggtagctggttggaacttatatgtagaagcttcaaacacaggtggctttgttcataggctagttcgtaatagtgttacagcatctgctgagatactattgaaaaattatgatagtaaaacaagttcagggccatggactttacacgaagggagaattataagttaa

SEQ ID NO: 406381 - DNA, 1467 bp, Staphylococcus aureus
atgagtaatttagagaaatctgtagctataaatttagaaaacacagcgcattatggaaatatttcaaatctagatataacttttagaacaggagagagtgattcttctgttcttctttttaatatcactaaaaataatcaaccgttattattgagtgaagaaaatatcaaagcacgaatagcgattcgaggtaaaggagtcatggtagttgctccactagaaatattagatccatttaaaggtattttaaaatttcaattacctaatgatgtaattaaacgagatggaagttatcaagctcaagtttcggttgcagaattaggtaattcagacgtggtagttgtcgagagaactatcacatttaacgttgaaaaaagtttgtttagcatgattccatctgaaacaaaattacactatattgttgaatttcaggaattagaaaaaactattatggatcgtgcgaaagcaatggacgaggctataaaaaatggtgaagattatgcgagtctgattgaaaaagctaaagaaaaaggtctatcagatattcaaatagcaaaatcttcaagtatagatgaattaaagcaacttgctaatagccatatatctgatttggaaaataaagcgcaagcatattcaagaacattcgatgagcaaaagcgatatatggatgagaaacatgaagccttcaagcagtcagtgaatagtggtggtttagtcacaagtggttctacttcaaattggcaaaaagctaagattactaaagatgatggtaagataatgcagattactggatttgattttaataatccagaacaaagaataggtgattcaacccaatttatttatgtttcgcaagctataaattatccaagaggtgttagtactaacggtactgtcgaatatttagtagtaacttcagattacaagcgtatgacttatcgaccgaacggtacaaataaagtatttgttaaaagaaaagaagcgggttcatggtctgagtggtcagaattagctattaatgattacaatacaccttttgaaactgttcaaagtgcccaatcaaaagctaatatggccgaaagtaacgctaaattatacgcagatgacaagtttaataaaaggtattcggttatttttgatggaacagcaaatggtgtgggctctacattgtacttaaatgagagtttagaccaatttattttattaattttttatgggacttttccaggtggtgactttacagagtttggcagtccttttggaggaggaaagatttcattgaatccctcaaatcttccagatggtgatggaaatggtggaggtgtttatgagtttggattaactaaatctagtcgtacatctttaactatatcaaacgatgtctatttcgacttaggaagtcaaagaggctctggtgcgaacgcaaatagagggacaattaacaaaattataggagtgagaaaataa

SEQ ID NO: 406382 - DNA, 390 bp, Staphylococcus aureus
atgcaaatattagttaacaagcgtaatgagataatttcatacgctatcattggtggctttgaagaaggtattgatattgaaaatttaccagaaaatttctctcaagtttttagacctaaagcctttaaatattcaaatggggaaatagtttttaacgaagattattcagaagaaaaagatgacttgcatcaacagattgacagtgaagaacaaaacacagtcgcttctgatgacatcttacgaaaaatggttgctagtatgcagaaacaagttgttcaaagtacaaagttatcgatgcaagttaataagcaaaatgcactaatggcaaaacaacttgtgacacttaataaaaaattagaagaggttaaaggagagactgaaaatgcttaa

SEQ ID NO: 406383 - DNA, 165 bp, Staphylococcus aureus
atgcttaaattaatttcaccaacattcgaagatattaaaacatggtatcaattgaaagaatatagtaaagaagatatagcgtggtatgtagatatggaagttatagataaagaggaatatgcaattattacaggagaaaagtatccagaaaatctagagtcatag

SEQ ID NO: 406384 - DNA, 300 bp, Staphylococcus aureus
atgtttggatttaccaaacgacacgaacaagattggcgtttaacgcgattagaagaaaatgataagactatgtttgaaaaattcgacagaatagaagacagtctgagaacgcaagaaaaaatttatgacaagttagatagaaatttcgaagaactaaggcgtgacaaagaagaagatgaaaaaaataaagagaaaaatgctaaaaatattagagacatcaagatgtggattctaggattaatagggacgattctaagtacatttgttatagccttgttaaaaactatttttggcatttaa

SEQ ID NO: 406385 - DNA, 303 bp, Staphylococcus aureus
atggatgcaaaagtaataacaagatacatcgtattgatcttagcattagtcaatcagtttttagcgaataaaggtataagtccgataccagtagatgaagaaagtgtttcatcgattatcttaacagttgttgctttatatactacatataaagataatccaacatctcaagaaggtaaatgggcaaatcaaaagctaaagaaatataaagctgaaaacaagtatagaaaagcaacagggcaagcgccaattaaagaagtaatgacacctacgaatatgaacgacacaaatgatttagggtag

SEQ ID NO: 406386 - DNA, 1455 bp, Staphylococcus aureus
atgttgataacaaaaaaccaagcagaaaaatggtttgataattcattagggaagcagttcaatcctgatttgttttatggatttcagtgttacgattacgcaaatatgttttttatgatagcaacaggcgaaaggttacaaggtttatacgcttataatattccatttgataataaagcaaggattgaaaaatacgggcaaataattaaaaactatgatagctttttaccgcaaaagttggacattgtcgttttcccgtcaaagtatggtggcggagctggacatgttgaaattgttgagagcgctaatctaaacactttcacatcgtttggccaaaattggaatggtaaaggttggacaaatggcgttgcgcaacctggttggggtcccgaaaccgttacaagacatgttcattattacgatgacccaatgtattttattagattaaatttcccagataaagtaagtgttggagataaagctaaaagcgttattaagcaagcaactgccaaaaagcaagcagtaattaaacctaaaaaaattatgcttgtagccggtcatggttataacgatcctggagcagtcggaaacggaacaaatgaacgtgattttatccgtaaatatataacaccaaatatcgctaagtatttaagacatgcaggtcacgaagttgcattatatggtggctcaagtcaatcacaagatatgtatcaagatactgcttacggtgttaatgtaggaaataataaagattatggcttatattgggttaaatcacaggggtatgacattgttctagagattcatttagacgcagcaggagaaagtgcaagtggtgggcatgttattatttcaagtcaattcaatgcagatactattgataaaagtatacaagatgttattaaaaataacttaggacaaataagaggtgtaacacctcgtaatgatttactaaacgttaatgtatcagcagaaataaatataaactatcgtttatctgaattaggttttattactaataaaaatgatatggattggattaagaaaaactatgacttgtattctaaattaatagccggtgcgattcatggtaagcctataggtggtttggtagctggtaatgttaaaacatcagctaaaaaccaaaaaaatccaccagtgccagcaggttatacacttgataaaaacaatgtaccgtataaaaaagagactggttattacacagttgccaatgttaaaggtaataacgtaagggacggctattcaactaattcaagaattacaggtgtattacctaataacgcaacaattaaatatgacggcgcatattgcatcaatggctatagatggattacttatattgctaatagtggacaacgtcgttatatagcgacaggagaggtagacaaggcaggtaatagaataagtagttttggtaagtttagcacgatttag

SEQ ID NO: 406387 - DNA, 837 bp, Staphylococcus aureus
atgaaaggtgatatatacataccgataatatcatctattttatctggtgggatatcgtattatgctgcaacggtggttcataaatttaacaaaaggtataaaaggaaagaaaaggctgttgaaatggcagacgagttttcaaaattaatttcgaaaaggagttttgatataggggagataaacaagaaaattttagaaaatgttggtttgcaagataaaattaatgaattagagaataagatgaatttaagttttgataatcacgaactaagaacagtctttactgataaagagattgcaaaatatcacacttataaaaaagtcaccaataccgaatttataaaaattttgcttcgtactttcaagaacgagaattataaagaagagtgtttacgggctataattttagaatttgacaacaagaaaacaattaaagaaaatataggagataaacagtggactttttcgacaggtgaaaaagaaattgttattaaaagtaatgacgtattgcaaggtataaatacactcattaagaagtataatgaaacccatatatattgcatgaataaattagaatatttttctatgcattttaccaataatatagcagatagtaatacggtttatcagtcgttgcatcaaatctatttaaaaacaatattgagtctttacattgatatctcatcaacaaataaaatagggcatgaaaaattttatgttaatttaatagaattttacaatgaatggaataacaaaaagataaaatttaaaaagaaaacagaaaagcgtataaataaaaacagaaactcatttttaaaaactgaaaaattgaaataa

SEQ ID NO: 406388 - DNA, 348 bp, Staphylococcus aureus
gtgtttttttttcggggcgaaaaaagggcaaattatttaaataagggcaaacatgcgtggaaaacacagaggtttaaaaatgccaaaaccgttgatatgacaaggtttttatacgtttgtatacaacgacgaattatctattcgccatcacattatgacgatatgtttattttaaacacacaagctcatgcgcgtcttgatcaaatggcacaacagtttgaagttgtttgtaatggcttgaacgaaaatgaaggacaagcaattcaaacgatggatcaatctgcctctctaatacggtcaaacttaattcaagttaaagaacaattagaaaaactagctgtatactaa

SEQ ID NO: 406389 - DNA, 918 bp, Staphylococcus aureus
atgtttaaaagaactaaactaatcttaatagcaacattactgctatcaggatgttcaactaccaataacgaatctaataaagaaacaaaatcagtgccagaagaaatggaagcttcaaaatatgtaggtcaaggcttccaaccacctgcagaaaaagatgtggttgaatttgcgaaaaagcataaagataaaattgccaaacgaggcgaacaattttttatggataatttcggtctaaaagttaaagctaccaatgttgtaggtagtggaaaaggcgtagaagtattcgtgcattgtgatgaccacgatatcgtatttaatgcgagtattccatttgataaatcaataattgagagtgatagctcattaagaagtgaggacaaaggcgatgatatgagtactttagttggtacagtgttgagtggctttgaatatcgaacacaaaaagaaaagtatgacaatttatataaatttttcaaagataatgaagagaaataccaatatacaggctttacaaaagaagcaataaacaagacgcaaaatgtcggatataaaaatgaatatttttatatcacttactcgtcaagaagcttaaaagaatatcgtaagtattacgaaccattgattcataaaaatgataaagaatttaaagaaggaatggaacaagccagaaaagaagtgaattacgctgctaatacagatacagtaacaacattgtttagtacaaaggaaaattttactaaagacaatacagttgatgatgtaattgaactgagtgataaactatataattttaaaaataagccagaaaaatctacaattacaattcaaataggaaagcctactattaatactaaaaaagccttttatgatgataatgatccaatagaatatggagtgtatcgtaaagatgaataa

SEQ ID NO: 406390 - DNA, 879 bp, Staphylococcus aureus
atgaataatgaatcaaaaaaagacacaaatacagaaacaaatacagaaacaaaatcagtaccagaagaaatggaagcttcaaaatatgtaggacaaggctttcaaccacctgcagaaaaagatgcgattgaatttgtgaagaagcatcgtaaagaatttgaaaaagtaggtgaacaattctttaaagataactttggactaaaagttaaagctacaaatgttgtaggtaaagatgatggtgtagaagtttatgtgcattgcgaagatcatggcattgtatttaatgcaagtctacctttgtacaaagatgccatccatcaaaaaggatcaatgcgtagtaatgacaacggtgatgatatgagtatgatggtgggtacagtgctgagtggctttgaatatcgagcgcaaaaagaaaagtatgataatttatataaatttttaaaagaaaatgaaaagcaatatcaatatacaggttttactaaagaagcaattaacaagacgcaaaacgtcgggtatcaaaatgaatatttttatattacatatttatcaagaaatttaaaagaatatagaaaatattacgaaccattgatacataaaaatgataaagagtttaaagaaggtatgcaacgagctagaaaagagctaaactatactgctaatacaaatactgtagcaacgttgtttagtacgaatgatgaaaggaatagaaaagaaaagataaataatgtaatagatttatccgagaaaattgaaagaacaaaagatatgccaatcaagaatactataactactcaattaggaaataaacttattggcacaaaaaaagctcgttttgatgataagaaagtagtgtcgtttggagcatttgaagatgaataa

SEQ ID NO: 406391 - DNA, 207 bp, Staphylococcus aureus
atgaataaaataaatgatagagatttaacagaattgagtagctatagggtttatcaagacatcaataaagataatgactttacagttaacgaaaaacgatttaagcaggcagatgtatttgaagatttatatagagagaaactaaaagacacaaataaattaagagagtataattatttacaaaatgaaacttttaaaagcgcataa

SEQ ID NO: 406392 - DNA, 915 bp, Staphylococcus aureus
atgcttaaaaaagcaaaatttatcttaatggcaacgatactactatcaggatgttcaactaccaataacgaatccaacaaagaaacaaaatctgtaccagaagaaatggatgcttcaaaatatgtaggacaaggattccaaccacctgcagaaaaagatgcgattgaatttgcaaagaagcataaagataaaattgctaagcgaggcgaacaattttttatggataacttcggtctaaaagttaaagctacaaatgttataggtagtggcgatggtgtagaagtattcgtgcattgtgatgaccacgacatcgtatttaatgcgagtattccatttgataaatcaattattgacagtgatagctcattaagaagtaaggataaaggtgatgatatgagtactttagttggtgcagtactcagtgggtttgaatatcgagcacaaaaagaaaaatatgataaattatataaatttttcaaagataatgaagagaaatatcaatatacaggatttacaaaagaagcaattaataagacgcaaaatagtggttatgaaaatgaatatttttatatttcggccataccttataatttagctgagtatagagactattttgaaccattgttaaacaaaagtgacagtgaattttcaaaagaattgtcaaatgttaagaagcaattaaaagataagtctaaagtttcggtaactactactctatttagtaaaaaaaagaactatactaaaaaaagtaacagtgaaaatgtaataaaaatggcagaagaaataaaaaaagataaagagataccaaacggtatagagcttagtataaaattttcggacaataaaataaatacggttaaaccaaattttaacggtgaaagcacttcagaatatggtgtgtttgatcaagaataa

SEQ ID NO: 406393 - DNA, 546 bp, Staphylococcus aureus
atgcaacaaaataaacgtcttatcacaataagtatgttgagcgcgattgcgtttgtgttaacttttatcaagtttcctataccatttttgccaccatacttaactttagattttagtgatgtaccgtcactactagctacatttacgtttggaccagttgccggtatcgtagttgcactggttaaaaatttattgaactacttatttagtatgggcgatccagttggaccatttgctaactttttagcaggcgcaagtttcttattaactgcttacgccatctataaaaataaacgttcaacaaaatctttgattactggattaatcattgcaacaatcgttatgactatcgtgttgagtattttgaactatttcgttctattacctttgtacggtatgatatttaacttagctgatatcgcaaataatcttaaagtaatcattgtttcaggaattataccattcaatattattaaaggtatcgttatttctattgtatttattttactatatagaaggcttgcgaatttcttgaaaagaatttaa

SEQ ID NO: 406394 - DNA, 249 bp, Staphylococcus aureus
ttggcaaaatatacaatcgttgatatggatacttgtattgcatgtggtgcatgcggtgcagtagcgccagatatatatgattacgacgacgaaggtattgctttcgtaatccttgacgataaccaaggtactgcagaagtacctgaggaattatatgaagatatggaagatgcaattgatggatgccctacagattctattaaaattgcagacgaatcatttgatggggacgctttaaaatttgaataa

SEQ ID NO: 406395 - DNA, 954 bp, Staphylococcus aureus
ttgcaacacattataaaaacagcattacaacaaacatttaactataaaacaaataaaagtatttacaatatcttagttggtaagaaatctcaccaaaccttttttgacgcttgtagtcaacaacagttgtcattatatcacagtttaccactattaaaatatccgtcttttgagctatttttagaaaaaatcaatgaatttaatgctgaaatggaaatcatgttgcatcctagatatacatttgaaagcatggggcaaacatttcaagcaattcaactattagtgcaaaccatgtctaataccaaacaacatgtttttcattttgtaccaatctctcaaaataataagatacaagaaactgtaaagattgtctataactacattaaagaaaaccaattacaaattgattttgaaaatgaactacataacttgtttaaagcaataactttaaaagggccatgttacttacattattatttgcaaggctatgatgaaccaatgtatacgagacagcaagttagtttaatagaaaagctatctcaacagcaattgtttgaatacgaaatgaataatttagtgacaatgatgtttgaattagaaagtggagaatatactattttatcaaaaataataatgaaacctacattattaaatcaaacttatattacttatacaaaattgcttgaacaattcacgatggaagatatagcggctcaacaacaagttaaaatcaatactatcgaagatcatgtacttgaaatcttaatcaaaggttacatgtctaattacgatgattatgttgaactagaagatcaactccagtttttgaatttttatcaacagcatcgtggcgaacgattaaaattttacaaagaacaatttgacacgttatcatattttcaattaaaagtattaatcgttggatttgaaagaggtgatctgaatgttgcatga

SEQ ID NO: 406396 - DNA, 1380 bp, Staphylococcus aureus
atgttgcatgatattttacgaaacaaatttggattcgagagttttaaaccgggacaacaggaaattatagaaagtataatgtctcaacaacacactctaggtatacttccaactggaagtggaaagagtttgtgttatcaaatacctacgtatttatcaggtaagccgacattaattatctcaccgttaatatctttaatggatgaccaagttatgcagttgaaaataaatggagaaaaacgtgtaacatgtattcactctggtatggatgaaattgagaaaaagcataatattaaatgtttacgacatagccgcttcatctttctaagtccagaatttctcctgcaaccgtcaaattttaaattaatatctatgatagactttggcatgattgttctagatgaagcacattgcctatctgaatggggatatgatttcagaccacattatgctctaataggaaaagtaacaaagcattttaaagaagcggttgtcttagcattgacagcaactgcaccaccgcatttacaagatgatttgacggaaatgttagcgattcaattcaatgttattaaaactacaatgaatcgcccaaatataagctttaagcatcttaattttcatgatgatgaagataaaattgaatggttgctgccgtttctacaacagtcgggaccaacgattatttatgtctcatcgaaaaagatgtgtctgaatttagcgcaacttatttatgattcaggttttcttacaggtatttatcatggtgatatgaattatcaagagcgacacacagttcaacaacaatttttaaataatgatattccgattatagtcgcaacgagtgcttttggtatgggaattaataaaaaagatattcgcacaatcattcactttcatctttcaacaagtccttctaactacattcaagaaattggccgtgcgggtcgcgatggtgaactaagtcaggcaattagtttattccaaccggacgataaatatattttagaaacgttattatttgcagatatgataacagaagaagatgtacaaaatttcgaaataggagaatttttagctcccgataaacaagccgttttgacaacgttgcaatcattctatagtatcggcgccttgaaacagatatttaagcaatcatttaaacgaaagcaattaggattctttcgcatgattggctattgcaaattggatcaatgtagacggaagtatttattagaatttttcggtgaatatccaccggcacaagatcgatgttgtgacaatgattctaatataactgatatcgcaattttaaataagaagaaggtaattagaagtattggatttgatgaaaagttgcaaaatttatttctcagatag

SEQ ID NO: 406397 - DNA, 1461 bp, Staphylococcus aureus
atgtctaataattttaaagatgactttgaaaaaaatcgtcaatcgatagacacaaattcacatcaagaccatacggaagatgttgaaaaagaccaatcagaattagaacatcaggatacaatagagaatacggagcaacagtttccgccaagaaatgcccaaagaagaaaaagacgccgtgatttagcaacgaatcataataaacaagttcacaatgaatcacaaacatctgaagacaatgttcaaaatgaggctggcacaatagatgatcgtcaagtcgaatcatcacacagtactgaaagtcaagaacctagccatcaagacagtacacctcaacatgaagaggaatattataataagaatgcttttgcaatggataaatcacatccagaaccaatcgaagacaatgataaacacgatactattaaaaatgcagaaaataacactgagcattcaacagtttctgataagagtgaagctgaacaatctcagcaacctaaaccatattttacaacaggtgctaaccaatcagaaacatcaaaaaatgaacatgataatgattctgtaaaacaagatcaagatgaacctaaagaacatcataatggtaaaaaagcagcagctattggtgctggaacagcaggtgttgcaggtgcagctggtgcaatggctgcttctaaagctaagaaacattcaaatgacgctcaaaacaaaagtaattctggcaaggcgaataactcgactgaggataaagcgtctcaagataagtctaaagatcatcataatggcaaaaaaggtgcagcgatcggtgctggaacagcaggtttggctggaggcgcagcaagtaaaagtgcttctgccgcttcaaaaccacatgcctctaataatgcaagccaaaaccatgatgaacatgacaatcatgacagagataaagaacgtaaaaaaggtggcatggccaaagtattgttaccattaattgcagctgtactaattatcggtgcattagcgatatttggaggcatggcattaaacaatcataataatggtacaaaagaaaataaaatcgcgaatacaaataaaaataatgctgatgaaagtaaagacaaagacacatctaaagacgcttctaaagataaatcaaaatctacagacagtgataaatcaaaagaggatcaagacaaagcgactaaagatgaatctgataatgatcaaaacaacgctaatcaagcgaacaatcaagcacaaaataatcaaaatcaacaacaagctaatcaaaatcaacaacagcaacaacaacgtcaaggtggtggccaaagacatacagtgaatggtcaagaaaacttataccgtatcgcaattcaatactacggttcaggttcaccggaaaatgttgaaaaaattagacgtgccaatggtttaagtggtaacaatattagaaacggtcaacaaatcgttattccataa

SEQ ID NO: 406398 - DNA, 987 bp, Staphylococcus aureus
atgcaaaaagttgaaagtatcataattggtggagggccatgcggattaagtgcggctattgaacaaaaaagaaaaggtattgataccttaattattgaaaagggtaatgtcgttgaatcaatctacaattatcctactcaccaaacatttttctcatcaagtgataaattaagtattggggacgtaccgtttatcgttgaagaaagtaaaccaagacgtaatcaagcgctagtttattaccgagaagttgtaaaacatcatcaattaaaagtaaatgcatttgaagaagtattaactgttaaaaaaatgaataataaatttactattactacgacgaaagatgtttatgaatgtcgatttttaacaatcgcgacaggctattatggtcagcataatacattagaagttgaaagtgcggatttacctaaagtgttccattattttaaagaggcacatccgtattttgatcaagatgttgtaattatcggtggtaagaattcggctatcgatgctgctttggagttggaaaaagctggtgctaacgtgacggttctatatcgtggtggagattattcgccttcaattaaaccgtggatacttccaaatttcacagcattagtaaatcatgaaaaaattgacatggaatttaatgctaatgttacccaaataactgaagatactgtgacttatgaagtaaatggtgaaagtaaaacgatacacaatgattatgtatttgcgatgattggttatcatcccgattatgaatttttaaaatctgtaggcattcaaattaatacaaatgaatttggaacagcgcctatgtataataaagaaacatacgaaacaaatatcgaaaattgctatattgcaggtgtaattgctgcagggaacgatgcgaataccatttttattgaaaatggtaaattccacgggggcattattgctcaaagcatgctagctaagaaacaaacgcccttagaatcataa

SEQ ID NO: 406399 - DNA, 969 bp, Staphylococcus aureus
atgaaacatctacttgttattcatactggtggcaccattagtatgtcacaagaccaatctaataaagtagtaacaaatgatatcaaccctatttcaatgcatcaagatgtcataaatcaatatgcacaaatagatgaattaaatccttttaatgtaccatcacctcatatgacaatccaacatgttaaacaattaaaggatattattttagaagcagtaacaaataaatattatgatggtttcgttatcacgcatggtaccgatacgttagaagaaactgcctttttacttgatttaatattaggtatcgagcaacctgttgttattactggcgcaatgcgctcgtctaatgaaattggttctgacggattatataattatatttccgctattcgcgttgcctctgatgaaaaggcccgtcataaaggcgtgatggttgtatttaatgatgaaattcatacggcgcgtaatgttaccaaaacacatacgtctaatacaaacacatttcaaagtccaaatcatggtccgctaggtgtattgacaaaggatcgtgtgcaattccatcatatgccatatcgccaacaagcattggaaaatgtcaatgacaaactaaatgtaccattagtaaaagcatatatgggtatgccaggtgacatttttagtttttatagtcgagaaggtatcgatggtatggttattgaagcgttaggacaaggcaacatacctccaagcgcattagaaggcattcaacaattagtatctttaaatatacctattgtgctagtttcacgttcctttaatggtattgtgagtccaacttacgcatacgatggtggtggttaccaactcgcacaacaaggttttattttttctaacggcttgaatggtccaaaagcaagattaaaattattagtcgcgttaagcaacaatttagataaagctgaaatcaaatcatattttgaattataa

SEQ ID NO: 406400 - DNA, 660 bp, Staphylococcus aureus
atgaaagccattaatattgcattagatggtccagctgctgccggaaaaagtacaattgcgaaacgtgtagccagcgaactatcaatgatttatgtcgatacaggagcaatgtatcgtgcattaacatacaaatatttaaaattaaacaaaactgaggactttgcaaaactagttgaccaaacaacattagatttaacttataaagcagataaaggtcaatgtgtcattttagataacgaagatgtaacagactttttaagaaataatgatgtgacgcaacatgtttcatacgttgcatctaaagagccagtacgttcattcgccgttaaaaaacaaaaagagttagctgcagaaaaaggtatcgtaatggatggtcgcgatatcggaactgtagtgctaccagatgcagatttaaaagtatatatgattgcatcagttgaagagcgagcagaaagaagatataaagataatcaattaagaggtatcgaatcaaattttgaagatttaaaacgtgatattgaagctcgtgatcaatatgacatgaaccgtgaaatatcaccattaagaaaagcagatgatgcagtgacattagatacgacaggcaagtcgattgaagaagttactgacgaaattttagcgatggtgagtcaaattaaataa

SEQ ID NO: 406401 - DNA, 1176 bp, Staphylococcus aureus
atgactgaagaattcaatgaatcaatgattaacgatattaaagaaggtgacaaagtcactggcgaggtacaacaagttgaagacaagcaagttgttgttcatatcaacggtggtaaatttaatgggattattcctattagtcaactatctacgcatcatattgatagcccaagtgaagttgtaaaagagggcgacgaagttgaagcatatgtcactaaagttgagtttgatgaagaaaatgaaactggagcttacatcttatctagaagacaacttgaaactgagaagtcttatagttatttacaagaaaaattagataataatgaaatcatcgaagcgaaagtaacagaagtagttaaaggtggtttggttgttgatgtaggacaaagaggttttgttccggcttcactaatttcaacagacttcattgaggatttctctgtgtttgatggacaaacaattcgtattaaagttgaagaattggatcctgaaaataatagagtcattttaagccgtaaagcagttgaacaagaagaaaacgatgctaaaaaagatcaattattacaatctttaaatgaaggcgatgttattgatggtaaagtagcgcgtttaactcaatttggtgcatttatagacattggcggtgttgatggtttagtgcatgtatctgaactttctcacgaacatgttcaaacaccagaagaagtagtttcaattggtcaagatgttaaagttaaaattaaatctattgatagagatacagaacgtatttcattatcaatcaaagatacgttaccaacacctttcgaaaatattaaaggtcaattccacgaaaatgatgtcattgaaggtgtcgtagtaagattggcaaactttggtgcatttgttgaaattgcaccaggtgtacaaggacttgtacatatttctgaaattgcacacaaacacattggtacgccaggtgaagtgttagaacctggtcaacaagtaaatgttaaaatattaggtattgatgaagagaatgaaagagtatcactatctattaaagcaacattaccaaacgaagatgttgttgaaagtgatccttctacgactaaggcgtacttagaaaacgaagaagaagataatccaacaattggcgatatgattggtgataaacttaaaaatcttaaactataa

SEQ ID NO: 406402 - DNA, 1311 bp, Staphylococcus aureus
atgactaaacctatagtagctattgtaggtaggcctaatgtaggtaaatctacaatttttaatagaatagttggagaacgtgtttcgattgtggaagacacgccaggtgtaacacgagatcgtatttattcttcaggtgaatggttaacacatgatttcaatattattgatacaggtggtattgaaattggtgatgcaccattccaaacacaaattagagcgcaggcagaaatcgccatagatgaagcggatgttattatttttatggttaacgtgcgtgaaggattgacacaaagcgatgaaatggtcgctcaaattttatacaaatctaaaaaaccggtcgtattagcggttaacaaagtagataatatggaaatgcgtacagacgtgtatgatttctattcattaggatttggtgaaccgtatccgatatcagggtcacatggtttaggtcttggtgacttgttagatgcagttgtttctcattttggtgaagaggaagaagatccttatgatgaagatacaattcgactatccattattggacgaccaaacgtaggtaaatcaagtttagtaaatgctattttaggtgaagatcgcgttatcgtttctaatgttgcagggacaacgagagacgctattgatacagagtatagttatgatggacaagattatgttttaatcgatactgctggtatgcgtaaaaaaggaaaagtatatgaatcaactgagaaatattcagtattaagagctttaaaagcgattgaacgttcaaatgttgttttagtggtcatagatgcagaacaaggcatcattgaacaagataaacgtgttgcaggatatgcacatgaacaaggtaaagcagtcgtgattgtcgtaaataaatgggatactgtggaaaaagatagtaaaacgatgaagaaatttgaagatgaagtacgtaaagaattccaatttttagattatgcacaaattgcttttgtgtctgctaaagaacgcacaagattacgtacattattcccttacatcaatgaagcaagtgaaaaccataaaaaacgtgttcaaagttcaactttaaatgaagttgttactgatgcaatttccatgaaccctacaccaacagacaaaggtagacgtttgaatgtcttttatgcaacacaagttgctatagaaccaccgacatttgttgtatttgttaatgatgtagaattaatgcatttttcttataaacgctatttagagaatcaaatccgtgccgcttttggttttgaaggtacaccaattcatattatagctcgaaagagaaattaa

SEQ ID NO: 406403 - DNA, 999 bp, Staphylococcus aureus
atgactaaaattaccgtttttggtatgggaagttttgggacagcccttgccaatgttcttgcagaaaatggacatgatgttttgatgtggggtaaaaatcaagatgctgttgatgaattaaatacatgtcatacaaataaaaagtatttaaaatacgcgaaattagatgttaacatcatcgctacttcagatatgaccaaagcaattcaatttgcagatatttacttaatggctttacctactaaagcaatgcgagaagttgcttctcaaattaatgataagctgacctctaaaaagacttttatacatgttgctaaaggtattgaaaatgggacgtttaaacgtgtgtcagaaatgattgaagattctatttcacctgaatataatgcaggtattggcgtgttgtcagggccaagtcatgcggaagaagttgtagtcaagcaaccaactacagttgctgcttcatcaaaagataaaagtgtaagtaaattaacgcaagatttatttatgaatgattatttgcgtgtgtacacgaatgatgacttgattggtgttgaacttggtggtgcattgaaaaatatcatcgcagtagcaagtggtatcgtagctggaattggctacggtgataatgcaaaagctgcattaatgactcgtggcttagcggaaattagtagattaggtgaaaagttaggtgccgatcctatgacatttctaggtttaggtggtatcggtgacttaatcgttacttgcacatcaacacattctcggaatttcacattaggatataaacttggacaaggtgaatcaatggatcaagcattatctgaaatgaatatggttgttgaaggtatttatacaactaaatcagtttatcatttagctaaagaaaaaaatgtggatatgccaattacaaatgcattatatagagtattatttgaaaatatctcagtaaaagaatgcgtaaaagatttaatggagcgcgataaaaaatctgaataa

SEQ ID NO: 406404 - DNA, 273 bp, Staphylococcus aureus
atgaacaaaacagatttaatcaatgcagttgcagagcaagctgatttaactaaaaaagaagctggttcagcagtagatgctgtattcgaatcaatccaaaactcacttgctaaaggtgaaaaagtacaattaattggtttcggtaactttgaggtacgtgaacgtgctgcacgtaaaggtcgtaaccctcaaactggtaaagaaattgatatcccagcaagtaaagttccagcattcaaagctggtaaagcattaaaagatgctgtaaaataa

SEQ ID NO: 406405 - DNA, 573 bp, Staphylococcus aureus
atggaaacaactgttagcaaattggaaagacaaatagaagaaagattaaagggcgtatcagaatatgaatccattaatattaatcatcggttaggtaagttacttgatttatatgatattccagatgttgccaaagtggcatgcctcacaattgacacatcaatgagacaccttgatgacattacatataatcatttgtctaaacattccattttgattggagatttaattagtgcacatttttatacgctactagcagaaatcaatgatttatcatttcaaaatgaaattagtaaagcaattgttgaaattaatgaattgaaatcttcattacatcatcaagctttaaatgattatgaaatttctcaagcaatagtaaaaattgaaacacttttcccatatattacgttatctcatttcggtatcaatattgatgagtcggaaatatataattatttatttgaagatatgtctgattactatccatcatacttcaagaaatataatcaaagtgaagtaaagcattacttacacgatatccaaaaaagttatttaaaaagtagaggtaattaa

SEQ ID NO: 406406 - DNA, 726 bp, Staphylococcus aureus
atggctgacaataaagcaaataaagagcaagtacatcgcgtttttcaaaatatttcaaaaaaatatgatagattaaataatattattagttttgagcagcataaagtatggagaaaacgcgtcatgaaagacatgggtgttagaaaagggacgaaagcattagatgtttgttgtggtactggtgattggacaatcgcattaagcaaagctgtaggaccaacaggtgaagttactggtattgactttagtgagaatatgttagaagtaggaaaagaaaaaactgcttcaatggaaaatgttaaacttgttcatggtgatgcaatggaattgccgtttgaagacaattcttttgattatgtaacaattgggtttggattaagaaatgtgccagactatttagtcgcgttaaaagaaatgaatagagtacttaaaccaggtggtatggtggtatgtcttgaaacgagccaaccaactttgccagtctttaaacaaatgtatgcactatactttaaatttgttatgcctatttttggaaaattatttgcaaaatcaaaagaagaatatgaatggttacagcaatctacgtttaattttcctggaaaagaagagttgaagcgcatgtttgaagaagcaggtttcataaatgtaagagtacgtagttttacagggggcgttgctgcaatgcaccttggctataaagaaaaagataataccaaaggtgattaa

SEQ ID NO: 406407 - DNA, 960 bp, Staphylococcus aureus
gtggcaaagttaaacatgaacaatgaaattaagaaagtggaacaacgacttgaaaaggcaataaaaagtaaagattctgtattagaacaggcatcattacacttattgtcttctggtggtaaaagagtacgcccagcatttgttattctgagtagccaatttggcaaagatgaacaaacgtctgaacaaacgtatcaagttgcagtcgcattagagttaattcatatggcaacacttgttcatgatgacgttattgataaaagcgacaagcgtcgaggcaagttaaccatatcaaagaaatgggatcagacaactgctattttaactgggaattttttattggcattaggacttgaacacttaatggccgttaaagataatcgtgtacatcaattgatatctgaatctatcgttgatgtttgtagaggggaacttttccaatttcaagaccaatttaacagtcaacagacaattattaattatttacgacgtatcaatcgcaaaacagcactgttaattcaaatatcaactgaagttggtgcaattacttctcaatctgataaagagactgtacgaaaattgaaaatgattggtcattatataggtatgagcttccaaatcattgatgatgtattagacttcacaagtaccgaaaagaaattaggtaagccggtcggaagtgatttgcttaatggtcatattacgttaccgattttattagaaatgcgtaaaaatccagacttcaaattgaaaatcgaacagttacgtcgtgatagtgaacgcaaagaatttgaagaatgtatccaaatcattagaaaatctgacagcatcgatgaggctaaggcagtaagttcgaagtatttaagtaaagctttgaatttgatttctgagttaccagatggacatccgaaatcactacttttaagtttgacgaaaaaaatgggttcaagaaacacgtag

SEQ ID NO: 406408 - DNA, 450 bp, Staphylococcus aureus
gtggaacgtacatttttaatgattaaaccagatgcagtacaaagaaatctaattggtgaagtaatttcaagaattgaaagaaaaggactaaaacttgtcggtggtaaattaatgcaagtaccaatggaacttgctgaaacacattatggtgaacaccaaggtaaaccattttataatgatttaatttcatttattacatcagcaccagtgttcgcaatggtagttgaaggtgaagatgcagttaatgtatctagacatattattggcagcaccaatccttcagaagcttcaccaggatcaattagaggtgatttaggtttaactgttggtagaaatatcattcacggttcagattcattagagtctgctgaacgtgaaattaatctatggtttaatgaaaatgaaattactagctatgcttcaccacgtgatgcatggttatatgaataa

SEQ ID NO: 406409 - DNA, 201 bp, Staphylococcus aureus
atgaagaatattatttcgattattttggggattttaatgttcttaaaattaatggaattactatatggtgctatatttttagataaaccacttaatcctataacaaaaattatttttatactgactctcatttatattttttatgtattagtaaaagaattgattatatttttgaagtcaaagtataacaaaagcgcttaa

SEQ ID NO: 406410 - DNA, 1167 bp, Staphylococcus aureus
atgagatacctaacatcaggagaatcacatggacctcaattaacagttattgttgaaggtgtacctgcaaatatagaaattaaggttgaggatattaataaagaaatgtttaagcgtcaaggcggttacggacgtggacgtcgtatgcaaattgagaaagatacagtagaaatagtatcaggcgttagaaatggttatacattaggtagtccaattactatggttgtaaccaatgatgactttacgcattggagaaaaattatgggagcagctccaataagtgaagaagaacgtgaaaatatgaaacgtactattacaaaaccaagacctggtcatgcagatttggttggaggtatgaaatataatcatcgtgatttacgaaatgtgctagagcgatcatctgctagagaaacagcagctcgagttgcagtcggtgccttatgtaaagtgttattacaacagttagatatcgatatatacagtcgtgttgttgaaataggtggaattaaagataaagatttttatgattcagaaacatttaaagcaaatcttgatcgtaatgatgttcgtgtaattgatgacagtatcgcacaagcaatgcgagataaaattgacgaagctaaaaatgaaggagattcaattggcggtgtcgttcaagttgtagttgaaaatatgcctgttggtgtaggtagttatgtgcattatgatcgtaagttagatggtaagattgcacaaggtgttgtcagcataaatgcttttaaaggtgtaagctttggtgaaggatttaaagcagctgaaaagccaggtagtgagattcaagatgaaattctatataatagtgaaattggttattatcgtggatctaatcacttaggtggtttagaaggcggtatgtcaaatggaatgccaattatcgttaatggtgtaatgaaaccaattccaacgttatataaaccattaaattcagtagacattaatactaaagaagactttaaagcaacaattgaacgttctgatagttgtgctgttcctgcagcaagtatcgtctgcgaacatgtcgtagcatttgaaatagcaaaagcattattggaagaattccaatcaaatcatattgagcaacttaaacaacaaattattgagcgcagacaattaaatattgagttttaa

SEQ ID NO: 406411 - DNA, 1065 bp, Staphylococcus aureus
atgaaattacaaacaacatacccttcaaataattatccaatatatgttgaacacggtgcaattgaccatattagcacgtatattgatcagtttgatcaaagttttatattaattgacgagcatgtaaatcaatattttgctgataaatttgatgatattttatcatatgaaaatgtacataaagttattattccagctggtgaaaagacgaaaacatttgagcaatatcaagaaacattagagtatattttatcccatcatgtaactcgtaatacagcaattattgctgttggtggtggtgcaactggtgattttgctgggtttattgcggcgacacttttacgaggcgttcactttatacaagtgccaacgactatactagcgcatgattctagtgttggcggtaaagtgggtattaactcaaagcaaggtaaaaaccttatcggtgcattttatcgtccaactgctgtgatttatgatttagactttttaaagacgttaccatttgagcaaatattaagtggctatgcagaagtttataagcatgcgttattgaatggtgaatcagcgacgcaagatatcgaacagcactttaaagatagagagatattacagtcattaaatggtatggataaatatattgctaaaggtattgaaacgaagctggatattgttattgcagatgaaaaagaacaaggtgtacgtaaatttttaaatttaggtcatacatttggtcatgctgttgaatactatcataaaatacctcatggtcatgcagtgatggttggcattatctatcaatttatagttgcgaatgctttgtttgattctaagcatgatattaatcattatattcaatatttaatacaactcggctatcctttagacatgataactgacttggattttgaaacgttataccaatatatgctaagtgataaaaagaatgataagcaaggtgtacaaatggtcttgattagacaatttggagatatcgttgtacaacatgttgatcaactaacattacaacatgcatgtgaacaattaaaaacatattttaagtag

SEQ ID NO: 406412 - DNA, 1299 bp, Staphylococcus aureus
atggtaaatgaacaaatcattgatatttcaggtccgttaaagggcgaaatagaagtgccgggcgataagtcaatgacacaccgtgcaatcatgttggcgtcgctagctgaaggtgtatctactatatataagccactacttggcgaagattgtcgtcgtacgatggacattttccgactgttaggtgtagaaatcaaagaagatgatgaaaaattagttgtgacttccccaggatatcaatcttttaacacgccacatcaagtattgtatacaggtaattctggtacaacaacacgattattggcaggtttgttaagtggtttaggtattgaaagtgttttgtctggcgatgtttcaattggtaaaaggccaatggatcgtgtcttgagaccattgaaacttatggatgcgaatattgaaggtattgaagataattatacaccattaattattaagccatctgtcataaaaggtataaattatcaaatggaagttgcaagtgcacaagtaaaaagtgccattttatttgcaagtttgttttctaaggaaccgaccatcattaaagaattagatgtaagtcgaaatcatactgagacgatgttcaaacattttaatattccaattgaagcagaagggttatcaattaatacaacccctgaagcaattcgatacattaaacctgcagattttcatgttcctggcgatatttcatctgcagcgttctttattgttgcagcacttatcacaccaggaagtgatgtaacaattcataatgttggaatcaatccaacacgttcaggtattattgatattgttgaaaaaatgggcggtaatatccaacttttcaatcaaacaactggtgctgaacctactgcttctattcgtattcaatacacaccaatgcttcaaccaataacaatcgaaggagaattagttccaaaagcaattgatgaactgcctgtaatagcattactttgtacacaagcagttggcacgagtacaattaaagatgccgaggaattaaaagtaaaagaaacaaatagaattgatacaacggctgatatgttaaacttgttagggtttgaattacaaccaactaatgatggattgattattcatccgtcagaatttaaaacaaatgcaacagttgatagtttaactgatcatcgaataggaatgatgcttgcagttgcttctctactttcaagcgagcctgtcaaaatcaaacaatttgatgctgtaaatgtatcatttccaggatttttaccaaaactaaagcttttagaaaatgagggataa

SEQ ID NO: 406413 - DNA, 1245 bp, Staphylococcus aureus
atggaagatatctataaattaatagacgatatcaatctacaaaaactagaaaatttagactctcgtgttaatgaagcaataactactgacaacgatgacgcattatttattctaggagagacactttacaattttggattaatgccacaaggtttggaagtattccgcgtgttatatcacaaatatccagacgaaagtgaattgctgatttattttattgaaggtttaatgtctgaaaatcaaactgacgaagcgttagaatatttaagttatgttgaaccatcacctgaaaagttgatgttagaagcagatttatatcaacaaattaatatgatggaagttgctattgataaattacaagaagcacttgaactagagccaaatgatccaataatccattttgcattggctgaaatgttatattatgatggtcaatatttacgtgctacctctgaatacgaaaccgttttagaaactggtgaatatcaagttaatggtgtaaacttattctctcgtatggcagattgtagtttacaaagtggtaactatagtgatgcgattcgcttatacgatgaaattaatgaagatgaaatgacttcagaagattatctcaaaaaagccatttcttacgataaaaatgacatcactcaagaagcaattaaaataatgactacattactttctaaagatcctgattatattcaaggctacttgtatttacaatcattatatgaaaatgaaaaaaattatccagatgccattgaaacgggtaaagaaggattacgactaagtcaattttataaagagttaatgtatacaactggatgtttggaaatagaacacggcgatgctaatgaaggtgtattattgttaaaacaagcattagaggttgataatgcttaccaagaacctttattgattttaagcgatttatatcgtaatgaagaagattatgaagcaatcattgaattattaacatatgtagatgaagaagatttggatcctacattcatgtggcatttagcgttcgcctatggtcaagaagagcgagataaagaagctcaacatttctttgaattagcatatccaacgatgaaaacaaatattgattttatgagtgattattatttctatttaattgaaattggtcaaaaggaacaagcaattactattttaaatcaattgttggaactagagccaagtaacgaaaattggcatgacgaattatcaagattgcaatcttaa

SEQ ID NO: 406414 - DNA, 588 bp, Staphylococcus aureus
atggggtatttgatgtcagagacattcaatcaaattaaagaaagttttattgaatatttactttttcaatatcgatttaagtcgcgtattgcagtttgggtgcttaactatataaaagtgaatgaggcgaaattggcaaacattcattttgtagatacaaaaattaatcatcatgaaacattagaaattgcagaagtgggaagtcacgcttctgcaattcaatttactaagcgtaatataaagttaatgaatacaaatgaaatatttgattatatcgctaatcataactgtgcttttgatattcaaattcacttcgcaaacgtgtcaaagcgtgagcaaaggctagatgatttaatagttgctcaactaacggaatcgcccagttatcaaacttatcttcatgacttaaatagtatggctatagatcggcataaacatgcgttattaatagattacttgttacacaatattgatttaagtttacagatgaatgaaaagcaacgtttttatcaactaacgcaaattttaaatacactcaagctagtaaataaacataatcaatttgaggacttagcagatgacaattaa

SEQ ID NO: 406415 - DNA, 588 bp, Staphylococcus aureus
atgacaattaaagcattttggcaatatacactttatcaacgttcttggttaatgatgctactcatttgtaatatattagggatgatttatggttatatatggtatggtgaacaattaagtcatacgccctggcattttaagatttttgttccagatagcccaactgcaatattatacttagttatttctatctcattgatattaattcaaaaacaaaatagtattatcgatgcactggcatttgtaacattattcaaatatgggatttgggcagttataatgaatatattatttattattgaacaaggtgatattacagtaaatggtttggtattaatgttttcccacagtataatggctgttcaggcaatttacttctatcctaggtttaaacgttctatgattggaatcagtgtagcgatgatttgggtgtttttgaatgattatattgactattttcaccttcaatttccatattatgattttataactacacatgtgtggcaaattggtgtattatcatgttgtctaagtgtttttggacttttgctttatattgaattaaacaaattattaaagtgtaaatga

SEQ ID NO: 406416 - DNA, 699 bp, Staphylococcus aureus
ttgtcttcaatttttactatgataatttatttcgtaatattaatggtgcttcctttatgggcacaacacaaagttaaatctaactatgagaaatattcacaagttagatcaactagtggtaaaacgggtcgtgaagttgcattagaaattttacatgcaaacggtatttatgatgtcgaagttgttaaaggtgaaggattcttaacagatcattacgatcctaaaaagaaagttgtttcactatctcctgcaaactatgacagaccatcagttgctggaactgcaattgcagcccacgaagttggtcatgccattcaagatcaccaaggatattggttcttaagattcagagcagcattagtacctgttgcaaacctagggagttcattaagttatatgatcatcatgttaggtattatcttaacagcgataggtagtgcatttggttcaactgctttatggattggtgctggtttaatgtcattagcggtattattctcaattgttacgttaccagttgagtttgatgcgagttcaagagcgatgaaacaaattacggcattgaacattgtaaatgaaaaagaatacaagcatgcgcgtaaagtattatctgcagcagcaatgacttatgttgcagcaactgcagtcgctgtagcagagcttgtacgtattattttgattgcgcgttcaagtgattaa

SEQ ID NO: 406417 - DNA, 318 bp, Staphylococcus aureus
atgaaatcaatggtagaaatgcaacgtgaagttgatgaatatattggacaatttaaaacaggatatttttcaccattagctaacttagctagattgactgaagaagtgggcgaacttgcacgtgaaataaatcatacctatggtgaaaaaaagaagaaagattcagaggaagcaaatacgattaaagcagaattaggtgataatttatttgtgttgttatgtttagcgaattcaatgggaatagatatgacagagagttttaatgaaacaatggaaaagtttaatacaagagataaaaatcgattcgaaagaaagtga

SEQ ID NO: 406418 - DNA, 1143 bp, Staphylococcus aureus
atgaagataggtataacatgttacccgtccatgggtggttctggaattattgccacagaattaggaattaaattagcagagcgaggtcacgaagtacattttatcacttcaaatatcccgtttagaataagaaaaccattaccgaatatgatttttcatcaagttgaagtgaatcaatatgcagtatttcagtatccaccgtatgatattacgttaagtactaaaatcgctgaagttattaaagaatatgatcttgatttgttgcatatgcactatgctgtacctcatgcaatttgtgggattttagctcgtgagatgtcaggtaaagatataaaaattatgacaacgctacacggtactgatattactgttttgggctatgatcattcactccaaggtgcaattaaatttggcattgaaaaaagtgatattgtgacaagtgtgagtaaatctttagcacaagaaacacatgaaattattgaaactaacaaagaaattataccgatttataattttgtacgtgaaaatgagtttccaactaaacataacacagcattaaaatcacaatttggtatagcaccagatgaaaaagtgttaatacatgtatcgaattttagacaagtaaaacgcatagatactattatagaaacatttgcaaaagtacgtgaaaagatacctagtaaattaattttacttggagatggtcctgaattagtgccaatgcgtcaattgacgaaagagttaaacgtagaagaggatgttttatttttagggaaacaagattgcgtaagtgaattttaccaattatctgacttagtattattattaagtgaaaaagaaagctttggactaactttacttgaggctatgaaaacaggcgtcgttccaattggttcaaatgccggtggaattaaagaggttattaaacatggtgaaactggatttgtcgtagatgtgggtgattgtgattcagcgagtgactatgctatccgattacttgaagataaggtgttatacaacaaacttcagaaaaacatgctagcagatattgctgaacgttttggatcagaacttattacagatcaatatgagtattattatcaaaaaatgctaaatgagcataacaaaagtaaaggcgagtaa

SEQ ID NO: 406419 - DNA, 1203 bp, Staphylococcus aureus
atggataaatcattatttgaacaggcaaggcctatattagaacaaattcaagacaatggttttgaagcatattatgtaggtggctctgtaagagattatgtcatgggaagaaatattcatgatatagatatcacaacaagtgcaacgccggatgaaatagaatctatctttagtcatacgatacctgtaggtaaagaacatggcacgataaatgtagtttttaatgatgaaaattatgaagtgacaacattccgggctgaagaagattatgtcgatcaccgtagaccaagtggtgttacatttgttcgtgatttatacgaagatttgcaacgacgagatttcacgatgaatgcgatagcaatggatacagcatacaaattgtatgattattttgatggtcaacaagatattaataatcgaataataagaactgtaggtatagctgaggaacgattccaagaagatgctttacgtatgattcgatgtttaaggttccagtcacaattatcatttgatattgcaacggaaacattcgaagcgatgcgtatacaaatggcagatattaaatttttatcaattgagcgtatagtgattgaactaactaaattaatgcgaggtattaatgttgaaaagagttttaatcatttaaaatcgctgaaagcatttaattatatgccgtatttcgaacatcttgatatgaatcaaattaatgtaactgaagcaattgatttagaattgttgattgctatagtatcagttaaatttgatattaattactcattgaagcctttaaagctaagtaaccgacaagtaaaagatatcaatcaatatattcaaattatgaatgcattaccaagtattattacaaaagaacaattaaaaatgtttgtttatgattatgatacgcatctcattaaaaatgtaatggttgcagcagacgtgttaaaggcaaatgatattcaaggacatgaaccattaatcgttaaccttcaaacgattgatgaaacattacatcgtttacctatgcataatagaaaagacatgatggttaatggcggtgtacttatggcacatttaaatgccaaaagtggtccgtggttaaaagatgtgctaagacaaattgagatagcgattgtaacaggtaaagtaagcaacgaagaaactgaaattttgaaatgggtggataatcatgtcaaaatatag

SEQ ID NO: 406420 - DNA, 972 bp, Staphylococcus aureus
atgtcaaaatatagtcaagatgtacttcaattactctataaaaataaaccgaattatatatctggacaaagcattgcggaatcacttaatatttcacgcactgcagtaaaaaaagtgattgaccaattaaagttagagggatgtaaaatagattcagtaaatcataaagggcatttattacaacagctcccagatatttggtatcaaggtataatagaccaatatacaaaaagttctgctttgtttgattttagtgaagtatacgattcaatagattctacacaacttgctgcgaaaaagtcacttgttggaaatcaatcttcattttttatcttgagtgatgaacaaacgaaaggtcgtgggcgatttaatagacattggagttcttcaaaagggcaaggactttggatgtctgtcgtgttaagacctaacgttgcattctcaatgatatctaaatttaatttatttattgcattagggataagagatgcgattcaacattttagtcaagatgaagtcaaagtgaaatggccgaatgatatatatattgataatggtaaagtgtgtggtttcttaactgaaatggttgctaataatgatggtatagaagcaataatatgtggtataggtattaatttgacgcaacaactagaaaactttgatgaaagtattagacatagagcaacaagtatacaattacatgataaaaataaattagatagatatcaatttttagagatattacttcaagaaattgaaaaaagatataatcaatttttaacgttacctttttctgaaattcgtgaagaatatactgcagcttctaatatttggaatagaacgttgctatttacagaaaatgataaacagtttaaaggacaagcaattgatttagattacgatggctatctaattgttagagatgaagcgggtgaatcacaccgtttaattagtgcagatatagatttttaa

SEQ ID NO: 406421 - DNA, 2694 bp, Staphylococcus aureus
atgggtatggcaacctatgccgttgtggatttggaaacaacaggcaaccaattagattttgacgatatcattcaaattggtataacgtttgtgcgcaataaccaaattattgatacatatcattctatgattagaacaaatttagagattccgccgttcattcaagcgttaacatccattgaagaaaatatgctacaacaagcgccatattttaatcaagttgcacaagaaatctacgataagataaaagattgcatttttgtagctcataatgtagattttgatttgaattttattaaaaaggcatttaaagattgtaatattcaatatcgtcccaaaaaagttatagatacactagaaatctttaaaatagcttttcctacagataaaagctatcaattaagtgaattagcagaggcacatggtattaccttagcaaatgcccatcgagctgacgaagatgccgctactactgctaaattgatgatattagcttttgaaaaatttgaaaagttaccgttagatactttgaagcaattatattatttaagtaaacagttaaaatacgatttgtatgatattttctttgagatggttaggcaatatgatgcaaagccattggataaatcgtacgaaaagttcgaacagattatctatcgtaagcaagttgattttaaaaagccgacaacaaattataatggcagcttgaagtctttatatagcaaagctgtagatcaacttggcttaacatatcgaccgcaacaattatatttagcggaaactatattagatcagctcatgcatagtgaaaaagcaatgattgaagcatcactaggcagtggtaaatcattagcatatttacttgcggccttgatgtataatattgaaactgggaagcatgtcatgatttctaccaatactaaattactgcaaagtcaattgttagaaaaagatattccagcaatgaatgaagcgttgaattttaaaattaatgcactattgattaaaagtaaaagtgattacatttcattggggcttattagtcaaattttaaaagatgacacaagtaattacgaagtgaatatcttgaaaatgcaattgctgatttggattacagagacgccgtccggagatatacaggaattaaatttaaaaggtggtcaaaagatgtattttgaccagaaaattgaaacatatgtaccggcacgtcacgatgttcattattataattttattaagcgaaatgcacagaacattcaaattggtattacaaatcatgcacatttaattcattctgatgttgaaaattcaatatatcaattgtttgatgattgtatagtggatgaagcacatcgcttaccagactatgccttaaatcaagtgacaaatgagttgagttatgctgatattaaatatcagcttggtttgattggtaaaaacgaaaatgaaaaattgttaaaggcaattgatcaactggaaaagcagcgaattttggaaaaattagatattgcaccaattgatatttttggcttgaaggctagtatgaatgagattcatgagttaaatgagcaattgttctcaacgatatttacgattatcaatgattctgatgtttatgatgatgatattcatcgcttccataatgtatttacttttgaaacaaaagacattttgaaggatttacatgcgattatcgataagttaaataaaacgctagaaatattcaatggcattagtcataaaacagttaaatcattacggaaacagttgttgtatttaaaagataaatttaaaaatatcgaacaaagtttaaaagctggacatactagtttcatttcgattaaaaatttatctcaaaaatcaacaatacgtttatatgtgaaagattacgctgtaaaagatgtattaacgaaacaagtattggaaaaatttaaatcgctcatttttatatctggtactttaaaatttaatcattcgtttgaagcttttaaacagttattcaacaaagatgttcactttaatacatttgaagttaacacgtcgttacaaagtgcaaaaaatacaagtgtatttataccgagtgatgtagcatcttatcaatataaaaatatagatgagtatgtagcatcgattgtaagctatattattgaatatacgactataacgtcatcaaaatgtttagtcttatttacgagttataaaatgatgcatatggtacaagatatgctaaatgaattgccagaatttgaagattatgttgtattaacacaacagcagaaccaaaattataaaatagtacaacagtttaataattttgataaggccatactgcttggtacgtcaacattttttgaaggttttgattttcaagcaaatggtattaaatgtgtgatgatagcgaagttaccgtttatgaacaagcataatgcaaaatattggcttatggattctgaattcacttcaactttcaaggaatatgtattacctgatgcagttacacgttttagacaaggacttggaagattaattagaaatgaaaatgatcgcggcataatagtttcatttgatgatcgactcataaacagtaattataaaaacttttttgaacaaacacttgaaaattatcgtcagaaaaaaggcgacattcaacagtttggaaaattattaagacaaattcaaaaaaagaaaaagtga

SEQ ID NO: 406422 - DNA, 1293 bp, Staphylococcus aureus
atgaaaacaacgattaaacaagcgaaagatcatttaaaccaagacgttacaattggtgcttggttaacaaataaacgttcaagtggtaaaatcgcctttttacaattacgtgatggaacaggctttatgcaaggcgtagtagttaaatcagaagttgatgaagaggtattcaaacttgcgaaagaaattactcaagaatcatctctatacgttacaggcacaattacagaagataatcgttctgacttaggatacgaaatgcaagtgaaatcaattgaagttatttcagaagcgcatgactatccgattacacctaaaaatcatggtacagaattcttaatggatcaccgtcatttatggttacgttctaaaaaacaacatgctgtaatgaaaattagaaatgaagttattcgtgcaacgtatgaatttttcaacaaagatggatttacaaaggttgatccaccaattttgacagcaagtgcgccagaaggtacaagtgaattattccatactaaatactttgatcaagatgcgtttttatctcaaagtggtcagttatacttagaagctgcagcaatggcacacggaaaagtattttcatttggtccaactttcagagctgaaaaatcaaaaacacgtagacacttgatcgagttctggatgattgaaggagaaatggctttcacaaatcatgctgaaagtttagaaattcaagaacaatatgtaacacatgttgtaaaatcagttttagaaaattgtaaactagagttgaaaattttagagcgtgatacatcaaaacttgaaaaagttgcgacaccattccctagaatttcatatgatgatgcaattgaattcttaaaagcagaaggctttgatgatattgaatggggcgaagattttggtgcgccacatgaaacagccattgctaatcattatgatttaccggtgtttattactaattatccaactaaaattaagcctttctatatgcaaccaaatcctgaaaatgaagaaactgtattatgtgcagacttaattgcacctgaaggatacggtgaaattattggtggatctgaacgtgtggatgacttagaattgttagaacaacgcgttaaagaacatggattagacgaagaagcatatagttactacttagacttacgtcgttatggtagtgtgccacactgtggatttggtttaggtttagagcgtacagtagcatggatttctggtgttgaacacgttcgtgaaacagcgccattcccaagattattaaaccgtttatatccataa

SEQ ID NO: 406423 - DNA, 687 bp, Staphylococcus aureus
atggataaatatcaattaaaagcaagacctgtagtgatacgaagagaattattagaccattacagtgacttaggtttagatgagcaagatttagtcattttgcttaaattgatttatgcttccgaaacatcaaataaacagccttcaattgaattgcttcagaagggctcaactatgcaaccacgtgatattacaatggttattcaaaatttgatacaacgtgaattgctagaattacaagttcaaaaagatgaagaaggtagatttaccgaatatatgaatctagatccttttttcgaaaaattaagtcatatattgaagcaacaaagtatggaaacgaaagagctaaatagtaaagaaaaatttaaacaattatttagagttttagaggatacatttgcaaggccgttatctccatatgaaatagaaacgttaaatcaatggattgatgttgataaacacgatactgcaattatacaagcggcattagacgaggcgaatagtttgaataaacttagctttaaatatatagatcgtattttacttaattggaagaaaaacaatgtcaaaacaattgacgattctagaaaaataagagaaaaattcaataaaccgaaaatgacgcacacagttaaaacggtacctaaatttgattggttaaacggggagaaccttgatggtaagtaa

SEQ ID NO: 406424 - DNA, 660 bp, Staphylococcus aureus
atggtaagtaagaaaaaagcattagaaatgattgatgttatagcaaatatgtttccggatgcagaatgtgaattaaaacatgataatccgttcgaattaactattgctgtattattgtcagcgcaatgtacagacgttctagtaaatagagtaacaactgagctgtttaaaaaatacaaaacgcctgaagattatttggcagtcagtgatgaagaacttatgaatgatattcgttctatcggtctgtatcgtaacaaagctaagaatattaagaaactttgtcaatctttgattgatcaatttaatggagaaataccacaaacacataaggaattagaaagtttagcaggtgtaggacgtaaaactgctaatgtagtcatgagtgtagcatttgatgaaccttcattagctgttgatacgcatgtagaacgtgtttctaaacgcttaggtattaatcgttggaaagataatgtgagacaggtagaagaccgtttatgttctgtcatacctagagatagatggaataggagccatcatcaactcattttctttggaagataccactgtttagcccgaaaacctaaatgcgatatttgtccactattagaagattgtagagaaggacaaaaacgttataaagctagtttgaaagaagcgtga

SEQ ID NO: 406425 - DNA, 342 bp, Staphylococcus aureus
atgacaaatattacaaaagaggtatttgataatttagaacaagagattgatttatttgccaaaaataagacattaggttctagtgaagcaaagccctacttggatgaataccatagtaaaattattgattattttaagcaggttaatgacataactggcaatattgattttgataaattaaatcaatatcctgttgtgccaatgaattttaaagaaagatatgattatatgattgaacgtaaatatcattttatgggctatcgacaaatgaagacctttaaaactgaattgattaaaatgaatgctagttatcaaacaaggttaaagaataagcaggtatag

SEQ ID NO: 406426 - DNA, 2184 bp, Staphylococcus aureus
atgacggaaaacaaaggatcttctcagcctaagaaaaacggtaataatggtgggaaatccaactcaaaaaagaatagaaatgtgaagagaacgattattaagattattggcttcatgattattgcatttttcgttgttcttttactaggtatcttattgtttgcttattatgcttggaaagcacctgcttttaccgaagctaaattacaagatccgattcctgcaaagatatatgacaagaacggagaacttgttaaaacattagataatggccaaagacatgagcatgtaaatttaaaagacgtgccgaaatcaatgaaagacgcagtacttgcaactgaagacaatcgtttctacgaacatggcgcacttgattataaacgtttattcggtgcaattggtaagaacttgactggtggatttggttctgaaggtgcctcaacattaacacaacaagttgttaaagatgcatttttatcacaacataaatctattggacgtaaagctcaagaagcatacttatcatatcgtttagaacaagagtatagtaaagatgatatcttccaagtatatctaaacaaaatttactattctgatggcgtaacaggtattaaagctgctgctaagtattactttaataaagatttaaaagatttaaacttagcggaagaagcttatttagccggtttacctcaggttccaaacaactataatatttatgatcatccaaaagctgctgaagatcgtaaaaacactgttttatacttaatgcattatcataaacgcattacagataaacagtgggaagatgctaagaaaatcgatttaaaagcgaacttagtaaatcgtactcctgaagaacgtcaaaacattgatacaaatcaagattctgagtataattcatacgttaactttgtaaaatctgaattaatgaataataaagcattcaaagatgaaaatttaggtaatgtattacaaagtggtattaaaatttatacaaacatggataaagatgttcaaaaaacattacaaaatgatgttgataatggtagcttctacaagaataaagaccaacaagttggtgcaacaattcttgatagtaaaactggtggtttagttgctatatctggtggacgtgatttcaaagacgtcgttaacagaaaccaagcaacagatcctcaccctactggttcatctttaaaacctttcttagcgtatggacctgccattgaaaatatgaaatgggcaacaaaccatgcgattcaagatgaatcttcatatcaagttgatggttctacatttagaaactatgatacgaagagtcacggtactgtatctatttatgatgctttacgacaaagtttcaatatcccagctttaaaagcttggcaatcagttaagcaaaatgctggtaatgatgcacctaagaaattcgctgccaaacttggcttaaactacgaaggcgatattggtccatctgaagtacttggtggttctgcttcagaattctcaccaacacaattagcatcagcatttgctgcaatcgctaacggtggtacttataacaacgcgcattcaattcaaaaagtagttactcgtgatggtgaaacaatcgaatacgatcatactagccataaagcgatgagtgattacactgcatacatgttagctgagatgctaaaaggtacatttaaaccatatggttctgcatatggccatggtgtatctggagtaaatatgggtgctaagacaggtactggtacttacggtgctgaaacttattcacaatataatttacctgataatgcagcgaaagacgtgtggattaacggctttacacctcaatacactatgtcagtgtggatgggcttcagtaaagttaaacaatatggtgaaaactcatttgtgggacatagccaacaagaatatccacagttcttatatgaaaatgtgatgtcaaaaatttcatctagagatggcgaagactttaaacgtcctagctcagtaagtggtagtatcccatcaatcaatgtttctggtagtcaagataacaacactacaaatcgtagtacacacggtggtagtgacacatcagcaaacagcagtggtactgcacaatcaaataacaatactagatctcaacaatctagaaacagcggtggattaacaggtatattcaactaa

SEQ ID NO: 406427 - DNA, 627 bp, Staphylococcus aureus
atgaattatccaaatggtaaaccatatcgtaaaaatagtgctatagacggagggaaaaagaccgctgcctttagtaatattgagtatggtggacgtggtatgtcacttgaaaaagatatcgaacattcaaatacgttttatcttaaaagcgacattgcagttattcacaaaaagcctacgccagtacaaatagttaatgtcaactatcctaagcggagtaaagctgtgattaacgaagcttattttcgtacaccttcaacaactgattacaacggcgtttatcaaggttattatattgattttgaagcaaaggaaactaaaaacaagacgtcctttcctttaaataatattcatgaccatcaagtcgaacatatgaaaaatgcatatcaacaaaaaggtattgtgtttttaatgattcgttttaaaacgctagatgaagtttatcttttaccctattcaaaattcgaagtattttggaagagatataaagataatattaaaaagtctataacagttgatgaaatacgaaaaaatggttaccatattccttatcagtatcaaccaagattagactatctaaaagcagttgataagttgatattagatgaaagtgaggaccgcgtatga

SEQ ID NO: 406428 - DNA, 402 bp, Staphylococcus aureus
atgacgaatacagtatattgtgataaattaaaaaatgtaggaggcgtcctcatgaatgatgtagtcgaatcactaatttatgaagttaacaacatgcaacaaaattttgaaaatgtgaaatcacaacaacaagatcatgatttttaccaaactgtaaagccatatactgaacatattgatagcatactcaatgagatcaaattacatcgtgaatttattatagaagtaccttatatgaattcaaggaaatttgagctactgattgctaacattgaacaactttctgtcgaatgtcattttaagcgaacaagtcgaaagttatttatagaaaagcttaaaagtgttcaatatgatttacaaaatatattagatggcgtaacaaaagagggtactgatggttaa

SEQ ID NO: 406429 - DNA, 564 bp, Staphylococcus aureus
atggttaaaacagtttatgtaacaggttacaaatcattcgaattaaacatttttaaagatgacgcacctgaagtacattatttaaaacaatttataaaacataaaattgaacaactgttggatgaaggattagaatgggtgttaatacaagggcaaatgggtatagaattatggactgcagaagttgttattgaattacaacgaacatatgattcgttaaagtttgctgtaattacaccgttccaaggacatacagaaaagtggaatgaacataatcaaagtaagtatgccaacataattaagcatgcagattatgttgatagtatttttcatacgtcgtatcaaggtccttttcaatttaaacaagcagatcaatttatgcttgaacattcggatcaaacattgctcatttatgatgaggaacaagaggcgagtcctaagttcttcaagcagatgttagttgattttatggataaaacaaactatacttgtgatattgtgacgttcgatgaattaacagcattcatcaatgacttacagtggtctgaagatcaaagtttctaa

SEQ ID NO: 406430 - DNA, 345 bp, Staphylococcus aureus
atgtcagatgtttcattgaaattatcagcaaaagatatttatgaaaaagattttgaaaaaacgatggctcgtggctatagaagagaagaagtagatgcatttttagatgacattattgctgattatcaaaaaatggccgatatgaataatgaagttgtaaaattatcagaagagaatcataaacttaaaaaagaattagaagaattaagactacgtgtagcaacatcaagacctcaggacaataaaagtttttcttcgaataatacaacaacaaatacatcttcaaataatgtagatattttaaaacgtatttcaaacttagaaaaagctgtatttggtaaataa

SEQ ID NO: 406431 - DNA, 1146 bp, Staphylococcus aureus
atgtttcaattacttgcagtttgtccgatgggattagaagctgttgttgctagggaaattcaagaattaggctatgaaacaaatgttgaaaatggtcgtatattttttgaaggagacgcaagtgcaattgtaaaggcaaatttatggttgcgcacagcagaccgaatcaaaattgttgttggacgttttaacgcaacaacgtttgacgaattattcgaacaaaccaaagcgctcccttgggaatctataattgataaagagggtaacttcccagttcaaggtagaagcgttaaatcaacactacatagtgtgccagattgtcaggcgataactaagaaagctattgttgaacgattacgtcgcgcatataacgaaaaaggttggttaaatgaatcaggtgccaaataccctgttgaagttgccattttaaaagataatgtattattgactatcgacacatcaggttctggtttgaacagacgtggttatagattagcacaaggtgaagcaccaattaaagaaacgttggcagcaagtttaatccgtcttgcaaactggaaaggtgatacacctttaattgatccattttgcggttcgggaacaatagctatagaagcttgtttaattgctcaaaatatcgcacctggttttaatcgcgagttcgtatcagagcaatggaacatcatgccagcaaatatttatgatgattaccgtgatgaagcggataagatggctgattatgataaagaaatcgaagtatatgcttctgatatcgatccagaaatggtagagattgctaagcgtaacgctgaagaagttgggttgtctgatattattaaatttagtgtaaaagatgtcaatacattaacaattgatacagaagaaccggtggcgttaattggaaatcctccatatggtgaacgtattggtgatcgtgaagaagttgaagaaatgtaccgttatattggtaaactaatgaaacaacatccatttttatctacatacattttaacaagtaataaagaatttgaatatttagtagatcgtaaagcaacaaagcgacgtaagttatttaatggatatatagaatgtacttattatcaatactggggtaaaaagacagaacgtaaaactattgaaaactaa

SEQ ID NO: 406432 - DNA, 333 bp, Staphylococcus aureus
atgggtaaaaaaatgggtctaggtttatctattgcattggttgttattggtattgccgttgtatgtttaatgattttttctagtcaaaaaacgacttattttggttatatgaatagtaatacaaatgcagaaaaagttgtcagtgaaaaagatggattagtcaaacataatatcaaagtagaaccatctaatgatttcaagccgaaaaaaggagactttgtaaaattagtttctaaagatgatgggaagacattttataaacaagagattgttaaacatgatgacgtcccacacggtttaatgatgaaaattcacgacatgcatatgaattaa

SEQ ID NO: 406433 - DNA, 1341 bp, Staphylococcus aureus
atgaaaaatacatttaatccattacaaagattacatttctatgcagcaatatttattgctccactgttaatcactttaaccatttcgggcattggttacttgttctttccagaagttgaaaataatatttataagaatgagttttttggtgacagtgatgtaaaaacgcatcaaacattaaatgatgcagtacatcaagttgaacaacaatatgaaggattctttgtaagtaaagttagcatacttgatgaaccatataacaaacgaattacactgagtgatatggcaggaaatcaacgttacgtctttctagatcataacaatcaatttgttgcagatcaaaatgcgaaacatacgtattctaatgtgatgcgaagtatacatagttctttgtttactgaaaatactattattaattatttagtagagttaaccgcatgttggatgatattcatgattttatctggtacttatttactcattaagaagcatttaatttctaacaaaagtaaggcacttcgttggcaaaagtggcacgcaatgattggagttatcattgcaattccagtatttgtattagtcttaactggattgccatggtctggttttatgggcagtaaaattgccggtatgatggacacaaacggtgaccttggtcaaggtgaattagcgattaatccacctaaatcagatttgaacgaattaccttgggctacacgtaaaaataaacagccagcttcatccgaaaaaggttcaagtggtcatcatggtaatgcagcaatgcctcaaaccaaattagattatcaaatatctattgataaggtcgttgaacaggcgcaaaaagctggtattaaaaagccgttttcaatcgtatatccaagtgataaaaatggtacctttattgtatctaatactagtaattcaggtgttactgggctagatgtatcaccatacaaggaacaaacactttatttcgatcaatatagcggtaaaaagctaggtacgattaaatatgatgactacggtattattgctaaatggtttacatggggcattccgcttcacgaaggtcatttattcggcattttaaataaaatcattaatttatttgtatgtatcgctttattagtagccattggcatggggtttgtctcttggataaagcgtacaaaaaatactgcagtaaaagtaccacatcgcgtaaaaaaaccagcatctatatcactcataatatgtttaattgtattaggattattaatgccattatttggattatcacttatccttgtatttataattgaattaatattatatattaaagatcgtcgtgctaaacaataa

SEQ ID NO: 406434 - DNA, 3441 bp, Staphylococcus aureus
atgattaataaagaacaattagatcttttatataaattaaaaaaagaagttgaaaagtcgcgaaatgaagcacttttacatacaattaaccaagtaattaagaaagtatatttgcagcaatatacatgttcgttcgttggacatttttctgcaggtaaatcgacactgataaatttattaattgaacaagatatcttaccaagttcacctgtaccaacgacaagtaatactgctattgtgtcagtttcagacaatcacgatattattgctaatttgccgaatcaaacgtatgccaaattatctaattatgatgaagtaagggaaatgaatcgccaaaatgtcgacgttgaatctgtagaaattaattttcaatcagctaaatttgaaaatgggtttacgttgcaagatacaccaggtgttgattcaaatgttgcatcacatcagtcaataacagaacaatatatgtatacaagtaatatgatattttatacggttgactataaccacgttcaatctgaacttaactttaagtttatgaagcatataaatgatgttggaatacctgttgtgtttatcattaatcaaattgacaagcatcaagacgatgaattgtcattctctacgtttaaatctcgagttgaaaaatcaattgcagattggggtattaaattagaacgcaccttttatgtatctaaatttgatcaccctgaaaatgaacttgaagtattatcaagttatctaatttcattagatcaacatagagagacaatagaggattatacatcaagaacggttgaatacattaccgaagctcagctagattacattcagtctgaaattcaggaagtactagaagatttaggtatcgaagaagcggagtttgaacaagcatttttaaatagtcaacaacatcaagcaattagtgaagaggcacaacttttaaataatccagatgaattaatggcatttttaaagaataagcgtaaaaatattttagaaaatgcatacattatgccgcataatatgagagaaatgttacgaagttatttggaaagtatgtctcaagactttaatgttggcggattttttaataaaaagaagaaaaaactacaaattcaacaacagcgattattaacagcgacagatgcgttacaagaacatgttaatcaacaaattcgtcaaccaatgcgagaagatatgtcatttgttacgcgttttatcaataaaaaagaagcttcagataaagtattaaatcagcattatgacgttaagccagaaatgattgaaggtttatatcaaccacaaacatcaatcagcaatacttatgtacttacattttcagacgaagtggttaaagccattaagaaatatgttgaacaacaatcaacaccaatttttaaagaaataatagaaaatgtgcaggcagatgaattaccaacagaagaaagtgatgatttaaaagaatatcaacgttatacagaattaaatgagctgcgtcagtcattgacgactaagaattatcgtcactactatattcatttagatgaatctctagataaattaataggtcgacaagagacaacatatcaagtggctactgataatgctcaggataatcgtgataatcagcagctaaatcaaaatacagctacaacaaatatgtctatagatattcaaaaagcgcttgatataatttcggatgtgcctttgttcaagcgtacaaagcaagatatccacgaaacattaacacgtatagataataaattaataaaaataggtgtatttggaacatttagtgctggtaaaagtagtttgataaatgcattattaggcgagcatattttagtcagttctccaaatcctactacagcagctactacagaaatatcttatggagacgagagttatataacgctaaaatcacaatcgcaattattagatgaaattaatgcagtagttgaataccaagatatgtcttattcgactatagaagactttattaattcagatttagaaaagttaaaatcacatttaaataaaaatcaactcgcttttattcaggcagttgaaaaacattataaattgtatgtcaatatgttggaaaatggagaaaaacatgccattaatcaacaggaattgaaaaagtggagtgcagaagatgaatatgcaacatttgttaagacagtacacattgcattaatgcatgattggttaaaaggtaaaataattgttgattcattagggctacactcaaataaccaaaggcatacaaatgaaaccgaacaaattttaacttcttcagacttaatattgtatgtaagttattttaatcattcatttactgataatgacaaagcgtttatagaacacatgaaagatatgaaccagttgaatgaaaaccaagcatttaaaatggtaattaatgctgctgatttagcagaaagtcaagatgatcttgaagcagttgaaacatatgtatcagatgcattaagacaagtacacttacaatcagacatttttgctgtatcaagtcgaaatgcattgcaagctgaagataagggcattgatcaattaaaacaaagcatacaacaatttgttgatgttgaatctaaatcaattttagaacaacaaatgattcatcagcttcaacaaatggatcgttcttatgtagagatgattacagaatttgaaacaaataaagctgatatttcacgtcgccaacaaaggttaacagattataaagataaacagcgtttacaacatcaattaattgatgcgacgttacaacatacagacaacgaagttgaagaacaagtttatcatttaaatgcccgtttaaaactacaactacttgacgatgttaaatcagtgtttaattctcaaatgacgcaaaatagtgattttaatgaagaaaagaaagtgtctacgagagtatacttagatcaaattcatcaacgattgtttttagagcaatctttaattacagaacgtataaaaaaatactttaataagcaactcactgagcaaattgcaccaatcgttcaacaattagcagatttacatgtcattattaatcctcagtttaactttgaatcagctaatatagagcaaccattattgcacatcgatttcaacgatatgctaaatgcattgcctaaacaattaacaaaacgtaaaattttgaatccaaatgggcaaagagatatacatgaatcaatttgtcaaagtacgttaggattattacaaccacaaatgggattattgaggcaacagcttgaattatatgtaaagcaaatggctgtagaagctgaatcgcaatttgaaagttttgaagctaatattcaaacgcaaataaacgatttattagcatttgatttagatacaacacttatcaatcaattgaaagataaacatcaacaactgaaaactattttatattaa

SEQ ID NO: 406435 - DNA, 879 bp, Staphylococcus aureus
atgcctaataaaatattacttgtagatggtatggcgctattatttagacatttctatgctacaagtcttcataaacaatttatgtacaattcacaaggtgaacctacaaatggaatacaaggatttgtgcgtcatatcttttcggcaatacatgaaatacgccctacacatgtagctgtatgttgggatatgggacaatcaacttttagaaatgatatgtttgatggttataagcaaaatcgttctgcaccaccagaagaattgataccacaatttgattatgttaaagaaatttcagagcaatttggctttgtaaatattggcgttaaaaactatgaagcggatgatgttataggtacattagcacaacaatattcaactgataacgatgtctatattattacgggcgacaaagatttactgcaatgtattaatgacaatgttgaagtttggctaattaaaaaaggttttaacatttataatagatatacattacatcgttttaacgaagaatatgcccttgaaccacaacaactaatcgatattaaagcgtttatgggtgatacagcagatggatatgcgggtgttaaaggtattggcgagaaaacggctattaagttaattcagcaatatcaaagcgttgaaaatgtggttgaaaacattgatgcattatcagctgggcaacgtaataagattaatgacaatttagatgaactatatttatcgaagcgactggctgaaattcacacacaagtaccaattgatagtgaagcgctttttgagaaaatgtcatttgcaacaacgcttaatcatattttatcaatttgtaacgaacatgaattacatgtttcaggaaaatatatttcatcccatttttaa

SEQ ID NO: 406436 - DNA, 1119 bp, Staphylococcus aureus
atgttagttgcagtagtcaaagaattaaaacaaggtgaaggacgtgtagcttgcacacccgaaaatgtgcgtaagttaacggatgcaggacataaagtaattgttgaaaaaaatgctggcattggttcaggattttctaacgatatgtatgaaaaagaaggcgctaagatcgtaactcacgaacaagcatgggaagctgatcttgttatcaaagtaaaagaacctcatgaaagcgaatatcaatatttcaaaaagaatcaaattatctggggatttttacatctagcatcttcaaaagaaatagtagaaaaaatgcaagaagttggtgtaactgcgattagtggtgaaaccattataaaaaatggaaaagcagaattattagcgccaatgagtgctatagcaggtcaacgctcagcaattatgggagcttactactctgaagcacaacatggtggtcaaggtactttagtgactggtgtacatgaaaatgtggatatacctggtagtacatatgtgattttcggtggtggagtagcagcaacaaatgcagcaaatgttgccttgggactaaatgctaaagtaatcattatcgagttaaacgatgaccgcattaaatatcttgaagatatgtatgcagaaaaagatgtcacagtagtcaaatcaacaccagaaaatttagcagaacaaattaagaaagcagatgtatttatttctacaattttaattccaggtgcgaaaccgccaaaattggttactcgtgagatggttaaatcaatgaaaaaaggttcagtattaatcgatatagctattgaccaaggtggaactattgaaacaattagaccaactacaatttctgatccagtgtatgaagaagaaggtgtgattcattatggtgtaccaaatcaaccaggagcagtcccaagaacttcaacaatggcattagcacaaggaaatattgattatatattagaaatttgtgacaaaggcttagaacaagcaattaaagataatgaagccttaagtactggtgtaaacatttaccaaggacaagtgacaaatcaaggattagcttcatcacatgacctagattataaagaaatattaaatgttatcgaatag

SEQ ID NO: 406437 - DNA, 1041 bp, Staphylococcus aureus
atgacaaccaacacagttacattacaaacagcacatattgtaagtttaggagatatcgaagaagctaaagcaagcattaaaccatttattcgtcgaacacctctaattaaatcaatgtatttaagccaaagtataactaaagggaatgtatttctaaaattagaaaatatgcaattcacaggatcttttaaatttagaggcgctagcaataaaattaatcacttaacagatgaacaaaaagaaaaaggcattatcgcagcatctgctgggaaccatgcacaaggtgttgctttaacagctaaattattaggcattgatgcaacgattgtaatgcctgaaacagcaccacaagcgaaacaacaagcaacaaaaggctatggggcaaaggttattttaaaaggtaaaaactttaacgaaactagactttatatggaagaattagcgaaagaaaatggcatgacaatcgttcatccatatgacgataagtttgtaatggcaggccaaggaacaattggtttagaaattttagatgatatttggaatgtgaatacagtcatcgtaccagttggcggtggaggattaattgcaggtattgccaccgcattaaaatcatttaacccttcaattcatattatcggtgttcaatctgagaatgttcatggtatggctgagtctttctataagagagatttaactgaacatcgagtggatagcacaatagcagatggttgtgatgtaaaagttcctggtgaacaaacatatgaagtagttaaacatttagtagatgaatttattcttgttactgaagaagaaattgaacatgctatgaaagatttaatgcagcgtgccaaaattattactgaaggtgcaggcgcattaccaacagctgcaattttaagtggaaaaataaacaataaatggcttgaagataaaaatgttgttgcattagtttcaggcgggaatgttgacttaactagagtttcaggtgtcattgaacatggactgaatattgcagatacaagcaagggtgtggtaggttaa

SEQ ID NO: 406438 - DNA, 1323 bp, Staphylococcus aureus
atgtcaaatggtaaagaattacaaaaaaatataggtttcttctcagcgtttgctattgttatggggacagttattggttcaggagtattctttaaaatatcaaacgtaacagaagtaacaggaacagcaggaatggccttgtttgtatggttcctaggcggcatcattaccatttgtgcggggttaacagcagcagaacttgctgctgcaatccctgaaacaggtggcttaacgaagtatatagaatatacatacggtgatttctggggcttcctatcaggttgggcgcaatcatttatttattttccagctaacgtagcagcattgtctatcgtatttgcgacacagctaattaatttattccatttatctataggttcgttaataccaatagcaatcgcatctgcgttatctattgtgttgataaatttcctaggttcaaaagcaggcggaattttacaatcagttactttagtaattaaactgattccaatcatcgttattgtaatttttggtatttttcaatctggagatatcactttttcattaattccaactacaggtaattcaggaaatggcttctttacagcaattggtagtggtttattagcaactatgtttgcatatgatggttggattcatgtaggaaatgttgcgggggaacttaaaaatcctaaacgcgatttacctttagcgatttcagttggtatcggttgtattatggctgtgtatttattaattaacgctacattcttattaacgttgccaatagaactacttgctggtaatttaaatgcagcttcagatacatcaaaaatattatttggtgaaaatggcggtaagattattacaatcggtatattaatttctgtttatggtacgatcaatggctatactatgactggtatgcgcgtaccatatgcaatggctgaaagaaaattattgccatttagccatttattcgcaaaattaacaaaatctggcgcaccatggtttggcgcaattatacaacttataatcgctatcatcatgatgtcaatgggagcatttgatacaattacaaatatgttaatctttgttatttggttgttctattgtatgtcatttgttgcggtaataattttaagaaaacgtgaaccaaatatggaacgaccatataaagtaccgttatatccgatcatacctttaattgctattttggcaggatcatttgtattaattaatacactgtttacacaatttatattagcaatcattggaattctaataacagcacttggtataccagtttattactataaaaagaaacaaaaagcagcataa

SEQ ID NO: 406439 - DNA, 1392 bp, Staphylococcus aureus
atggaaaagccgtcaagagaggcatttgaaggcaataataagttgttaataggaattgttctaagtgtaataacgttttggctatttgcacaatcattggttaatgttgtaccaatacttgaagatagtttcaatacagatattggaacggttaatatcgccgttagtataactgctttattttcaggaatgtttgtagtaggagcaggtggtcttgctgataaatatggcagaattaaactcacgaacattggtattatcttaaatatattaggttcattattaatcattatttcaaatattcctttattacttattataggaagattaattcaaggactttcagcagcatgtattatgcctgcaactttgtctattattaagtcatattacattgggaaagatagacaacgcgctttaagttattggtcaattggctcatggggcggctctggtgtttgttcattttttggaggtgcagttgcaacgcttttaggttggcgttggattttcatcctatcaattataatttcattaattgcactgtttcttattaaaggcacacctgaaactaaatctaaatcgatttctctaaataaatttgacattaaaggtctggttcttttagtcattatgctcctcagtttaaatattttaattactaaaggatcagaattaggtgtaacctcacttctttttattactttattagctattgcaattggatcttttagtttatttatagttcttgaaaagcgtgctacaaatcctttaatcgattttaaattatttaaaaataaagcttacacaggtgcaacagcttcaaactttttgttaaatggtgttgcaggaacattaatagtagccaacacatttgttcaaagaggtttaggatattcttcattgcaagcaggaagtttatcaatcacttatttagtaatggtactaattatgattcgtgttggtgaaaagttacttcaaacactcggatgcaagaaaccaatgttaattggaacaggagttcttattgtcggagaatgtctcatttcattaactttcttgccagaaatattctatgtcatttgttgtattataggttatttattctttggtttaggactagggatatatgctacaccatcaacagatacagcaattgcaaatgcaccgttagaaaaagtaggcgttgctgcaggtatctataaaatggcttctgcattaggtggagcatttggcgtcgcattgagtggtgcagtatatgcaatcgtatcaaatatgacaaacatttatacaggtgcaatgattgcattatggttaaatgcaggtatgggaatattatcattcgttatcattttgttacttgtgcctaaacaaaacgatactcaattatga

SEQ ID NO: 406440 - DNA, 26475 bp, Staphylococcus aureus
gtgaattatcgtgataaaattcaaaagtttagtattcgtaaatatacagttggtacattttcaactgtcattgcgacattggtatttttaggattcaatacatcacaagcacatgctgctgaaacaaatcaaccagcaagcgtggttaaacagaaacaacaaagtaataatgaacagactgagaatcgagaatctcaagtacaaaattctcaaaattcacaaaatggtcaatcattatctgctactcatgaaaatgagcaaccaaatattagtcaagctaatttagtagatcaaaaagtagcgcaatcatctactactaatgatgaacaaccagcatctcaaaatgtaaatacaaagaaagattcggcaacggctgcgacaacacaaccagataaagaacaaagtaagcataaacaaaacgaaagtcaatctgctaataaaaatggaaacgacaatagagcggctcatgtagaaaatcatgaagcaaatgtagtaacagcttcagattcatctgataatggtaacgtacaacatgaccgaaatgaattacaagcgttttttgatgcaaattatcatgattatcgctttattgaccgtgaaaatgcagattctggcacatttaactatgtaaaaggcatttttgataagattaatacgttattaggcagtaatgatccaataaacaataaagacttgcaacttgcatacaaagaattggaacaagctgttgctttaattcgtacaatgcctcaacgtcaacagactagccgacgttcaaatagaattcaaacgcgttcggttgagtcaagagctgcagagcctagatcagtatcagactatcaaaatgcaaattcatcatattatgttgaaaatgctaatgatggttcgggctatcctgttggtacatatatcaatgcttctagtaaaggggcgccatataatttaccaactacaccatggaatacattgaaggcctctgactcaaaggaaattgctcttatgacagcgaaacaaactggagacgggtaccaatgggttattaagtttaataaaggacatgctccacatcaaaatatgatcttttggtttgcattaccagcagaccaagtgccagtaggaagaactgactttgtaacagttaattcagatggaacaaatgtacaatggagtcatggagcaggagcaggtgcaaataaaccacttcaacaaatgtgggaatatggagtaaatgatcctcatcgttcacatgactttaaaataagaaatagaagtggccaagtaatatatgactggccaactgtccatatttattctttagaagatttatctagagcgagtgattattttagtgaagctggagcgacacctgctactaaagcttttggtagacaaaattttgaatatattaatggtcaaaaacctgctgaatcaccgggtgttcctaaagtttatactttcatcggtcaaggtgatgcaagttatacaatttcatttaaaacacaaggtccaactgttaataaattgtactatgcagcaggtgggcgtgctttagagtacaatcaattatttatgtacagtcaactatacgtcgaatcaacgcaagaccatcaacaacgtcttaatggtttaagacaagtggttaatcgtacatatcgcataggtacaactaaacgtgtagaagtgagtcaaggaaatgtacaaacgaaaaaggtattagaaagtacaaacctaaatatagatgattttgttgatgatcctttaagttatgttaagacgccgagtaataaagtgttaggattttattcgaataatgcaaatactaatgcttttagaccgggtggagcccaacaattaaatgaatatcaattaagtcaattatttactgatcaaaaattacaagaagcagcaagaactagaaacccaataagattaatgattggtttcgactatcctgatgcttatggtaatagtgaaactttagttcctgttaacttaacggtattacctgaaatccaacataatattaaattctttaaaaatgacgatactcaaaatattgctgaaaaaccattttcaaaacaagctgggcatccagttttctatgtatatgcaggtaaccaagggaatgcttccgtgaatttaggtggtagcgtaacatctattcaaccattacgtattaatttaacaagtaatgagaattttacagataaagattggcaaattacaggtattccgcgtacattacacattgaaaactcgacaaatagacctaataatgccagagaacgcaatattgaacttgttggtaacttattaccaggggattactttggaacgatacgttttggacgtaaagaacaattattcgaaattcgtgttaaaccacatacaccaacaattacaacgacagctgagcaattaagaggtacagcattacaaaaagtgcctgttaatatttcgggaataccgttggatccatcggcattggtttatttagttgcaccaacaaatcaaactacgaatggtggtagtgaggcagatcaaataccatctggttatacgatacttgcgactggtacacctgatggggtgcataatacaattactatacgaccgcaagattatgttgtattcataccacctgtaggtaaacaaattagagcagtagtttattataataaagtagttgcatctaatatgagtaatgctgttactattttgccagatgacattccaccaacaatcaataatcctgttggaataaatgccaaatactatcgaggcgacgaagtcaactttacaatgggtgtctctgatagacattctggtataaaaaatacaactattacgacattgccgaatggttggacatcaaatttaacaaaagcggataagaataatggctcattatctattacaggtagagtgagtatgaatcaggcatttaacagtgatattacatttaaagtgtcagcgacagacaatgtcaataatacgacaaatgatagtcaatctaaacatgtttcaattcatgtaggtaaaattagtgaagatgctcatccgattgtattaggaaatactgagaaagttgtagtagtcaatccgactgctgtatctaatgatgaaaagcaaagcataattactgcctttatgaataaaaaccaaaatataagaggatatttagcatcaactgatccagtaactgtcgataataatggtaatgtcacattacattaccgtgatggctcatcgacaacgcttgatgctacaaatgtgatgacatacgaaccagttgtgaaacctgaataccaaactgtcaatgctgctaaaacagcaacggtaacgattgctaaaggacaatcatttagtattggtgatattaaacaatattttactttaagtaatggacaacctattccaagtggcacatttacaaatattacatctgatagaactattccaactgcacaagaagttagtcaaatgaacgcaggcacgcagttataccatataactgctacaaatgcgtatcataaagatagtgaagacttctatattagtttgaaaatcatcgatgtgaaacaaccagaaggcgatcaacgtgtatatcgtacatcaacatatgatttaactactgatgaaatctcaaaagtaaaacaagcatttattaatgcaaatagagatgtaattacgcttgccgaaggtgatatttcagttacaaatacacctaatggtgctaatgtaagtactattacagtaaatattaataaaggtcgattaacgaaatcattcgcgtcaaacctagctaatatgaatttcttgcgttgggttaatttcccacaagattatacagtgacatggacgaatgcaaaaattgcaaacagaccaacagatggtggtttatcatggtctgatgaccataaatctttaatttatcgttatgatgctacattaggtactcaaattacgacgaatgatattttaacaatgttaaaagcaacaactacagtgcctggattgcgaaataacattactggtaatgaaaaatcacaagcagaagctggcggaagacctaactttagaacgactggttattcacaatcaaatgcgacaactgatggtcaacgtcaatttacgttgaatggtcaagtgattcaagtgttagacatcatcaacccttcaaacggttatggtgggcaacctgttacaaattcaaatactcgtgcaaaccatagtaactcaactgttgttaacgtaaacgaaccggcagctaatggtgctggcgcatttacaattgaccacgttgtaaaaagtaattctacacataatgcaagtgatgcagtttataaagcacagttatacttaacgccatatggtccaaaacaatatgttgaacatttaaatcaaaatacaggaaatactactgacgctattaacatttattttgtaccaagtgacttagtgaatccaacaatttcagtaggtaattacactaatcatcaagtgttctcaggtgaaacatttacaaatactattacagcgaatgataactttggtgtgcaatctgtaactgtaccaaatacatcacaaattacaggtactgttgataataaccatcaacatgtttctgcaacggcaccaaatgtgacatcagcaactaataagacaatcaatttattagcaactgatacaagcggcaatacagctacaacttcgttcaatgtaacagtgaaacctttgcgtgataaatatcgagttggtacttcatcaacggctgctaatcctgtgagaattgccaatatttcgaataatgcgacagtatcacaagctgatcaaacgacaattattaattcgttaacgtttactgaaacagtaccaaatagaagttatgcaagagcaagtgcgaatgaaatcactagtaaaacagttagtaatgtcagtcgtactggaaataatgccaatgtcacagtaactgttacttatcaagatggaacaacatcaacagtgactgtacctgtaaagcatgtcattccagaaatcgttgcacattcgcattacactgtacaaggccaagacttcccagcaggtaatggttctagtgcatcagattactttaagttatctaatggtagtgacattgcagatgcaactattacatgggtaagtggacaagcgccaaataaagataatacacgtattggtgaagatataactgtaactgcacatatcttaattgatggcgaaacaacgccgattacgaaaacagcaacatataaagtagtaagaactgtaccgaaacatgtctttgaaacagccagaggtgttttatacccaggtgtttcagatatgtatgatgcgaaacaatatgttaagccagtaaataattcttggtcgacaaatgcgcaacatatgaatttccaatttgttggaacatatggtcctaacaaagatgttgtaggcatatctactcgtcttattagagtgacatatgataatagacaaacagaagatttaactattttatctaaagttaaacctgacccacctagaattgacgcaaactctgtgacatataaagcaggtcttacaaaccaagaaattaaagttaataacgtattaaataactcgtcagtaaaattatttaaagcagataatacaccattaaatgtcacaaatattactcatggtagcggttttagttcggttgtgacagtaagtgacgcgttaccaaatggcggaattaaagcaaaatcttcaatttcaatgaacaatgtgacgtatacgacgcaagacgaacatggtcaagttgttacagtaacaagaaatgaatctgttgattcaaatgacagtgcaacagtaacagtgacaccacaattacaagcaactactgaaggcgctgtatttattaaaggtggcgacggttttgatttcggacacgtagaaagatttattcaaaacccgccacatggggcaacggttgcatggcatgatagtccagatacatggaagaatacagtcggtaacactcataaaactgcggttgtaacattacctaatggtcaaggtacgcgtaatgttgaagttccagtcaaagtttatccagttgctaatgcaaaggcgccatcacgtgatgtgaaaggtcaaaatttgactaatggaacggatgcgatgaactacattacatttgatccaaatacaaacacaaatggtatcactgcagcatgggcaaatagacaacaaccaaataaccaacaagcaggcgtgcaacatttaaatgtcgatgtcacatatccaggtatttcagctgctaaacgagttcctgttactgttaatgtatatcaatttgaattccctcaaactacttatacgacaacggttggaggcactttagcaagtggtacgcaagcatcaggatatgcacatatgcaaaatgctactggtttaccaacagatggatttacgtataaatggaatcgtgatactacaggtacaaatgacgcaaactggtcagctatgaataaaccgaatgtggctaaagtcgttaacgcaaaatatgacgtcatctataacggacatacttttgcaacatctttaccagcgaaatttgtagtaaaagatgtgcaaccagcgaaaccaactgtgactgaaacagcggcaggagcgattacaattgcacctggagcaaaccaaacagtgaatacacatgccggtaacgtaacgacatacgctgataaattagttattaaacgtaatggtaacgttgtgacgacatttacacgtcgcaataatacgagtccatgggtgaaagaagcatctgcagcaactgtagcaggtattgctggaactaataatggtattactgttgcagcaggtactttcaaccctgctgatacaattcaagttgttgcaacgcaaggaagcggagagacagtgagtgatgagcaacgtagtgatgatttcacagttgtcgcaccacaaccgaaccaagcgactactaagatttggcaaaatggtcatattgatatcacgcctaataatccatcaggacatttaattaatccaactcaagcaatggatattgcttacactgaaaaagtgggtaatggtgcagaacatagtaagacaattaatgttgttcgtggtcaaaataatcaatggacaattgcgaataagcctgactatgtaacgttagatgcacaaactggtaaagtgacgttcaatgccaatactataaaaccaaattcatcaatcacaattactccgaaagcaggtacaggtcactcagtaagtagtaatccaagtacattaactgcaccggcagctcatactgtcaacacaactgaaattgtgaaagattatggttcaaatgtaacagcagctgaaattaacaatgcagttcaagttgctaataaacgtactgcaacgattaaaaatggcacagcaatgcctactaatttagctggtggtagcacaacgacgattcctgtgacagtaacttacaatgatggtagtactgaagaagtacaagagtccattttcacaaaagcggataaacgtgagttaatcacagctaaaaatcatttagatgatccagtaagcactgaaggtaaaaagccaggtacaattacgcagtacaataatgcaatgcataatgcgcaacaacaaatcaatactgcgaaaacagaagcacaacaagtgattaataatgagcgtgcaacaccacaacaagtttctgacgcactaactaaagttcgtgcagcacaaactaagattgatcaagctaaagcattacttcaaaataaagaagataatagccaattagtaacgtctaaaaataacttacaaagttctgtgaaccaagtaccatcaactgctggtatgacgcaacaaagtattgataactataatgcgaagaagcgtgaagcagaaactgaaataactgcagctcaacgtgttattgacaatggcgatgcaactgcacaacaaatttcagatgaaaaacatcgtgtcgataacgcattaacagcattaaaccaagcgaaacatgatttaactgcagatacacatgccttagagcaagcagtgcaacaattgaatcgcacaggtacaacgactggtaagaagccggcaagtattactgcttacaataattcgattcgtgcacttcaaagtgacttaacaagtgctaaaaatagcgctaatgctattattcaaaagccaataagaacagtacaagaagtgcaatctgcgttaacaaatgtaaatcgtgtcaatgagcgattaacgcaagcaattaatcaattagtacctttagctgataatagtgctttaaaaactgctaagacgaaacttgatgaagaaatcaataaatcagtaacgactgatggtatgacacaatcatcaatccaagcatatgaaaatgctaaacgtgcgggtcaaacagaatcaacaaatgcacaaaatgttattaacaatggtgatgcgactgaccaacaaattgccgcagaaaaaacaaaagtagaagaaaaatataatagcttaaaacaagcaattgctggattaactccagacttggcaccattacaaactgcaaaaactcagttgcaaaatgatattgatcagccaacgagtacgactggtatgacaagcgcatctattgcagcatttaatgaaaaactttcagcagctagaactaaaattcaagaaattgatcgtgtattagcctcacatccagatgttgcgacaatacgtcaaaacgtgacagcagcgaatgccgctaaatcagcacttgatcaagcacgtaatggcttaacagtcgataaagcgcctttagaaaatgcgaaaaatcaactacaacatagtattgacacgcaaacaagtacaactggtatgacacaagactctataaatgcatataatgcgaagttaacagctgcacgtaataagattcaacaaatcaatcaagtattagcaggttcaccgactgtagaacaaattaatacaaatacgtctacagcaaatcaagctaaatctgatttagatcatgcacgtcaagctttaacaccagataaagcgccgcttcaaactgcgaaaacgcaattagaacaaagcattaatcaaccaacggatacaacaggtatgacgaccgcttcgttaaatgcgtacaaccaaaaattacaagcagcgcgtcaaaagttaactgaaattaatcaagtgttgaatggcaacccaactgtccaaaatatcaatgataaagtgacagaggcaaaccaagctaaggatcaattaaatacagcacgtcaaggtttaacattagatagacagccagcgttaacaacattacatggtgcatctaacttaaaccaagcacaacaaaataatttcacgcaacaaattaatgctgctcaaaatcatgctgcgcttgaaacaattaagtctaacattacggctttaaatactgcgatgacgaaattaaaagacagtgttgcggataataatacaattaaatcagatcaaaattacactgacgcaacaccagctaataaacaagcgtatgataatgcagttaatgcggctaaaggtgtcattggagaaacgactaatccaacgatggatgttaacacagtgaaccaaaaagcagcatctgttaaatcgacgaaagatgctttagatggtcaacaaaacttacaacgtgcgaaaacagaagcaacaaatgcgattacgcatgcaagtgatttaaaccaagcacaaaagaatgcattaacacaacaagtgaatagtgcacaaaacgtgcaagcagtaaatgatattaaacaaacgactcaaagcttaaatactgctatgacaggtttaaaacgtggcgttgctaatcataaccaagtcgtacaaagtgataattatgtcaacgcagatactaataagaaaaatgattacaacaatgcatacaaccatgcgaatgacattattaatggtaatgcacaacatccagttataacaccaagtgatgttaacaatgctttatcaaatgtcacaagtaaagaacatgcattgaatggtgaagctaagttaaatgctgcgaaacaagaagcgaatactgcattaggtcatttaaacaatttaaataatgcacaacgtcaaaacttacaatcgcaaattaatggtgcgcatcaaattgatgcagttaatacaattaagcaaaatgcaacaaacttgaatagtgcaatgggtaacttaagacaagctgttgcagataaagatcaagtgaaacgtacagaagattatgcggatgcagatacagctaaacaaaatgcatataacagtgcagtttcaagtgccgaaacaatcattaatcaaacaacaaatccaacgatgtctgttgatgatgttaatcgtgcaacttcagctgttacttctaataaaaatgcattaaatggttatgaaaaattagcacaatctaaaacagatgctgcaagagcaattgatgcattaccacatttaaataatgcacaaaaagcagatgttaaatctaaaattaatgctgcatcaaatattgctggcgtaaatactgttaaacaacaaggtacagatttaaatacagcgatgggtaacttgcaaggtgcaatcaatgatgaacaaacgacgcttaatagtcaaaactatcaagatgcgacacctagtaagaaaacagcatacacaaatgcggtacaagctgcgaaagatattttaaataaatcaaatggtcaaaataaaacgaaagatcaagttactgaagcgatgaatcaagtgaattctgctaaaaataacttagatggtacgcgtttattagatcaagcgaagcaaacagcaaaacagcagttaaataatatgacgcatttaacaactgcacaaaaaacgaatttaacaaaccaaattaatagtggtactactgtcgctggtgttcaaacggttcaatcaaatgccaatacattagatcaagccatgaatacgttaagacaaagtattgccaacaaagatgcgactaaagcaagtgaagattacgtagatgctaataatgataagcaaacagcatataacaacgcagtagctgctgctgaaacgattattaatgctaatagtaatccagaaatgaatccaagtacgattacacaaaaagcagagcaagtgaatagttctaaaagggcacttaacggtgatgaaaacttagctgctgcaaaacaaaatgcgaaaacgtacttaaacacattgacaagtattacagatgctcaaaagaacaatttgattagtcaaattactagtgcgacaagagtgagtggtgttgatactgtaaaacaaaatgcgcaacatctagaccaagctatggctagcttacagaatggtattaacaacgaatctcaagtgaaatcatctgagaaatatcgtgatgctgatacaaataaacaacaagagtatgataatgctattactgcagcgaaagcgattttaaataaatcgacaggtccaaacactgcgcaaaatgcagttgaagcagcattacaacgtgttaataatgcgaaagatgcattgaatggtgatgcaaaattaattgcagctcaaaacgcagcgaaacaacatttaggtactttaacgcatatcactacagctcaacgtaatgatttaacaaatcaaatttcacaagctacaaacttagctggtgttgaatctgttaaacaaaatgcgaatagtttagatggtgctatgggtaacttacaaacggctatcaacgataagtcaggaacattagcgagccaaaacttcttggatgctgatgagcaaaaacgtaatgcatacaatcaagctgtatcagcagccgaaaccattttaaataaacaaactggaccgaatacagcgaaaacagcagtcgaacaagcacttaataatgttaataatgcgaaacatgcattaaatggtacgcaaaacttaaacaatgcgaaacaagcagcgattacagcaatcaatggcgcatctgatttaaatcaaaaacaaaaagatgcattaaaagcacaagctaatggtgctcaacgcgtatctaatgcacaagatgtacagcacaatgcgactgaactgaacacggcaatgggcacattaaaacatgccatcgcagataagacgaatacgttagcaagcagtaaatatgttaatgccgatagcactaaacaaaatgcttacacaactaaagttaccaatgctgaacatattattagcggtacgccaacggttgttacgacaccttcagaagtaacagctgcagctaatcaagtaaacagcgcgaaacaagaattaaatggtgacgaaagattacgtgaagcaaaacaaaacgccaatactgctattgatgcattaacacaattaaatacacctcaaaaagctaaattaaaagaacaagtgggacaagccaatagattagaagacgtacaaactgttcaaacaaatggacaagcattgaacaatgcaatgaaaggcttaagagatagtattgctaacgaaacaacagtcaaaacaagtcaaaactatacagacgcaagtccgaataaccaatcaacatataatagcgctgtgtcaaatgcgaaaggtatcattaatcaaactaacaatccgactatggatactagtgcgattacccaagctacaacacaagtgaataatgctaaaaatggtttaaacggtgctgaaaacttaagaaatgcacaaaacactgctaagcaaaacttaaatacattatcacacttaacaaataaccaaaaatctgccatctcatcacaaattgatcgtgcaggtcatgtgagtgaggtaactgctactaaaaatgcagcaactgagttgaatacgcaaatgggtaacttggaacaagctatccatgatcaaaacacagttaaacaaagtgttaaatttactgatgcagataaagctaaacgtgatgcgtatacaaatgcggtaagcagagctgaagcaattctgaataaaacgcaaggtgcaaatacgtctaaacaagatgttgaagcggctattcaaaatgtttcaagtgctaaaaatgcattgaatggtgatcaaaacgttacaaatgcgaagaatgcagctaaaaatgcattaaataacttaacgtcaattaataatgcacaaaaacgtgacttaacaactaaaattgatcaagcaacaactgtagctggtgttgaagctgtatctaatacgagtacacaattgaatacagcgatggctaacttgcaaaatggtattaatgataaaacaaatacactagcaagtgaaaactatcatgatgctgattcagataagaaaactgcttatactcaagccgttacgaacgcagaaaatattttaaataaaaatagtggatcaaatttagacaaaactgccgttgaaaacgcgttgtcacaagttgctaatgcgaaaggtgccctaaatggtaaccataatttagagcaagctaaatcaaatgcaaacactactataaacggacttcaacatttaacaactgctcaaaaagataaattgaaacaacaagtgcaacaagcacaaaatgttgcaggtgtagatactgttaaatcaagtgccaacacattaaatggtgctatgggtacgttaagaaatagcatacaagataacacagctacgaaaaatggccaaaactatcttgatgctacagaacgtaacaaaacaaactataacaatgctgttgatagtgctaatggcgtcattaatgcaacaagcaatccaaatatggatgctaatgcaattaaccaaatcgctacacaagtgacatcaacgaaaaatgcattagatggtacacataatttaacgcaagcgaaacaaacagcaacaaatgccatcgatggtgctactaacttaaataaagcgcaaaaagatgcgttaaaagcacaagttacaagtgcgcaacgtgttgcaaatgtaacaagtatccaacaaactgcaaatgaacttaatacagctatgggtcaattacaacatggtattgatgatgaaaatgcaacaaaacaaactcaaaaatatcgtgacgctgaacaaagtaagaaaactgcttatgatcaagctgtagctgctgcgaaagcaattttaaataaacaaacaggttcaaattcagataaagcagcagttgaccgtgcattacaacaagtaacaagtacgaaagatgcattgaatggtgatgcaaaactggcagaagcgaaagcggcagctaaacaaaacttaggcactttaaaccatattacgaatgcacaacgtactgacttagaaggccaaatcaatcaagcgacgactgttgatggcgttaatactgtaaaaacaaatgccaatacattagacggcgcaatgaatagcttacaaggttcaatcaatgataaagatgcgacattaagaaatcaaaattatcttgatgcggatgaatcaaaacgaaatgcatatacgcaagctgtcacagcggctgaaggcattttaaataaacaaactggtggtaacacatctaaagcagacgttgataatgcattaaatgcagttacaagagcgaaagcggctttaaatggtgctgacaacttaagaaatgcgaaaacttcagcaacaaatacgattgatggtttacctaacttaacacaattacaaaaagacaacttgaagcatcaagttgaacaagcgcaaaatgtagcaggtgtaaatggtgttaaagataaaggtaatacgttaaatactgccatgggtgcattacgtacaagtatccaaaatgataatacgacgaaaacaagtcaaaattatcttgatgcatctgacagcaacaaaaataattacaatactgctgtaaataatgcaaatggtgttattaatgcaacgaacaatccaaatatggatgctaatgcgattaatggcatggcaaatcaagtcaatacaacaaaagcagcgttaaatggtgcacaaaacttagctcaagctaaaacaaatgcgacgaacacaattaacaacgcacatgacttaaaccaaaaacaaaaagatgcattaaaaacacaagttaacaatgcacaacgtgtatctgatgcaaataacgttcaacacactgcaactgaattgaacagtgcgatgacagcacttaaagcagctattgctgataaagaaagaacaaaagcaagcggtaattatgtcaatgctgatcaagaaaaacgtcaagcgtatgattcaaaagtgactaacgctgaaaatatcattagtggtacaccgaatgcgacattaacagtcaatgacgtaaatagtgcggcatcacaagtcaatgcggctaaaacagcattaaatggtgataacaacttacgtgtagcgaaagagcatgccaacaatacaattgacggcttagcacaattgaataatgcacaaaaagcaaaattaaaagaacaagttcaaagtgcaactacattagatggtgttcaaactgttaaaaatagttctcaaacgttgaatacagcgatgaaaggcttaagagatagtattgcgaatgaagcaacaattaaagcaggtcaaaactacactgacgcaagtccaaataatcgtaacgagtacgacagtgcagttactgcagcaaaagcaatcattaatcaaacatcgaacccaacgatggaaccaaatactattacgcaagtaacatcacaagtgacaactaaagaacaggcattaaatggtgcgcgaaacttagctcaagctaagacaactgcgaaaaacaacttgaataacttaacatcaattaacaatgcacaaaaagatgcgttaacgcgtagcattgatggtgcaacaacagtagctggtgtaaatcaagaaactgcaaaagcaacagaattaaataacgcaatgcatagtttacaaaatggtatcaatgatgagacacaaacaaaacaaactcagaaatacctagatgcagagccaagtaagaaatcagcttatgatcaagcagtaaatgcagcgaaagcaattttaacaaaagctagtggtcaaaatgtagacaaagcagcagttgaacaagcattgcaaaatgtgaacagtacgaagacggcgttgaacggtgatgcgaaattaaatgaagctaaagcagctgcgaaacaaacgttaggtacattaacacacattaataatgcacaacgtacagcgttagacaatgaaattacacaagcaacaaatgttgaaggtgttaatacagttaaagccaaagcgcaacaattagatggtgctatgggtcaattagaaacatcaattcgtgataaagacacgacgttacaaagtcaaaattatcaagatgctgatgatgctaaacgaactgcttattctcaagcagtaaatgcagcagcaactattttaaataaaacagctggcggtaatacacctaaagcagatgttgaaagagcaatgcaagctgttacacaagcaaatactgcattaaacggtattcaaaacttagatcgtgcgaaacaggctgctaacacagcgattacaaatgcttcggacttaaatacaaaacaaaaagaagcattaaaagcacaagtaacaagtgcaggacgtgtatctgcagcaaatggtgttgaacatactgcgactgaattaaatactgcgatgacagctttaaagcgtgccattgctgataaagctgagacaaaagctagtggtaactatgtcaatgctgatgcgaataaacgtcaagcatatgatgaaaaagttacagctgccgaaaatatcgttagtggtacaccaacaccaacgttaacaccagcagatgttacaaatgcagcaacgcaagtaacgaatgctaagacgcagttaaacggtaatcataatttagaagtagcgaaacaaaatgctaacactgcaattgatggtttaacttctttaaatggtccgcaaaaagcaaaacttaaagaacaagtgggtcaagcgacgacgttgccaaatgttcaaactgttcgtgataatgcacaaacattaaacactgcaatgaaaggtctacgagatagcattgcgaatgaagcaacgattaaagcaggtcaaaactacacagatgcaagtcaaaacaaacaaactgactacaacagtgcagtcactgcagcaaaagcaatcattggtcaaacaactagtccatcaatgaatgcgcaagaaattaatcaagcgaaagaccaagtgacagctaaacaacaagcgttaaacggtcaagaaaacttaagaactgcgcaaacaaatgcgaagcaacatttgaacggcttaagtgacttaactgacgctcaaaaagatgcagtgaaacgtcaaatcgaaggtgcaacgcatgttaatgaagtaacacaagcacaaaataatgcggatgcattaaatacagctatgacgaacttgaaaaatggtattcaagatcagaatacgattaagcaaggtgttaacttcactgatgccgacgaagcgaaacgtaatgcatatacaaatgcagtgacgcaagctgaacaaattttaaataaagcacaaggtccaaatacttcaaaagacggtgtcgaaactgcgttagaaaatgtacaacgtgctaaaaacgaattgaacggtaatcaaaatgttgcgaacgctaagacaactgcgaaaaatgcattgaataacctaacatcaattaataatgcacaaaaagaagcattgaaatcacaaattgaaggtgcgacaacagttgcaggtgtaaatcaagtgtctacaacggcatctgaattaaatacagcaatgagcaacttacaaaatggtattaatgatgaagcagctacaaaagcagctcagaaatatactgatgcagatagagaaaaacaaactgcatacaatgacgctgtaacagcagctaaaacgttattagataaaacagctggttcaaatgacaataaagcagctgttgaacaagcattacaacgtgtgaatactgctaaaacagcattaaatggtgacgagcgattaaatgaagcgaagaacacagctaaacaacaagtagcgacaatgtcacacttaactgatgctcaaaaagcaaacttaacatcgcaaatcgaaagtggtacgactgttgcaggtgttcaaggtattcaagctaatgccggtactttagatcaagcaatgaatcaattaagacaaagtattgcttctaaagatgcgactaaatcaagcgaagattatcaagacgcgaatgcagatttacaaaatgcatacaatgatgcggtaactaatgctgaaggtattattagtgcaacgaataaccctgaaatgaatcctgatacaattaaccaaaaagcgagccaagtgaacagtgcgaattctgcattgaacggtgatgaaaaattagcagcagcaaaacaaactgcgaaatcagatatcagtcgtttgacagacttgaacaatgcacaacgaactgcggcaaatgctgaagtggatcaagcaccaaatcttgcagctgtcacagcggctaaaaacaaagcaacatcgttaaacacagcgatgggtaatttgaaacatgcacttgctgaaaaggataatacgaaacgtagtgtcaattacacagatgcggatcaaccaaaacaacaagcgtatgatactgcggttacacaagcagaagcaattactaatgctaatggcagcaacgcgaatgaaacacaagttcaagcagcactaaaccaattgaatcaagctaaaaatgacttgaatggtgataataaagttgctcaagcaaaagagtcagcgaaacgtgcattagcttcatatagtaacttgaataatgcgcaatcaactgcagcaactagtcaaattgacaatgcaacgacagtagcaggcgtaactgctgcacaaaatactgctaatgaattaaatacagcaatgggtcaacttcaaaatggtataaatgaccaaaacactgttaaacaacaagtgaactttacagatgctgaccaaggtaagaaagatgcttacacaaatgctgttacgaatgctcaaggtattttagataaagtacacggtcaaaatatgacgaaagcacaagttgaagctgcattaaatcaagtaacgactgctaagaatgctttaaacggtgacgcaaatgtaagacaagcaaaatcagatgcgaaagcaaacttaggtacattaacacacttaaataatgcacaaaaacaagatttaacatcacaaatcgaaggcgcaacaacagtcaacggtgtaaatggtgttaaaacgaaagcacaagacttagatggtgcaatgcaacgattacaatcagctatagcaaataaagatcaaactaaagcgagcgaaaattacatcgacgcagatccaactaagaaaacagcatttgataatgctatcacacaagctgaatcttacttaaataaagatcacggtgcgaataaagataagcaagctgttgaacaagcaattcaaagtgtaacgtctactgaaaatgctttgaacggtgacgcgaacttacaacgcgctaaaactgaagctatacaagctatcgataacttgacacatttgaatacaccacaaaaaacagcattaaaacaacaagtgaacgctgcgcaacgtgtatcaggtgtaactgatctgaaaaatagtgctacatcacttaataatgcgatggatcaattaaaacaagcaattgctgatcatgacacaattgtagctagtggtaattacactaacgcgagtcctgataagcaaggtgcttatactgatgcatataatgctgcgaaaaacattgtaaatggttcgcctaatgtgattacaaatgcagcagatgttacagcagcaacacaacgtgttaataatgctgaaacaggtttaaacggtgatacaaacttagcaactgcgaagcaacaagctaaagatgcattacgtcaaatgacacatttatctgatgcacaaaaacaaagtattactggtcaaattgatagcgcgacacaagtaactggcgttcaaagtgtgaaagacaacgcgacaaatcttgataatgcaatgaatcaacttcgaaatagtattgcgaataaagatgatgtaaaagcgagtcaaccatatgttgatgcagatagagataaacaaaatgcatacaatacagcagttacaaatgctgaaaatatcattaatgcaacgagtcagccgacacttgatccatctgcagtaacacaagcagctaatcaagtgagcactaacaaaactgcgcttaatggtgcacaaaacttagcgaataaaaagcaagaaacgactgctaacatcaaccaattaagtcatttaaataatgctcaaaagcaagatttaaatacgcaagtgacaaatgcaccaaatattagcacagtaaatcaagtgaaaactaaagctgaacaattagatcaagcaatggaacgtttaatcaacggaatccaagacaaagatcaagtgaaacaaagtgttaactttacagatgcagatccagaaaaacaaacagcatacaacaatgcggtaactgctgctgaaaatattattaatcaagcaaatggtacaaatgcgaaccaatcacaagttgaagcagcactttcaactgtaacaactacgaaacaagcgttgaatggtgatagaaaagtaacagatgctaaaaacaatgcaaaccaaacattatctacgttagataacttaaacaatgcacaaaaaggtgctgttactggaaacatcaatcaagcgcacactgtagctgaagtaacgcaagccattcaaaccgctcaggaactgaatacagcgatgggtaacttgaaaaatagcttgaatgataaagacactacacttggcagtcaaaactttgcagatgcagatccagagaagaaaaatgcatacaatgaagcggttcataatgctgaaaatattttaaataaatctacaggtacgaacgtgcctaaagatcaagttgaagcagctatgaatcaagtgaatgctacaaaagcagcgcttaatggtactcaaaaccttgaaaaagctaaacaacacgcaaatacagcaattgacggtttaagccatttaacaaatgcacaaaaagaggcattaaaacaattggtacaacaatcgactactgttgcagaagcacaaggtaatgagcaaaaagcaaacaatgttgatgcagcaatggacaaattacgtcaaagtattgcagataatgcgacaacaaaacaaaaccaaaattatactgatgcaagtcagaataaaaaggatgcgtacaataatgctgtcacaactgcacaaggtattattgatcaaactacaagtccaactttagatccgactgttatcaatcaagctgctggacaagtaagcacaactaaaaatgcattaaatggtaatgaaaacctagaggcagcgaaacaacaagcgtcacaatcattaggttcattagataacttaaataatgcgcaaaaacaaacagttactgatcaaattaatggcgcgcatactgttgatgaagcaaatcaaattaagcaaaatgcgcaaaacttaaatacagcgatgggtaacttgaaacaagcgatagctgacaaagatgctacgaaagcgacagttaacttcactgatgcagatcaagcaaaacaacaagcatataacactgctgttacaaatgctgaaaatatcatttcaaaagctaatggcggcaatgcaacacaagctgaagttgaacaagcaatcaaacaagttaatgctgcaaaacaagcattaaatggtaatgccaacgttcaacatgcaaaagacgaagcaacagcattaattaatagctctaatgaccttaaccaagcacaaaaagacgcattaaaacaacaagttcaaaatgcaactactgtagctggtgtaaacaatgttaaacaaacagcacaagagttaaacaatgctatgacacaattaaaacaaggcattgcagataaagaacaaacaaaagctgatggtaactttgtcaatgcagatcctgataagcaaaatgcatataatcaagcagtagcgaaagctgaagcattaattagtgctacgcctgatgttgtcgttacacctagcgaaattactgcagcgttaaataaagttacgcaagctaaaaatgatttaaatggtaatacaaacttagcaacggcgaaacaaaatgttcaacatgctattgatcaattgccaaacttaaaccaagcgcaacgtgatgaatacagcaaacaaatcacgcaagcaacacttgtaccaaacgtcaatgctattcaacaagcggcgacaacgcttaatgacgcgatgacacaattgaaacaaggtattgcgaataaagcacaaattaaaggtagcgagaactatcacgatgctgatactgacaagcaaacagcatatgataatgcagtaacaaaagcagaagaattgttaaaacaaacaacaaatccaacaatggatccaaatacaattcaacaagcattaactaaagtgaatgacacaaatcaagcacttaacggtaatcaaaaattagctgatgccaaacaagatgctaagacaacacttggtacactagatcatttaaatgatgctcaaaaacaagcgctaacaactcaagttgaacaagcaccagatattgcaacagttaataatgttaagcaaaatgctcaaaatctgaataatgctatgactaacttaaacaatgcattacaagataaaactgagacattaaatagcattaactttactgatgcagatcaagctaagaaagatgcttatactaatgcggtttcacatgcagaaggtattttatctaaagcaaatggcagcaatgcaagtcaaactgaagtggaacaagcgatgcaacgtgtgaacgaagcgaaacaagcattgaatggtaatgacaatgtacaacgtgcaaaagatgcagcgaaacaagtgattacaaatgcaaatgatttaaatcaagcgcaaaaagatgcattaaaacaacaagtcgatgctgcgcaaactgttgcaaatgtaaacacgattaagcaaacagcacaagatttaaatcaagcaatgacacaattgaaacaaggtattgcagataaagaccaaactaaagcaaatggtaactttgtcaatgctgatactgataagcaaaatgcttacaacaatgcggtagcacatgctgaacaaataattagtggtacaccaaatgcaaacgtggatccacaacaagtggctcaagcgttacaacaagtgaatcaagctaagggtgatttaaacggtaaccataacttacaagttgctaaagacaatgcaaatacagccattgatcagttaccaaacttaaatcaaccacaaaaaacagcattaaaagaccaagtgtcgcatgcagaacttgttacaggtgttaatgctattaagcaaaatgctgatgcgttaaataatgcaatgggtacattgaaacaacaaattcaagcgaacagtcaagtaccacagtcagttgactttacacaagcggatcaagacaaacaacaagcatataacaatgcggctaaccaagcgcaacaaatcgcaaatggcataccaacacctgtattgacgcctgatacagtaacacaagcagtgacaactatgaatcaagcgaaagatgcattaaacggtgatgaaaaattagcacaagcgaaacaagaagctttagcaaatcttgatacgttacgcgatttaaatcaaccacaacgtgatgcattacgtaaccaaatcaatcaagcacaagcgttagctacagttgaacaaactaaacaaaatgcacaaaatgtgaatacagcaatgagtaacttgaaacaaggtattgcaaacaaagatactgtcaaagcaagtgagaactatcatgatgctgatgccgataagcaaacagcatatacaaatgcagtgtctcaagcggaaggtattatcaatcaaacgacaaatccaacgcttaacccagatgaaataacacgtgcattaactcaagtgactgatgctaaaaatggcttaaacggtgaagctaaattggcaactgaaaagcaaaatgctaaagatgccgtaagtgggatgacgcatttaaacgatgctcaaaaacaagcattaaaaggtcaaatcgatcaatcgcctgaaattgctacagtgaaccaagttaaacaaacagcaacgagcctagatcaagcaatggatcaattatcacaagctattaatgataaagctcaaacattagcggacggtaattacttaaatgcagatcctgacaaacaaaatgcgtataaacaggcagtagcaaaagctgaagcattattgaataaacaaagtggtactaatgaagtacaagcacaagttgaaagcatcactaatgaagtgaacgcagcgaaacaagcattaaatggtaatgacaatttggcaaatgcaaaacaacaagcaaaacaacaattggcgaacttaacacacttaaatgatgcacaaaaacaatcatttgaaagtcaaattacacaagcgccacttgttacagatgtcactacgattaatcaaaaagcacaaacgttagatcatgcgatggaattattaagaaatagtgttgcggataatcaaacgacattagcgtctgaagattatcatgatgcaactgcgcaaagacaaaatgactataaccaagctgtaacagctgctaataatatcattaatcaaactacatcgcctacgatgaatccagatgatgttaatggtgcaacgacacaagtgaataatacgaaagttgcattagatggtgatgaaaaccttgcagcagctaaacaacaagcaaacaacagacttgatcaattagatcatttgaataatgcgcaaaagcaacagttacaatcacaaattacgcaatcatctgatattgctgcagttaatggtcacaaacaaacagcagaatctttaaatactgcgatgggtaacttaattaatgcgattgcagatcatcaagccgttgaacaacgtggtaacttcatcaatgctgatactgataaacaaactgcttataatacagcggtaaatgaagcagcagcaatgattaacaaacaaactggtcaaaatgcgaaccaaacagaagtagaacaagctattactaaagttcaaacaacacttcaagcgttaaatggagaccataatttacaagttgctaaaacaaatgcgacgcaagcaattgatgctttaacaagcttaaatgatcctcaaaaaacagcattaaaagaccaagttacagctgcaactttagtaactgcagttcatcaaattgaacaaaatgcgaatacgcttaaccaagcaatgcatggtttaagacagagcattcaagataacgcagcaactaaagcaaatagcaaatatatcaacgaagatcaaccagagcaacaaaactatgatcaagctgttcaagccgcaaataatattatcaatgaacaaactgcaacattagataataatgcgattaatcaagcagcgacaactgtgaatacaacgaaagcagcattacatggtgatgtgaagttacaaaatgataaagatcatgctaagcaaacggttagtcaattagcacatctaaacaatgcacaaaaacatatggaagatacgttaattgatagtgaaacaactagaacagcagttaagcaagatttgactgaagcacaagcattagatcaacttatggatgcattacaacaaagtattgctgacaaagatgcaacacgtgcgagcagtgcatatgtcaatgcagaaccgaataaaaaacaatcctatgatgaagcagttcaaaatgctgagtctatcattgcaggattaaataatccaactatcaataaaggtaatgtatcaagtgcgactcaagcagtaatatcatctaaaaatgcattagatggtgttgaacgattagctcaagataagcaaactgctggaaattctctaaatcatttagatcaattaacaccagctcaacaacaagcgctagaaaatcaaattaataatgcaacaactcgtggcgaagtagcacaaaaattaactgaagcacaagcacttaaccaagcaatggaagctttacgtaatagcattcaagatcaacagcaaacggaagcgggtagcaagtttatcaatgaagataaaccacaaaaagatgcttaccaagcagcagttcaaaatgcaaaagatttaattaatcaaactaacaatccaacgcttgataaagcacaagttgaacaattgacacaagctgttaaccaagctaaagataacctacacggtgatcaaaaacttgcagacgataaacaacatgcggttactgatttaaatcaattaaatggtttgaataatccgcaacgtcaagcacttgaaagccaaataaacaacgcagcaactcgtggcgaagtagcacaaaaattagctgaagcaaaagcgcttgatcaagcaatgtaa

SEQ ID NO: 406441 - DNA, 4626 bp, Staphylococcus aureus
ttgacacaagcagtaacaactgcaaaagataatctacatggtgatcaaaaacttgctcgtgatcaacaacaagcagtaacaactgtaaatgcattgccaaacttaaatcatgcacaacaacaagcattaactgatgctataaatgcagcgcctacaagaacagaggttgcacaacatgttcaaactgctactgaacttgatcacgcgatggaaacattgaaaaataaagttgatcaagtgaatacagataaggctcaaccaaattacactgaagcgtcaactgataaaaaagaagcagtagatcaagcgttacaagctgcagaaagcattacagatccaactaatggttcaaatgcgaataaagacgctgtagaccaagtattaactaagcttcaagaaaaagaaaatgagttaaatggtaatgagagagtcgctgaagctaaaacacaagcgaaacaaactattgaccaattaacacatttaaatgctgatcaaattgcaactgctaaacaaaacattgatcaagcgacgaaacttcaaccaattgctgaattagtagatcaagcaacgcaattgaatcaatctatggatcaattacaacaagcagttaatgaacatgctaacgttgagcaaactgtagattacacacaagcagattcagataaacaaaatgcttataaacaagctattgctgatgctgaaaatgtattgaaacaaaatgcgaataagcaacaagtggatcaagcacttcaaaatattttaaatgcaaaacaagcattaaatggtgatgaacgtgtagcacttgctaaaacaaatggtaaacatgacatcgaccaattgaatgcattaaacaatgctcaacaagatggatttaaaggtcgcatcgatcaatcaaacgatttaaatcaaatccaacaaattgtagatgaggctaaggcacttaatcgtgcaatggatcaattgtcacaagaaatcactgacaatgaaggacgcacgaaaggtagcacgaactatgtcaatgcagatacacaagtcaaacaagtatatgatgaaacggttgataaagcgaaacaagcacttgataaatcgactggtcaaaacttaactgcaaaacaagttatcaaattaaatgatgcagtcactgcagctaagaaagcattaaatggtgaagaaagacttaataatcgtaaagctgaagcattacaaagattggatcaattaacacatctaaacaatgctcaaagacaattagcaatccaacaaattaataatgctgaaacgctaaataaagcatctcgagcaattaatagagcaactaaattagataatgcaatgggtgcagtacaacaatatattgacgaacagcaccttggtgttatcagcagcacaaattacatcaatgcagatgacaatttgaaagcaaattatgataatgcaattgcgaatgcagcacatgagttagataaagtgcaaggtaatgcaattgcaaaagctgaagcagagcaattgaaacaaaatattatcgatgctcaaaatgcattaaatggagaccaaaaccttgcaaatgccaaagataaagcaaatgcgtttgttaattcgttaaatggattaaatcaacagcaacaagatcttgcacataaagcaattaacaatgccgatactgtatcagatgtaacagatattgttaataatcaaattgacttaaatgatgcaatggaaacattgaaacatttagttgacaatgaaattccaaatgcagagcaaactgtcaattaccaaaacgctgacgataatgctaaaacaaacttcgatgatgccaaacgtctagcaaatacattgctaaatagtgataacacaaatgtgaatgatatcaatggcgcaatccaagcagtcaatgatgcaatccataatcttaatggtgatcaacgactacaagatgctaaagacaaggcaattcaatctattaatcaagctttagctaataagctaaaagaaatcgaagcttcaaatgcgacggatcaagacaagcttattgcgaaaaataaagcagaagaattggcaaacagcatcatcaacaacattaataaagcaacaagtaatcaggctgtatctcaagttcaaacagcaggcaaccacgcgattgaacaagtgcatgccaatgaaataccaaaagcaaaaattgatgccaataaagacgttgataagcaagttcaagcattaattgacgaaattgatcgaaatccaaatctaacagataaggaaaaacaagcacttaaagatcgtattaatcaaatacttcaacaaggtcataacggcattaacaatgcgatgactaaagaagaaattgaacaagccaaagcacaacttgcgcaagcattacaagacatcaaagatttagtgaaagctaaagaagatgcgaaacaagatgttgataaacaagttcaagctttaattgacgaaatcgatcaaaatccaaatctaacagataaggaaaaacaagcacttaaagatcgtattaatcaaatacttcaacaaggtcataacgacattaacaatgcgatgacaaaagaagcaattgaacaagcaaaagaacgtttagcgcaagcattgcaagacatcaaagatttagtgaaagctaaagaagatgcgaaaaatgcaataaaagccttagctaatgcgaagcgtgatcaaatcaattcaaatccagatttaacacctgagcaaaaagcaaaagcgctcaaagaaattgacgaagctgaaaaacgagcactacaaaacgttgagaatgctcaaactatagatcaattaaatcgaggattaaacttaggtttagatgacattagaaatacacatgtatgggaggttgatgaacaacctgctgtaaatgaaatttttgaagcaacacctgagcaaatcctagttaatggtgaactcattgtacatcgtgatgacatcattacagaacaagatattcttgcacacataaacttaattgatcagctttcagcagaagtcatcgatacaccatcaactgcaacgatttctgatagcttaacagcaaaagttgaagttacattgcttgatggatcaaaagtgattgttaatgttcctgtaaaagttgtagaaaaagaattgtcagtagtcaaacaacaggcaattgaatcaatcgaaaatgcggcacaacaaaagattaatgaaatcaataatagtgtgacattaacactggaacaaaaagaagctgcaattgcagaagttaataagcttaaacaacaagcaattaatcatgttaacaatgcacctgatgttcattcagttgaagaaattcaacaacaagaacaagcgcatattgaacaatttaatccagaacaatttacgattgaacaagcaaaatcaaatgcaattaaatcgattgaagatgcaattcaacatatgattgatgaaatcaaagctcgtactgatctaacagataaagagaagcaagaagctattgctaagttaaatcaattaaaagaacaagcaattcaagcgattcaacgtgcgcaaagcatcgatgaaataagtgagcaattggaacaatttaaagctcaaatgaaagcagctaatccaacagcaaaagaactagctaaacgcaagcaagaagctattagtagaattaaagacttttcaaatgaaaaaataaatagtattcgaaatagtgaaattggcacagctgatgaaaaacaagcagcaatgaatcaaattaacgaaattgtgcttgaaacaattagagatattaataatgcgcatacattacagcaagttgaggctgcattgaacaatggtattgctcgaatttcagcagtacaaattgtaacatctgatcgtgctaaacaatcgtcaagtactggaaatgaatctaatagccatttaacaattggttatggaactgcaaatcatccatttaacagttcgactattggacataaaaagaaacttgatgaagatgatgacattgatccacttcatatgcgtcactttagtaataatttcggtaatgttattaaaaacgctattggtgtggtgggtatctctggtttactagctagtttctggttcttcattgccaaacgtcgtcgtaaagaagatgaagaggaagaattagaaataagagataataataaagattcaataaaagagactttagacgatacaaaacatttaccacttttatttgcgaaacgtcgcagaaaagaagatgaagaagatgttactgttgaagaaaaagattcgctaaataatggcgagtcactcgataaagttaaacatacgccgttcttcttaccaaaacgtcgtcgtaaagaagatgaagaagatgtggaagttacaaatgaaaacacagatgaaaaagtgttgaaagataacgaacattcaccactcttattcgcaaaacgacgcaaagataaagaggaagatgttgaaacaacaactagtattgaatctaaagatgaggacgttcctttattattggctaaaaagaaaaatcaaaaagataaccaatccaaagacaaaaagtcagcatcaaaaaatacttctaaaaaggtagcagctaaaaagaagaaaaagaaagctaagaaaaataaaaaataa

SEQ ID NO: 406442 - DNA, 402 bp, Staphylococcus aureus
atggcgaaaataaattttgatgctgcgacgaaaggaaatccaggcataagtacatgtgccattgtaatcaaagaagatgagcagcattatacatatacacatgagttaggcgaaatggataaccacactgcagaatgggctgcatgtatttatgcactagaacatgcacgtgaattaaatgttcaaaacgcactattatatacagactcaaagctaattgcagatagcattgaagctggttatgtgaaaaacgcaaatttcaaaccttattttgatcaaatagaaatatttgaaaaagattttgatttattatttgttaaatggataccgagagaacaaaacaaagaagcgaatcaacacgctcaacaggcattgtataaattaattaaaaagaataaataa

SEQ ID NO: 406443 - DNA, 705 bp, Staphylococcus aureus
atgtataatgaaattttaggactagttacgtttattgcaacgttcgtgcttatggtacttatgtatcgcttttttggtaaacaaggtttaattgcatgggttgcaattggcacaatcattgccaacatacaagtgattaaaactgtagaaatctttggtatttcagcaactttaggtaatgtcatgtttgcttctatttatttagcaacagatatattaaacgatatttatgggcgtagagttgcaaaaagagcagtttggttaggcttttcatcaacattaattatgattattgttatgcaattgtcattacattttattcctgcaccagaagatatggcacaaaaagcattacacgcaatctttgatgttgtgccacgcattgctttaggctcaatcgtcgcatatattattggtcaacatattgatgtatttatcttttcactaattaaaaaagtatttagttctgataaaacgtttttcatccgtgcatatggtagtacatttttaagctcaataattgatacagctttatttgtagctatcgcatttatcggaagtttacctggtacagttgtatttgaaatatttattacaacgtacgtattaaaattagcttcaacagttttcaatgtaccatttggatatattgctaaatcattttatcgtaaaggtaagattgataagttagatcaaggctattaa

SEQ ID NO: 406444 - DNA, 252 bp, Staphylococcus aureus
atgaaaattatatctatatcagaaacaccgaaccacaacacaatgaagattacacttagtgaaagcagagaaggtatgacatcagatacgtatactaaagttgatgattcacagccagcatttattaatgacatcttaaaggttgaaggcgttaaatcaattttccatgttatggactttatttcagtagataaagaaaatgacgcaaattgggaaacagtattgccaaaagtagaggctgtattcgaataa

SEQ ID NO: 406445 - DNA, 336 bp, Staphylococcus aureus
atggaaattttacgtatagagccaacaccaagtccaaatacaatgaaagttgttttgtcatatacaagagaagacaagttatctaatacttataaaaaagtagaagaaacacaaccaagatttataaatcagttgttatctatagatggtatcacttccatttttcatgtcatgaacttcttagctgttgataaggcaccaaaagctgattgggaagtcatattacctgatattaaagctgctttttctgatgcgaataaggttttagaatctgtaaatgaacctcaaattgacaatcattttggtgaaattaaagctgaattattaactttttaa

SEQ ID NO: 406446 - DNA, 711 bp, Staphylococcus aureus
atgactcaagcgcaaacagcacatgacaatattgtttttatgcgtaaatggctagatttaggaaatcgctatggaaatattcaagaagtaatggatggtgtcctagaagaagtgctagctacctatccagaatcacagttacccgtattggtaaaacatgctttagaagaaaatcacgcaactaataattatcatttctatcgacatgtctctttggatgaatatcatgcaactgataattggaagactcgattacgaatgttaaaccattttccaaagccgacttttgaagatataccgctgcttgatttagctttatctgatgaaaaagtaccggttagacgtcaagcgattgtattattaggtatgattgaaagtaaagaaattttaccgtatttatataaggggcttcgtgataaaagtcctgctgtaagaagaacagcaggggattgcataagcgatttagggtatccagaggcactaccagaaatggtgctactattagatgatccacagaaaatcgttaggtggcgtgctgctatgtttatctttgatgaaggtaatgcagagcagcttcccgcactaaaagcccatattaatgacaatgcgtttgaagttaaattacaaattgaaatggccatatctcgtattgaaaacggagatgaagcacttggttcagtatggaaacaaatggcaaacagaacaatttaa

SEQ ID NO: 406447 - DNA, 438 bp, Staphylococcus aureus
atgaatgcatatgatgcttatatgaaagaaattgcgcaacaaatgcgtggcgaattaactcaaaatggttttacaagtttagaaacgagcgaagcagtatcggagtatatgaaccaagtaaatgctgatgacactacttttgtagttattaactctacatgcggctgtgcagctggattagcaagaccagctgcagtagcagttgcaacacaaaatgaacatagacctacaaatacagttacagtttttgctgggcaagataaagaagcaactgctacaatgcgagaattcattcagcaagcaccatctagtccttcgtatgctttattcaaaggtcaagatttagtttattttatgcctagagaatttatcgaaggtagagatattaatgacattgcaatggacttaaaggatgcctttgacgaaaattgtaaatag

SEQ ID NO: 406448 - DNA, 957 bp, Staphylococcus aureus
atgttgaattcatttgatgcagcatatcacagtctttgtgaagaagttttagaaataggaaatacacgaaatgatcgcacaaatacaggtacgatttcgaaatttggtcatcaacttcgctttgacttatctaaaggatttccactattaacgacaaagaaagtttcttttaaattagtagcaaccgaattattatggttcattaaaggagatacaaacatccaatacttattaaaatataataataatatatggaacgaatgggcttttgaaaattatatcaaatcagacgagtataaaggtccagatatgacagatttcgggcatcgtgcattgagtgatcctgaatttaacgaacaatataaagaacaaatgaaacaatttaagcaacgtattcttgaagatgatacatttgcgaagcaattcggggatttaggaaatgtttatggtaaacaatggcgagattgggttgataaagatggtaatcattttgatcaacttaaaacagtaattgaacaaattaagcataatccagattcaaggcgacacatcgtatctgcatggaatccaacagaaattgatacaatggcacttccgccttgtcataccatgttccagttttatgtccaagatggtaagttaagttgccagttataccaacgtagcgcagatatctttttaggtgtgccatttaatatcgcaagctacgctttattgacacaccttattgccaaagaatgtggacttgaagtgggtgaatttgtgcatacatttggagatgcacatatttattcaaatcatattgatgcgattcaaacacaattagcacgtgaaagcttcaatcctccaacattaaaaattaacagtgacaagtctattttcgacataaattatgaagatttggaaattgttgactatgaatcacatccagcaataaaagctccaatagcagtgtag

SEQ ID NO: 406449 - DNA, 480 bp, Staphylococcus aureus
atgactttatccattctagttgcacatgacttgcaacgagtaattggttttgaaaatcaattaccttggcacctaccaaatgatttgaagcatgttaaaaaattatcaacaggtcatactttagtaatgggtcgtaagacatttgaatcgattggtaaaccactaccgaatcgtcgaaatgttgtacttacttcagatacaagtttcaacgtagagggcgttgatgtaattcactctattgaagatatttaccaactaccgggccatgttttcatatttggagggcaaacattatttgaagaaatgattgataaagtggacgacatgtatattactgttattgaaggtaaattccgtggtgatacgttctttccaccttatacatttgaagactgggaagttgcctcttcagttgaaggtaaactagatgagaaaaatacaattccacatacctttctacatttaattcgtaaaaaataa

SEQ ID NO: 406450 - DNA, 840 bp, Staphylococcus aureus
atgacaaaacagattatagtaacagactcaacatccgatttatctaaagaatacttagaagcaaacaacattcatgtaattcctttaagtttaactattgaaggagcttcatacgttgaccaagtagatattacatcagaagaatttattaatcatattgaaaatgatgaagatgtaaagacaagtcagccagccataggtgaatttatatctgcttatgaagaactaggaaaagatggctctgaaatcataagtattcatctttcttcaggattaagtggtacatataacactgcttaccaagcaagtcaaatggtagatgctaatgtaactgttattgattcaaaatctatttcttttggtttagggtatcaaatacaacacctagtagagcttgtaaaagaaggtgtctcaacttctgaaatagttaaaaagttaaatcatttaagagaaaacattaaattatttgtagttatagggcaattgaatcaattaattaaaggtggcagaattagtaaaacaaaaggtttgattggtaatcttatgaaaattaaaccaattggtacactagatgatggtcgcttagagcttgtgcacaatgcgagaactcaaaattctagtatccaatacttgaaaaaggaaattgctgaatttataggagatcatgaaatcaaatccattggtgtcgcacatgctaacgtcattgaatatgttgataaattgaagaaagtttttaatgaagcttttcatgtgaataattacgatataaatgtaactacaccagttatttctgcacatactggtcaaggtgcgattggcctcgtagtccttaagaagtaa

SEQ ID NO: 406451 - DNA, 534 bp, Staphylococcus aureus
atgacaaaagaatatgcaacattagcaggaggatgtttctggtgcatggttaaaccatttacatcatatccaggcatcaagtcagtcgtatctggttatagtggcggtcatgttgacaacccaacttatgaacaggtatgtacgaatcaaaccggccatgtcgaagcagtacaaattacgtttgatccagaggttacttcctttgaaaatatattagacatatatttcaaaacatttgacccaactgatgatcaagggcaatttttcgatagaggcgaaagctatcaaccagtcattttctatcatgatgaacatcagaaaaaggctgctgagtttaaaaagcaacaattaaatgaacaaggtattttcaagaaaccagtgattacacctattaaaccatataaaaatttctatccagctgaagactaccatcaagattattacaaaaagaacccggtacattattaccaatatcaacgtggttcaggtagaaaagcgtttatagaatcacattgggggaatcaaaatgcttaa

SEQ ID NO: 406452 - DNA, 429 bp, Staphylococcus aureus
atgcttaaaaaagataaaagtgaactaacagatatagaatatattgttacacaagaaaacggcactgaaccaccatttatgaatgaatattggaatcattttgctaaaggaatttatgtagataaaatttctggtaaacctttatttacatctgaagaaaagtttcattctgaatgtggatggcctagcttttccaaagcgcttgatgacgatgaaattatagaattagtcgacaaatcatttggtatgttgagaactgaagtgcgttcagaagaatcaaatagtcatttaggacatgtctttaatgatggacctaaagaaagtggcggcttaagatactgtatcaattccgctgcaattcaatttattccatatgaaaagttagaagaattgggttatggcgatttaatatcacattttgataagtag

SEQ ID NO: 406453 - DNA, 501 bp, Staphylococcus aureus
atgtttaaaaaattattcggaaaaggcaaagaagttcagaaagatatcgcaatttatgcaccattaactggagaattcgtgaaaattgaagatattccagatcctgtattcgcacaaaaaatgatgggcgaaggttttggtattaatccaactgaaggagaagttgtgtctccaattgcaggacgtgttgacaatgtctttccaactaagcatgcgattgggttaaaagcagataacggattagaattattagttcatatcggtttagacacagttcaattagacggtgaaggatttgaagtgttagtgtctagtggtgacgaagttaacgtcggagatccattagtaagattcaaccttgaatatattaataataacgctaaatctgtaatttcaccaattataattactaacactgatcaagcagcttcaattaatatttatgatgaaaatgctgtgattaaaggtgaaacaaaagtgattgatgtgacaatgaactaa

SEQ ID NO: 406454 - DNA, 222 bp, Staphylococcus aureus
atgaaaaactattcgttttatcaatttgtcatgacagttcgtggtcgacacgacgataaaggtcgtctagcagaagagatatttgacgatcttgctttcccaaaacacgatgatgattttaacatactgtctgattatattgagacacatggtgatttcacattgccaatgtctgtatttgatgatttatatgaagaatatacggaatggctaaaattttaa

SEQ ID NO: 406455 - DNA, 1491 bp, Staphylococcus aureus
atggatgataagcaacacacatcttcatccgatgatgaacgcgctgaaattgcaacaagcaatcaagaccaagaaactaattcatcgaaacgcgttcacttaaaacgttggcaattcatatcaatattaattggtacaatcctaataacagctgtcatcacagttgttgcatatatttttataaatcaaaaaataagtggtttaaacaaaactgatcaagcaaacttaaataaaattgaaaatgtgtataaaatcttaaatagtgattattacaaaaaacaggactctgacaagttaagtaaagctgcaattgatggcatggtcaaagaattaaaagatccttattctgaatatttaacaaaagaacaaacgaaatcctttaatgaaggtgtttcaggtgattttgtaggtattggtgcagaaatgcaaaagaaaaatgatcaaattatggttactagtcctatgaagggatctccagcagaacgtgctggcattcgtcctaaagatgtcattactaaagtaaatggaaaatcaattaaaggtaaagcattagatgaagttgtcaaagatgttcgtggtaaagaaaacactgaagtcactttaactgttcaacgaggtagtgaagaaaaagacgttaagattaaacgtgaaaaaattcatgttaaaagtgttgagtataagaaaaaaggtaaagttggagttattactattaataaattccagaatgatacatcaggtgaattgaaagatgcagttctaaaagctcacaaagatggtttgaaaaagattgttttagatttaagaaataatccaggtggactactagatgaagctgttaaaatggcaaatatttttatcgataaaggaaaaactgttgttaaactagaaaaaggtaaagatactgaagcaattcaaacttctaatgatgcgttaaaagaagcgaaagacatggatatatccatcttagtgaatgaaggttcagctagcgcttctgaagtgtttactggtgcgctaaaagactataataaagctaaagtttatgggtcaaaaacattcggcaaaggtgtcgtacaaactacaagagagtttaaggatggttcattgttaaaatatactgaaatgaaatggttaacgccagatggtcattatattcacggtaaaggcattaaaccagacgttactattgacacacctaaatatcaatctttaaatgtcattcctaatacgaaaacatttaaagttggagacgatgataaaaatattaaaactattaaaattggtttatcagctttaggttataaagttgataatgaatcaacgcaatttgataaagctttagaaaatcaagttaaagctttccaacaagcgaataaacttgaggtaactggtgaatttaataaagaaacgaataataaatttactgagttattagttgaaaaagctaataaacatgatgatgttctcgataagttgattaatattttaaaataa

SEQ ID NO: 406456 - DNA, 510 bp, Staphylococcus aureus
atgatccgtctaggtaaaatgtcagatttagatcaaatcttaaatctagtagaagaagcaaaagaattaatgaaagaacacgacaacgagcaatgggacgatcagtacccacttttagaacattttgaagaagatattgctaaagattatttgtacgtattagaggaaaatgacaaaatttatggctttattgttgtcgaccaagaccaagcagaatggtatgatgacattgactggccagtaaatagagaaggcgcctttgttattcatcgattaactggttcgaaagaatataaaggagctgctacagaattattcaattatgttattgatgtagttaaagcacgtggtgcagaagttattttaacggacacctttgcgttaaacaaacctgcacaaggtttatttgccaaatttggatttcataaggtcggtgaacaattaatggaatatccgccatatgataaaggtgaaccattttatgcatattataaaaatttaaaagaatag

SEQ ID NO: 406457 - DNA, 1071 bp, Staphylococcus aureus
atgacgaaaatcgcatttaccggagggggaacagttggacacgtatcagtaaatttaagtttaattccaactgcattatcacaaggttatgaagcgctttatattggttctaaaaatggtattgaaagagaaatgattgaatcacaactaccagaaattaagtattatcctatttcgagtggtaaattaagaagatatatttctttagaaaatgccaaagacgtatttaaagtattgaaaggtattcttgatgctcgtaaagttttgaaaaaagaaaaacctgatctattattttcaaaaggtggatttgtatctgtgcctgttgttattgcagccaaatcattaaatataccaactattattcatgaatctgacttaacaccaggattagcgaataagatagcacttaaatttgccaagaaaatatatacaacatttgaagaaacgctaaactacttacctaaagagaaagctgattttattggagcaacaattcgagaagatttaaaaaatggtaatgcacataatggttatcaattaacaggctttaatgaaaataaaaaagttttactcgttatgggtggaagcttaggaagtaaaaaattaaatagcattattcgcgaaaacttagatgcattattacaacaatatcaagtgatacatttaactggtaaaggattaaaagatgctcaagttaaaaaatcaggatatatacaatatgaatttgttaaagaggatttaacagatttattagcaattacggatacagtaataagtagagctggatcaaatgcgatttatgagttcttaacattacgtataccaatgttattagtaccattaggtttagatcaatcccgaggcgaccaaattgacaatgcaaatcattttgctgataaaggatatgctaaagcgattgatgaagaacaattaacagcacaaattttattacaagaactaaatgaaatggaacaggaaagaactcgaattatcaataatatgaaatcgtatgaacaaagttatacgaaagaagctttatttgataagatgattaaagacgcattgaattaa

SEQ ID NO: 406458 - DNA, 615 bp, Staphylococcus aureus
atgagtcaatggaaacgtatctctttgctcatcgtttttacattggtttttggaattatcgcgtttttccacgaatcaagacttgggaaatggattgataatgaagtttatgagtttgtatattcatcagagagctttattacgacatctatcatgcttggggctactaaagtaggtgaagtctgggcaatgttatgtatttcattacttcttgtggcatatctcatgttaaagcgccacaaaattgaagcattattttttgcattaacaatggcattatctggaattttgaatccagcattaaaaaatatattcgatagagaaagacctacattgctgcgtttaattgatataacaggatttagttttcctagcggtcatgctatgggatcaactgcatattttggaagtggtatctatctattaaatcgattaaatcaaggtaattcaaaaggtattcttatagggttatgtgcagctatgattttattgatttccatatcacgtgtatatctaggtgtacattatccaacagatattattgccggcattattggtggattattttgcattattttatcaacgttattacttagaaataaattaataaattaa

SEQ ID NO: 406459 - DNA, 909 bp, Staphylococcus aureus
atgacaaagacaaaagcaattgatattataggtgcaccatcaacatttggacaaagaaaattaggtgttgatttaggaccaacagcaattagatatgctggattaatttcaagattaaagcaattagaccttgatgtatatgacaagggggatattaaggtacctgctgtgaacattgaaaaatttcatagtgaacaaaaaggattaagaaattatgatgaaattatagatgttaatcaaaaattaaataaagaggtttcagcatcaattgaaaataacagatttcctctagttcttggtggagatcattctattgcggtaggttcagtatcagcaataagtaaacattataataatttaggtgttatttggtatgatgcacatggtgatttaaatatacctgaagagtcaccaagtggaaatattcatggtatgcctctaaggattttgacaggcgaaggtcccaaagaacttttagaattaaatagtaatgtaatcaagccagaaaacatcgtactaattggtatgagagatttagataaaggtgaaagacaatttatcaaagatcataatattaaaacatttactatgtcagatattgataaattggggataaaggaagtaattgaaaatacaatagaatatttgaagtcacgcaatgttgatggcgttcatttatctttagatgttgatgctttagatccgcttgaaacgccaggcactggtactagagttttgggtggtcttagttatagagaaagccattttgcattggaattactgcatcaatcacatttaatttcctcaatggatttagttgaagtaaatccattgattgacagtaataatcatactgctgaacaagcggtttcattagttggaacattttttggtgaaactttattataa

SEQ ID NO: 406460 - DNA, 810 bp, Staphylococcus aureus
atggatttttccaacttttttcaaaacctcagtacgttaaaaattgtaacgagtatccttgatttactgatagtttggtatgtactttatcttctcatcacggtctttaagggaactaaagcgatacaattacttaaagggatattagtaattgttattggtcagcagataagtatgatattgaacttgactgcaacatctaaattattcgatatcgttattcaatggggggtattagctttaatagtaatattccaaccagaaattagacgtgcgttagaacaacttggtagaggtagctttttaaaacgctatacttctaatacgtatagtaaagatgaagagaaattgattcaatcggtttcaaaggctgtgcaatatatggctaaaagacgtataggtgcattaattgtctttgaaaaagaaacaggtcttcaagattatattgaaacaggtattgcaatggattcaaatatttcgcaagaacttttaattaatgtctttatacctaacacacctttacatgatggtgcaatgattattcaaggcacgaagattgcagcagcagcaagttatttgccattgtctgatagtcctaagatatctaaaagtttgggtacaagacatagagctgcggttggtatttcagaagtatctgatgcatttaccgttattgtatctgaagaaactggtgatatttcggtaacatttgatggaaaattacgacgagacatttcaaacgaaatttttgaagagttgcttgctgaacattggtttggcacacgctttcaaaagaaaggtgtgaaataa

SEQ ID NO: 406461 - DNA, 933 bp, Staphylococcus aureus
atgctagaaagtaaatggggcttgagatttattgcctttcttttggcattgtttttctttttatctgttaacaatgtttttggaaatatctttaacactggtaatcttggtcaaaagtctagtaaaacgattcaagatgtacccgttgaaattctttataacactaaagatttgcatttaacaaaagcgcctgaaacagttaatgtgactatttcaggaccacaatcaaagataataaaaattgaaaatccagaagatttaagagtagtgattgatttatcaaatgctaaagctggaaaatatcaagagaagtatcaagttaaagggttagctgatgacattcattattctgtaaaacctaaattagcaaatattacgcttgaaaacaaagtaactaaaaagatgacagttcaacctgatgtaagtcagagtgatattgatccactttataaaattacaaagcaagaagtttcaccacaaacagttaaagtaacaggtggagaagaacaattgaatgatatcgcttatttaaaagccacttttaaaactaataaaaagattaatggtgacacaaaagatgtcgcagaagtaacggcttttgataaaaaactgaataaattaaatgtatcgattcaacctaatgaagtgaatttacaagttaaagtagagccttttagcaaaaaggttaaagtaaatgttaaacagaaaggtagtttagcagatgataaagagttaagttcgattgatttagaagataaagaaattgaaatcttcggtagtcgagatgacttacaaaatataagcgaagttgatgcagaagtagatttagatggtatttcagaatcaactgaaaagactgtaaaaatcaatttaccagaacatgtcactaaagcacaaccaagtgaaacgaaggcttatataaatgtaaaataa

SEQ ID NO: 406462 - DNA, 1356 bp, Staphylococcus aureus
atgggaaaatattttggtacagacggagtaagaggtgtcgcaaaccaagaactaacacctgaattggcatttaaattaggaagatacggtggctatgttctagcacataataaaggtgaaaaacacccacgtgtacttgtaggtcgcgatactagagtttcaggtgaaatgttagaatcagcattaatagctggtttgatttcaattggtgcagaagtgatgcgattaggtattatttcaacaccaggtgttgcatatttaacacgcgatatgggtgcagagttaggtgtaatgatttcagcctctcataatccagttgcagataatggtattaaattctttggatcagatggttttaaactatcagatgaacaagaaaatgaaattgaagcattattggatcaagaaaacccagaattaccaagaccagttggcaatgatattgtacattattcagattactttgaaggggcacaaaaatatttgagctatttaaaatcaacagtagatgttaactttgaaggtttgaaaattgctttagatggtgcaaatggttcaacatcatcactagcgccattcttatttggtgacttagaagcagatactgaaacaattggatgtagtcctgatggatataatatcaatgagaaatgtggctctacacatcctgaaaaattagctgaaaaagtagttgaaactgaaagtgattttgggttagcatttgacggcgatggagacagaatcatagcagtagatgagaatggtcaaatcgttgacggtgaccaaattatgtttattattggtcaagaaatgcataaaaatcaagaattgaataatgacatgattgtttctactgttatgagtaatttaggtttttacaaagcgcttgaacaagaaggaattaaatctaataaaactaaagttggcgacagatatgtagtagaagaaatgcgtcgcggtaattataacttaggtggagaacaatctggacatatcgttatgatggattacaatacaactggtgatggtttattaactggtattcaattagcttctgtaataaaaatgactggtaaatcactaagtgaattagctggacaaatgaaaaaatatccacaatcattaattaacgtacgcgtaacagataaatatcgtgttgaagaaaatgttgacgttaaagaagttatgactaaagtagaagtagaaatgaatggagaaggtcgaattttagtaagaccttctggaacagaaccattagttcgtgtcatggttgaagcagcaactgatgaagatgctgaaagatttgcacaacaaatagctgatgtggttcaagataaaatgggattagataaataa

SEQ ID NO: 406463 - DNA, 7437 bp, Staphylococcus aureus
atgaatttattcagacaacaaaaatttagtatcagaaaatttaatgtcggtattttttcagctttaattgccactgttacttttatatctactaacccgacaacagcgtctgcagcagagcaaaatcagcctgcacaaaatcaaccagcacaaccagctgatgccaatacacagcctaacgcaaatgctggtgctcaagctaatcctacagcacagccagctgcacctgccaaccaaggacaaccagcagtacaaccagcaaaccaaggtggacaggctaatccagcaggaggagcagcacaaccaaatacacaaccagctggacaaggtaatcaagctgatccgaataacgctgcacaagcacaacctggaaatcaagcaacaccggcaaaccaagcaggtcaaggaaataaccaagcaacacctaataataatgcaacaccggcaaatcaaacacagccagcgaatgctccagcagcagcgcaaccagcagcacctgtagcagcaaacgcacaaactcaagatccaaatgctagcaatactggtgaaggcagtattaatacgacattaacatttgatgatcctgccatatcaacagatgagaatagacaagatccaactgtaactgttacagataaagtaaatggttattcattaattaacaacggtaagattggtttcgttaactcagaattaagacgaagcgatatgtttgataagaataaccctcaaaactatcaagctaaaggaaacgtggctgcattaggtcgtgtgaatgcaaatgattctacagatcatggtaactttaacggtatttcaaaaactgtaaatgtaaaaccagattcagaattaattattaactttactactatgcaaacgaatagtaagcaaggtgcaacaaatttagttattaaagatgctaagaaaaatactgaattagcaactgtaaatgttgctaagactggtactgcacatttatttaaagtaccaactgatgctgatcgtttagatttacaatttattcctgacaatacagcagttgctgatgcttcaagaattacaacaaataaagatggttataaatactattcattcattgataatgtaggtctattctcaggatcacatttatatgtcaaaaatagagatttagcaccgaaagcaactaacaataaagaatatactattaatactgaaatcggtaacaatggtaattttggtgcttcattaaaagcagatcaatttaaatatgaagtaacattaccacaaggtgtaacttacgttaataattcattaactacaacattccctaatggtaatgaagacagtacagtattgaaaaatatgactgttaattatgatcaaaatgcaaataaagttacatttacaagccaaggtgtgacaacggcacgtggtacacacactaaagaagttttattcccagataaatctttaaaattatcatataaagttaatgttgcgaatatcgatacacctaaaaatattgattttaatgaaaaattaacatatcgtactgcttcagatgttgtaattaataatgcgcaaccagaagttacactaactgcagatccattttcagtagcggttgaaatgaacaaagatgcgttgcaacaacaagtaaactcacaagttgataatagtcattacacaacagcatcaattgcagaatacaataaacttaaacaacaagcagatactattttaaatgaagatgcgaatcatgttaaaactgcaaatcgtgcatctcaagcggatattgatggtttagtaactaaattacaagctgcattaattgataatcaagcagcaattgctgaattagatactaaagctcaagaaaaggttacagcagcacaacaaagtaaaaaagttacgcaagatgaagttgcagcacttgtaactaaaattaacaatgataaaaataatgcaatcgcagaaattaataaacaaactacagcacaaggtgtcacaactgaaaaagataatggtatcgcagtgttagaacaagatgtgattacaccaacagttaaacctcaagcgaaacaagatattatccaagcagttacaactcgtaaacaacaaattaaaaagtcaaatgcatcattacaagatgaaaaagatgtagcaaatgataaaattggtaaaattgaaacaaaggcaattaaagatattgatgcagcaacaacaaatgcacaagtagaagccattaaaacaaaagcaatcaatgatattaatcaaactacacctgctacaacagctaaagcagcagctcttgaagaatttgacgaagttgttcaagcacaaattgatcaagcacctttaaatcctgatacaacaaatgaagaagtagcggaagctattgaacgtattaatgcagctaaagtttctggtgttaaagcaattgaagcgacaacgactgcacaagatttagaaagagttaaaaacgaagaaatctcaaaaattgaaaatattactgactctacgcaaacaaaaatggatgcctataatgaagttaaacaagctgcaacagctagaaaagctcaaaatgctacagtttcaaatgcaacaaatgaagaagtagcagaagctgatgcagcagtagatgcagctcaaaagcaaggtttacatgacatccaagttgttaaatcaaaacaggaagttgctgatacaaaatcaaaagtattagataaaatcaatgcaattcaaacacaagcaaaagttaaacctgcagctgatacggaagtagaaaacgcatataatacacgtaaacaagaaattcaaaatagcaatgcttcaactacagaagaaaaacaagctgcatatacagaattagatactaaaaagcaagaagcaagaacaaatcttgatgctgcaaatacaaacagtgatgtaacaacagctaaagacaatagtattgctgcaattaatcaagttcaagctgccacaactaagaaatcggatgcaaaagcggaaatcgctcaaaaagcaagtgaacgtaaaacagcaattgaagcaatgaatgattcgactactgaagaacaacaagcagcgaaagacaaagtggatcaagcagtagttactgcaaacgctgatatagataatgctgcagcaaacaatgatgtggataatgcaaaaactacaaatgaagctacaatcgcagccattacacctgatgcaaatgttaaaccagcagcaaaacaagcaattgcagataaagtacaagctcaagaaacagcaattgatggaaataacggctcaacaactgaagaaaaagcagctgctaaacaacaagttcaaactgaaaaaacaacagctgatgccgcaatagatgcagcacatacaaatgcggaagttgaagcggctaaaaaagcagcaattgctaaaattgaagcgattcagccagcaacaacaactaaagataatgcgaaagaagcaattgctacgaaagcgaatgaacgtaaaacagcaatcgctcaaacgcaagacattactgctgaagaaattgcagcggctaatgcggacgtagataatgctgtgacacaagcaaatagcaacattgaagctgctaatagtcaaaatgatgtagaccaagcgaaaacgacaggtgaaaatagtattgatcaagtaacaccaacagttaataaaaaagcaactgcacgtaatgaaatcacagcaattttaaataacaaattgcaagagattcaagctacgccagatgcaacagatgaagaaaaacaagcagctgatgctgaagcaaatactgaaaatggtaaagcaaatcaagccatttcagcagcaactactaacgcacaagttgatgaagctaaagcaaatgcagaagcagcgattaatgcggtaacaccaaaagttgtgaagaaacaagcggctaaagatgaaattgatcaattacaagcaacgcaaacaaatgttatcaataatgatcagaacgctacaacagaagaaaaagcagcagctattcaacaattagcaacagcagttacagacgcgaaaaataatattacagctgcaactgatgataatggtgtagatcaggcgaaagacgctggaaagaattcaattcaaagcacgcaaccagcaacagcggttaaatcaaatgctaaaaatgatgttgatcaagctgtgacaactcaaaatcaagcaattgataatacaactggtgctacaactgaagagaaaaatgcagcaaaagatttagttttaaaagctaaagaaaaagcgtatcaagatatcttaaatgcacaaacaactaatgatgttacgcaaattaaagatcaagcagttgctgatattcaaggtattactgcagatacaacaattaaagatgttgcgaaagatgaattagcaacaaaagcaaacgaacaaaaagcgcttattgcacaaactgcagatgcgactactgaagaaaaagaacaagcaaatcaacaagtagacgcacaattaacacaaggtaatcaaaatattgaaaatgcacagtcaatcgatgatgtaaacactgcaaaagataatgcaattcaagcaattgacccaattcaagcatcaacagatgttaaaacgaatgcaagagcggaattgctaactgaaatgcaaaataaaataactgaaatacttaataataatgagactactaatgaagaaaaaggtaacgatattggaccagttagagcagcatatgaagaaggtttaaataatattaatgcagcaactactacaggtgatgtaactactgctaaagatacagcagtacaaaaagttcaacaacttcatgcaaatcctgttaagaaaccagcaggtaaaaaagaattagatcaagctgcagctgataagaaaacacaaatagaacaaacaccaaatgcatcacaacaagaaattaatgatgcaaaacaagaagttgatactgaattaaatcaagcgaaaacaaatgtcgatcaatcatcaacaaatgaatatgttgataatgcagttaaagaaggaaaagctaaaattaatgcagttaaaacatttagtgagtacaaaaaagatgctttagctaaaattgaagatgcatataatgctaaagtaaacgaagcggataactctaacgcatcgacttcaagtgaaattgctgaagcgaaacaaaaacttgctgaattaaaacaaactgcggatcaaaatgttaatcaagctacttctaaagatgacattgaagttcaaattcataatgacttagataatattaacgattacacaattccaacaggtaaaaaagaatcagctacaacagatttatatgcttatgcagatcagaagaaaaataatatttcagctgacactaatgcaacacaagatgaaaagcaacaagcaattaagcaagttgaccaaaatgttcaaactgcattagaaagcattaataatggtgtggataatggtgacgttgatgatgcattaacacaaggtaaagcagcaattgatgctattcaagtagatgctactgttaaacctaaagcgaaccaagctattgaagttaaagcagaagatacgaaagaatctattgatcaaagtgaccagttaactgctgaagaaaaaactgaagcattagcaatgattaaacaaattacagatcaagctaaacaaggtattactgatgcaacaacaactgctgaagttgaaaaagcgaaagctcaaggacttgaagcatttgataacattcaaatcgactcaacagaaaaacaaaaagctatcgaagaattagaaactgcactagaccagattgaagcaggtgtaaatgtcaacgctgatgctacaactgaagaaaaagaagcgtttacgaatgctttagaagacattttatcaaaagcaactgaagatatttctgatcaaactacaaatgcagaaatcgctactgtcaaaaatagtgcgcttgaacaacttaaagcacaacgtattaatcctgaagttaagaaaaatgctttggaagcaatcagagaagtggttaacaagcaaatagaaataattaaaaatgcagatgcagatgcatcggcgaaagaaattgcacgtacggatttaggtagatattttgacagatttgctgataaattagataaaacacaaacaaatgcagaagttgctgaattacaaaatgtaacgatacctgcaattgaagcgattgtgcctcagaatgatccagatgctaatgatactaataatggtatagataataatgatgcaacagcaaattcaaatgctaatgcaacaccagaaaatactggacaacctaacgtatctgagacgacagctaatggcaaagcagacgcttctccgacaacaccaaataatagtgatgcggcaacaggtgaaacaacagcaacatcagcaactgatgatgcaaatgataaaccgcaagctaataacaattctagtgtagatgcatcaacaaacagtccgacaatggataacgatgtaactagtaaaccagaagtagaatcaactaataacggcacaactgataaacctgtaacagaaactgataatgcaacgccagcagaaagcacaacaaataacaatagtacaactacagcaacaaacgagaatgcaccaacaggatcaacagcaacggctccaacaactgcgagcacagaagcagcatcatctgctgatagcaaagataatgcatctgtaaatgattcaaaacaaaatgctgaagtaaataatagtgctgaatctcaatcaactaatgacaaggttgcacaaccaaaatctgaaaataaagctaaggcagaaaaagatggtagtgattcaacaaatcaaagtatggttgaatcaacaactgaaacattgccttcagcagacataacagaaccaaatgtaccttctaatacatcaaaagataaagaagaaagtacgacaaatcaaactgatgcaggacaacttaagtctgaaactaacgttgcatctaacgaagcagataaatcgccaagcaaagctgatactgaagtttcgaataaaccatcaacatctgcatcttctgaagcaaaagaaaaaatgacttcaactaatgttagccaaaaagatgatacggcaacagcagatactaatgatacgcaaaaatcagttggttcagctgcaaacaataaagctacgcaaaacgacggtgccaatgcatctccagctacagtttcaaatggaagcaatagtgctaatcaagatatgcttaatgtaactaacactgacgaccaccaagctaagacaaaatcagctcaacaaggaaaagttaataaagctaaacaacaagctaaaactttaccagatactggtatgtcacataatgacgatttaccatatgctgaattagctctaggtgcaggtatggcattcttaattagaagattcactaagaaagaccaacaaactgaagaataa

SEQ ID NO: 406464 - DNA, 1107 bp, Staphylococcus aureus
atgaaagcagttcactttggtgctggtaacataggtcgtggtttcattggttatattcttgcagacaacaatgttaaagtaacatttgcagacgtcaatgaagaaatcattaatgctttagctcatgatcatcaatacgatgttattttagctgatgagtctaaaacaacgacgcgcgtgaataatgttgatgcaattaattcaatgcaaccttctgaagcgttgaaacaagcaattctagaagctgatattattacaacagctgttggtgttaacatactacctattattgctaaatcttttgcgcctttcttaaaagaaaaaacaaaccatgttaatattgttgcttgtgagaatgctattatggcaactgatacattgaaaaaagcagtacttgatattactggccctcttggtaacaatattcattttgctaactcagcagttgatagaattgtaccattacaaaagaatgaaaatatattagacgttatggttgagccattttacgaatgggttgttgaaaaagatgcatggtatggtccagaactaaaccatattaaatatgttgatgatttaacaccatatattgagcgtaaattattaactgtgaatacaggacatgcatatttagcgtatgctggtaaatttgcaggtaaagctacagttttagatgcagttgaagatagttcaattgaagctggcttacgccgtgttttagctgaaactagtcaatatattactaatgaatttgattttactgaagcggaacaagctgcttatgttgaaaaaataatagatcgtttcaacaattcttatttatctgatgaagtaacacgtgtcggacgaggtacattacgtaaaattggccctaaagatagaattataaaaccattaacatatctttataataaagatttagaacgcactggtttattaaatacagctgcattgttattgaagtatgatgatacagcagaccaagaaactgttgagaaaaataattacattaaagaacacggtttaaaagcgtttttaagtgaatatgctaaagttgacgatggcttagccgatgaaataattgaagcgtacaattcactttcataa

SEQ ID NO: 406465 - DNA, 435 bp, Staphylococcus aureus
atgagcgaattatttagtaatgacaatatctttttaaatgtaaatgttaacagccaaaatgaagcaattgaaaaagcaggtaaagccttagttgatagtggtgctgtaacagatgcttatattcaagcaatgaaagatcgtgagcaagtcgtatcaacatttatgggaaatggcttagcaattcctcatggcacagatgaagctaaaacaaatgtgattcactcaggtttaacattattacaaatccctgaaggcgttgactgggatggcgaagtagttaaagttgtcgtgggaattgctggtaaagatggcgaacatttagacttgttatctaaaattgcaattacatttagcgaagaagaaaatgtggatcgtatcgttcaagcaaaatctgcagaagaaattaaacaagtattcgaggaggcagatgcataa

SEQ ID NO: 406466 - DNA, 2133 bp, Staphylococcus aureus
atgttattgagtacacgtgaaaaagaaatgatagccctattgattaagtaccacggtcaatatatcactatacacgacattgctcagcaacttgcggtgtcctctcgtactattcaccgtgaattaaaaggtgttgaagcatatttaacttcattttcattaactttagaacgcgcaaacaaaaaagggctacgcattgctggcacagattctgatttaaacgatttgaagcaatcgattgcacaacatcaaaccattgacttatctgttgaagagcagaaagtaattattatatacgctttgatacaagccaaggagccagttaaacaatatagtttagcgcaagaaattggcgtttctgtccagactttagcaaagatgttagatgatttagagcttgatttaaataagtaccaactatctttatctcgaaagcgtggcgaaggcatttacttggtaggtactgaatcaaagaaacgtgaatttttaagtcaattaatggtgaataacttaaatagtactagcgtttattcagtaattgaaaatcattttgtctttcattcattaaatcaaatccacaaagactttgttgacttagagcgcatttttaatgttgaaagactattaatggactacctaagtgccttaccctaccaacttaccgaatcaagttatttaactttaactgtccatatcgtgctctccatttcacgtataaaaaatggagagtatgtcgcattaaacgatgatatttatgattctgtacaaaacacatttgaacacaaagtagcaagcgaacttgctgataaacttggtcaaatatatgacgtcacgtttaatcaggcagaaattgctttcattactatccatttacgtggagctaaacgaaaaaatcttaatgatacatcattaaataatcgttgtgaagaaaacaaaattaaagcgtttgttaacaaagtagaaatgatttccggtatgacatttgcagatttggatactttagtagatggactgacgctacaccttaatcctgcaatcaatcgtttgcaagctaatatcgagacctataatccgttaacagacatgattaagttcaaatatccaagactatttgaaaatgtaagattagctttaaatgattgttggcctgatttgatttttccagagagtgaaattgcttttatagttttacactttggtggctcgattaaaaaccaaggtaatcgatttttaaacatattagtcgtttgcagcagtggtatgggaactagtcgtctattatcaactcgtctagagcaagtttttagtgagattgagcgtattacacaagcatcagtcagcgatttgaagtcactagatttaagtcaatatgatggcattatttctactgtgaatttagacatcgactccccctatttaacggtaaacccattattaccagatagtgatatcagttatgtcgcacagtttttaaatacaaagtctacgttccaagagacgcatgataaatcatcaaacatgattgataaggatgatgttcatgttgaaacgaaagatgttgatggcaacacatcttttgaaaatgaacaaacttcatacttaacttcagttttcgaaaaacatttaagtgacgaaaaatcagaacaattattgcatcatatgcgttcgggtttaactttgcttgattcagtgaaaatagttagtaccgaagttaaacagtggcaaacatatatcgcagattatctatatcaatgcgatgtaataaacgatccaacgtcattcgctgaactactagagcaacgattgattgacaatccaggatggatattaagtccatatcctgttgcaataccacacctaagagacaatatgattaaacaccctatgattctaatcacagttttagaagaaccgttaacattgcctagtattcaaaatgacaatcaaacaattaaatatatgatttccatgtttatttctgacaatgattttatggcatcactggtaagtgacttgtccgaatttttaagtttgaaattagaatctattgatacttttatggaaaatccacaggaacttgaaacattattaagaaacaaatttttagaacgaattaaaaaacaatttatttag

SEQ ID NO: 406467 - DNA, 1539 bp, Staphylococcus aureus
atgtcacaaactgaagagaaaaaaggaattggtcgtcgtgttcaagcatttggatcattcttaagtagtatgatcatgccaaacattggcgctttcatcgcttggggttttatcgcggccatttttatagataatggatggttacctaacaaagatttagctactttagcaggaccaatgattacttatttaatcccattattgatcgcatttagtggtggtcgtttaatttatgatttacgtggtggtatcatcgcagcaacagcaactatgggggtcatcgttgcattacctgatacaccaatgttacttggtgcaatgattatgggtccacttgttggttggttaatgaagaagaccgaccaattgattcaacctagaacgccgcaaggttttgaaatgttatttaataacttttctgctggtattttaggatttatcatgacgattgcaggatttaaaattttagcaccacttatgaaatttattatgcatattttatcagtggcagttgaagcattagtacatgcacacctacttccacttgtaagtattttagtagagcctgcaaaaattgtatttttaaacaatgcgattaaccatggtgtattcacaccgcttggtgcagatcaagctgcaaaagctggtcaatcaattttatacacaattgaatctaaccctggaccaggtttaggtatcttacttgcttatatgatttttggaaaaggcactgcaaaagcaacgtcatatggtgctggaattatccacttcttaggtggtattcatgaaatttatttcccatatgtattaatgcgtcctttattatttatcgctgttattttaggtggaatgactggtgttgcaacttatcaagcaacaggatttggatttaaaagtcccgcgtcaccaggttcatttatagtttactgtttaaatgcacctagaggtgaattcttgcacatgttactcggtgtcttccttgctgcacttgtatcattcgttgtagctgctttaattatgaagttcactagagaaccaaagcaggatttagaagctgcgacagctcaaatggaaaatactaaagggaaaaaatcaagcgttgcttctaagttagtatcttctgataaaaatgttaatacagaagaaaatgctagtggtaatgttagtgaaacatcttcatcagatgatgatcctgaagcgctattggataattacaacactgaagatgttgatgcacacaattacaataatataaatcatgttatttttgcctgcgatgcgggtatgggttctagtgcaatgggtgcaagcatgttacgtaataaatttaaaaaggcgggcattaatgatattacagttacaaatactgcgattaatcaattgccaaaagatgctcaattagttatcactcagaaaaaactaactgatcgtgctattaaacaaacaccaaatgccatccatatttcagtggataatttccttaattcaccaagatatgaagaacttttaaataatctaaaaaaagatgatcaagcataa

SEQ ID NO: 406468 - DNA, 1806 bp, Staphylococcus aureus
atgtgtggaattgttggttatattggctatgataatgccaaagaattattattaaaaggtttagaaaaattagaatacagaggttatgactctgcaggtatcgcagtagtaaatgatgataatacaactgtatttaaagaaaaaggtcgtattgcagaattacgtaaagttgctgatagtagcgattttgatggacctgttggaatcggtcacacacgttgggcaacacacggtgtaccgaatcatgaaaactctcatccacatcaatcatcaaatggccgttttactctagttcataacggtgttattgaaaactatgaagagttaaaaggtgaatacttacaaggtgtatcattcatttcagaaacagatacagaagttatcgttcaattagttgaatacttttcaaatcaaggactttcaactgaagaagcatttacaaaagttgtgtcattattacatggttcatatgcattaggtttattagatgctgaagacaaagacacaatctatgttgctaaaaataaatcaccattattattaggtgttggtgaaggtttcaatgttatcgcatcagacgcacttgcaatgttacaagtgacaagcgaatataaagaaatccatgaccatgaaatcgttattgttaaaaaagatgaagttattattaaagatgcagatggaaacgttgtagaacgtgattcatatattgctgaaattgatgcatcagatgctgaaaaaggtgtttatgcacactacatgttaaaagaaattcatgaacaaccagcagtaatgcgtcgtattattcaagaatatcaagatgcagaaggtaacttgaaaattgatcaagacatcatcaatgatgttaaagaagcagaccgcatttacgttattgcagcaggtacaagctaccatgcaggtttagtaggtaaagaatttttagaaaaatgggctggcgtaccaactgaagtacacgttgcatcagagtttgtctacaacatgccattattatctgaaaaaccattgttcgtttatatttctcaatcaggtgaaactgcagatagccgcgccgtattagttgaaactaataaattaggtcataaatcattaacaatcactaatgttgcaggttcaactttatcacgtgaagcagaccacacattgttattacacgcgggtcctgaaatcgcagttgcatctacaaaagcatatactgcacaaattgcagtattatcaatcttgtctcaaatcgttgcaaaagagcatggtcgtgaagcagatattgatttattgagagaattagcaaaagtaacaacagcaatagaagcaattgttgacgatgcaccaattatggaacaaattgctacagatttcttagaaacaacacgcaatgcattctttatcggacgtactattgactataacgtaagtttagaaggtgcgttaaaacttaaagaaatttcttacattcaagcagaaggttttgctggtggagaacttaaacatggtacaattgccttaatcgaagaaggtacaccagttgtaggtttagcaacacaagagaaagttaatttatcaattcgtggtaacgttaaagaggtagtagcacgtggtgcacatccatgtattatttctatggagggtcttgaaaaagaaggcgacacttatgtcattcctcatgtacatgaattgttaacgccattagtatcagtggttgcattacaattaatttcatactatgcagcattacacagagatttagatgttgataaaccacgtaaccttgctaaatcagttactgtggaataa

SEQ ID NO: 406469 - DNA, 783 bp, Staphylococcus aureus
atgttaattcaattagatcaaattgggcgaatgaagcaaggaaaaacaattttaaaaaagatttcttggcaaattgctaaaggtgataaatggatattatatgggttgaatggtgctggcaagacaacacttctaaatattttaaatgcgtatgagcctgcaacatctggaactgttaaccttttcggtaaaatgccaggcaaggtagggtattctgcagagactgtacgacaacatataggttttgtatctcatagtttactggaaaagtttcaagagggtgaaagagtaatcgatgtggtgataagcggtgcctttaaatcaattggtgtttatcaagatattgatgatgagatacgtaatgaagcacatcaattacttaaattagttggaatgtttgctaaagcgcaacaatatattggttatttatctaccggtgaaaaacaacgagtgatgattgcacgagctttaatggggcaaccccaggttttaattttagatgagccagcagctggtttagactttattgcacgagaatcgttgttaagtatacttgactcattgtcagattcatatccaacgcttgcgatgatttatgtgacgcactttattgaagaaataactgctaacttttccaaaattttactgctaaaagatggccaaagtattcaacaaggcgctgtagaagacatattaacttctgaaaacatgtcacgatttttccagaaaaatgtagcagttcaaagatggaataatcgattttctatggcaatgttagagtaa

SEQ ID NO: 406470 - DNA, 858 bp, Staphylococcus aureus
atggataacgtaaaagcaatatttttggacatggatggaacaattttacatgaaaataatcaagcatcaacgtatacgaaagatgtcattaatcaattgagagagaaaggatataaagtatttttggcaacaggacgttcgcattctgaaatacatcaacttgtacctcaagattttgcggttaatggcatcattagttcaaatggaacaattggagaagtagatggagaaattatcttcaagcatggtttatcattggctcaagtgcaacaaattactaatttagctaagcgccaacaaatttattatgaggtatttccttttgaaggtaatagagtttctttaaaagaagatgaaacatggatgcgagatatgattcgtagtcaagatcctattaatggcgtaagtcatagtgaatggtcttcaagacaagatgcgcttgctggtaagatagattgggtaactaagtttcctgaaggtgaatattcaaaaatttatctattcagttctaatttagaaaaaataacagcatttagagatgaattaaagcaaaatcatgtgcaactacagattagtgtttcaaattcatcaagatttaatgcggaaacaatggcttatcaaactgataaaggtacaggcattaaagaaatgattgcacattttggtattcatcaagaagaaacgttagttattggagatagcgacaatgatagagcaatgtttgaatttggtcattatacagttgctatgaaaaatgcacgccctgaaatccaagcattaacttcagatgtaacggcatacacgaatgaagaggatggcgcagcaaaatatttagcagagcattttttagctgaataa

SEQ ID NO: 406471 - DNA, 1137 bp, Staphylococcus aureus
gtgagcgtaaatgcacgtgatttattagtattacacactaatgtaaatagattggttggagaagagatatttgctaataagtgccttgctaataatgatgttcaaattatgaattcaataaaaaaattaattgaagctgagttattaacaacgactaatgattttgaagttagtatatataaaaagacaagacctgaattacaaagtattttaaaaagttttggtataaaaacaacaggtaataaatctgacttaattaaacgtattgacgacaattttcatattattaataacttagatttaccatatgtatatataccaactaagaaaggagaagaaattttaaagaaaacagagtacttaacctcttttatacaaagttatggtgaaatttctcttgagcgtgcttattatttggttgaaaactatatagatgaaaattgcgatgataaagttgcagaaatatacaagtttgaatttcaaagaaaatatgacaatggcgagtttgattttaatcatggatataatttcgaattgaatatgttgatagatcactataaaagagatgtaaaagactacgataatgccagaaagtattcaaatatttatctttactttggtttgagagatttcttaaaaaaattaatgagtaattattcatattacgatagtaaagggaatatagatttgaacgaaatacaaaacgatctgaatagatttatcaactctagcgcttctggtatgtacgagcgattaatatataatgaaaatttatccaataatattatgtttgaattatttaaaaaggacacacaagattatagtgatttggaagaacaattgattgaaaagttcataaactatgtagtgtctaatgtaaaaaaagaaagtaggagtaatactcttatagagttatcaaaaattttagagaacggatatacaattgataaagaagaatttaaaaaagaagatgattatctttctaagtacatatttactgacatagattatttgaaaaagttagaatcaaaaataaacgttgctattgatattcgaagtggagaaattcatttggtattagatgatgatagccttgatatattaatacaaaatcaaaaatacggcaatgagttttga

SEQ ID NO: 406472 - DNA, 204 bp, Staphylococcus aureus
atgatcgtgtatcaacgaaagattaatatcgatacacttaaagaatttgggtgtgggtgtgtatatagtgaaagaataagtggtgtcaaacgtacagagcttgttaagtgtttagattatttacgagagagcgacacattagttgtctatcaacttgatcggttaggtagaacgacaaaactattaattgaattatcacaatga

SEQ ID NO: 406473 - DNA, 1092 bp, Staphylococcus aureus
ttgtttacttactttaaatcagcatttaaaaatgctaaaccacaattattaataacattgatatatgcacttatagcatttgctgtaattgcagttgtatatttacttgctaatttccagcttgctaagtatgcacaaactattgcaatttattcacaatttgggcaaaaaccaccagtagatgcatatttaaaagttatcgctgtattacttatagcagctgtagtttcactgtttgttttagttcaaatttttatcggaattacaaatgttatgaaacgagcaatgagtcatgaaaaagtaaaatttaccgatttatttattgcatttaaaaaaggtaattatttaaagagcgttctgatcggtcttgtatctatagcaatgattatcgttctttcacttctgacatcattactatacaaattattttctccagtatcagaaatgattatgaattcagtacaatcatcatatgcagatagtacacacctgattggtattgctattacaactcaaagcatcataatcattgttgttttattgattaaagcaattattacttggttattgttaatacctattttcaactttatgactagtttcgttgaatcaactaacgataaagtaaaaacacacttagctaatggatttaaagcaatgaaaaatggtcaaaaaacatttttcaaatttttcattggaatactattattaaacttaattattattttatttaaaacacctgttggttacttgatttcatttaatacgcaatcactctctcaaagtgttgcagaaaatatcataagagtttatacagtaatgacaattattttattcgttgttattcatgcaatcattttaatgggtatcgttcaatattacttaaaacgtggtcaaaaaattactaaagataaagtaaaaacagctgacaagaataaaaaagttgtcactgaaccaaaaaatacaaaagtagaaaatgataaagtgacaacatctgttgaaacaaaaacagaaaaagcacaagattcattaaatgataatacaacaaaaacaatgacttcagataaaccagaagacaatcaaccaaaataa

SEQ ID NO: 406474 - DNA, 981 bp, Staphylococcus aureus
atgtctcattcacatcatcatcatgaccatatgcatagtcatgtaactacaaataataagaaagtattgtttatatcgtttttaataatcggtctatatatgtttatcgaaatcatcggcggtctccttgctaacagcttggcattactatctgacggtatccatatgtttagcgacacattctcattaggtgttgcacttgtcgcatttatttatgctgaaaagaatgccacaactacaaaaacatttggttataaacgtttcgaagtactcgcagcgttatttaacggtgtaacgctttttgtaataagtattttgattgtttttgaagcgattaaacgtttctttgttccttctgaagttcaatcaaaagaaatgttaatcattagtattatcggtttaattgtcaatatcgttgttgcattctttatgtttaaaggcggcgacacttcacacaatttaaatatgcgtggtgcttttctacatgttatcggagacttattaggttcagttggcgccattactgcagctattttaatttgggcatttggatggacaatcgccgatcctatcgcaagtattttagtttccgttattattttaaaaagtgcttggggtatcacaaaatcttcaattaacattttaatggaaggcacaccaagtgatgttgatatagatgaagttataactactattaaaaaggattcacgaatacaaagtgtgcatgattgccatgtttggacaatttcaaatgatatgaatgcattgagttgtcatgttgttgtagaccatacattgacaatgaaagaatgtgaattattattagaaaacattgagcatgatttattacatttaaatattcaccatatgactattcaattagaaacgcctaatcacaaacatgatgaatcgattatatgttcaggaacacatagtcattcacataaccatcatgctcatcatcacgcgcatgtacattaa

SEQ ID NO: 406475 - DNA, 321 bp, Staphylococcus aureus
atgtcagaacaatattcagaaataaatacagatacattagaacgcgtaactgaaattttcaaggcattaggcgattacaatcgaatacgtatcatggaattgttatcagtcagcgaagcaagtgttggtcacatttcacatcaattgaatttatctcaatcaaatgtctcgcaccaattaaaattacttaaaagtgtgcatcttgtgaaagcaaaacgacaaggccaatcaatgatttattcattagatgacatccacgtagcaactatgttaaagcaagccatacatcacgcgaatcatcctaaagaaagtgggttataa

SEQ ID NO: 406476 - DNA, 666 bp, Staphylococcus aureus
atgaatattttggttataggtgctaatggcggtgtaggttcgttactagtgcaacaattagcaaaagaaaatgtaccatttactgctggtgttaggcaatcagatcaacttaatgcgttaaaatcacaaggtatgaaagcaattcttgttgatgttgaaaatgattcaatagagactttaactgagacgtttaaaccattcgataaagttatcttttcagtaggttctggagggaacacgggtgcagataaaacaattattgtcgatttagatggtgctgttaaatcaatgattgcgagtaaagaggccaatattaaacactatgtcatggtttcaacatatgattcgagacgtcaggcttttgatgatagcggtgatttaaagccatatacaatagctaaacattacgctgatgactatttaagacgttcaggtttgaattatacaattttacatccaggggcacttacaaatgcagcaggatctggaaagatagaagctgcacaatattttgatggtaaaggtgaaattcctagagaagatgttgcgacagtattaaaagaaattgtcacatccaatcattttaatcaccaagagtttcaaattattagtggtgatcaggacattaaagatgctttaactcaatttgaaaatgaaacggattaa

SEQ ID NO: 406477 - DNA, 939 bp, Staphylococcus aureus
atgccattatttttacaaccaattttaaaaacaaaattatggggcggtcaacgtctaagtgagtttggatatcaattagacaatgatacaactggggaatgttggtgtgtgtcagcacatccaaatggtacgagcgagattattaatggaccatatcaaggtcaaacattagaccgtatttggtcagaacatcgtgaattgtttggtgatttcccaagcaaagattttccgcttctaactaaaatagtggatgcaagagaatcactttctattcatgtgcaccctgataattcttatgcttatgagcatgaaaacgggcaatatggcaaatctgaatgttggtatattatagatgcagaagaagatgcagaaatagttatagggacattagcagagtctagagaagaagttgcgaatcatgttcaacacggaacgatagagtcgatacttagatatattaaagtaaaacctggagaattctattttattccagcaggaacagtacatactatttcttcaggaatattagcatacgaaacgatgcaatcgtcagacattacatatagactttatgatttcaatcgtcaagataatcaatataatgatagaccgttaaatattgaaaaagctttagacgttattcagtacaatgcaccattacctaatattttgcctgaaagcgaaattattgaaaaccataagtgtacacacattgtatcgaatgatttctttacattggttaaatgggaaatttctggcacgttaaattatatgaagcctagagagttctgtttagttacagtgttggaaggcgaagggcaaatgattgtcgatggtgaaattttcaaactgactactggtacaaactttattttgacttctgaagatttggatagtgtctttgaaggtgatttcacattgatgattagctatgtgtaa

SEQ ID NO: 406478 - DNA, 231 bp, Staphylococcus aureus
ttgaagcaatttctatatattgcgttagtatgtggtgtgatagcaggtcttggtgctttcttacatataccgcagtatccgagcatgacaattccacgtatagtagctattttaggaattatcagtgctatgttgacttttaaagacaagcaaatcagcgcctcattaaagtttagcgcattgttaattaatgtgctgccattatgcggtacctttgtagcttcaaattaa

SEQ ID NO: 406479 - DNA, 1374 bp, Staphylococcus aureus
atgacagcagaaacgaattatttttggttgaattgtggatataaccgttggaatcataatgaaccgttagtaggacaaacagctttatttgaatcaggcgcacattttaacccatctcaaggatttagagcgtttaaaaaggctaaagtaggagatcaagtcatcttttatcaagttcagacggatactggactacttggatgtggtgaaattattagtgttgaaacaggtgcacaaaataaaatacgtgtacagtttcgttttaatgaacaattgaaaccattaacagcagattatttaaagcgtagtgaagctttggaatttcgtataagtaatatgaaagagacattgttcaatcaaatcactgcagaagagtttgatttaataagtggtcttggtaaaggcgaaattaagataccgcgttatttctttttagctgaaactgaagaatttgaacctggaaaccaatatacgatttatacgcacacgtacaacggtattaaacgtaatggttatcatttttatactcagttagaagaaggcgacaatattattttttataatcgaacgaaaaatcaatctgtcgttggaattggagaagtatcaaagcatattcatgaaaaaccaccaattcctggtagaacaaatagtacagtgattgaagtgtcttatgagaaagacattacaccgattacattaagtacattaaataagcatcctaaattgaaaaacttatatttccttcaagaaaatgcaaaacaggctattgcaagtatgtcacaagcacagtatgatgcaattattgaaatgagcgataataatggattgaaatctccatttgaaatggttcaaaaaccagatatgcttgaaagtgaaaaagaagaagcgttaaagccatttattttacttgttgtagatcgaaaagaagaaggcttaaaagcggctaatgacttattgcaaaaagcgaatgcaaatcctgttataacaacaggtcatcctgatttttcagaagatatgctttatggcaagtatttaccaaatgaaacaggggcattatactatcgtgaagggtttattactcaattaatgcctaaaaaggataaaagttatttagttattgataattttaatcgtatagatacagacattttccaaacgtatattaatgtgttagaaggctatgaagtaacattaccacgttataataaagacggtaatatgattaaatggtcacgacaaaaagattctttctattatttcaatcctaattggcatattgtaggtattacatatgacagtttagaggaaattaaggagaaatattcagagcagtttttaaaatacacacgtatagtcaaagtcaaacatgactaa

SEQ ID NO: 406480 - DNA, 414 bp, Staphylococcus aureus
atgccaatcgtatattatgatggaaactgtatatattgttataactatgtcatttggttaattcaacatgacctaccaagaaattatcaatttgccacgttaaaaggtgaagttggccaacaattttttaaacaacatccagaagcggcaaataaaaatagtgtgattttacagaaaggtgatcgtatatattttgaatcgcaggcgattattaaactaatcacagcactacctaatcgaactaaattattgggcgtaggtttatggcttgtacctaaaccagtccgtaatttcggttatcgaatgtttgctaataatagaaatagaatgtggaaaacaacatggcaccaaccaaatgattatgaaaaatcgttctttttagatgataatgcgaaagtaaaacttactgattga

SEQ ID NO: 406481 - DNA, 444 bp, Staphylococcus aureus
atgagtaatcaacaagatgttgtaaaagaattgaatcaacaagtagcaaactggacagtagcttacacaaagctacacaatttccactggtatgtgaaagggcctaacttcttctcattacacgttaaatttgaagaattatataatgaagcaagccaatatgtagacgaattagctgaaagaattttagcggtaggaggaaaccctgtaggtacattaactgaatgcttagagcaatcaattgttaaagaagctgcgaaaggttactctgcagaacaaatggttgaagaattatcacaagacttcacaaatatctcaaaacaattagaaaacgcaatcgaaattgctggtaatgctggcgatgatgtatcagaagatatgtttataggtatgcaaacatcagtagataaacataattggatgtttaaatcttacttaagctaa

SEQ ID NO: 406482 - DNA, 711 bp, Staphylococcus aureus
atgacaaaaggtacaccacatattcaaccaaatggagtaaaaattgctaaaacagtattaatgcctggcgatccgctacgtgcaaaatatattgctgataattttttagaaaatgttgaacaatttaacgatgtacgtaacatgtttggttacactggtacatataaaggtaaagaagtttctgtaatgggttctggtatgggtattccaagtattggtatttactcatatgagttatacaacttctttgatgtagatacaatcattcgtatcggttcttgtggcgcattacaagaaaatgttaacttatacgatgttattattgcacaagctgcatcaactaattcaaattatgtagatcaatacaatattccaggtcatttcgcgcctatcgctgacttcgagttagtaactaaagctaaaaatgtcgctgaccaaatcggtgctactacacacgtaggtaacgtattatcttctgatacattttacaatgccgatccaacattcaatgatgcttggaaaaaaatgggtattttaggtatcgaaatggaatcagctggtttatatttaaatgcgattcatgctggtaaaaaagcacttggtattttcacagtaagtgatcatattttacgtgacgaagctactacacctgaagaacgtcaaaattcatttacacaaatgatggaaatcgctttagaaatcgcagagtaa

SEQ ID NO: 406483 - DNA, 663 bp, Staphylococcus aureus
atgaatagtgcaaaattgattgatcacactttattgaagcctgagtcaacacgtacgcaaatcgatcaaatcatcgatgaagcgaaagcataccattttaaatctgtatgtgtgaatccaacgcatgttaaatatgcagcagagcgactagctgattcagaggtgttagtttgtacggtaataggattcccattaggtgcatcgacaactgcgacgaaagcatttgaaacagaagatgcgattcaaaatggtgcagatgaaattgacatggtcatcaacatcggcgcattaaaagatggacgttttgatgatgtacaacaagacattgaagcagtggtgaaagctgcgaaaggtcacacagtaaaagtgattattgagacggtattgttggaccatgacgaaattgtaaaagcgagtgaattaacaaaagcggctggtgcggacttcgttaaaacttcaacaggttttgcaggtggcggtgcgactgcagaagacgttaaattaatgaaagatacagtaggtgctgatatagaagtaaaagcatcaggtggcgtacgtaatttagaagatttcaataaaatggttgaagcaggtgcgacacgtattggtgcgagcgcaggcgttcaaattatgcaaggtttagaagcagattcagattactaa

SEQ ID NO: 406484 - DNA, 1302 bp, Staphylococcus aureus
atgagaatgatagacattattgagaaaaagcgtgacggtcatacactaacaacggaagaaattaatttctttattggcggctatgttaaaggggatattcctgattaccaagcatcaagtttagcaatggcgatttatttccaagatatgaatgatgatgagcgtgcagcattaacgatggctatggttaattctggtgatatgatagatttgagtgatattaaaggtgtcaaagtagataagcactcaacaggtggtgtaggagatacaactacattggttttagcaccattagtagcagctgtagatgttcctgttgcaaaaatgagtgggcgtggattaggtcatacaggtggtacgattgataaattagaagcaattgatggttttcatgttgaaatagatgaagcaacatttgtgaaattggttaatgaaaataaagtggcagttgtaggacaatcaggaaatttaactcctgcagacaaaaaattatatgccttaagggatgttactggtactgtcaattcaataccattaattgcctcttcaattatgagtaaaaagattgctgctggtgcagatgcaattgtattagatgtaaaaactggtagcggtgcatttatgaaaacattagaagatgctgaagcattagcgcacgcaatggtacgtattggtaataatgtgggacgtaatacgatggcgattatttctgatatgaatcagccacttggacgtgcgattggcaatgcgcttgagttacaagaagcaattgatacgttgaaaggacaaggtccgaaagatttaacagaacttgtattaacattaggttctcaaatggttgtacttgcaaacaaagctgaaacgcttgaagaagcgagagcgttgctaattgaggcaattaattcaggtgcagcattagaaaaattcaaaacatttattaaaaaccaaggtggcgacgaaactgttattgaccatccagagcgtttgccacaagctcaatatcaaattgaatataaagctaaaaaatcaggttatgtgactgaattagtctctaacgatataggtgtcgcttcgatgatgttaggagcgggacgtttaacaaaagaggatgatattgatttagcggttggtattgttttaaataaaaaaattggtgataaagtagaagaaggagaatcattattaacgattcacagtaatcgccaagatgtagacgatgttgttaaaaaattagattcaagcataacaattgctgatcatgttgtatcgcctacattaattcataaaatcattacagaatag

SEQ ID NO: 406485 - DNA, 351 bp, Staphylococcus aureus
ttgaacatactaagatatttattaggaataggttttagtgtaataggtgtattgcattttacacgagaacgacaatttagaaatatcataccgaaatgtttgccacttcgaaaaacagcggttcttgttacaggaatctttgagatattatttggacttgcacttttaattaaaagaccatctcaatgcttgaaaaatacaatcaatctattcttgctagctgtattcccagctaatatctatatggcagttaaaaagttacctttaggagataaacaattgccaacatggcaactatatttaaggttacctatgcagttcgtgttaatgggactaattaagaaattatag

SEQ ID NO: 406486 - DNA, 471 bp, Staphylococcus aureus
atgacaaaaatgaatgttgaaagtttcaatttagatcatactaaggtggttgccccatttattagattagcgggaacgatggaaggattaaacggagatgtcattcacaaatacgacattcgtttcaaacaaccaaacaaagaacatatggatatgcccggactacattcattagaacatttaatggctgaaaatattagaaatcatagtgacaaagttgttgatttaagtcctatgggttgccaaactggtttctatgtatcatttattaatcatgataattatgatgatgtattaaatattgttgaagcaactttaaatgatgtgctaaatgctactgaagtgcctgcttgtaatgaagtacaatgtggctgggcagcaagtcattcattagaaggtgctaaaactatcgctcaagcatttctagacaaacgaaacgaatggcatgatgttttcggtacaggaaaataa

SEQ ID NO: 406487 - DNA, 1185 bp, Staphylococcus aureus
atgagtgaaaaacaacaaattctcgattatatagaaacaaataaatatagttatatcgaaatcagtcatagaattcatgaacgtcctgaacttggtaatgaagaaatatttgcgtctcgaactttaatagatcgtttgaaagagcatgattttgaaattgaaaccgagattgctgggcatgcaactgggtttatagcgacatatgattcaggacttgacgggccagctataggttttttagcagaatacgatgctttgccaggattgggtcatgcttgtggtcataatatcattggaactgcaagtgttcttggtgcaattggtttgaagcaagtgattgaccaaattggtggtaaagtagtcgttcttggatgtccagctgaagaaggtggggaaaatggtagcgctaaagcttcttatgtcaaggctggtgtgattgatcaaatagacattgccttaatgattcatccgggaaatgaaacttataaaacgattgatactttggcagtggatgttttagatgttaaattttacggaaaaagtgctcatgcctctgaaaatgcagatgaagcgttaaatgcattagacgctatgattagttattttaatggtgtagcacaactacgacaacatattaaaaaagatcaacgtgtgcatggtgtgattttagatggcgggaaagcagctaatattattccagactatacacatgctcgtttttatactagagcaatgacgcgtaaagaattggatatattaacagaaaaagtaaatcaaatcgcacgtggagctgcgatacagactggttgtgattatgaatttggtcgaattcaaaacggtgtgaatgaattcattaaaacgccgaaattagatgatttatttgctaaatatgctgaagaagttggtgaagcagttattgatgatgattttggttatggctctacggatacagggaacgtaagtcatgttgtgccaacaatacatcctcatattaaaataggatcacgtaatttagtaggacatacgcatagatttagagaagcggctgcgagtgtacatggtgatgaagcattaattaaaggcgctaaaataatggcgttgatggggttagagttaattacaaatcaagacgtttatcaagacattattgaagagcatgcgcatttgaaagggaatgggaagtaa

SEQ ID NO: 406488 - DNA, 1194 bp, Staphylococcus aureus
atgacaaataatggtaatgagccgaacttaacgttaagtgatttatatgacaaagatgttgtctatacgtcaagaccttcgtatatatcgaatccatggttgaaaccggacgaacatcaatctaattttttaactggtagggagttattaatagcaaatcaattacctgttattgttcacgaagctagtgcgacagacaaattgcatcagctatttcaagttattggtaaggaagtaccgaactcaatttatacatttaacaatcagcaatcttacgaaaacttgatcaaacaattggcacataaggaaaataaaaagatttattttcaatatattcatgatgaaacaatcttgaatcagcaatattatgcattagataaaacgttatttgttgctttaaataataaagcaagaatacctgaatggacaaatgggaagtttttaccaaaaagaaaagttgtaaaaattgagcaattcgaaaacgagattaagaattgggaattcccgttagtaattaagccgggagatgatcttccgacagcaggtggctatggcgttatgatttgttatcatgatgcagatttacaaaaagcgataacgcgtattaaagaggcaactgctgaaacgaattcgcttattatcgaacagaagattgaagaaaaagcgaattattgcgttcagtttgcatactcggaatcgctaggcattcaatatcttggtgcggcaacgcaattaacggataagtacggattttataacggaaatgaaaatactactaatgtaccagagcacgttatagaagcaggtagacaaattatggaaaacggtgtgaatcaaggattctttggtgtagctggttttgacctactcgtcgatgaggatgataacgtttatgcgattgatttaaactttagacaaaatggttcaacgagcatgttattacttgctaacgagttgaattcaggatatcaaaagttttatagttatcattcaaaaggtgataacacacatttcttcaatacgattttgaaatatgtcaaagaaggtagtttatacccgttatcttattatgatggtgattggtacggtgaagataaagttaaatcaaggtttggctgtatttggcatggtgattcaaaagaaacagtactggagaatgaacgcgcatttttagctgaacttgaacactattag

SEQ ID NO: 406489 - DNA, 672 bp, Staphylococcus aureus
atgtcttataaagcatatccattctttagagatatattaataaatgaatgtatttatttcgcctctaaaaataaaaaactagtacgcctaaattataaaagtgaagcgtatgtaggcgtttggacagaagaaagtgtggccgtatcatttttaacaagtcgtgatattccatttgataaagttgtaaaaatggacgttgatcgttttgctacttatgaattagatgaattgtttgatgaacaagaccatattattatgaatcaaacaatggaagaagaagggcatctactaaacgttgtagctgttacacaagaagtgatgacggaattagataaaattagaatcaaagaatttgtccaagatgtagcgaaatatgatgaagtatacggcttaactaaaaaaggtagtaagcagtttattctcattagtgaaaatgatagcgacgaaaaaaagccgcatattatgcctgtatggagtattaaaaacagagcgttaaaagttcgagatgaagattttgaagagtgtgatttaattacgattgaaggttctgttttcggagaatggctagatgaacttagagatgatcataaagccgttgcgatagatttaaaaactggcgtggttggtacaattgtttcagcgcaaaaattgtctaatgaacttacattttaa

SEQ ID NO: 406490 - DNA, 804 bp, Staphylococcus aureus
atgaaagttggcattgacgctggcggtacactaattaaaatcgttcaagagcaagataaccaacgtacttttaaaactgaattaactaaaaatattgatcaagttgtggaatggttaaaccaacagcaaattgaaaaattatgcttaactggaggtaatgcaggtgtcattgctgaaaacatcaacattcctgcacaaatttttgtagagtttgatgctgcatctcaaggactaggtattttgttaaaagagcaaggccatgacttagcagattatatttttgcaaatgttggtaccggtacgtcactacattatttcgacggccaatcacaacgtcgtgtaggcggtatcggtacaggtggaggcatgattcaaggactcggttatttactaagtcaaatcactgattataaacagttaactgacatggcacaacacggtgatcgtaacactatcgatttaaaggttagacatatttataaagataccgaaccacccattcccggtgatttaacagcagctaattttggtcatgtactacatcatttagatgctgattttacacctagcaataaattagcagccgttattggtgtcgttggcgaagttgttacgacaatggccattactgttgcacgtgaatttaaaactgaaaatatcgtttatatcggttcttcatttcataataacgctttattacgcaaagttgtggaagattatactgtgttacgcggttgcaaaccgtactatgttgaaaacggcgcattttcaggtgctattggtgcattatatttagaaaaatag

SEQ ID NO: 406491 - DNA, 861 bp, Staphylococcus aureus
atggctaaagaactttgttttgaaggtatcactttaaaagcatttgatgaacaatatcgttcagcaattaatgattttgacttgaatgaaagacaacaaatatattcatctttacctaaagaagttattgatgatgcaattaatgatgctgataggattgctaacgtagcaataaacgataaaaatgaagtggtgggcttttttgtattacatcgttactatcagcatgaaggttatgatacacctgaaaatgtcgtttatattcgttcattatcgattaatgaaaaatatcaaggttttggatatggcacgaaaataatgatgtcattgccgcaatatgttcaaggtgtatttcctgattttaatcatctatatctagtagtagatgcggaaaatgacaatgcttggaacctatacgaacgtgctggattcatgcatacagcgactaaagaagaaggaccaattggcaaagaacgactatattacttggacttagattcaaaacatgtttcatcattaaagcttgaagaagaaagtcgttcagaagtgaccaatgtacatatcattaatttaatgattgatggccaaaaggttggctttatcgcattggagcagattggtgaacgcatgaacattgctgctattgaagtggataaatcatatcgctttaatggtattggttcaagtgctctgcgacaattgccaacttacttaagaaaaaactatgacaaccttaatgtgattacgatgattctgtttggagagaataatgattttaaaccattatgtttaaatagtaatttcgttgaaatcgaacaaactgatgattatgtcgttttcgaaaaatatttaaattactaa

SEQ ID NO: 406492 - DNA, 531 bp, Staphylococcus aureus
atgaaaattcaagattatacaaaacaaatggttgatgaaaaatcatttattgatatggcttatacattattgaatgataaaggcgaaacaatgaacttatatgatatcatcgatgaatttagagcgttaggtgattatgagtacgaagaaattgaaaatcgtgttgtacaattttacacggatttaaacacagatggtcgttttttaaatgttggagaaaatttatggggattacgtgattggtattcggtagatgatattgaagagaaaatcgcaccaactattcaaaaattcgatattctggatgcagatgatgaagaagatcaaaacttaaaattattgggcgaagatgaaatggatgacgacgatgatattccagctcaaacagatgatcaagaagaactaaatgatccagaagatgagcaggttgaagaagaaatcaatcattcggatatagtcattgaagaagatgaagatgaactagacgaagacgaagaagtgtttgaagacgaagaagacttcaacgattaa

SEQ ID NO: 406493 - DNA, 1611 bp, Staphylococcus aureus
atgacaaaatttatttttgtaacaggtggcgtagtttcatcattagggaagggtattacagcatcttctctaggtagattattaaaagatagaggtctaaatgtaacaattcaaaaattcgatccatacttaaatgttgacccaggtacaatgagtccttatcaacatggtgaagtattcgtaacggatgatggtgcagaaactgacctagacttaggacattacgaaagatttattgatattaatttaaacaagttttcaaatgtgacagccggtaaagtgtattcacacgtattgaaaaaagaacgtcgtggtgattacttaggcggaacagttcaagttattccgcatattacaaatgaaattaaagaacgtttattacttgcaggggaaagtacgaatgcagacgttgttatcactgaaattggcggtacaacaggtgatattgagtcattaccgtttattgaagcgattcgtcaaattcgtagcgatttaggtagagaaaatgttatgtatgttcactgtacattactgccttatattaaagctgctggagaaatgaaaacgaagccaacacaacatagtgttaaagaattacgaggcttaggtattcaaccagacttaatcgttgtaagaactgaatatgaaatgacacaagatttaaaagataaaattgcattattctgtgacattaataaagaaagtgttattgaatgtcgtgatgcagactctttatacgaaattccattacaattaagccaacaaaatatggatgatatcgttattaaacgtttacaattaaacgcgaaatatgaaacacagcttgatgaatggaaacagttgttagatatcgttaataatttagatggtaaaattacaattggtttagtaggtaaatatgttagcttacaagatgcatatttatcagttattgaatcattgaaacatgctggatatccttttgccaaagatattgacattagatggattgattcaagtgaagtaacagatgaaaatgcagccgaataccttgcagatgtcgacggtattttagtaccaggtggatttggtttccgtgcaagtgaaggtaaaattagtgcaattaagtatgctagagaaaacaatgtaccattctttggtatttgtttaggaatgcaacttgcaacagttgaattttcaagaaacgtattaggccttgaaggcgcacattcagctgaattagacccagcaacaccatatccaattatagatttattaccagaacaaaaagatatcgaagatttaggtggtacattacgcttaggcttatatccatgttcaattaaagaaggcacattggcacaagatgtttatggtaaagcggaaattgaagaaagacatcgtcatcgttatgaatttaataatgactatagagaacaattagaagcaaatggtatggtgatttctggtacaagtccagatggacgtttagtagaaatggtagagattccgacaaatgatttctttattgcttgtcaattccacccagaattcttatctagaccaaatcgtccgcacccgatttttaaatcatttattgaagcttcattaaaatatcaacaaaataaataa

SEQ ID NO: 406494 - DNA, 522 bp, Staphylococcus aureus
atgtcaaaaatcttaaacacacaactaataggtatctttaataggctagaaaaacaatctttagaaattcaaatggccgcccaatgtttaattcaagcaattggtggcgaaggttatgtttatgtaaaaggttatgatgatttacagtttttcgaaagtttcattctacatagtgatgagcgtttaaaatctagccgaaaacttgacgctattaaagactttaaagaaattgactcaactgatcgtgtattattattcgcaccattttataatgatcaagttgcattagatattcaaaaacttatcgacttagatatcgatgtggtcttaataagcaacaaacctaaaacagatgatttccctgatcatctcgtacattttatcgatttatctacaccaagacctatagtctacactgaagattacgataagattgtccaaccacatgcgatggcattgaattatgtatactatgacatttatacacaaatgattgaaatgacaagagacttagaattataa

SEQ ID NO: 406495 - DNA, 861 bp, Staphylococcus aureus
atgcctttagtttcaatgaaagaaatgttaattgatgcaaaagaaaatggttatgcggtaggtcaatacaatattaataacctagaattcactcaagcaattttagaagcgtcacaagaagaaaatgcacctgtaattttaggtgtttctgaaggtgctgctcgttacatgagcggtttctacacaattgttaaaatggttgaagggttaatgcatgacttaaacatcactattcctgtagcaatccatttagaccatggttcaagctttgaaaaatgtaaagaagctatcgatgctggtttcacatcagtaatgatcgatgcttcacacagcccattcgaagaaaacgtagcaacaactaaaaaagttgttgaatacgctcatgaaaaaggtgtttctgtagaagctgaattaggtactgttggtggacaagaagatgatgttgtagcagacggcatcatttatgctgatcctaaagaatgtcaagaactagttggaaaaactggtattgatgcattagcgccagcattaggttcagttcatggtccatacaaaggtgaaccaaaattaggatttaaagaaatggaagaaatcggtttatctacaggtttaccattagtattacacggtggtactggtatcccgactaaagatatccaaaaagcaattccatttggtacagctaaaattaacgtaaacactgaaaaccaaatcgcttcagcaaaagcagttcgtgacgttttaaataacgacaaagaagtttacgatcctcgtaaatacttaggacctgcacgtgaagccatcaaagaaacagttaaaggtaaaattaaagagttcggtacttctaaccgcgctaaataa

SEQ ID NO: 406496 - DNA, 1260 bp, Staphylococcus aureus
atggctcaagaggtaataaaaataagaggtggacgcacactaaatggggaagttaatatcagtggcgcgaaaaacagtgctgtagctatcattcctgcaacattattagctcaaggacatgtgaaattagaagggttaccgcaaatctctgatgttaaaactttagtgagtttattagaagatttaaatattaaggcatcactaaatggtacggaattagaagttgatacaactgaaatacaaaatgctgcattaccaaataataaagttgaatcattacgtgcttcatactatatgatgggtgccatgttaggtagatttaaaaaatgtgtgattggtttaccgggaggatgtccacttgggccacgtccaattgatcaacatattaaaggatttaaagctttaggtgctgaaattgatgaatcaagtacgacatcaatgaaaatcgaagctaaagagttaaaaggtgcacatatttttctagatatggttagcgtaggtgcaacaattaacattatgctagctgcagtttatgcaacaggacaaactgtaattgaaaatgctgctaaagaaccggaagtagttgatgttgctaacttcttaacaagtatgggagctaatattaagggagcgggtacatcaacaattaaaatcaatggcgtcaaagaattacatggttctgagtatcaagttatacctgatagaattgaagcaggcacatatatgtgtatcgctgcagcatgtggagaaaatgttatattaaataatattgttccgaaacatgtagaaacattaactgctaaatttagtgaattaggtgtgaatgttgatgtaagagacgaaagaattcgcatcaataataatgcgccatatcaatttgttgatattaaaacactagtatatccaggttttgctactgatttgcaacagcctattacaccattattatttatggcaaatggtccttcatttgtaactgatacgatttatccggagcgttttaaacatgttgaagaattaaagcgcatgggtgcaaatattgaagttgacgaaggcacagcaacgataaaaccatcaacattacatggtgctgaagtttatgctagcgatttaagagcaggagcttgtttaattattgctggtttaattgctgagggtgtaactacaatttacaatgttaaacatatttatagaggttatacagatattgtagaacacttaaaagctttaggtgcagatatttggacggaaactgtatag

SEQ ID NO: 406497 - DNA, 336 bp, Staphylococcus aureus
atggaagtatgtccgtatctcgaagaaacttttaaaatacttggtagaagttggaatggattaatcattaattatctctcaagatgtaatgactgttcagcacacttttccgatatgaaaagagatttgaaaacaataacaccacgtgctttaagtcttaagttgtcagagcttgcacaatgggagttagttgagaagcaaatcatttctacgagtccagtacaaattatttatgtgctaactgaaaaaggtaaagcgttagcagaggctttacatccaattgaagcatgggcgcaatcatatgtcgatttaacagatcaacgtactgctaaataa

SEQ ID NO: 406498 - DNA, 1428 bp, Staphylococcus aureus
atgagagactacacaaagcaatacattaatggcgaatgggtagaaagtaatagtaatgaaacgatagaagttataaatccagcaaccgaagaagtaatcgggaaagttgctaaaggtaataaagctgatgttgataaagccgtcgaggcggcagacgatgtttatttagagttccgtcatacatctgtgaaagaaagacaagcgttattagataaaattgtaaaagaatatgaaaacagaaaagacgatattgtacaagctattacggatgaattaggtgctcctttatcattatctgagcgtgtccattatcaaatgggactaaaccattttgttgcagcgagagacgcattagataactacgaatttgaagaacgccgcggagatgatttagttgttaaagaagcaatcggtgtatctggattaattacaccgtggaacttccctacaaaccaaacatcattaaaattagcagcagcatttgcggctggtagtccagttgtacttaaaccatctgaagaaacaccatttgcagctgttattttagctgagatttttgataaagtcggtgttcctaaaggtgtatttaaccttgttaatggtgatggtgctggtgttgggaatcctttatctgaacatcctaaagtacgcatgatgtcatttacaggatcaggccctactggttctaaaattatggaaaaagccgctaaagattttaaaaaggtatcattagagcttggtggcaaatcaccatatatcgtcctagatgacgtagatattaaagaagcggctaaagcaacaacaggcaaagttgttaataatactggtcaagtatgtacagctggtacacgtgttttagtgcctaacaaaattaaagatgcattcttagctgaattaaaagaacaatttagccaagtgcgtgtcggtaatccaagagaagatggtacacaagtaggccctatcattagtaaaaaacaatttgatcaagtacaaaattatattaataaaggtattgaagaaggtgctgaattattttatggtggtcctggtaaaccagaaggacttgaaaaaggatactttgcacgtccgacaatttttattaatgtagataatcaaatgacgatagcacaagaagaaatttttgggccagtaatgtcagttatcacttataacgatttagatgaagcgattcaaattgcaaatgatacaaaatatggtttggcaggatatgttattggtaaggacaaagaaacattgcataaagtagctcgttctattgaagcaggtacagtagaaataaacgaagcaggtagaaagccagatttaccatttggtggctataaacaatctggtttaggtcgtgaatggggcgattatggtattgaagagttcttagaagtgaaatctatagctggatattttaaataa

SEQ ID NO: 406499 - DNA, 1317 bp, Staphylococcus aureus
atgcctgaaagagaacgtacatctcctcagtatgaatcattccacgaattgtacaagaactatactaccaaggaactcactcaaaaagctaaaactcttaagttgacgaactatagtaaattaaataaaaaagaacttgttctagctattatggaagcacaaatggaaaaagatggtaactattatatggaaggtatcttagatgatatacaaccagatggttatggttttttaagaacagtgaactattctaaaggggaaaaagatatttatatatctgctagccaaattcgtcgttttgaaattaaacgtggggataaagtaactgggaaagttagaaaacctaaagataacgaaaaatattatggcttattacaagttgactttgtcaatgaccataacgcagaagaagtgaagaaacgtccgcatttccaagctttgacaccactttatccagatgagcgtattaaattagagacagaaacacaaaattattcaacgcgcatcatggatttagtaacaccgattggtttaggtcaacgtggtttaatagtggcgccacctaaagcaggtaaaacatcgttattaaaagaaatagcgaatgcaatcagtacgaacaaaccagatgcaaagctatttattttgttagttggcgagcgtcctgaagaggtaacagatttagaacgctcagtagaagctgctgaagtcgttcattcaacgtttgacgaaccaccagaacaccatgttaaagtagctgaattattacttgaacgtgcaaagcgtttagtagaaattggggaagatgtcattattttaatggattctataacgagattagcacgcgcttataacttagttattccaccaagtggtcgtacattatcaggtggtttagatcctgcatctttacacaaaccaaaagcattcttcggtgcagcgagaaatattgaagcgggtggaagtttaacaatacttgcaactgcattagttgatacgggttcacgtatggacgatatgatttacgaagaatttaaaggaacaggtaacatggagttacatttagatcgtaaattgtctgaacgtcgtatcttccctgcaattgatattggcagaagttcaacgcgtaaagaagaattgttgataagtaaatctgaattagacacattatggcaattaagaaatctattcactgactcaactgactttactgaaagatttattcgcaaacttaaaaggtctaagaataatgaagatttcttcaagcagctacaaaagtctgcagaagaaagtactaaaacgggtcgacctataatttaa

SEQ ID NO: 406500 - DNA, 255 bp, Staphylococcus aureus
atgaaacaaggaattcatcctgagtatcaccaagtaatctttttagatactactacaaacttcaaattcttaagcggttctacaaaaacatcttcagaaatgatggagtgggaagatggaaaagaatacccagttattcgtttagatatttcatctgattcacatccattctacactggacgtcaaaaattcgctgctgcggatggacgtgtggaacgtttcaacaaaaagtttggtcttaaatcaaacaactaa

SEQ ID NO: 406501 - DNA, 600 bp, Staphylococcus aureus
atgtatgaaacttaccattccggttggatagaatgtattacaggtagtatgtttagcggtaaatccgaagaactaataagacgtctaagaaggggtatatacgctaaacaaaaagtcgttgtatttaaaccggcgattgatgatcgatatcataaagaaaaagtggtctctcataatggtaatgccattgaagcgattaatatttctaaagcaagtgaaattatgacgcacgacttaactaatgttgatgttataggaatagacgaagtgcaattttttgacgatgaaattgtaagtatagtagaaaaactatcagcagatggacaccgtgttattgttgctggattagatatggattttaggggcgaaccgttcgaaccaatgcctaaattgatggctgtcagtgaacaagtaacgaaacttcaagcagtttgtgctgtttgtggttcttcatctagtagaacgcaacgattaataaatggtaaaccagctaaaatcgatgatccgattatcttagtaggtgccaatgaaagttatgagccacgttgtcgcgcgcaccatatcgtagcacctagtgataataataaggaggaattataa

SEQ ID NO: 406502 - DNA, 1077 bp, Staphylococcus aureus
gtgtttgatcaattagatattgtagaagaaagatacgaacagttaaatgaactgttaagtgacccagatgttgtaaatgattcagataaattacgtaaatattctaaagagcaagctgatttacaaaaaactgtagatgtttatcgtaactataaagctaaaaaagaagaattagctgatattgaagaaatgttaagtgagactgatgataaagaagaagtagaaatgttaaaagaggagagtaatggtattaaagctgaacttccaaatcttgaagaagagcttaaaatattattgattcctaaagatcctaatgatgacaaagacgttattgtagaaataagagcagcagcaggtggtgatgaggctgcgatttttgctggtgatttaatgcgtatgtattcaaagtatgctgaatcacaaggattcaaaactgaaatagtagaagcgtctgaaagtgaccatggtggttacaaagaaattagtttctcagtttctggtaatggcgcgtatagtaaattgaaatttgaaaatggtgcgcaccgcgttcaacgtgtgcctgaaacagaatcaggtggacgtattcatacttcaacagctacagtggcagttttaccagaagttgaagatgtagaaattgaaattagaaatgaagatttaaaaatcgacacgtatcgttcaagtggtgcaggtggtcagcacgtaaacacaactgactctgcagtacgtattacccatttaccaactggtgtcattgcaacatcttctgagaagtctcaaattcaaaaccgtgaaaaagcaatgaaagtgttaaaagcacgtttatacgatatgaaagttcaagaagaacaacaaaagtatgcgtcacaacgtaaatcagcagtcggtactggtgatcgttcagaacgtattcgaacttataattatccacaaagccgtgtaacagaccatcgtataggtctaacgcttcaaaaattagggcaaattatggaaggccatttagaagaaattatagatgcactgactttatcagagcagacagataaattgaaagaacttaataatggtgaattataa

SEQ ID NO: 406503 - DNA, 837 bp, Staphylococcus aureus
atggtgaattataaagaaaagttagatgaagcaattcatttaacacaacaaaaagggtttgaacaaacacgagctgaatggttaatgttagatgtatttcaatggacgcgtacggactttgtagtccacatgcatgatgatatgccgaaagcgatgattatgaagttcgacttagcattacaacgtatgttattaggagagcctatacagtatatagttggctttgcctcattttatggtagaacgtttgatgtaaactcaaattgtttgataccaagacctgaaactgaagaagtaatgttgcatttcttacaacagttagaagatgatgcaacaatcgtagatatcggaacgggtagtggtgtacttgcaattactttgaaatgtgaaaagccggatttaaatgttattgctactgatatttcacttgaagcaatgaatatggctcgtaataatgctgagaagcatcaatcacaaatacaatttttaacaggggatgcattaaagcccttaattaatgaaggtatcaagttgaacggcttgatatctaatccaccatatatagatgaaaaagatatggttacgatgtctccaacggttacgagattcgaaccacatcaggcattgtttgcagataaccatggatatgctatttatgaatcaatcattgaagatttacctcacgttatggaaaaaggcagcccagttgtttttgaaattggttacaatcaaggtgaggcacttaaatcaataattttaaataaatttcctgacaaaaaaatcgacattattaaagatataaatggccacgatcgaatcgtctcatttaaatggtaa

SEQ ID NO: 406504 - DNA, 1047 bp, Staphylococcus aureus
ttggatactaaaatttgggatgttagagaatataatgaagatttacagcaatatcctaaaattaatgaaataaaagacattgttttaaacggtggtttaataggtttaccaactgaaacagtttatggacttgcagcaaatgcgacagatgaagaagctgtagctaaaatatatgaagctaaaggccgtccatctgacaatccgcttattgttcatatacacagtaaaggtcaattaaaagattttacatatactttggatccacgcgtagaaaagttaatgcaggcattctggccgggccctatttcgtttatattgccgttaaagctaggctatctatgtcgaaaagtttctggaggtttatcatcagttgctgttagaatgccaagtcattctgtaggtagacaattattacaaatcataaatgaacctctagctgctccaagtgctaatttaagtggtagaccttcaccaacaactttcaatcatgtatatcaagatttgaatggccgtatcgatggtattgttcaagctgaacaaagtgaagaaggattagaaagtacggttttagattgcacatcttttccttataaaattgcaagacctggttctataacagcagcaatgattacagaaatacttccgaatagtatcgcccatgctgattataatgatactgaacagccaattgcaccaggtatgaagtataagcattactcacccaatacaccacttacaattattacagatattgagagcaaaattggaaatgacggtaaagattggtcttctatagcttttattgtgccgagtaataaggtggcgtttataccaagtgaagcgcaattcattcaattatgtcaggatgacaatgatgttaaacaagcaagtcataatctttatgatgtgttacattcacttgatgaaaatgaaaatatttcagcggcgtatatatacggctttgagctgaatgataatacagaagcaattatgaatcgcatgttaaaagctgcaggtaatcacattattaaaggatgtgaactatga

SEQ ID NO: 406505 - DNA, 420 bp, Staphylococcus aureus
atgaagattttattcgtttgtacaggtaacacatgtcgtagcccattagcggaaagtattgcaaaagaggttatgccaaatcatcaatttgaatcaagaggtatattcgctgtgaacaatcaaggtgtttcgaattatgttgaagacttagttgaagaacatcatttagctgaaacgaccttatcgcaacaatttactgaagcagatttgaaagcagatattattttgacgatgtcgtattcgcacaaagaattaatagaggcacactttggtttgcaaaatcatgttttcacattgcatgaatatgtaaaagaagcaggagaagttatagatccatacggtggaacaaaagaaatgtatgtacatacctatgaagaacttgtaagtttaattttaaaattaaaagatattatttgctag

SEQ ID NO: 406506 - DNA, 525 bp, Staphylococcus aureus
atgaaagatttgacaatgttattagatgaattaaaagatatgtccttttttaataaaggagatatatgtttaattggatgttcaacatcggaagtcattggcgaaaaaatagggactgtcggttcgatggaagttgcagaaactatttttaatgcattagatgttgtgagtaaagagacaggcgttacttttgcttttcaaggatgtgaacatatcaacagagcgataacaatagaaaaatctcagtataatccattaacaatggaagaagtttccgtcgttccagatgtacatgctggagggagtttggcaacatacgcttttcagcatatgaaggatccgatcgtggtcgaacatattactgttccttgtggaattgatattggtcaaacgttaataggcatgcatattaaacatgtatgtgtacctgtaaggacctcagtaaagcaagtaggacaggcaattgtaactattgccacatctaggccgaaaaagattggtggcgaacgtgctaaataccaataa

SEQ ID NO: 406507 - DNA, 1239 bp, Staphylococcus aureus
atgtcttatatcaccaagcaagataaagttatcgcagaagcaatcgagagagaatttcagagacaaaatagcaacatagagttaatcgcatcggaaaattttgtatcggaagcggttatggaagcacaaggttcagtgttgactaataagtatgctgaaggctatccaggacgccgatattatggtggctgtgagtttgtagatgttactgaaagcatcgcaattgatcgtgctaaagcattgtttggagctgaacatgtcaatgttcaaccacattcaggttcacaagcgaacatggctgtttacttagttgcattagaaatgggcgacacagttttaggtatgaatttgagtcatggtggtcacttgacacatggagcgcctgttaattttagtggtaaattctacaatttcgttgaatatggagtagataaagacacagaacgaatcaattatgatgaagttcgtaaattagcgttagagcataagcctaagcttattgtggcaggagcatcagcatattcaagaacaattgacttcaaaaagtttaaagaaatcgcagatgaagtaaacgctaagttaatggtagacatggcacatattgcaggattagtagcggcaggtttacatccaaatccagtagaatatgctgattttgtaacaactacaacacacaaaacattacgcggaccacgtggtggtatgattttatgtaaggaagaatataaaaaagacatagataaaacaattttccctggtattcaaggtggacctcttgagcatgttattgcagcaaaagcagttgcttttggagaagcgttagaaaataatttcaaaacgtatcaacaacaagtggttaaaaacgcaaaagttcttgcagaagcattaattaatgaaggatttagaattgtttctggcggtacagataatcacttagtagctgttgatgtaaaagggtctataggacttactggtaaagaagctgaagagactttagattcagttggtatcacatgtaacaaaaataccattccgttcgatcaagaaaaaccttttgtaacgagtggtatacgtttaggtacacctgctgcaacaacgcgtggatttgatgaaaaagcttttgaggaagttgcaaaaatcatcagtttagcattgaaaaatagtaaagatgaagaaaaattacaacaagctaaagaacgcgttgcgaaattaacagctgaatatcctctatatcaataa

SEQ ID NO: 406508 - DNA, 630 bp, Staphylococcus aureus
atgagtaaagtacacgttttcgatcatccattaattcaacacaaactaagctatattagagatgtaaatacaggtactaaagaatttagagaacttgtagacgaagttggtatgttgatggcatatgaagtaactagagacttagagcttcaggatgttgatattgaaacgcctgtaactaaaatgacggctaaacgattagctggtaaaaaattagctatcgttccaattttaagagctggtttaggtatgactgatggtattttaagtttagtacctgcagccagagttggacatatcggtttatatcgagatcccgaaacattaaaggctgtagagtattttgctaagttacctcaagatattactgaaagacaaatcattgttgttgatcctatgttagcaacaggcgcatcagcaattgaagctattacttcattgaagaaacgtggcgctaaaaatattcgcttcatgtgtttaattgcagcaccagaaggcgtagaaaagatgcatgaagcacatccagatgtagatatttatattgctgcacttgatgaaaagctaaatgacaaagcatatatcacaccagggttaggcgacgctggagatagattgtttggtactaaatag

SEQ ID NO: 406509 - DNA, 1128 bp, Staphylococcus aureus
atgaaaaagattatgaccatatttggaacaagacccgaagccataaagatggctcctttagttaaagctttggaacaagaaaaaatgctcgagccaattgttgttgttacagcacagcatagagaaatgcttgattcagtattaagtacctttgaaatcaaaccaaaatacgatttgaatattatgaaatcaggacagacactttctgagataacttctaaatcaatcactcaattagaacaagtgattcaattagaaaaaccagacatggtacttgtacatggtgatacgatgacgacatttgcaggtggtttagcggcattttataaccaagtgccgattggacacgttgaagcagggcttagaagttatgataaatattcaccttttccagaagaggtgaatagacaattagttggtgtattagctgacttacattttgcacctactaaaaatgctgcatcgcatttgttaagtgaagggaaatattcagaaagtgttgttgtcactggtaatactgcgattgatgctatgaaatatacagttgatgacaattataaatctaacatcatggataaataccatgacaaaaaattcattcttatgacagcacaccgacgagaaaatatcgggaaacccatggaaaatatatttaaagcggttagacgcttaatagatgagtatactgatttagcactggtatatccaatgcataaaaacccgaaagttcgagaggtggctcaaaagattttaggtagtcatgacagaattgaattgattgaacctttggacgtagtagatttccataattttgctaaaaaatcttattttattttgacagattcaggtggaattcaggaagaagcgccatcatttaataagccagttttagttttgcgaagtgttacagaacgtcctgaaggtgttgaagctggcacattaaaagtcattggaacaaataagcaaaatgtgtatcaagctgcaaaagaattaatcgatgatgagagattatatcatcaaatgtctgaagcatctaatccttacggtgatggatttgcttcagaaagaatagttaatcatattaagtattatttgaatttaatcactgaaaaaccaagcgatttctga

SEQ ID NO: 406510 - DNA, 354 bp, Staphylococcus aureus
atgagtcgtttctacaacatttttaaacagttcattcaatattatttttatctaataataatattgggaggattatacctttatacacaccatgcatttatcttaggattaatcattggtgttactggttctgcaatcaacacatgtatttttgaatgctatttagctaaagctaaaagaccagacactatgcatatttcaactggaaatatgtggcgatacttagttgcaattattgcctgtatgatttggtaccttaataaagcgcatgtaagtatcatcggtataattattggtttaatgatttcatatgttgtagttatcatacgtcctttactaaaggtgagcaaataa

SEQ ID NO: 406511 - DNA, 729 bp, Staphylococcus aureus
atggatcacaaatccccgctcgtgagttggaatttattcggttttgatatcgttttcaatttatcaagtatattgatgatacttgttacggcgtttcttgtttttctacttgctatcatttgtacgcgtaatttgaaaaaaagaccaactggcaagcaaaatttcgttgaatggatttttgatttcgtgaggggaatcattgaaggtaacatggcttggaaaaaaggtggtcaattccacttcttagcagtaacgctgattctgtacatttttatagctaatatgttaggtcttccgttttctatagtaacgaaagatcacacattgtggtggaaatcaccgacagctgatgcaacagtgactttaacgttgtctacaacgataatactgttaactcacttttatggaattaaaatgcgtggtacgaaacaatatcttaaaggttatgtacagccgttttggccattggcaattattaatgtttttgaagagttcacttcaacattaacgcttggtctgcgtttgtacggtaacatatttgcaggtgagatactattaacattacttgctggcttattctttaacgaaccagcatggggttggattattagtatcccaggattaattgtttggcaagcattttcaatatttgtaggaacaatccaagcatatatctttattatgctttcgatggtttatatgtcacataaagtggcagatgaacactaa

SEQ ID NO: 406512 - DNA, 213 bp, Staphylococcus aureus
atgaatttaatcgcagcagcaatcgcaattggtttatcagcattaggagcaggtatcggtaacggtttaatcgtttcaagaacagttgaaggtgtagcacgtcaaccagaagcacgtggtcaattaatgggtatcatgttcattggtgtaggtttagttgaggcattacctatcatcggtgtagtaattgcattcatgacatttgctggataa

SEQ ID NO: 406513 - DNA, 522 bp, Staphylococcus aureus
gtgactgaaacagctaacttattcgttcttggtgcagctggaggcgttgagtggggtactgtgattgtacaggtcctaactttcatcgtgttacttgcgttacttaaaaagttcgcatggggtccattgaaagatgtaatggataaacgtgaaagagatattaacagagatatcgatgacgcagaacaagctaagttaaatgcacagaaacttgaagaagaaaataaacaaaaacttaaagaaacacaagaagaagttcaaaagattttagaagatgctaaggttcaagcacgtcaacagcaagaacaaattattcatgaagcaaacgtacgtgcaaacggtatgattgaaacagcacaaagtgaaatcaatagccaaaaagaacgtgccattgcagatattaataatcaagtatctgaactatcagtgttaattgcttctaaagttcttagaaaagaaatttctgaacaagaccaaaaagcattggttgacaagtatctaaaagaggcaggcgataaataa

SEQ ID NO: 406514 - DNA, 540 bp, Staphylococcus aureus
atggtaaaagtagctaacaagtatgctaaagcattatttgacgtgtcattagatacaaataatttagagactattaatgaagaattaacagttataaatgaagcagtaaaagataaaattgagcaattgagaatggttgacagtaatccaactcaaacagcagaacaacgtcgtgagttgattaatggtgtatttactgacattaatccatacattaaaaatatgatgtacgtgttagcagataatagacatatctcattaatagctgacgtattcaaggcgttccaaagcttatataacggacactacaatcaagattttgcaacaattgagtcaacatatgaattgagtcaagaagagttagataagattgtcaaactagtaactcaacaaacgaagttatctaaagttattgtagatacaaaaattaatccagatttaattggtggatttagagttaaagtcggcacaactgtattagatggtagtgttagaaatgatcttgtccaattacaaagaaaatttagaagagttaattaa

SEQ ID NO: 406515 - DNA, 1509 bp, Staphylococcus aureus
atggccataaaagctgaagaaatcagtgcattacttcgctcacaaattgaaaattatgagtcagaaatgtccgtaactgatgtaggtactgtattacaaattggtgatggtattgcattaattcacggattaaatgacgttatggctggtgagctagtagaattccataacggcgtacttggtttagcccaaaaccttgaagagtcaaacgtgggtgtggttattttaggaccatacacaggtattactgaaggtgacgaagttaaacgtactggtcgtatcatggaagtaccagtaggtgaagaactaatcggaagagttgttaatccattaggacaacctattgatggacaaggaccgattaacacaactaaaacacgtccagtagagaaaaaagctactggtgtaatggatcgtaaatcagtagatgagccattacaaacaggtatcaaagcaattgatgctttagtaccaattggtagaggtcaacgtgagttaatcatcggtgaccgtcaaacaggtaaaacaacaattgcaattgacacaattttgaaccaaaaagatcaaggtacgatttgtatctatgttgctattggtcaaaaagattcaacagtaagagcaaatgttgaaaagttaagacaagcaggcgctttagactacactattgttgtagcagcatcagcttctgaaccttctccattattatatattgcaccatattcaggtgtaacaatgggtgaagaattcatgtttaacggtaaacatgttttaatcgtttatgatgatttaactaaacaagcagcagcttatcgtgagttatcattattattacgtagacctccaggtcgtgaagcatacccaggtgacgtattctacttacatagtagattattagaaagagcagcaaaattaaacgatgacttaggtggcggttcaattactgcattaccaattatcgaaacacaagctggtgatatttcagcttatgtaccaacaaacgttatttcaattacagatggacaaatcttcttacaatctgatttattcttctcaggtgtaagaccagcgattaatgccggacaatctgtatctcgtgttggtggatctgcacaaattaaagcaatgaagaaagttgctggtacgttacgtcttgacttagcgtcatacagagaacttgaatcatttgcacaattcggttcagaccttgatgaatttactgcaagtaaattagaacgtggtaaacgtactgttgaagtcttaaaacaagatcaaaacaaaccattaccagtcgaacaccaagtgttgattatttatgcattaacaaaaggatatttagatgatattccagttgtagatatcacacgttttgaagacgagttaaaccactgggcagaatcaaatgctactgaactgttaaatgaaatcagagaaactggtggcttaccagatgctgagaagtttgacacagcaattaacgaattcaaaaaaagctttagcaaatctgaataa

SEQ ID NO: 406516 - DNA, 867 bp, Staphylococcus aureus
gtggcttctcttaaagaaatagatactcgaataaaatcaaccaaaaaaatgaagcagattacgaaagcgatgaacatggtatcaagttcaaaacttcgtagagctgaaaaaaatacaaaacaattcacaccatatatggataaaatgcaagatgcaattactgcagttgcaggggcaagtagcaatacaaaccatccaatgctaagacctcgtaaaattactagaagtggatatttagttatcacgagtgataaaggtttagcaggtgcatatagtgcaaacgtgcttaaaaaattgattactgatattgaagcgaaacatcaagatagtagcgaatacagtattgtagttttagggcaacaaggtgttgatttcctaaaaaatagaggttatgacattgagtattctcaagtagacgtacctgatcaaccttctttcaaatctgttcaagcactagctaaccatgctatagacttatacagtgaagaagaaattgatgaattaaatatatactatagtcattatgtcagcgttcttgaaaacaagcctacatctagacaagtattaccattatctcaagaggattctagtaaggggcatggtcatttgtcttcttatgaatttgagccagataaagaatctatcttaagtgtaatcttgcctcaatatgttgagagtttgatttacggaacaatattagacgcaaaagcaagtgagcatgcaacacgtatgactgcgatgaaaaatgccactgataatgcaactgaacttattgatgacttatcattagaatataacagagcgagacaagcagaaattacgcaacaaattactgaaattgttggtggttccgcagcgcttgaataa

SEQ ID NO: 406517 - DNA, 1413 bp, Staphylococcus aureus
atgggaattggccgtgtaactcaagttatgggtcctgtaattgatgttcgatttgaacataacgaagttcctaaaattaataacgccttggttattgatgtgcctaaagaagaaggtacaatacaactaacattagaagttgcgctgcaattaggtgacgacgttgttcgtacaattgcgatggattcaactgatggtgtccaaagaggcatggatgtaaaagatacaggcaaagaaattagtgtacctgttggtgacgaaacattaggtcgtgtatttaatgtactaggtgaaacaattgaccttaaagaagaaattagtgattctgttcgccgcgatcctatccatcgtcaagcaccagcattcgatgaactttcaacagaagttcaaattttagaaacaggtattaaagtagtagatttactagcaccttatattaaaggtggtaaaatcggattgttcggtggtgccggtgtaggtaaaacagtattaatccaagaattaattaacaacatcgctcaagagcacggtggtatttctgtattcgccggtgtaggtgaacgtactcgtgaaggtaacgatttatacttcgaaatgagtgacagtggtgtaattaagaaaacagccatggtattcgggcaaatgaatgagccacctggtgcacgtatgcgtgttgcattatctggtttaacaatggctgaatatttccgtgacgaacaaggtcaagacgtattattattcatcgataacattttcagatttacacaagctggttctgaggtatctgcattattaggtcgtatgccttctgcagtaggttaccaaccaacacttgctactgaaatgggacaattacaagaacgtattacgtctacaacaaaaggatcagttacttctattcaagcggtattcgtacctgccgatgactatactgacccagcgcctgcgacagcgtttgcccatttagatgcaactacaaacttagaacgtaaattaactgaaatgggtatttatccagccgtggatccattagcgtctacatcaagagcattggaaccatcaattgtaggtcaagaacattatgaagtagctcgtgatgtacaatcaacacttcaaaaataccgtgaattacaagatatcattgctatcttaggtatggacgaattatctgatgaagataaacaaacagttgaacgcgcacgtagaattcaattcttcttatctcaaaacttccacgtagcggaacaatttactggtcaaaaaggttcttatgtacctgttaagacaacagttgcaaactttaaagatatcttagatggtaaatatgaccatattccagaagatgcattccgtttagttggtagcatggatgatgttattgcaaaagctaaagatatgggtgttgaagtataa

SEQ ID NO: 406518 - DNA, 405 bp, Staphylococcus aureus
atgaatacattaaacctagatattgtcactcctaatggttctgtttacaatcgtgataatgttgaactcgttgttatgcaaacaacagctggtgagataggtgtcatgagtggacatattccaactgtagctgctttaaaaacaggctttgtaaaagtgaaatttcacgatggaactgaatatattgctgtaagcgatggctttgttgaagttagaaaagataaagtttcaatcattgttcagactgcagaaactgcaagagaaattgatgttgaaagagctaaattagccaaagcaagagcagagtctcacttggaaaatgatgacgacaatactgatattcatagagccgaaagagctttagagagagcaaataaccgtttgcgtgtggctgaattaaaatag

SEQ ID NO: 406519 - DNA, 234 bp, Staphylococcus aureus
atggattatatcggacaatatgcagttatccatttagtgttacatgttgtatgtatttgtattgcctattgggctttacaatcaattagattagatcaattttttaaaaaaggatacgccactcaattacaagtgtgtatgatatttgttgctattttattaggcactgcagtaagcaattttattgtagatttgttacaatactcgacgcaggtaaaatatttaataaaataa

SEQ ID NO: 406520 - DNA, 1266 bp, Staphylococcus aureus
atggataaaatagtaatcaaaggtggaaataaattaacgggtgaagttaaagtagaaggtgctaaaaatgcagtattaccaatattgacagcatctttattagcttctgataaaccgagcaaattagttaatgttccagctttaagtgatgtagaaacaataaataatgtattaacaactttaaatgctgacgttacatacaaaaaggacgaaaatgctgttgtcgttgatgcaacaaagactctaaatgaagaggcaccatatgaatatgttagtaaaatgcgtgcaagtattttagttatgggacctcttttagcaagactaggacatgctattgttgcattgcctggtggttgtgcaattggaagtagaccgattgagcaacacattaaaggttttgaagctttaggcgcagaaattcatcttgaaaatggtaatatttatgctaatgctaaagatggattaaaaggtacatcaattcatttagattttccaagtgtaggagcaacacaaaatattattatggcagcatcattagctaagggtaagactttaattgaaaatgcagctaaagaacctgaaattgtcgatttagcaaactacattaatgaaatgggtggtagaattactggtgctggtacagacacaattacaatcaatggtgtagaatcattacatggtgtagaacatgctatcattccagatagaattgaagcaggcacattactaatcgctggtgctataacgcgtggtgatatttttgtacgtgatgcaatcaaagaacatatggcgagtttagtctataaactagaagaaatgggcgttgaattggactatcaagaagatggtattcgtgtacgtgctgaaggggaattacaacctgtagacatcaaaactctaccacatcctggattcccgactgatatgcaatcacaaatgatggcattgttattaacggcaaatggtcataaagtcgtaaccgaaactgtttttgaaaaccgttttatgcatgttgcagagttcaaacgtatgaatgctaatatcaatgtagaaggtcgtagtgctaaacttgaaggtaaaagtcaattgcaaggtgcacaagttaaagcgactgatttaagagcagcagccgccttaattttagctggattagttgctgatggtaaaacaagcgttactgaattaacgcacctagatagaggctatgttgacttacacggtaaattgaagcaattaggtgcagacattgaacgtattaacgattaa

SEQ ID NO: 406521 - DNA, 441 bp, Staphylococcus aureus
atggaaacaatttttgattataaccaaattaaacaaattatacctcacagacagccatttttattaattgataaagtagttgaatatgaagaaggtcaacgttgtgtggctattaaacaagtatcaggaaacgaaccattctttcaagggcattttcctgagtatgcggtaatgccaggcgtattaattactgaagcgttagctcaaacaggtgcggtagctattttaaatagtgaagaaaataaaggtaaaatcgctttatttgctggtattgataaatgtcgttttaaacgtcaagtagtacctggtgatactttaacgttggaagtagaaatcactaaaattaaaggaccaataggtaaaggtaatgctaaagctactgtcgatggtcaacttgcttgtagttgtgaacttacatttgcaattcaagatgtaaaataa

SEQ ID NO: 406522 - DNA, 441 bp, Staphylococcus aureus
atgaaaacttttaaagcagtaaggtttcaaattgtgaatgaacacggcagaattatagaatatgaattagaagatggcgtaataattaataaagaggaaagtggcacgggttggttgcttgaaattgtcatttctaatgagcattatgaaacatttaaggaatatcaagacaatgaacagttattggatattcgtgtcgtcatcacgcgtccagccaatgatccagctttatttgaatctactgtgaaaagtattaaaaattttaaaacaacaatgtctatcgtatttgaatgtcatatttacactttacgtcaacagtatgctgaaagtttattagaacaacttattgatgatggattatctggtgaagaattaaaaaaatcatttaatcgaatgatgcagtctaaaccaaagttaaaggatgaaaaattagaagagtaa

SEQ ID NO: 406523 - DNA, 396 bp, Staphylococcus aureus
atgctaaataaaatcgtaattgtcgggagactgacgaaagacgcacaaatatttgaaaaggaggatagaaaaattgcaacgttttgtgttgcaacgcaccgaaattataaagatgaaaatggagaaatcgtctgtgattacttattctgtaaagcatttggcaagttagcttctaatatagaaaaatatactaatcaaggtacattggttggtataactggtcaaatgagatcaagaaagtatgataaagacggacaaacacactttgtcactgaattatatgttgaaacaataaaatttatgtcccctaaatcccaaaataatgaaattctctcagatagtattttagatattgactctcaaaatatagataatcatgacttattagaaatttaa

SEQ ID NO: 406524 - DNA, 696 bp, Staphylococcus aureus
atgaagaaaacattactcgcatcatcattagcagtaggtttaggaatcgtagcaggaaatgcaggtcacgaagcccatgcaagtgaagcggacttaaataaagcatctttagcgcaaatggcgcaatcaaatgatcaaacattaaatcaaaaaccaattgaagctggggcttataattatacatttgactatgaagggtttacttatcactttgaatcagatggtacacactttgcttggaattaccatgcaacaggtactaatggagcagacatgagtgcacaagcacctgcaactaataatgttgcaccatcagctgttcaagctaatcaagtacaatcacaagaagttgaagcaccacaaaatgctcaaactcaacaaccacaagcatcaacatcaaacaattcacaagttactgcaacaccaactgaatcaaaatcatcagaaggttcatcagtaaatgtgaatgctcatctaaaacaaattgctcaacgtgaatcaggtggcaatattcatgctgtaaatccaacatcaggtgcagctggtaagtatcaattcttacaatcaacttgggattcagtagcacctgctaaatataaaggtgtatcaccagcaaatgctcctgaaagtgttcaagatgccgcagcagtaaaattatataacactggtggcgctggacattgggttactgcataa

SEQ ID NO: 406525 - DNA, 690 bp, Staphylococcus aureus
atggaattttcacaaaaattgtaccaagctgcaaagccaatcattaatgatatttatgaggatgactttattcagaagatgttatccggagatataggagctgacgcattacgccattacttaaaagctgatgctgcgtatttaaaagaatttacaaacttatatgctttgttaattccaaaaatgaatagcatgaatgacgtaaaatttttagtagagcaaatagaatttatggttgaaggtgaagtacttgcgcatgatattttagcgcaaattgttggtgaatcatacgaagaaatcattaaaacaaaagtttggcctccaagtggcgaccattacataaaacatatgtatttccaagcgcatagtcgtgaaaatgctatttatacaattgctgcaatggcaccttgtccatatatttatgcagaattagctaagcgctctcaaagtgatcataagcttaatagagaaaaagatacggcaaaatggtttgatttttatagtactgaaatggatgacataattaacgtatttgaggcattaatgaataaattagccgaatcaatgtctgacaaggaattggaacaagtaaagcaagtatttttagaaagttgcatacatgagcgtcgatttttcaatatggctatgacactagaacaatgggaatttggaggaaaagtaaatgattaa

SEQ ID NO: 406526 - DNA, 831 bp, Staphylococcus aureus
atgattaaacctaaaatagcattaaccattgcaggtactgatccaacaggtggtgccggcgtaatggctgatttaaaatcatttcattcatgtggtgtatatggtatgggcgtcgttacaagtattgttgctcaaaatacattgggcgtacaacatattcataatttaaatcatcaatgggtagatgaacaacttgatagtgtcttcaatgataccttacctcatgctattaaaacggggatgattgctacagcagatactatggaaacgattcgtcattatttaatgcaacatgaatctattccatatgtaattgatcctgttatgttggcgaaaagcggtgattcattaatggataatgacacaaagcaaaacttgcagcatacgttattgccattagctgacgtagtaacaccgaatttaccagaagctgaagaaataacgggactaaccattgatagtgaagaaaaaattatgcaggctggccgcatctttattaatgagattggtagtaaaggtgtcatcattaaaggcggtcattcaaatgatactgatatagcaaaagattatttatttactaacgaaggtgttcaaacatttgaaaatgaacgatttaaaacaaaacatacgcatggaacagggtgtacattttcagcagttataacggcagaacttgcaaaaggtagaccattatttgaggctgtacacaaggctaaaaagtttatttcaatgagtatacaatatacgcctgaaatcggccgtggtagaggtccagtgaatcattttgcatatttaaagaaagagggattagacgatgaattatctaaataa

SEQ ID NO: 406527 - DNA, 792 bp, Staphylococcus aureus
atgaattatctaaataaaatacgtattgaaaacccattaacaatttgttatacaaacgatgtagttaaaaattttacagcgaatggtttattaagtattggtgctagccctgcaatgagtgaagctcccgaagaagctgaagaattttacaaagttgcacaagcgctattaatcaatatcggtactttaacagcagaaaatgaacaagatattattgcgattgctcaaacggcaaatgaggcaggcttacctattgtatttgaccctgtagctgttggtgcttctacatatcgaaagcaattttgtaaattattattgaaatcagcgaaagtatcagtaattaaaggcaatgcatctgaaatattagcgttgattgatgatacagcaactatgaaaggtacagatagtgatgctaatcttgatgcggttgcaatagcgaaaaaggcttacgcaacatataaaactgcaatagtaatcacaggtaaagaggacgttattgttcaagataataaagccttcgtattagctaatggatctccattattagcacgagtaactggagctggttgtttattaggaggcgttattgctggatttttatttagagaaacagaaccagacatagaagcgttaattgaagcggtaagcgtatttaatattgctgctgaggtagctgctgaaaatgaaaattgtggtggtcctggtacgttttcaccattgttgcttgatacgttatatcatttaaatgaaacaacctatcaacaacggattcgtattcaagaggtggaataa

SEQ ID NO: 406528 - DNA, 642 bp, Staphylococcus aureus
atgtttaaccaatcgtatctaaatgtgtattttatttgtgggacctccgatgttccgagtcatcgaactattcatgaagtattagaagcagcattaaaggcagggattacacttttccaatttcgagaaaagggtgaatcagctttaaaaggaaacgataaacttgtattagctaaagaattacagcatctctgtcatcaatatgatgtgccttttatcgttaatgatgatgtatccttggcaaaagaaattaacgcggatggtatacatgtcggtcaagatgatgcgaaagtcaaagagatagcacaatatttcactgataaaattattggacttagtattagtgatttagatgagtatgcaaaatctgatttaactcatgttgattatataggtgttggaccaatctatcctacgccgtcgaagcatgacgcgcatataccagtaggtccagaaatgattgcaacgtttaaagaaatgaatccgcaactaccgattgtagctattggcggtatcaatactaataatgtggcgccgattgtagaagcaggtgccaatggaatttcagtcatttcagccatttctaaaagtgaaaatattgaaaagactgttaatcgattcaaagatttttttaataattag

SEQ ID NO: 406529 - DNA, 873 bp, Staphylococcus aureus
atgaagaaaaaagcgttactaccattatttttaggtattatggtctttttggctggttgtgactattctaaacctgaaaaacgtagtgggtttttctacaatacattcgtagatccaatgaaaaatgtattggattggttgggaaataacttattaaacgacaattatggtttagctattattatccttgtattggtaattcgtattattttattaccattcatgttgtcaaactataaaaatagtcatatgatgcgtcaaaaaatgaaagttgcaaagccagaagttgaaaaaattcaagaaaaagtgaaacgtgcgcgtacacaagaagaaaaaatggctgcaaaccaagaattaatgcaagtatataaaaagtatgacatgaacccgattaagagtatgttgggttgtttaccaatgctaatccaattaccaatcatcatgggattatactttgtacttaaagaccaacttgtagatggtttgtttaaatatccacacttcttatggttcgatttaggacgtcctgatatttggattacaattattgccggtgttttatactttatccaagcatatgtatcaagtaaaacgatgccagacgaacaacgtcaaatgggttacatgatgatggtcatttcaccaattatgattatctggatttcattaagctcagcatcagcacttggtttgtactggtcagtcagtgcggcgttccttgtagttcaaacacactttgcgaacatttattatgaaaaagtcgctaaaaaagaagtacaacctttcattgaagcgtatgaaagagagcacaacggcggcagcaataaaaaaggcaaaaacacacaagttgtgtctaaaaagaaaaagaaataa

SEQ ID NO: 406530 - DNA, 648 bp, Staphylococcus aureus
atgcaacaatcagacgtcattagtgctgccaaaaaatatatggaatctattcatcaaaatgattatacaggccatgatattgcgcatgtatatcgtgtcactgctttagctaaatcaatcgctgaaaatgaaggtgttaatgatactttagtcattgaactcgcatgtttgcttcatgataccgttgacgaaaaagttgtagatgctaacaaacaatatgttgaattgaagtcatttttatcttctttatcactatcaaccgaagatcaagagcacattttatttattattaataatatgagctatcgcaatggcaaaaatgatcatgtcactttatctttagaaggtcaaattgtcagggatgcagatcgtcttgatgctataggcgctataggtgttgcacgaacatttcaatttgcaggacactttggtgaacctatgtggacagaacatatgtcactagataagattaatgatgatttagttgaacagttgccaccatctgcaattaaacatttctttgaaaaattacttaagttagaatctttaatgcatacagatacggcgaagatgattgctaaagaacgtcacgactttatgatgatgtacttgaaacagttttttacggaatggaattgtcacgactag

SEQ ID NO: 406531 - DNA, 1485 bp, Staphylococcus aureus
atgatagagttattatccattgcactcaagcattctaatattattttaaattcaatatttattggtgcatttattttaaacttattattcgcctttaccattattttcatggaaagacgttctgccaattctatctgggcttggttactagtcttagttttcttgcctttattcggcttcattttatacttactattaggacgacaaattcaacgtgaccaaattttcaaaattgataaggaagataaaaaaggattagagttaatcgttgatgagcaattagctgctttaaaaaatgaaaacttttcaaattccaattatcaaattgtaaaatttaaagaaatgattcaaatgttgttatataataacgcagcatttttaacaacagacaacgatttaaaaatatacacagacggccaagaaaaatttgatgacctaatacaagacatccgtaatgctactgattatattcattttcagtactatattattcaaaatgatgaattaggtcgtaccattttaaatgaacttggtaaaaaagcggaacaaggtgtagaagttaaaattctttatgatgacatgggttctcgtggactgcgtaaaaaaggcttacgcccgtttcgcaataaaggtggacatgctgaagcatttttcccatcaaaattacctttaattaacttgcgtatgaacaatcgaaaccatcgaaaaattgttgtaatagatgggcaaattggatatgttggtggttttaatgttggtgatgagtacttaggtaaatcaaaaaaattcggctattggcgagatacgcatttacgaattgtcggggatgcagtgaatgcattgcaattacgatttattctagattggaattcacaagccacacgtgaccacatctcctatgatgatcgttatttcccagatgtaaattctggtggaacaattggcgttcaaatagcttctagtggtcctgacgaagaatgggaacagattaaatacggctatttgaaaatgatttcatctgctaaaaaatcgatttatattcaatctccctatttcatacctgatcaagcctttttagattctattaaaattgcggcattaggtggtgttgatgtcaatatcatgattcctaataaacctgaccatccgtttgttttttgggctactttaaaaaatgcagcatccttattagatgccggtgttaaagtatttcactacgacaatggctttttacactcaaaaacacttgttatagatgatgaaattgcaagtgtgggaacagctaatatggaccatcgcagtttcacattgaatttcgaagtcaacgcttttatttatgaccaacaaattgccaaaaaattaaaacaagcttttatagatgatttagcagtatcttctgaattaacaaaagcacgttatgctaagcgaagtctttggattaaatttaaagaaggtatttcacaattattgtcacctatcttataa

SEQ ID NO: 406532 - DNA, 294 bp, Staphylococcus aureus
atgactgaacaagataatgcacatcattctgaacaaataaaaacgaatcttaaatcacgtttaaatcgaattgaaggacaagtgagagcgattaatcgcatgattgaagaagatgtctattgtgatgatgtccttacgcaaataagagcgacacgttcggcgttaaacagtgttgcgataaagttattagaacaacatatgaaaagttgtattatgaataaagttaatcaaggtgctcaggaagaggcaatggaagagttattagtgacttttcaaaaattgattaaagactaa

SEQ ID NO: 406533 - DNA, 210 bp, Staphylococcus aureus
atgatacatcaaaatacgatttacacagcgggaattgaaacagaagaacaagtaagtcaattgacagaacgcatttcaaatatgataggtgttcatcaagtgaatattaatataatagatggtcaagtaactgtatcgtatgagacaccagcaaatttgaatagtattgaaaaagaaatctatgatgaaggatacaaaattgtattttag

SEQ ID NO: 406534 - DNA, 138 bp, Staphylococcus aureus
atgaaacgtcctgaaaagattcaaaatgtagtcaaactattgtcatcattaggtgtgaatattaaaaaaactaaatctcgtttagacattattaatactttgccagcatctaataaagtaagtcacgaattaaaataa

SEQ ID NO: 406535 - DNA, 1203 bp, Staphylococcus aureus
atgaattattcatctcgtcaacagccggataagcattggcttcgcaaagtagactgggtattagtagccactatagctgttttagcaattttcagtgttctgcttattaactcggcaatgggcggtggtcaatacagtgctaatttcggtatcagacaaattttttattacattttaggtgcaatttttgcaggtatcatcatgtttatttcacctaaaaagattaaacattatacatatttattgtatttcttaatctgtctattattaataggcttgctcgttattcctgagtcacctattacacctattatcaatggtgccaaaagttggtacacgtttggccctatcagtattcagccatctgaattcatgaaaattattttaattttagcattagcgcgtgtcgtttctagacataatcaattcacattcaataaatcattccaaagtgatttgttattatttttcaaaattattggtgtctcgttagtaccaagtattttaatattactgcaaaatgacctaggaactacattagtattagctgctattattgcaggtgtgatgttagtaagtggtataacatggcgtatcttagcacctatctttattacaggtattgttggtgcaatgacagtcattttaggtattctatatgcacccgcattaattgaaaatttattaggtgtccaactgtatcaaatgggacgaatcaattcatggcttgacccctatacatatagtagtggtgatggctatcatttaactgaatcacttaaagctatcggttctggacagttactaggtaaaggatacaatcacggtgaagtttatatacctgaaaatcatactgactttatcttttcagtgattggagaggaacttggctttatcggttctgtcatattgatcttaatatttttatttttaatcttccatctaataagattagctgcgaaaattgaagatcaatttaacaaaatctttatcgttggtttcgtcactttacttgtgttccatattttacaaaatattggtatgacaattcagttgttaccaatcactggtattccattaccatttattagttatggtggtagtgcgctatggagtatgatgactggaataggtatagtcttatcaatttattatcatgaaccaaaacgatatgtcgatttataccatccaaaaagtaattaa

SEQ ID NO: 406536 - DNA, 1071 bp, Staphylococcus aureus
atgacaaaagaaaatatttgtatcgtttttggagggaaaagtgcagaacacgaagtatcgattctgacagcacaaaatgtattaaatgcaatagataaagacaaatatcatgttgatatcatttatattaccaatgatggtgattggagaaagcaaaataatattacagctgaaattaaatctactgatgagcttcatttagaaaatggagaggcgcttgagatttcacagctattgaaagaaagtagttcaggacaaccatacgatgcagtattcccattattacatggtcctaatggtgaagatggcacgattcaagggctttttgaagttttggatgtaccatatgtaggaaatggtgtattgtcagctgcaagttctatggacaaacttgtaatgaaacaattatttgaacatcgagggttaccacagttaccttatattagtttcttacgttctgaatatgaaaaatatgaacataacattttaaaattagtaaatgataaattaaattacccagtctttgttaaacctgctaacttagggtcaagtgtaggtatcagtaaatgtaataatgaagcggaacttaaagaaggtattaaagaagcattccaatttgaccgtaagcttgttatagaacaaggcgttaacgcacgtgaaattgaagtagcagttttaggaaatgactatcctgaagcgacatggccaggtgaagtcgtaaaagatgtcgcgttttacgattacaaatcaaaatataaagatggtaaggttcaattacaaattccagctgacttagacgaagatgttcaattaacgcttagaaatatggcattagaggcattcaaagcgacagattgttctggtttagtccgtgctgatttctttgtaacagaagacaaccaaatatatattaatgaaacaaatgcaatgcctggatttacggctttcagtatgtatccaaagttatgggaaaatatgggcttatcttatccagaattgattacaaaacttatcgagcttgctaaagaacgtcaccaggataaacagaaaaataaatacaaaattgactaa

SEQ ID NO: 406537 - DNA, 1359 bp, Staphylococcus aureus
atgattaatgttacattaaagcaaattcaatcatggattccttgtgaaattgaagatcaatttttaaatcaagagataaatggagtcacaattgattcacgagcaatttctaaaaatatgttatttataccatttaaaggtgaaaatgttgacggtcatcgctttgtctctaaagcattacaagatggtgctggggctgctttttatcaaagagggacacctatagatgaaaatgtaagcgggcctattatatgggttgaagacacattaacggcattacaacaattggcacaagcttacttgagacatgtaaaccctaaagtaattgccgtcacagggtctaatggtaaaacaacgactaaagatatgattgaaagtgtattgcataccgaatttaaagttaagaaaacgcaaggtaattacaataatgaaattggtttacctttaactattttggaattagataatgatactgaaatatcaatattggagatggggatgtcaggtttccatgaaattgaatttctgtcaaacctcgctcaaccagatattgcagttataactaatattggtgagtcacatatgcaagatttaggttcgcgcgaggggattgctaaagctaaatctgaaattacaataggtctaaaagataatggtacgtttatatatgatggcgatgaaccattattgaaaccacatgttaaagaagttgaaaatgcaaaatgtattagtattggtgttgctactgataatgcattagtttgttctgttgatgatagagatactacaggtatttcatttacgattaataataaagaacattacgatctgccaatattaggaaagcataatatgaaaaatgcgacgattgccattgcggttggtcatgaattaggtttgatatataacacaatctatcaaaatttaaaaaatgtcagcttaactggtatgcgtatggaacaacatacattagaaaatgatattactgtgataaatgatgcctataatgcaagtcctacaagtatgagagcagctattgatacactgagtactttgacagggcgtcgcattctaattttaggagatgttttagaattaggtgaaaatagcaaagaaatgcatatcggtgtaggtaattatttagaagaaaagcatatagatgtgttgtatacgtttggtaatgaagcgaagtatatttatgattcgggccagcaacatgtcgaaaaagcacaacacttcaattctaaagacgatatgatagaagttttaataaacgatttaaaagcgcatgaccgtgtattagttaaaggatcacgtggtatgaaattagaagaagtggtaaatgctttaatttcatag

SEQ ID NO: 406538 - DNA, 1521 bp, Staphylococcus aureus
ttgcaaaattttaaagaactagggatttcggataatacggttcagtcacttgaatcaatgggatttaaagagccgacacctatccaaaaagacagtatcccttatgcgttacaaggaattgatatccttgggcaagctcaaaccggtacaggtaaaacaggagcattcggtattcctttaattgagaaagtagtagggaaacaaggggttcaatcgttgattttagcacctacaagagaattggcaatgcaggtagctgaacaattaagagaatttagccgtggacaaggtgtccaagttgttactgtattcggtggtatgcctatcgaacgccaaattaaagccttgaaaaaaggcccacaaatcgtagtcggaacacctgggcgtgttatcgaccatttaaatcgtcgcacattaaaaacggacggaattcatactttgattttagatgaagctgatgaaatgatgaatatgggattcatcgatgatatgagatttattatggataaaattccagcagtacaacgtcaaacaatgttgttctcagctacaatgcctaaagcaatccaagctttagtacaacaatttatgaaatcaccaaaaatcattaagacaatgaataatgaaatgtctgatccacaaatcgaagaattctatacaattgttaaagaattagagaaatttgatacatttacaaatttcctagatgttcatcaacctgaattagcaatcgtattcggacgtacaaaacgtcgtgttgatgaattaacaagtgctttgatttctaaaggatataaagctgaaggtttacatggtgatattacacaagcgaaacgtttagaagtattaaagaaatttaaaaatgaccaaattaatattttagtcgctactgatgtagcagcaagaggactagatatttctggtgtgagtcatgtttataactttgatatacctcaagatactgaaagctatacacaccgtattggtcgtacgggtcgtgctggtaaagaaggtatcgctgtaacgtttgttaatccaatcgaaatggattatatcagacaaattgaagatgcaaacggtagaaaaatgagtgcacttcgtccaccacatcgtaaagaagtacttcaagcacgtgaagatgacatcaaagaaaaagttgaaaactggatgtctaaagagtcagaatcacgcttgaaacgcatttctacagagttgttaaatgaatataacgatgttgatttagttgctgcacttttacaagagttagtagaagcaaacgatgaagttgaagttcaattaacttttgaaaaaccattatctcgcaaaggccgtaacggtaaaccaagtggttctcgtaacagaaatagtaagcgtggtaatcctaaatttgacagtaagagtaaacgttcaaaaggatactcaagtaagaagaaaagtacaaaaaaattcgaccgtaaagagaagagcagcggtggaagcagacctatgaaaggtcgcacatttgctgaccatcaaaaataa

SEQ ID NO: 406539 - DNA, 285 bp, Staphylococcus aureus
atgactgagtttacacctttttttgatggttcaaatcaattaaattatcttaaatttgtaattttaagatttcatggtgtttctaaaagaaaaatttgtaaaatgtataattttgcatattttcgtatattagaagtttgtgaaatggcaaaaaagaatgattatcgatttacttataaggattataaatttttaaaacaatatggtgtgtctaatacatttatttgtaagatgtatcatatttcaattgaagacttagaattttttgaggtgatgaaccgatag

SEQ ID NO: 406540 - DNA, 321 bp, Staphylococcus aureus
atgaaaccagtattggatattaaaaaaactttaggacaattaaactttttaggtgtagatgaaaaatataaatatgaaaatggagagcgtactgataaaactgtttatgcatataaattagcgagtcaagaacaaggcgaacaaatcactgttaaaacgcctaataaagtggaattagactatttacaagaatgcgaattagttgaaccagacgttaaaatgtatgttcaaatgtcaggcgattttggaactatcgcatatagctggaatgcagaagatattaaagtagttggttctaatagtgcacttaaacaaaaataa

SEQ ID NO: 406541 - DNA, 303 bp, Staphylococcus aureus
atggattattatacagcagatagattatatcgctacacaaatagttcaaatttgagtgaacctattttaaactatgttgctagtcgtataaattggggcgataaagtttcattaatgactttagctaaagaaatacagtctaaatttaatgatagttacgttaaagaaaatacggtaaaaggtcggcctaaaatttacgctgacctttgtctattgtgtatgagcttgagtgaagcaggacatggcagaatgctacaagttaatttggaagattgtatatatattggcgatattgatgtttaa

SEQ ID NO: 406542 - DNA, 1092 bp, Staphylococcus aureus
atgactttaaaaaaccagtgtaccccccttactaataggggggtagagcgtacaaataaaagtgccgtggaggcagttgttgactgggttcaggtcactttccatataacccctatttcagcagtaattgaggacgttatcggtttgcctataacgttgttcaaaaaacgaaatagtggcatttacttttataatcgcggttatgaattttcaaacattaaattgtattattcaagtgatgatgaatcaatgggcattcacttacagttaactggtacaggttgtagagagtttgaacatcatttacagcagttgaataaaacttggcaagatttttttgacaaatgtttatcagttaatgcaaattttacaagaattgatattgcaattgatgattataaaacatatttaaaagtgcctttattaattaaaaaggctgaaaaagctgagtgtgtttcacgttttagagctggaagcgcaataaacggttttaatttgtcagacggaagaagtaaaggcgctactttttatattggttctaaacaaagcaatttatattgtcgtttttatgaaaagaattatgaacaagcgtttaaacgtcattgtgatgtcgaagacattgggctatggaatcgttatgaaatacaaatgcgaaaggcatatgcagttaattgtgcgaaagttttaagtagaacagataatataagtgaaattgtaaagtctatattgcataataatttgcgttttatctctcctcctaaagatggaaatgataaaaatcgtaagcggtggccattatatagaccttgggcgttatttattaaagatactgaaaaattgaatttaactactagaccaacattaaagtccattgaggataatcttgattggttatgtaaacaagttgctactactttagatacagtgttaactgccgaaagtatggcgcaatctgaggggttgcttacagatactgattttttagataaaattttagcgcattcacaatttaatgatgagcatacgaatagaattaatcattatttggaggctttaaaacaaaaaaagcacttatcaaaagataagtgttaa

SEQ ID NO: 406543 - DNA, 1056 bp, Staphylococcus aureus
atgaaaataataagcaagtacattttaacacgattttctaaaaacggaaagcattttgatattcctaaagaacaacgccgagtaattccaaaatttaaaaatcgtcgtaagatgattgtaatttgtttttactcattattagctattttgttaattcttttattagcttcttttattaaagctacaagagcaaataatgacagtaaagaagcagttaataaaacgaatatgattcaaaaaaagtatgaagataatgcgaatacagttcagtatagtcctaaattaaagttatatgctgataagtttattgatacgtatatgaatatctcgaaagattcaaaagaattggaatctagagaaaaagaattgttgaaatattttccatcagattataaaaaacctgatgaaaaaatttcagatacagaacgaaaattgaatagtaaagaattttataatattaaacgtaaagataaacaaacaattatacagtatattgttaattatgatgtgaatattactgaaaagaaagaagttaaagttaagaagaaaaagaaaagtgaaaaagataaagatgagtatgaaacaaaaacagaagaaaagcaacgtaaagtaaatcaaaacattttaataaatatacctattaagagtgaaaataataagtatgttgttgttgaatatccttattttacgccaatccctgatagtcaattgaataaagctaaaatggttgaggataatttgaaagacaataaacgggaagacaatccgaaagcaaaagcttttattgaagatttctttaataaatatgcttctagtaagtctgatgatatggcctatttaatggataaccctgagggcttagaaggaactagagaagtttctcagataagagaaattaggttatatccaaaaggcgatgattatgttgctaaagttgaaattttgatgaaagataaagattctcctttggagaatttggagcattacacattagatataacaaaaaaagatggtaaatattacgttaaaaatatgactaattctattggaggttaa

SEQ ID NO: 406544 - DNA, 261 bp, Staphylococcus aureus
atgagtggtttatttaatttttttgttttaggtgctgaccgtccatcacttggtggagttggtgactggataagtaatgaagtaggtacgggtattggtttagtagtattggttgttggtattgtaaaatgggctagtggtaaatatgggcatatggttatattatttgttgttggtggctttttattcttagtttctaaaggtcctgaacaggtatttaatgcgattgcaggtgtttggaaaatgatttttggcggttga

SEQ ID NO: 406545 - DNA, 384 bp, Staphylococcus aureus
ttggataaaaaagcttataatttaaagcgaacttttgaacaaccgatagttatgtatgaatttacagataagtttcgtattaataagggttttcgtttagatttttgggctacatttttgattgtgtggtttatattatttttgttattttggtatttattacagcctgtaattatgtcgattggtggacttatgtttatttactttacggttgcaccttattatataacgaaatatattgttaagttaaaacaagatggaaagaaattatttttcttcttatgggattttgtaatatttgtttttaatgtgcagttaagaaaagttaaattaagttatgatgaagaagtagaatatcatgataaaaaaataacatttaaatag

SEQ ID NO: 406546 - DNA, 2496 bp, Staphylococcus aureus
atgaatttaaaagcaccgtatgcaggtttaagagataatttgttattaacgaaaactggcgaagtttgggcgtattatcgtgttcgttctgagtctatatcaacagcaaattatgatgcaaaagaagaatcaaaaaagcgtatgcgttattttttagagtcgattaaaggttatcaagattttcattttgaaatgtatgaccacgatttagatttgcgaaataaatttaaagaaattagtaaagattttgatgatgaagcttttaatgtagctgaatattattcaaaagaaactattgacgtattagaacaagaattacaaatgattacgcataattcttttgttatgggtgttaaaatacgtgaattagctgacgatgcagttacacttaaagagattttaaaaagtacattatcagatacggctgagcgtattgtttcgaattttggttttgatgtgaatttagacgataaaattttagataagtataaaacatttgaacgagatttggctgatagttttctaggtattggaggcgagcgtttaactgagaatgaattggcttatattattagaaagccttttatttcaaatgcaacacatgacgtacaggaagaatcttcaagaagagctattacagatatttataatgcagtaattgaccctactcgcttgagtgttttagaagttgaaaatgataacgagaaattttatacaacaacagttgttgttgatgattttccgttagatatggaatatacacatttatttgagaaagctcaaaatatgccttttccggttgaatgccatgtaaaagcaaaaatcattaataatgagaaagttaagaaaaaatttgaccgtgcgaaaataaatcataaacaacaagcaaaagaaaagcaagatactggcgacagtgcttcggaagatgttcaagataatttgtttgtattgaatcaaatggaacgagaagtgactggctcaggtgtatttattgagtgggtatttatgtttgtaattaaaagtgatgattatagagattgtaaacgtaaagcaaagcgtttgatgaaacgattaaaggaaactcaaatatatgcagttaatccattagctgaccagttacaattgttttatcaatgtttacatggtaatgatttatttattaataagtattggttacaaagaacaacggcaacaggtatagcagagaatttatttggtgtgtctcaaagtttgggaacaaaaacgggtttttatatagggcgtattgataaatttatacgttctgtttcacgtgaggaagctgttgcaagttcaagggatataattttgtttagtttattgttggccgcaaaaggtattaagggggctgtcagtgatagtccgcatgttttaattactggtcaaactggtaaaggtaaatcatttttagcaaaattattatggatttatacatcattttttaaaggtcaaatgttgtactgggatccaaaatctgagtttgcagaatggtttgacagagtaacagaaagtaaggaaatgcaagaaaagtatcccctatttattaatcatttaaaaacatttaaatatgtaacattgaattatgaagattcaaccaattatggttgtctagaccctattgtatttttagatggtattgaagctaatgagatgttgaaatcagtgtttgatgaaattaaatcttttgaaaattatcatcatattgaaacagcaatttatcaagctatttctgatacggttgaagaacgtgaaaatggtaaaaaagttggttcattaaatgtaattgaaaaattacagaataatgaagatgagcatgtaaaaaatgcaggcgatttattatttgaaaaaacgcaaaacaatattttaaaacttgtttttagtgatggtacgaatccagctttaaatattcaagaaaaagcaactattttacaggttaaaggtttagatatgcctaaagcagatgatgatacatcaagttattcaacaagtgagaaaaatgggattacattaatgttattaattggtaagtttttagagaaattcggttctcgtagagatgttcaaacgactatatttattgatgagggttgggcttttagtgcttcaagacaaggtaaaaaagttggtaagcgtataaaaagaacgggacgttctgagaataattcacttgtatttattacacaatcggtaaaagataaagcagatgatgatggtggtaactttggttgtcattttgcatttgatgaaaaagatgaacgtgaggatattttaaaatctttaggcttagaatattcaaaagaatctcctgaaaatatggagatgttgaaagatttgaagaaaggtcaatgtatattcagtgatttttatggacgtgttggaaaaatggttgtacattgtccatttgaggaaatgactgaagcatttagaacacaagaagattctgcaagctctaaagctgaagaaaaatttgcgatgtaa

SEQ ID NO: 406547 - DNA, 1359 bp, Staphylococcus aureus
atggcaatgaatgaaattgctttatttaaaggcgtacgtatacagccttatcagaagtatattgattttatgtttgcaagtgtattagcatttatttttttggtatatcgtatatacattttgtttattgattataaatcagttaataaaaaattggatatattgacgttgtttgcatattttaaaccgcatttattgtatttattaattggtacagcaattatatttgttatatgtaagcttatcgctcagcttttaattcgttttaaaacaaaagatttagctgaaatgattgaaacacaaggctttcataatcgtacagtaatcaagaaaacaaccgagtatatccctattgattataaacaaactgaatatgactattatccaacgatgttttataaacgtggtaaaaaaacttttgttattcatattaaaaaagacggttcgaggtttcaagataattatttagagttagaaacgattattgaaccaatgtttaattctgaattagtagaaaaaaagcatattggtcgttatttgagatatgaatttatgccacttaaatataaaaagcgtattgttatgaatggcgaacaagaatcaaatacaattttttatgatacaaaaattgctattacgcatcaaattacttgggattttgtgaaagcacctcatggattggttacaggtataaccggaggtggtaaaacatattttttattttatgtgattcgtgagttattccgtagacattcagaagtacgtttattagacccaaaagtttcagatttaagctttatgaagcgcgttattggtgatgataaagttgcagatactaaaggtcaaatattaaaacaattgagagaagctaataatgaaatggaagagcgttttagattaatgaatgatagttcggattataaaatcggaaatgatttccgtaattttgatatgcgcccctatttcattatttttgatgaggtaacggcttttacttcaactttagataaaaaagaattacaagaaatgaatgattatttaattaatattattatgaaaggtcgtcaagctggtgtatttatgtttttaacagcacaaagaccagatgcagatgtgattaaaggtaatgtgcgtgaccaattagggttacgtgtgtctttaggtaatttgtcaaatgatggttatcgtatgacctttggtcaaactgataaagaatttcaaacgattcatgatagtgatatcggccgaggttatataactatacttggacaatataatgaaccaattttatttgatgcacctttaatggaacaatatgattttgtggaagatgtgaaacaaatattaaataaggagtga

SEQ ID NO: 406548 - DNA, 1848 bp, Staphylococcus aureus
atgaagcataaaagtgtgtatcttttatgctttttaattttgcctattctgcttttaacatctgtgagtgcttacgctgtttctaatccagttggagagccctcacatgcagttaagcccaaaattgaaaagtatgatttatcacattatcgttcaatatatagtgaaaaaggcgactggaatccgtttggtcaagaagaaatttcacgacaaattaataatgtgtcagattttttcttttctatgactaagattttagcaggtgttacagattatgcgattgaaaatttatttcaactagatgttattaatgattttgcggataaaatcggcgattttgttggcgatatatatcaaaagttattgagtaatttggcaataacattatttattattgtttgttttaacgcatttattatttttagtgtacaaggtaatgcaagagaagcattaaagcgagcgtttttaattatgtgtttgattggttttggtgttggtatacttgcgaatgcaggtaatattatacgtggtacaaacaatattggtaaggatttgaataatataattatgaatagtacatcttctattgatgggaacattgattatattcatgagaattcaggtatgaatcatatacgtaatcaattatttgatatgacgatatatagaacatatttagtaatgaattatggaactgtagacgaaaaagagataaaagcaaaaggtaaagaccgtattgataacattttaaaacaagatttttcaaaaaaaggacaagatgagattgataaaattgtaaaaaatgaggttgagaaaaaagataataaatatatgacgcaaggttatgtatttcaaaagttggctatttcagttattggctttattattactgtttttatgtcaattgtatttttatcaattagttttgcgaagttgattttttctacatttgctttatttttattcttatttttagtattcagttggatagtgagttttataccaggatttgaattatctgttttctctgcgtttgcaaaaacgttaggctatattattttaagtgcctgtatgacattcttatttgtgatagttggtttgtgtatcaagcttgcaaatagttttattgaaccggatagtcaaaatgcttattttttaaattcaatatttataattgtaatattgtttgtaatgtataaaaaacgggctcaaattatcaattttgtaagtcgtggtaatattagtttttctcctagtgcaattggtgctggtgtgatgaatcgaacacaagaacgttttaataagattcgtcatgaacaagcgcaaaataagaaagctaaacgagaaaatcaaagagatgaacccgccccaccacttcaaaatgataatgatttaagaagaagacagcaggataaaccaatgcctttatttataaataaagataatcaaaaaaatggtaataagcgaagagaacaacaagagtcaatgaatggtaatgatgtaaaatctgcttctgttgaatcaaatgcaaatgattattctaaacaaccacaaaaagcatcacagcaagagcatcaagtacgagaaacaagacagcgaaaagatatacaaaggtcgccacaagtggttaatcagccattaaataatgagaatcattcaataaatcgtaaagaacagaagtcagttcaaactgcttatgatactgatgttcaaaaacgacaaatacaaaatgcgacacagaatcaacaaagtagacaatctggaaatcgtaatcaacctattacacgtaattctcagtcaaaagaccgtctaaaagagcaaaaggatatcaataagcatggtaaataa

SEQ ID NO: 406549 - DNA, 1047 bp, Staphylococcus aureus
atggtaaataaaaaagatattgctaaaaaagtaataggtaaaacgccaataggtgttaaattgaaattagcgaaagtcatcatcattttgtgtgtggtggctttttttacatttccagtaattgtaatgtttttgttagcgcctgatttaaataaaggtaaagatgatgctggttgtactgttagtggcggtaatgtttcggcaaatggtattgataagtttaacgaaaatgctaaaggtggaaaattagagggtaaaggaaaagaaatacagaaaattgcagaaaaaaataaagtacctgtgaatatttttatggccattattgcgagtgaatcacaatggggtaaaggagaaaatgcgacaagacaaaataatcctttgtctgttatgggttcaaaatcgattcatgattcaacatatccaactattgaagatggtcttaatgcgggagctaaaaatttgtatgatgtttatatttctaaaggtttagatactcctaaaaaaataggtcccaaatatgcgcctgttggtgcgtcaaatgaccctaataatatgaatgcccgttggataccaacagttgaaaaaattatgaaagatttaggcggttcagaagctaaaacgtcatgtagtaatggtaaaggaaagtctataaagtttaatggtaaattgccacattggtcaaatgatgaccctggaaaaggtaatttatacactgctggtcaatgtacttggtatgcatacggtatgcgtcaaaaaatgggtaaacctgtatcgacttattggcatgatgcacataaatggaatgatagagctaaagctgagggttataaagttgataaaaatccggaacctggtgcattatttattgctgaacaaggtgcaggcggtcatgatgggcattatggtcatgtggctgttgttattggtgtaagtgatggtggtaaaacatttagaataacagaaatgaattgggaaggtgcttttaaagttaatgaacgtacattgaaaatgactgacggatatagttttattcatgataaggagtga

SEQ ID NO: 406550 - DNA, 591 bp, Staphylococcus aureus
atgaagcaaaaaattattatgtttactcttgtaacagtaatattattttgtgctgttttaattggttatcagattcctaaacaacaagttaaaatgaaacaaaatcaaattgaagatttgcaggaagaacaacgtatattaagagataaaaatggagagttaaataaattagtaaagagacaatcaaaaacagttatttctgatgaagaaaaacaaatacgtgaagtttcttcaaattttgttaaacagatgtttgaaatgaaaaaagattcttcttttaaatcaaaagcaccacaaataaagcctttagttacaaaggattattacgatacattatttaaggattctaaagataaatatgatttatatgatgatataacggttaatgatattcatgtttattttgatacttatgaccctaaaaaagatagttataaagtttttgttcagttcgacgaacgtattgaaacagatggagatgataaaattgaacatcgtcaaacatctgcacaattggatttagttcgtacagctgaaggttggcgtattgataatttaaaacgttttaatttaaaacctctaggacgttag

SEQ ID NO: 406551 - DNA, 342 bp, Staphylococcus aureus
atgaggcgatggtttgtattaattttaggattagttatattattatctgcatgtggtcagaaatatgataaagagattgatgcagttttaaattctgaaagaaaaagtatgagtgagtcttcttttaagaagcctgaaaaaagtaatagtgattttaaagtatatgaagatggtaaatttataactatttcttttgtttatgataaagatggtacagtgtggacaagtttatataaaaagaatgagacaacagataaatatgtaaaagttgaagatatgaatgaaaaagaatatcaaagtaatcataaaccagtttatgaagaaaataatatgaaaaaataa

SEQ ID NO: 406552 - DNA, 504 bp, Staphylococcus aureus
atgaaaaaaagaaaaaaacgtaaagaattagattataaaacacgtctagctatcgcaaagtatttaaatgatggtttaaacatcattcagatttctaagattttaggtcgtgatgatgcggttctttatagagaagtaaataagcgttctgttgatggtgtttataatcctttattagctgaggaagatgctataaaatcgcgtagtatttcagatgaacaagttgctaaacgtagacgtttgaatgatgaaacaaaagcatatattgaagaaaaactttcattaaaatggtctcctagacagatagcaagtcaaattgaaaaagatacagggcattatataagttatcctactatatatagatatattcgcaatggattggtaaaagttgatgttaagcgtgatatgagacaagcaggcaaaaaatataataagtcttctgaaaagcgtggcaaattagacgtaggggctcgtgttataaagtatcggctcaaaaagtattaa

SEQ ID NO: 406553 - DNA, 354 bp, Staphylococcus aureus
atgaaaccattattaccaaaaagcataactatggatagaggtaaggagttcgctctatttgaacaaatagaagatgaattgaattgtagtatttattttagtgatttgggttgtccatatcaacgtggttccattgaaaatgtaaatggacttttaagacagtattatcctaaaggtacggattttgcaaatataacacaaaagtcattagatgaagctgttaaacaaattaatacacggcctcgaatgatatttgactataaatcgagtgaggaaatgttaaagtaccatgtaagcacacaaaattgtgaacctatattaaatgactgtgtgaggcacgaacccgtcaattaa

SEQ ID NO: 406554 - DNA, 696 bp, Staphylococcus aureus
atgcaatctaaaatattgataattgaagatgatcacgcaatcacacatttacttgatgttgcattaactttagattattacaatgtaactacagccgacaatgccacacaagcacactttaaaattcaaattgataaaccagatgtcattttattagatttaggtttaccagataaagatggattatgtttgatttcagaaatcaggcaacatactgacattcctatcattgtaataagtgcaagacaagaagaacaaacaattattcaagctttagataacggtgcgaatgactatatgactaaaccttttaatgttgatgagcttcgggcacgaatacgagtcatcgagagaatcgctaagtcacatcaagaaactaacattgtatttactaacggtttgctaagcatcgactttggctccaaatctgttgttattaataatcaggaggtacatttgacgccaaatgaatttagcttgttagaactattgtcaaatcataaaggaaaagtactcacttatgagatgatattaaaacgaatatatggctatgttaataagactgaaatgcctagtttaagagtgcatatgacatcattaagacaaaaactttcacaatgtcatgaggacgcaaaagatattattaaaacacatccacgcattggttatcaaatgttgcagtggaaagagaaataa

SEQ ID NO: 406555 - DNA, 2658 bp, Staphylococcus aureus
atgtcaaacactgaatcgctaaacataggaaaaaagcgtggatctttaacaatttacatcggttacagtccaggtgttggtaaaacatttgagatgctttcaaatgccattgaactatttcaaagtaacgttgatattaaaataggatatattgaaccgcatcagcgtgatgaaacaaatgcattagctgaacaattacctaaaatcacaaccaattttactaaacatggtagtcatcattttcaatatttagatgtcgaccgcataatcgaagaatcgccgacaatagtacttatcgatgagttagcacatacgaatatttctagagatcgtcatgagaaacgatatatggatattgaagaaattttaaatcatggtatcgatgttcataccactttgaacattcaacatattgaaagtttaagtagtcaaattgaactgatgaccggtgtacatgttaaagaacgtgtacccgactatttcataatgagcgccgatgtattagaagtcgtagatatctcacctgaacaattaattaaacgcttaaaagctggcaaggtatataaaaaggataggctagatgtagcatttagtaatttctttacgtatgcccacctaagcgaactgcgtacattgacgttaagaacagttgccgacttgatgagtgataaagaaaaagtccgacacaaccataaaacgtcactcaaacctcatattgctgtggcaattagtgggagcatttataatgaagcagtaattaaagaggcattccatattgctcaaaaagaacatgcgaagttcactgctatttatatagatgtattcgaaaaaaacaggcaatataaagatagtcaaaagcaagtgcatcaacatctcatgcttgcaaaatcattaggagcaaaagtaaaagtagtttatagccaaaccgttgcattaggattagacgaatggtgtaaaaatcaagatgtaaccaaattaattatcggacaacatattagaaataagtggcgagactttttcaatacacctttaattgaccatttaatgtcctttgaacatagctataaaatcgaaatcgttccaatcaaacaaatacctgttgaattgaaaatgaacaaatcaccctatcgtcctaaaggcaaacgtttcgccatagatatgttaaaaatgattttgattcaaataatttgtgtaatgatgggactgtggatttatcaacttgataagcatgagtctagtacgattattttaatgatttttctcatcggcatcattttattatccatttggacgcggtccttcatcattggctttttagcagcaattattaacgtatttgtttttaattatttttttacggaacctagatatacatttgaagtatatcgctttgactatcctattacatttatcgttagcattttaacaagtattttaacgagtgctttattaaaacaaattaaattccaatactccattactaaaaagcaactttatcgtacagatttattatttcaatttaatgattcgattaaacaaacttatacagttgaaaacttactaataaatgctggataccaaattaatcaattattgcaacaatcaattactatatacgttatcaatcaatcgaaagtaattaaaacaataccattgcaaaaccatatcgataatacgactcaacagcatgaacaagcattaagctgggtaattaaaaatgaaagacaagctggtgcaacaacagatacatttccaggcattaataaatggttgataccaattggcacatctccgattaaaggcattctagccattgattaccaaagttctcaagtgattaatccatatgatgcatcaatattagaatcaatgttaaatgaactttctctcgccgttgaaaatgtgacgttacttaaacaaacgagagaatccatgttacaggctgaacgtcaactgacacattcaaattttttaagatcaatttcgcatgacatacgtacaccgttaacaacaattatgggaaatttagatattttagtatcacatagtaaagatatgtctatcatagaaaaggaacaattacttgtacatagttttcaagaaagtcagtatttatatctattagtgacaaatattttatcattaacaaaattacagtcatcaaatgttcagataaaattgcaaccttatctcgttagtgaattagtagaagaaatcgatatgattttagaacgtcgccatttaaaaaagcgtataactgtatcatcctcagtaaatttacagtttatacacattgacagtaagttgattttacaagctttattcaatttgattgaaaatgcagttaaacacacttctactgacaccaaaatcaatttatctattcgttatgctagctatgaacaaatcgaatttgccgttatagacgaaggacctggaattagtttagaagaacaacaaaagatattcgagcctttttacacaggatcaaataaatattttaaagataaccaaaaagaaagcatgggactaggcttatatttagtacagactatcctacacaaacatcaatcaaacttacaatataaaccgaaccaaccacacggcagtatattctatttcaatatatatacagactttaacgaaggagacgtataa

SEQ ID NO: 406556 - DNA, 1677 bp, Staphylococcus aureus
atggaaataattttgtttctaacaatgatggttatgattacgtatgtttttagtggatatctatatcgcgtagcattggtgcaatcgtcaagagtagatttaatatttactagatttgaaaatatgtgttttaaaattatcggcacagatttagaacacatgtcagctaaaacatatgtcaaacattttctggcatttaatggatttatggggtttataacatttgtattgctaatagttcagcaatggctttttttaaatccaaatcataatttaaaccaatcgatagatttagcgtttaatacagcaatatcttttttaacaaatagtaatttacaacactataacggtgaatcagatgtgacatatttaacgcaaatgattgtaatgacatatttaatgtttacatctagtgcatcaggttacgccgtttgtatagcgatgttgagacgtttaactggattaactaatatcattggtaatttttatcaagatattgttcggtttattgtccgagtacttttaccattatcatgtttaattagtattttattgatgactcaaggtgtaccacaaacgttgcatgctaatttaatgattcggactttaagcggacatattcaacatattgcatttggacctattgcatcacttgaatcaataaaacatcttggtacgaatggtggaggatttttagcaggaaattctgcaacaccttttgaaaatccaaatatttggagcaattttatagaaatgggcagtatgatgttacttcctatgtcaatgttgttcttatttggtcgcatgttaagtagacatggtaaacgagtacatcgtcatgcgttgatattatttgtcgcaatgtttttcatttttatagcaattcttacattaactatgtggagtgagtatcgtggtaatccaatactagcgaatttaggcatttatggaccgaatatggaaggtaaagaggtacggtttggagcaggtttgtcagcactatttacagttattacgacggcatttacaacgggttctgttaataacatgcatgatagcttaacgcctataggtggattaggaccaatggtattaatgatgctaaatgttgtatttggtggcgaaggcgtaggactcatgaatttattgatatttgtcttactgacggtgtttatatgcagtttgatggttggtaaaacaccagaatatttaaatatgccaattggcgcccgtgaaatgaaatgtattgtcttagtctttctcatacacccaattttaattttagtattttcagcacttgcttttatgattcctggagcaagtgaaagtataacgaatccgtcttttcatggtatttcacaagttatgtatgaaatgacatcagctgctgcgaacaatggatcagggtttgaaggactgaaagatgatacaacattctggaatatctctacaggaatcattatgttgctttctcgttatataccaattattttgcaattaatgattgcatcaagtttagtgaataaaaaatcataccatcaagataaatatacaatagcgattgataaaccttattttggcgtatcactaatcgtatttatcgttttactaagtggtttgacatttattccagtactattacttggtcctattggtgaatttttaactttaaaataa

SEQ ID NO: 406557 - DNA, 2028 bp, Staphylococcus aureus
atgcatcatgtaaataaatatttcaatcaaacaatggtgatagaagctttgaaaatgagtttttataagctgaatcttaaacaattaataaaaaatccgataatgtttgtcgttgaggttggaatgattttaacgttgatattaatatgttttcctgacatatttggaactagctatctatcgcgaggttatttgattacaatttttatcatattattaataactatattgtttgctaatttttcagaagcctttgctgaaggtcgtggaaaagcgcaagctgatagtttaagacaagcacaatcaaatttaactgctcgattgatagaagaaaatggtgcgtatcggatagtgaacgccacagagttaaaagccggacaaaatattcgggtagaaaatggagaaacaatccctgctgatggcgttgtaataaatggattagcaaccgttgatgaatctgcaattactggtgagtctgcacctgtgataaaagaatcaggtggcgattttgatggagtcattggcggtacacttgtaacatctgattggttagaaatacgtgttgagagtgaagcgggtacatcttttttagataaaatgattgccttagttgaaggggcggaaagaaataaaacaccaaatgaaattgcactttttacattattaacaacgttaacaattatatttttagtcgttattgtaacgttatatccaatagcatcttacctgcatttaattttacctattgcgatgctcattgcgttaacagtatgtttaataccaacgacaatcggtggtttgttatcggcgattggtattgcaggcatggatcgtgttactcaattcaatgtattagcgaaaagtgggcgtgctgtagaagtatgtggagatgtcgatgtaatgattttagacaagacaggcacaatcacttatggcaatcgaatcgctagtgaatttttaccagtgaatcaacaaatgcttgaaaaattgatagtcgctgcttatatgtcatcaatctacgatgatacgccagaaggaaaaagtattgtacgattagcgaagcagatgtatataaatgagctgcctaaagacattgatggcacatataagccttttacagctgaaactagaatgagcggaatcattacaaatgaaatatcggtattcaaaggtgcacctaatagtatgataaatcttgtcaaacaacaacaaggcaatattcctcttaatattgagtctctctgtatggatgtatcgagtaaaggtggcacaccattaatagtcattgaaaacaatgtcatgcttggcgtgatttatttaaaagatgtgattaaagatggtcttgtagaacgatttactgaattgagaaaaatggggattgaaacagttatgtgtacaggtgataatgctttaacagcagctacaattgcaaaagaagccggggttgatagatttgttgcagagtgtaaacccgaagataaaattaaagtcatcaaagatgaacaagcgaaaggccatattgttgcgatgacaggagatggtacaaatgatgcacctgcgctagcacaagcgaatataggattagctatgaactcagggacaattagtgctaaagaggcagctaatctaattgatttagattcgaatcctacaaagttaatagaggttgtaaaaataggcaaacaattattaatgacgagaggtgcattaacgacatttagtttggctaatgacgtagcaaaatactttgcaattttacctgcactaatgatgtcaacaattccagaaatgacttcactaaatattatgcatttatcgtcacctaaatctgcaattatatcagctttgatattcaatgcattaatcattgttgccttaattccaattgccatgaaaggtgtaaaagtaaagggttacagcattgatagaatctttataaataatatgttgatttatggattaggtggattaatcgtcccgtttttaggcattaaattaatagatatgattgtacaattttttgtgtaa

SEQ ID NO: 406558 - DNA, 561 bp, Staphylococcus aureus
atgaatacgataagaaatagtatttgtttaacgataataactatggtattatgtggatttttattcccgttagctatcacgttaattggtcaaatatttttttatcaacaagcaaatggcagtttaattacgtatgacaatcgtatagttggatcaaaattgattggacagcactggacagagacacgatattttcacgggagaccgagtgcagttgattataatatgaatcctgaaaaattatataaaaacggcgtatcttcaggtggaagtaatgaatcgaatggaaacaccgaattaatagcacgcatgaaacatcatgttaaatttgggaattcaaatgtaacaatagatgctgcaacaagttctgggtcgggcttagatccgcatattacggtcgaaaatgcattgaagcaagcacctcgtattgctgatgctcgtcatgtatctacttcaagagtggccgacttgattcaacatcgtaagcagcgtggtgtgttaacaaatgattatgtgaatgtgcttgaactaaatatcgctcttgataagatgaaagattga

SEQ ID NO: 406559 - DNA, 480 bp, Staphylococcus aureus
atgtcagattatactaagttgactaagagtcctaagtcagcattgttgtattactacattacgaatggcttagaatttatattgagtgtagctgtgtatgtcattttttattttatatggttaagatttgaatggccacattacttactttatattttgttggttttaggtgctctgagtacattaaaattatttattaagcctttatggcaatatcattgtcgcttttataaagttgatcaactaagtgtacaatatcgtacatcattttttatatataaagaagaaacgagtcgaattgaacgtttacaatacttgtcgattaaatctaatccaattagtaaagtgcttaatttgtataaagttggatttatgactgcaggtcatactatttatttaccgatgatgtctcatgacgatgttaaaataatcgaagagagaactatgtcgaatttgagaggggttgaaagtgatgtctga

SEQ ID NO: 406560 - DNA, 1584 bp, Staphylococcus aureus
atgtctgaacctcaaaaattacatccgatttcatattttaatggcataatcaatgctatcaaacaaaacatagtcgtcttttttattttcattatctttcaattgaaagattttgattatacgaatcccgaatcatatttatggataggtattgtatttgtattctttttaatatcatacatttctcaaattgtcggaattatgaacacgcgatattggattgaggataattatttcattttaacaacaggtatttttaataaaaagcgtaaagaattaaatataaaacgtattcagtccgttgatatgacacaaggggtcgtcaatcaaattattggtggtgtggatttacaaatcaaaacaccaagtgatggtattgtcttaagtgttatttcgaaaaaacaaggtgaatatcttgaacgatatattgatcaattgcaaacagagttgaagacagaagtggcgcaaaagtctagtgctgagaagaatgacaactgtaatcatgacattgaaggtaatgtggaagacatcgcagaaggtcgcttagatgaagtgcagaacactgatagtatgcttaatcagaaaaataaacgcattcctatatatcagatgaattttaaagaatcactatttatggcaatgaccagtggcgccattggtgtaacgttagcagctttagtaccgatttacggggctgtaagagagttgatcccatggtcgaagctaaatcatgaaattagtcaatgggttcaaattgtaagtatttcagtattaatcatcattttactagtattaatagtggcatatattattggaacgattataacaatgataagattttatggcttttcggtgatgcttgaaaatgagcaacttaaaattgaatatggtctctttaacaagaagaaagtaactgtaccaacgaaacgattgcaagctgttgttgaacgtcagtcatatatacgaagattatttggctacacagcaatacattttatcatcacaagtgattttgaaaataaaaaaatcgaagatgatgacaatgattcaggtagtgtgccgatattgccgtttattaaacgagacaaagcatatcaaattatccagaatttagtaccagatttatcttatcaacaagttaatgaaggtatgcctttgtcaggtttccacagacactttttaatacctagtattattgtcatagctatggcaggtataggctgttatttttggaatcaattattattgttatttacgattataacaatagtcattattggtttatttgtgatcaaaggatatctttatgtcaaacatgcgggttttaaaatgacagaagaacaaattactatccagaatttcgagctattgaaacgaaatatttattattttaaagcgcatcacattataggatttgacacttggcaacatacattacttaaacgcaacaatttaaataattttagctttattgttgctaaaggtgtgggagcccaatcgattaacttaaaatacgcaagaagtgaagatgcaaataaattgaaatcatggtatttaagaggtgaaaatgatgagggattataa

SEQ ID NO: 406561 - DNA, 495 bp, Staphylococcus aureus
atgatgagggattataattttatgtcaccacacgctaaaaaagtgatgaggttaagtgctgtgctgttttggatacccatagcgcttgtacttttaatcgcatttaatattttgaactggctattttgggagattttagataaccatttatccattgttagtagtgtgattataatattacttgttgctgttttcacgcttgttatagcgccagtctatcgatataagcactgcagatatgcatttgaaaaacaccatttgcgtgtacgaaacggcattttatttttggatgaaaaggtaataccatattttcgtattcaaaatattgatatcgatgttggtcctataatgagacgctatcgattagcaactttgaccctttatacagcgggtggtcaagctgaaattgaattaatagatagaagtgaagcacgtagattgaaacgatggttaaataacgagagacatttagaaaacaataaaaatgaggaataa

SEQ ID NO: 406562 - DNA, 360 bp, Staphylococcus aureus
atgatacatggaattggtgtagatttaatcgaaatcgatcgaatacaagcgttatatagtaagcaaccaaaattggttgagcggattttaactaaaaatgaacagcacaaattcaacaatttcacacatgagcaacgtaaaattgaatttttagctggcaggtttgctacaaaagaagcgttcagtaaagcattaggcacaggcttaggaaaacatgtagcttttaacgatatagactgttacaacgacgaacttggcaaaccaaagattgattacgaagggtttatcgtacatgttagtatctcacacactgagcattatgcgatgagccaagttgttttagaaaagtcagcattttaa

SEQ ID NO: 406563 - DNA, 1149 bp, Staphylococcus aureus
atgtcggataaatattatagatctgcgtatatgaatgtagatttaaacgctgttgcatcaaatttcaaagtattcagtacattgcatccaaataaaacagtgatggctgtcgttaaagccaatgcctatggactaggtagtgttaaagtagcacgtcatttaatggaaaatggcgccacattttttgctgtagcaacgttagatgaagcgatagaacttagaatgcatgggattactgctaaaattttagtcttaggtgtgttaccagctaaagatattgataaagcgatacaacaccgagttgccttaacggttccgtctaaacagtggttgaaagaagcaattaaaaacatttctggtgagcaagagaaaaagttatggttgcacattaaattagatacaggaatgggacgtttaggtattaaagatactaaaacgtatcaagaagtgattgaaatcattcaacaatatgagcaacttgtatttgaaggcgtgtttacacactttgcctgtgctgacgaaccaggagatatgacaactgaacaatatcaacgttttaaagatatggtcaatgaagcaattaaacctgaatatatacattgtcagaactcagcaggctctctattaatggattgccaattctgtaatgcaataagaccaggaatttccctttatggatattatccatcagagtatgtacagcaaaaagttaaagtacaccttaaaccaagtgtgcaattaattgctaatgtagttcaaacaaagacgctacaagcgggtgagtctgtaagttatggtgcaacttatacagctactgacccaactacaatagcattgttacctattggatatgcagatggctatttacgcataatgcaaggtagctttgtaaatgtaaatggtcatcaatgcgaagttattggtcgcgtatgtatggatcagacaattgttaaagtgccagatcaagttaaagctggagattcggtgattttaatagataatcatagagaaagtccacagtcggtagaggtggtagctgaaaagcaacatactattaattatgaagtgctttgtaacttgtcgagacgtttgccgcgaatctatcatgatggtgatcaacgttttgtaacaaatgaattgttaaaataa

SEQ ID NO: 406564 - DNA, 171 bp, Staphylococcus aureus
atgttatcttttagtcaaaatagaagtcatagcttagaacaatctttaaaagaaggatattcacaaatggctgatttaaatctctccctagcgaacgaagcttttccgatagagtgtgaagcatgcgattgcaacgaaacatatttatcttctaattcaacgaatgaatga

SEQ ID NO: 406565 - DNA, 363 bp, Staphylococcus aureus
atgattagacgaggagatgtttatttagcagatttatcaccagtacagggatctgaacaagggggagtcagacctgtagtcataattcaaaatgatactggtaataaatatagtcctacagttattgttgcggcaataactggtaggattaataaagcgaaaataccgacacatgtagagattgaaaagaaaaagtataagttggataaagactcagttatattattagaacaaattcgtacacttgataaaaaacgattgaaagaaaaactgacgtacttatccgatgataaaatgaaagaagtagataatgcactaatgattagtttagggctgaatgcagtagctcaccagaaaaattag

SEQ ID NO: 406566 - DNA, 1002 bp, Staphylococcus aureus
gtggaagaatttaagcaacattataagggtttaattgatgaaagtttaacgtgccaagataaagtagaattgataaaaaagtgtgagaaatacactgacgaagtgattcgtaaggacgtcttgcctgaagacattgtcgatattcacaaaaactatatattgacgttaaacttaacgcgtgaagatgtgttcaagacattagatgtcttacaagaaatcgttaaaggctttggttatagttatcgagattatcaaagattggtagataaacttcaagttcacgataaagagatagacttagcttctagcttacaacaaacaatgcttaaaacagatattccacaatttgatagtattcaaattggcgttatttcagtggcggcacaaaaagtaagtggagattattttaatttaattgaccataacgatggcacaatgagctttgctgttgcagatgtcattggaaaaggtataccagctgctttagcaatgagtatgataaagtttggcatggattcttatggacactcacaattaccgagtgatggtttaaaacgtttaaatcgtgttgttgaaaagaatattaatcaaaatatgttcgtcacaatgttttatggtttatatgaagaaatgaaccatttattgtattgtagttcagctggtcatgagcctggatatatttatcgcgctgaaaaagaagaatttgaagaaatttcagttagaggtagagtgttaggaatcagttcacaaacacgatatcaacaacaagaaattccaatataccttgatgatttaattatcattttaacggatggtgtgactgaagctagaaatagtgaaggtacctttatagataaacaaaaacttttagaatatattaaaaaacataaacatatgcacccacaagatattgttcaaattatctatgaagcaattttaaagcttcaaaacccaaataaaaaagatgatatgactattttgattataaaaagagtaaattaa

SEQ ID NO: 406567 - DNA, 327 bp, Staphylococcus aureus
atgaatcttaatatagaaacaaccactcaagataaattttacgaagttaaagtcggtggagaattagatgtttatactgtgcctgaattagaagaggttttaacacctatgagacaagatggaactcgtgatatttatgttaatttagaaaatgtgagttatatggattcgacaggtttaggtttattcgtaggtacattaaaagcattaaaccaaaatgataaagaactatacattttaggtgtgtcagatcgtatcggtagactatttgaaattactggtcttaaggatttaatgcatgttaatgaaggaacggaggtcgaataa

SEQ ID NO: 406568 - DNA, 480 bp, Staphylococcus aureus
atgcaatctaaagaagattttatcgaaatgcgcgtgccagcatcggcagagtatgtaagtttaattcgtttaacactttctggcgttttttcgagagctggtgctacatatgatgatattgaagatgccaagattgcagttagtgaagctgtgacaaatgcagttaaacatgcatacaaagaaaataacaatgtgggcattattaacatatattttgaaattttagaagataaaattaaaattgttatttctgataaaggtgacagttttgattatgaaacaactaaatcaaaaataggtccttacgataaagacgaaaatatagactttttacgcgaaggtggcctaggtttatttttaatcgaatctttaatggatgaagtcacagtatataaagaatctggtgtgacaatcagtatgactaagtatataaaaaaagagcaggtgcgaaataatggcgaaagagtcgaaatcagctaa

SEQ ID NO: 406569 - DNA, 771 bp, Staphylococcus aureus
atggcgaaagagtcgaaatcagctaatgaaatttcacctgagcaaattaaccaatggattaaagaacaccaagaaaataagaatacagatgcacaggataagttagttaaacattaccaaaaactaattgagtcattggcatataaatattctaaaggacaatcacatcacgaagatttagttcaagttggtatggttggtttaataggtgccataaatagattcgatatgtcctttgaacggaagtttgaagcctttttagtacctactgtaatcggtgaaatcaaaagatatctacgagataaaacttggagtgtacatgttccgagacgtattaaagaaattgggccaagaatcaaaaaagtgagcgatgaactaaccgctgaattagagcgttcaccttctatcagtgaaatagctgatcgattagaagtctcagaagaagaagtgttagaagcaatggaaatgggacaaagttataatgcgttaagtgttgatcattccattgaagctgataaagatggttcaactgttacgctattagatattatggggcaacaagatgaccattatgacttaactgaaaaacgtatgattttagaaaaaatattacctatattatctgatcgcgaacgagaaatcatacaatgtacgtttattgaaggattgagtcaaaaagagacaggtgagcgtatcggtttaagtcaaatgcatgtatcacgacttcagagaacggcaattaagaaattacaagaagcagcacatcaatag

SEQ ID NO: 406570 - DNA, 2139 bp, Staphylococcus aureus
ttgattaattcaatcatagagaaatatcaatttagtaaaaaacaaattgaagcagtattaacactgctagaagaaaaaaatacagtaccatttattgcgaggtatcgaaaagagcaaactggtggactagatgaagttcaaataaagcaaattgatgacgaataccaatatatggtcaatttacaaaaacgtaaagaagaagttatcaaaaatatagaacagcaaggattacttactgaggaattaaagaaggatattttaaaacagaacaaattacaacgtgttgaagacctatataggccttttaaacaaaagaaaaagacaagggcaactgaggcgaaacgtaaagggttagagccattagcgatatggatgaaggcacgtaaacatgaagtctcaattgaagaaaaagcacaacaatttataaatgaagaagtgcaatcggttgaagatgctatcaaaggtgcacaagatattattgcggaacaaatttcagataatcctaaatatagaacaaaaattttaaaagatatgtatcatcaaggtgtgttaactacatctaaaaagaaaaatgctgaagatgaaaaaggtatttttgaaatgtactatgcatatagtgagccaattaaacgcattgctaatcatagagttttagctgttaatcgtggtgaaaaagagaaagtattatctgtaaagtttgaattcgatacgacatcagtagaggatttcattgcacgtcaagaaatcaatcataataatgtaaatcgcagttatattttagaggcgattaaagatagcttgaaacgcttaattgtcccttcgatagagcgtgaaatccatgctgatttaactgaaaaagctgaaaatcatgcaatagatgtttttagtgaaaacttaagaaatctattactgcaacctccaatgaaaggtaaacaaatattaggcgtagatccagcatttagaacaggttgtaaattagcagtcattaacccattcggtacttttatagcaaaaggtgtgatttatccgcatccaccagtttctaaaaaagaggcagcagagaaggattttgtacaaatggttaaagcgtatgatgtgcaattaattgcaattggcaatggtactgcaagtcgtgaaacagaacaatttgttgcagatttaattaaaaagcatcagttgccagtacaattcatcattgtcaatgaagcgggcgcttcagtatactcagcatcagaaattgctagagatgaatttcctgattttcaagtggaagaaagaagtgccgtatcaattggacgacgcgttcaagatccattaagtgaattagttaaaatcgatcctaaatctattggtgtcggacaataccagcatgatgttaatcaaaaagcactagaaaatgcattaactttcgttgttgaaacagcagttaaccaagtaggtgttgatgtcaatacagcatcatcatcattattacaatatgtgtctggtctaagttcgcaaattgctaaaaatataattgcatatagagaagaaaatggcgcaataaagcataataaagagttaagcaagattaagcgtttgggtgctaaaacttttgagcagagtataggatttttaagaatagtagacggttcagagccattggataatacatcgattcatcccgaaagctataaagtaacgtatcagttattagataaactcggatttggtggcaatgatttaggtagtgatgcattaaaagctaaattaaattcattggatatggatgaactggcgattgaattacaagtcggtgtacctacattagaggatattattaaatccttgaaagcacctaatcgagatccaagggacgagtttgaaacaccaatccttaaatccgatgtgctatcaattgaagatttacaagaaggaatgaaattgagtggtacagttagaaatgtagtagattttggagcatttgtagatataggtgttaaacaagatggacttgtccatgtttcgaaactttctaagaagttcgtaaaaaatccaatggatattgtcagtgttggtgatatcgttgacgtttggatttacagtattgacaaaaataaagacaaagtatcattaacgatgattgatccacatgaataa

SEQ ID NO: 406571 - DNA, 456 bp, Staphylococcus aureus
atgaataatgacaaacttcagcgaatggttgagaatctttcggaagaaaaatttggacgtacgtttcgacattgtgcatattttaataaaaggttacgtacaacaggcggacgttatcttttaaagtcccatgatattgaaattaatccaaaacaatatgagcattatggagaagatgctgttgtaaaaattatactgcacgaattgtgtcattatcacttgcatattgctggtaaaggttatcaacataaagatcaagattttaaacgattgagccaacaggttggagcgcctagattttgtaacagcattgaaagctatcaacaacgggcaaattatgaatattattgcactaaatgtcatgcaaaatatatacgtatccgtaaagttgatacgaatcgtatgcgttgcggacattgcaatggaaaattaagaatgaaaagacaattgaaataa

SEQ ID NO: 406572 - DNA, 402 bp, Staphylococcus aureus
atgaaaaaagtaaataacgacactgtatttggaattttgcaattagaaacacttttgggtgacattaactcaattttcagcgagattgaaagcgaatacaaaatgtctagagaagaaattttaattttactaactttatggcaaaaaggttctatgacgcttaaagaaatggacagatttgttgaagttaaaccgtataagcgtacgagaacgtataataatttagttgaattagaatggatttacaaagagcgtcctgttgacgatgaaagaacagttattattcatttcaatgaaaagttacaacaagagaaagtagagttgttgaatttcatcagtgatgcgattgcaagtagagcaacagcaatgcaaaatagtttaaacgcaattattgctgtgtaa

SEQ ID NO: 406573 - DNA, 564 bp, Staphylococcus aureus
atgaaattagaacgtatactccctttttcaaaaacacttattaaacaacatataacaccagaaagtattgttgtagacgcaacttgcggtaacggcaatgacactttatttttagccgaacaagtaccagaaggacatgtttatggtttcgacattcaagatttagctttggaaaatacacgtgataaagttaaggatttcaatcatgtttctttaataaaagatggacatgaaaatattgaacatcatataaatgatgcacataaaggtcatattgatgcagccatctttaacctaggttatttgcctaaaggtgataaatctatcgtgacaaagcctgacacgacaatccaagctattaattcattgctatcattaatgtcaattgaaggtattattgtacttgttatatatcatggtcatagcgaaggacaaattgagaagcatgcattgcttgattacttgagtactttggatcaaaagcatgcgcaagttttgcaatatcaatttttaaaccaacgtaatcatgctccattcatttgtgccatagaaaaaatttcttaa

SEQ ID NO: 406574 - DNA, 954 bp, Staphylococcus aureus
atgggcaatcatttccaatacgcttttgaaaacaaacgttatcacacatggaattaccatttaaaaaataaatttggacaaaaaatatttaaagttgcattggatggcgggtttgactgtcctaaccgcgatggcactgtagcacatggtggatgtacattttgttctgctgcaggtagcggagactttgcaggtaatcgtgcagattcaatcgcagtacaatttaaagaaattaaagaaaagatgcatgagaaatggcacgaaggaaaatatattgcttattttcaggcatttacaaatacacatgcaccggttgaagtattaaaagaaaaattcgaacctgtacttaaagaaccgggtgttgtgggattatctattggtacgcgtcctgactgtctaccagacgatgttgtcgaatatttagcagatttgaatcaacgaacatacttatgggttgaattaggactacaaacaatccatcagtcaacatctgatttaatcaatcgtgcccatgatatgaaaacttattatgatggtgtggcaaaattacgtaagcataatatcaatgtatgtacacacatcattaatggcttacctggcgaagactatgacatgatgatggctactgccaaagaagttgcacaaatggatgtacaaggtattaaaattcatttacttcatttgttaaaaggtacaccgatggtaaaacaatacgataaaggtttattaacttttatgactcaagaagagtacacaaacctagttgtggaccaattagaagtgattccccctgaaatgatcgttcaccgaattaccggtgatgatccaatagatatcatggtaggtccaatgtggagtgttaataaatgggaagtattaaatggcatcgatgctgaattagcacgtagaaattcttatcaaggcttgcgttacaagtctaaggtgaagcaatga

SEQ ID NO: 406575 - DNA, 1182 bp, Staphylococcus aureus
atgaatatacctaaatcagtctggtggctagtaattggcatggcgttaaatattactggttccagttttttgtggcctttaaatacaatttatatgaaacaagaacttggaaaaagtttaactgttgctggtttagtgctaatgataaattcatttggcatggttattggaaacttattaggtggttcactatttgataaattaggtggatacaagacgattttaattggaactttcacttgtctttgtagtacaacgctacttaatttctttcacgggtggccttggtatgctgtatggcttgtaatgttagggtttggtggcggaatgattattcctgcgatatacgctatggctggagcagtgtggccaaatggcggaagacaaacgtttaatgcgatatacttagcgcaaaatattggtgtggctgtcggtgctgcaatgggcggctttgtcgcagaatttagctttaactatatctttttagccaatcttattatgtatgttgtgtttgcgcttgtcgcggtaacgcaatttaatattgaaattaatgcgaaagttaaatatccaactcatttagatattactggtaaaaagaataaagcaagatttatttcattagtactaatttgtgcaatgtttgcaatttgttgggttgcatatattcaatgggagtctacaatcgcttcatttacacaatctattaatatttcaatggcacaatatagtgttttatggacaattaacggaataatgattttagtagcacaaccattaattaaaccgattctctatctgttaaaaggaaacttaaagaagcaaatgtttgtcggcatcatcatttttatgttgtcgttctttgtcacgagttttgccgaaaactttacaatatttgttgtcggtatgattattttaacttttggagaaatgtttgtatggccagcagttccaactatagccaatcagttagcgccagatggtaagcaaggacagtaccaaggttttgtgaattcagctgctacagtaggaaaagcatttggtccatttcttggtggtgtattagttgatgcgtttaatatgcgcatgatgtttatcggtatgatgctactacttgtatttgcattaatattattaatggttttcaaggagaataatacgcaacctaaaaaaatagatgcataa

SEQ ID NO: 406576 - DNA, 2418 bp, Staphylococcus aureus
gtgttgaattacaaccacaatcaaattgaaaagaaatggcaagactattgggacgaaaataaaacatttaaaacaaatgataacttaggtcaaaagaaattttatgctttagacatgtttccatatccatcaggtgctggtttacatgttggacatcctgagggctatacagcaacagatatcatttcaagatataaaagaatgcaaggatataatgtattacatccgttggggtgggatgcattcggattaccagcagagcaatatgctttagacactggcaacgacccacgtgaatttacaaagaaaaatatccaaacttttaaacgacaaattaaagaattagggttcagttatgattgggatcgtgaagttaatacaacagatccagaatactataaatggacacagtggattttcatacagttatataacaaaggtttagcatacgttgatgaagttgcagttaactggtgtccagcattaggcactgttttatctaacgaagaagtgattgatggtgtctctgaacgtggtggacatccagtttatcgtaagccgatgaaacaatgggtacttaaaatcacagaatatgcagatcaattattagcagatttagatgatttagattggcctgagtctttaaaagatatgcagcgcaattggattggacgttctgaaggggccaaagtttcatttgatgtagataatacggaaggaaaagtagaagtatttacgactagaccagatacaatctatggtgcatcattcttagtcttaagtcctgaacatgcattagttaattcaattacaacagatgaatataaagaaaaagtaaaagcttatcaaacagaagcttctaaaaagtcagatttagaacgtacagatttagcaaaagataaatcaggtgtatttactggtgcatatgcaactaatcctttatctggtgaaaaagtacaaatttggattgctgattatgtattatcaacatatggtactggagcaattatggcagtaccagcgcatgatgacagagattatgaatttgctaaaaagtttgatttgccaatcattgaagtcatcgaaggtggaaatgttgaagaagcagcatacactggtgaaggtaaacatattaattctggtgaacttgatggtttagaaaatgaagcggcaattactaaagctattcaattattagagcaaaaaggtgctggcgaaaagaaagttaattacaaattaagagattggttattcagtcgtcagcgttattggggcgaaccaattcctgtcattcattgggaagatggaacaatgacaactgttcctgaagaagagctaccattgttgttacctgaaacagatgaaatcaagccatcagggactggtgagtctccactagctaatattgattcatttgtaaatgttgtagatgaaaaaacaggtatgaaaggacgtcgtgaaacaaatacaatgccacaatgggcaggtagttgttggtattatttacgttacatcgatcctaaaaatgaaaatatgttagcagatcctgaaaaattaaaacattggttacctgttgatttatatatcggtggagtagaacatgcggttcttcacttattatatgcaagattttggcataaagtcctttatgatttggctatcgtacctactaaagaacctttccaaaaattatttaaccaaggtatgattttaggagaaggtaatgagaagatgagtaaatctaaaggaaatgtaatcaatcctgatgatatagtacagtctcatggtgcagatactttgcgtctttacgaaatgtttatgggacctttagatgctgcaattgcatggagtgaaaaaggattagatgggtctcgtcgattcttagatcgcgtatggcgtttaatggtaaatgaagatgggacattgagttcaaaaattgtaactacaaataataaatctttagataaagtttataaccaaactgttaaaaaggtaacagaagactttgaaacattaggatttaatactgctattagtcaattaatggtatttattaatgagtgttataaagttgatgaagtttataaaccttacattgaaggcttcgttaaaatgttagcacctattgcaccacatatcggtgaagaattatggtcaaaattaggacatgaagagtctattacgtaccaaccttggccaacttatgacgaagcactacttgtagatgatgaagtagaaatcgttgttcaagtgaatggtaaattgagagctaaaattaaaattgctaaagatacatcaaaagaagaaatgcaagaaattgccttatctaatgacaatgttaaagcgagtattgaaggtaaagacatcatgaaagtcatcgctgttcctcaaaaattagtcaatattgtagctaaataa

SEQ ID NO: 406577 - DNA, 312 bp, Staphylococcus aureus
atgaagtcaattactacagatgaattaaaaaataaacttttagaatctaaaccagttcaaattgttgatgttcgtactgatgaagaaacagcaatgggatatattcctaatgcaaagttaattccaatggataccattccggataatttaaattcatttaataaaaatgaaatatattatattgtatgtgctggtggagttcgaagcgctaaagttgtagaatatttagaggcaaatggcattgatgccgtaaatgtcgaaggcggcatgcacgcatggggcgatgaaggtttggaaataaaaagtatttaa

SEQ ID NO: 406578 - DNA, 6561 bp, Staphylococcus aureus
atgaatttgttaaagaaaaataaatatagtattaggaagtataaagtaggcatattctctactttaatcggaacagttttattactttcaaacccaaatggtgcacaagccttaactacggataataatgtacaaagcgatactaatcaagcaacacctgtaaattcacaagataaagatgttgctaataatagaggtttagcaaatagtgcgcagaatacacctaatcaatctgcaacaaccaatcaagcaacgaatcaagcattggttaatcataataatggtagtatagtaaatcaagctacgccaacatcagtgcaatcaagtacgccttcagcacaaaacaataatcatacagatggcaatacaacagcaactgagacagtgtcaaacgctaataataatgatgtagtgtcgaataataccgcattaaatgtaccaactaaaacaaatgaaaatggttcaggaggacatctaactttaaaggaaattcaagaagatgttcgtcattcttcaaataaaccagagctagttgcaattgctgaaccagcatctaatagaccgaaaaagagaagtagacgtgcggcaccggcagatcctaatgcaactccagcagatccagcggctgcagcggtaggaaacggtggtgcaccagttgcaattacagcgccatatacgccaacaactgatcctaatgccaataatgcaggacaaaatgcacctaacgaagtgctgtcatttgatgacaatggtattagaccaagtaccaaccgttctgtgccaacagtaaacgttgttaataacttgccgggcttcacactaatcaatggtggcaaagtaggggtgtttagtcatgcaatggtaagaacgagcatgtttgattcaggagataataagaactatcaagcacaaggaaatgtaattgcattaggtcgtatacatggaactgatacgaatgaccatggcgattttaatggtatcgagaaagcattaacagtaaatccgaattctgaattaatctttgaatttaatacaatgactactaaaaacggtcaaggcgcaacaaatgttattatcaaaaatgctgatactaatgatacgattgctgaaaagactgttgaaggcggtccaactttgcgtttatttaaagtacctgataatgtgagaaatctcaaaattcaatttgtacctaaaaatgacgcaataacagatgcgcgtggcatttatcaactaaaagatggttacaaatactatagctttgttgactctatcggacttcattctgggtcacatgtttttgttgaaagacgaacaatggatccaacagcaacaaataataaagagtttactgtaacaacatcattaaagaataatggtaattctggtgcttctctagatacaaatgactttgtatatcaagttcaattacctgaaggtgttgaatatgtgaacaattcattgactaaagattttccaagtaacaattcaggcgttgatgttaatgatatgaatgttacatatgatgcagcaaatcgtgtgataacaattaaaagtactggaggaggtacagcaaactctccggcacgacttatgcctgataaaatactcgatttaagatataaattacgtgtaaataatgtgccgacaccaagaacagtaacatttaacgagacattaacgtataaaacatatacacaagatttcattaattcagctgcagaaagtcatactgtaagtacaaatccatatactatcgatatcatcatgaataaagatgcattacaagccgaagttgacagacgtattcaacaagctgattatacatttgcgtcattagatatctttaatggtctgaaacgacgcgcacaaacgattttagatgaaaatcgtaacaatgtaccattaaataaaagagtttctcaagcatatattgattcattaactaatcaaatgcaacatacgttaattcgaagtgttgatgctgaaaatgcagttaataaaaaagttgaccaaatggaagatttagttaatcaaaatgatgaattgacagatgaagaaaaacaagcagcaatacaagttatcgaggaacataaaaatgaaataattggtaatattggtgaccaaacgactgatgatggcgttactagaatcaaagatcaaggtatacagaccttaagtggggatactgcaacaccggttgttaaaccaaatgctaaaaaagcaatacgtgataaagcaacgaaacaaagggaaattatcaatgcaacaccagatgttactgaagacgagattcaagatgcactaaatcaattagctacggatgaaacagatgctattgataatgttacgaatgctactacaaatgctgacgttgaaacagctaaaaataatggcatcaatactattggagcagttgttcctcaagtaactcataaaaaagctgcaagagatgcaattaaccaagcaacagcaacgaaaagacaacaaataaatagtaatagagaagcaactcaggaagagaaaaatgcagcattgaacgaattaactcaagcaaccaaccatgctttagaacaaatcaatcaagcaacaacaaatgctgatgttgataacgccaaaggagatggtctaaatgccattaatccaattgctcctgtaactgttgttaagcaagctgcaagggatgccgtatcacatgatgcacaacaacatatcgcagagatcaatgctaatcctgatgcgactcaagaagaaagacaagcagcaattgacaaagtgaatgctgctgtaactgcagcaaacacaaacattttaaacgctaataccaatgctgatgttgaacaagtaaagacaaatgcgattcaaggaatacaagcaattacaccagctacaaaagtaaaaacagatgcaaaaaatgccatcgataaaagtgcggaaacgcaacataatacgatatttaataataatgatgcgacgctcgaagaacaacaagcagcacaacaattacttgatcaagctgtagccacagcgaagcaaaatattaatgcagcagatacgaatcaagaagttgcacaagcaaaagatcagggcacacaaaatatagtagtgattcaaccggcaacacaagttaaaacggatactcgcaatgttgtaaatgataaagcgcgagaggcgataacaaatatcaatgctacaactggcgcgactcgagaagagaaacaagaagcgataaatcgtgtcaatacacttaaaaatagagcattaactgatattggtgtgacgtctactactgcgatggtcaatagtattagagacgatgcagtcaatcaaatcggcgcagttcaaccgcatgtaacgaagaaacaaactgctacaggtgtattaaatgatttagcaactgctaaaaagcaagaaattaatcaaaacacaaatgcaacaactgaagaaaagcaagtggctttaaatcaagtggatcaagagttagcaacggcaattaataatataaatcaagctgatacaaatgcggaagtagatcaagcgcaacaattaggtacaaaagcaattaatgcgattcagccaaatattgttaaaaaacctgcagcattagcacaaatcaatcagcattataatgctaaattagctgaaatcaatgctacaccagatgcaacgaatgatgagaaaaatgctgcgatcaatactttaaatcaagacagacaacaagctattgaaagtattaaacaagctaacacaaatgcagaagtagaccaagctgcgacagtagcagagaataatatcgatgctgttcaagttgatgtagtaaaaaaacaagcagcgcgagataaaatcactgctgaagtggcgaagcgtattgaagcggttaaacaaacacctaatgcaactgacgaagaaaagcaggctgctgttaatcaaatcaatcaacttaaagatcaagcaattaatcaaattaatcaaaaccaaacaaatgatcaggtagacacaactacaaatcaagcggtaaatgctatagataatgttgaagctgaagtagtaattaaaccaaaggcaattgcagatattgaaaaagctgttaaagaaaagcaacagcaaattgataatagtcttgattcaacagataatgagaaagaagttgcttcacaagcattagctaaagaaaaagaaaaagcacttgcagctattgaccaagctcaaacgaatagtcaggtgaatcaagcagcaacaaatggtgtatcagcgattaaaattattcaacctgaaacaaaagttaaaccagctgcacgtgaaaaaatcaatcaaaaagcgaatgaattacgtgctaagattaatcaggataaagaagcaacagcagaagaaagacaagtagcactagataaaatcaatgaatttgtaaatcaagccatgacagatattacgaataatagaacaaatcaacaagttgatgatacaacaagtcaagcgcttgatagcattgctttagtgacgcctgaccatattgttagagcagctgctagagatgcagttaagcaacaatatgaagctaaaaagcgcgaaattgagcaagcggaacatgcgactgatgaagaaaaacaagttgctttaaatcaattagcgaataatgaaaaacgtgcattacaaaacatcgatcaagcaatagcgaataatgatgtgaaacgtgttgaaacaaatggcattgctacactaaaaggtgtacaacctcatattgtaattaagcctgaagcacaacaagcaataaaagcaagtgcagaaaatcaagtagaatcaataaaagatacaccacatgcaacagttgatgaattagatgaagcgaatcaattaattagcgacacactcaaacaagcgcaacaagaaatagaaaatacaaatcaagatgctgctgttactgatgttagaaatcaaacaatcaaggcaatagagcaaataaaacctaaagtaagacgtaaacgagctgcgcttgatagcattgaagaaaataataaaaatcaactcgatgcaatccgaaatacgttggatactactcaagatgaaagagatgttgctattgatactttaaataaaattgtaaatacaattaaaaatgacattgcacaaaacaaaacgaatgcagaagtggatcgaactgagactgatggcaacgacaacatcaaagtgattttacctaaagttcaagttaaaccagcagcgcgtcaatctgttggtgtaaaagccgaagctcaaaatgcactaatcgatcaaagcgatttatcaactgaagaagaaagactagctgctaaacatttagtagaacaagcacttaatcaggctattgatcagatcaatcatgcagataagactgcccaagttaatcaagatagtataaatgctcaaaatattatttcaaaaattaaaccagcgacaacagttaaagcaacagcattacaacaaattcaaaatatcgctacaaataaaattaatttaattaaagcaaataacgaagcgacagatgaagaacaaaatattgcaatagcacaagttgaaaaagagttaattaaagctaaacaacaaattgctagtgcagtgactaatgcagatgtggcatatttattgcatgatgagaaaaacgaaattcgtgaaatcgaacctgttattaacagaaaggcgtctgctcgagaacaattgacaacattattcaacgataaaaaacaagcaattgaagcgaatattcaagcaacggtagaagaaagaaatagtatattagcacagttacaaaatatttatgacactgctattggacaaattgatcaagatcgtagcaatgcacaagttgataaaacagcatcattaaatctacaaacaatacatgatttagatgtacatcctattaaaaagccagatgctgaaaaaacgattaatgatgatcttgcacgcgtcactgctttagtgcaaaattatcgaaaagtaagtaatcgtaataaggctgatgcattaaaagctataactgctttaaaattacaaatggatgaagaattaaaaacagcacgcactaatgctgatgttgatgcagttttaaaacgatttaatgttgcattaagcgatatagaagcagtaattactgaaaaagaaaatagcttactgcgaattgataacattgctcaacaaacatatgcgaaattcaaagcgatcgcaacaccagaacaattagctaaagtaaaagtattaattgatcaatatgttgcagatggcaatagaatgattgatgaagatgcgacattaaatgacatcaaacaacacacgcaattcattgttgatgaaattttagcaattaaattaccagctgaagcgacgaaagtatcaccaaaagaaattcagccagctccaaaagtttgtacgcctattaaaaaagaagagacacatgaatcgcgcaaagttgaaaaagaacttccaaatacaggttctgaaggaatggatttaccattgaaagaatttgcactgattacaggtgcggctttgttagctagaagacgtactaaaaacgaaaaagaatcataa

SEQ ID NO: 406579 - DNA, 1269 bp, Staphylococcus aureus
atgtatcaaacaattattatcggaggcggacctagcggcttaatggcggcagtagctgcaagcgaacaaagtagcagtgtgttactcattgaaaaaaagaaaggtctaggtcgtaaactcaaaatatctggtggcggtagatgtaacgtaactaatcgattaccatatgctgaaattattaagaacattcctggaaatgggaaatttttatatagtcccttttcaatttttgataatgaatccatcatagatttttttgagtctaggggtgttaaattaaaagaagaagatcacgggcgtatgtttccagtttccaacaaagcacaagacgtggttgatacattagtgacaactatcgaacgccaacatgtaacgattaaagaagaagaagctgttagtagaatcgaagttaatacagaccaaactttcactgtacatactcaaaataatagttatgaaagccattcgctagtgattgctacaggtggtacaagtgtccctcaaactggttcaactggtgatggttataagttcgcacaagatttaggtcataccattactgagttattcccgatcgaagttccaattacatcagctgaacctttcatcaaatccaatcgtctaaaaggtttaagtttaaaagatgttgaattgtcagtacttaagaaaaatggtaaaaaacgcatcagtcatcaaatggatatgttatttactcattttggtatcagtggtccagctgcattaagatgtagtcagtttgtttataaagaacaaaaaaatcaaaagacacagcacatttctatggcaatcgatgcatttcctgaattaaaccatgaacaattaaaacaacacatcacatcattattatcggacacaccagataaaatcattaaaaacagtttgcatggtctaattgaagagcgctacttactgttcatgctggaacaagcaggaatcgatgaaaataccacatcacatcacttatcaaatcaacaattgaacgacttagtaaatatgtttaaagggtttgtatttaaggtgaacgggacattacctatagataaggcatttgtcacaggtggtggtgtgtcacttaaagaaattcaacctaaaacaatgatgtctaaattagttccgggattatttttatgtggtgaagtattagatatacatggttatactggtggttataatattacaagtgcactcgtaacaggacatgtcgctggattatatgccggacattactcacatgcatcaatggaataa

SEQ ID NO: 406580 - DNA, 1662 bp, Staphylococcus aureus
atgagtgaaagtaaagaaatggtgcgtggaacctttttaattaccattagtatattaattaccaaggtattgggcgtactttttatcattccattcaactatttaattggtggacaagaaaatatggcgccgttcacatacgcttatgcaccatataatattgcaattgcagttgcgacagcaggtgtaccattagcagcttcgaaatatgttgcgaaatataatgctattggggcatataaagtaagtcagaaattttataaatcgagttttattgtaatgagtattaccggtgttttaggtttcttggtactgtatttcttagcaccttatatttctgaattaacattagctagaaacattcatgataaaaacggttggtcagtagatgatattacttggattataagaatcattagtatggttgttatctttattcctgtattagcgacatggagagggatattccaaggttataaatctatggggccaacagcagtgtcagaagtaactgagcaaattgcacgcgtgattttcatattaatcggaagttatttagtactaaatgtctttgatggctctattttattagccaatggtattgctacttttgcagcagcagttggtgcgattattggtatattcacactctggtattactggagaaagcgtaagcataatattgatcgtatggtcgaatctgattacacagatatagatgtgtcatatggcaagatgtataaagaaattattgcttatagtataccgttcgttattgtaagtttgaattatccattatttaacttagtagatcaatttacacataacggtgctttatctttagttggtataccttcacagttacaagatatattctttaatatgctaaatatgtcaactaataaaattgtaatgattccgacatcattaagtgctggttttgcagtgagtttaattccttatattacaaaaacatttgcagaaggtcgcttacatgaaatgcatcatcaaattagaacatctattggtgtattaatgtttataactgttccagctagtattggaattatggccttggcacaaccattattcacagttttctatggttacgatccaattgttttaggtcatgaccctaaccatgatggtagtcgcttattattctattatgcgcctgtagcaatactaatttcactattaagtgtaacggcatcaatgttacaaggtatagataaacagaaattaacagtttatgttattttagcttctgtagttatcaagttagcgttaaactatccattaattatgttattccatacacctggtgcaattttaagtactagtatcgcattattatttgcaattggatgtaatttctatattcttaaaaaatatgcgaagtttaaattcagctatagttggattcattttgcaaaaatattcttgtattcatttattatgatgctaggtgtagaattagtatttttccttgcaaatctattcttagaacctactaaacttggttacttaatcattattattttaggtgttacagtaggtattctaatttacggtacaatcacaattaaaacgcgtcttgcggacgaattcttaggtgaaattcctgaaaaattaagacgtagagttaggtttttacgatga

SEQ ID NO: 406581 - DNA, 696 bp, Staphylococcus aureus
atgagaatagataaatttttagcaaatatgggcgtcggtacacgtaatgaggtcaaacagttacttaaaaaaggccttgtaaatgtcaacgaacaagtaattaaatcaccaaaaacacatatagaaccagaaaacgataagataacagttcgtggagaattaatagaatacattgaaaatgtctatattatgttaaataagccaaaaggttatatatcagcaactgaagatcatcattcaaaaaccgttattgatttaatacctgaataccaacatctaaatatttttccggttggtcgtcttgataaagatacagaagggcttttattgataacgaatgatggtgattttaatcatgaattaatgagtccaaacaaacatgtttctaaaaaatatgaagttatttcagcaaatcctatcactgaagacgacattcaagcttttaaagagggtgtaacactgactgatggcaaggttaagcctgcaatattaacttatattgataatcaaacgtcacacgtaacaatttatgaaggaaaatatcatcaagttaaacgaatgtttcatagcattcaaaatgaggtattacatttaagacgtatcaaaattgctgatttagaattggacagcaatttagattcaggagaatatcgtttattaactgaaaatgattttgacaaattaaattataaataa

SEQ ID NO: 406582 - DNA, 423 bp, Staphylococcus aureus
atggcaaaaggtaatttatttaaagcgattttaggtataggtggcgctgtagcagctgtacttgttacacgtaaagatagtcgtgacaagctgaaagcagaatataataaatataaacaagatcctcaaagctataaagataatgctaaggataaagcgacgcaattaggaacaattgctaatgaaacaattaaagaagtaaaaacaaatccgaaagaatatgctaatagattaaaaaataatccaaaagcatttttcaaagaagaaaaatcaaaatttaccgaatatgacaataagactgacgaaagtattgaaaaaggtaaatttgatgatgaaggtggcgcagcaccaaataataatttacgtatcgtcactgaagaagatttaaaaaagaataaaaatgcattatctgataaagaataa

SEQ ID NO: 406583 - DNA, 1410 bp, Staphylococcus aureus
atgtggaaagaaaaagttcaacaatacgaagatcaaatcattaatgacttaaaaggattattagcaattgaaagtgtgagagatgatgcaaaagcatcagaagacgcaccagttggtccaggtcctcgtaaggcattagactacatgtatgaaattgcacatagagatggatttacaacacatgatgtggatcatattgcaggaagaattgaggcaggtaaaggaaatgacgtattaggtatcttatgtcatgttgacgttgttcctgctggtgatggatgggatagtaatccgttcgagccggttgtaacagaagatgctatcatagctagaggtacacttgatgacaaaggtccaacaattgctgcttattatgcaattaagatattagaagatatgaatgtggattggaagaaacgtattcatatgattattggtacggatgaagaatctgattggaaatgtacggatcgctattttaaaacagaagaaatgccaacattaggttttgcaccagatgcagaatttccatgtattcatggtgaaaaaggcattacaacatttgatttagttcaaaataaacttactgaagatcaagatgaacctgattatgaattaataacttttaaatctggtgaacgttacaacatggtacctgatcatgcagaagcaagagtgcttgttaaagaaaatatgacagatgttattcaagactttgagtactttttagaacaaaatcatttacaaggtgatagtactgttgatagtggcattctagttttaacagttgaaggtaaagcggttcatggtatggatccatctatcggtgtgaatgcgggtctttacttactaaaattcttagcatcattaaatcttgataataatgcacaagcgtttgtagcatttagtaatcgctacttatttaattcagattttggtgaaaagatgggaatgaaattccatacagatgtcatgggtgacgtgacaactaacattggtgttattacatatgataatgaaaacgcaggtcttttcggtatcaacttacgctacccagaaggatttgaatttgaaaaagctatggatcgttttgcaaatgagattcaacaatatggctttgaagtgaaattaggtaaagtccaaccaccacattatgttgataaaaatgatccttttgtacaaaagttagttactgcatatagaaatcaaacaaatgatatgactgaaccttatactataggtggcggtacttatgcgagaaacttagacaagggtgtagcatttggcgcaatgtttagtgattctgaagatttaatgcatcagaaaaatgaatatatcactaaaaaacagttatttaacgcaactagtatttacttagaagcaatttattcattatgcgtggaggaataa

SEQ ID NO: 406584 - DNA, 849 bp, Staphylococcus aureus
atggaaaaaatttttttaaatggtgagtttgtaagtccaagtgaagcaaaggtttcatacaacgacagaggatacgtatttggcgatggtatttatgaatacattcgagtatataatggtaagttatttacagtaacagaacattatgaaagatttttacgtagtgccaatgagattggtttagatttaaattattctgtagaagaattaattgaactatctcgtaaattagttgatatgaatcaaattgaaactggggcaatttatattcaagcaacgcgtggtgtagctgaaaggaatcatagcttcccgacacctgaagtagaaccagcaattgttgcttatacaaagagttatgatcgtccttatgatcatttagaaaatggtgtgaatggtgttaccgttgaagatatccgatggttacgttgcgacattaaaagcttgaacttattaggaaatgtattagcaaaagaatatgctgtgaaatataatgcagttgaagcaattcaacatcgaggtgaaactgtaactgaaggatcttcaagtaatgcttatgcaattaaagacggtgtgatttatacacatccgattaacaactatattcttaatggtattacacgaattgtaattaaaaaaattgccgaagactataacatcccatttaaagaagaaacgtttactgtagatttcttgaaaaacgcagatgaagttattgtttcaagtacttcagctgaggttacacctgttattaaattagatggtgaaccagttaatgatggtaaagttggcccaattacacgtcaactacaagaaggatttgaaaagtatatagagtcacacagtatttaa

SEQ ID NO: 406585 - DNA, 792 bp, Staphylococcus aureus
ttggagcagttttatcaattagggtggacacttgattcagcaggtggtgcatctggtgaagcatatatggctgaacaagatggacaaaagttgtttttaaaacgaaattcaaatccatttattgcggcattatcagcagaaggtattgtgcccaaattagtatggacgaaacgcatagaaacaggcgaggttgttacagcacaacattggaaaaatgggcgtgaactatcttcaaacgaaatgaagcaaacaagagttgcacatttattaaagaagatacacaattctagacctttattaagtatgttaaagcgtatggaaatggaacctattactcctgagattatgcttaataaaattaatgcctctttatcaagagaagttttaacacatcatattgtgagaaaatcattaacctatttagaagagcatataccgagtttagattcgcgttttttcactgttgtacatggtgatgtgaatcataataattggttattatccgatcgagatgaactatttttagttgattgggaaggtgcaatgattgcagacccggcaattgatatcggaatgctgctttacaactatgttccacaacaacaatggtctgaatggcttgaaacatatggtgttcaagagagcttgaatttaaataaacgtatgaaatggtatacggtaattcaatctataggtcttgttcaatggtatgaagagcaaaaaagatataaggatatgaacacttggcttaaattcctaaatgaagttatgaatagtaacatgtttatttaa

SEQ ID NO: 406586 - DNA, 645 bp, Staphylococcus aureus
atgagagttcgatacaaaccatgggctgaagattatttaaaagatcatcctgaattggttgacatggacggtcaacatgcagggaaaatgactgaatggtttgataaaacgcaaccgatacacattgaaattggttcgggtatggggcagtttattacaacattagctgctcaaaatcctcatattaactatatttcaatggaacgtgagaaaagtatcgtttataaagtattggataaagttaaagagatgggtttaacaaatttaaagattatttgtaatgacgccattgaattaaatgaatattttaaagacggcgaagtttcgcgtatttatttgaacttttcagatccatggccaaaaaatcgtcatgcaaaacgacgtttaacgtatcatacgtttttagcgttgtatcaacaaatcttaaatgatgaaggagatttacattttaaaactgataacagaggactatttgcctacagtttagaaagtatgtctcaatttggaatgtattttacaaaaataaatctaaatttacatcaagaagacgatggcagtaatattttaacagaatatgaaaagaaattttcggataaagggtcacgtatttatcgtatggaagcgaaattccattcacaaaaatag

SEQ ID NO: 406587 - DNA, 843 bp, Staphylococcus aureus
atgaaaatcggggatatatctattcattatctaaatggtggcaatacaaaaatggatggcggtgcaatgtttggtgttgttccgaagccgttgtggtcaaagcaatacaatgcaaatgaacgaaatcaaatcaatttaccgacacatccaattttgattcaaacggctcaatataatttgattatagatgcaggtattggtaatggtaaattatctgaaaagcaattacgtaattttggagtagatgaagaaagtcatataattgctgatttggcaaattataatttaacgccaaaggatattgattatgtgctaatgacacatatgcattttgatcatgctgccggtttgactgatcaagcaggacatgcaatttttgaaaatgcgattcatgttgtgcaacaagatgagtggcatgagtttattgcacctaatataagaagtaaatcaacttactgggataagaataaaggcgattatagtaacaagttgattttattcgaaaaacattttgaaccggttctgggtatcaagatgcaacatagtggaggtcatagctttggccacacgattattacgattgaaagtcaaggagataaagcagttcatatgggtgatatattcccaactactgcacataaaaatcctctatgggtaacggcatatgatgattatcctatgcaatcgattcgtgaaaaagaacgcatgataccatattttattcagcaacaatattggttcttgttttatcatgatgaaaactactttgctgtaaaatacagcgataatggtgaaaacatagatgcatatattttacgtgaaacattagttgataataactaa

SEQ ID NO: 406588 - DNA, 315 bp, Staphylococcus aureus
atgatgactaaactgaaatatataattccaacaataattgcagtagccattgtaattatttctaccatttcaatcatccaatttattaatcgtaaacgctataatcccgttaaagtacttaatgaagtaaaatcatattttatgaatgtcaaaggctcatatatcgtttatgaaccattcgttcatcctgaaactgataaataccgtttagtttatcaaggtggaattacaactattaaaaatggtcaaaatattcattatgatttttatgcagatgcatatactggtgaagtcattaacattgtagagcgttaa

SEQ ID NO: 406589 - DNA, 1077 bp, Staphylococcus aureus
atgaacataaataaaaaagtaacattacaacgaattcaaactttaactgagcttcatggggcaccaggttttgaagaagaagtaaaaaattatatgactcagcaaatggcgccgtacgtagatgaatttattgaaaatcgtatgggtggattttttggtgtgaaaaaatctaaaaatccaaatgcaaaacgtgtaatgattgcagcacatatggatgaaatcggatttatgattacaaatatcactaaaaatggaatgattcaattcacaaatttaggtggtgttgcaaatgatatttggcaaggacaacgcttagtaattaaaaatagaaatggcgataaaattatcggtgttgtttctaatatacctaaacattttcgtactggtagtgaaggtgcaccggaaattaaagatttaacattagatataggtgctcaaaatgaagatgaggtgcgtgagcgcggaatagatataggagatacaattgtacctcacacgccattcacacagttatctgaacatcgatatagtgctaaagcatgggataatcgttatggttgtgtcttggcaattgaaatactagaattattaaaagatatagaattagatgtagacttgtatgttggcgcaaatgttcaagaagaggttggattacgaggtgcgaaagcatctgcagagatgatagacccagacgttgcatttgtagttgattgttcacctgccaatgacgttaaaggaaaccaaccattatctggtgaacttggtaaagggacgttaattcgcataaaagacggtacaatgattttaaagcctgtatttagagactatttattaaagttagtagaagcacatgacattgaacatcaatactatatgtcaccaggtggaacagatggtggagaaattcataaagctaatattggtattccgactgcagttattggtgtatgtgcacgatatattcatagtacagactcagtatttgatataagagactattttgcagctagatctttactttcagaagccatttgtaatttagataataatcaaatagaaacattacaatataaataa

SEQ ID NO: 406590 - DNA, 312 bp, Staphylococcus aureus
atgaaacaacttgaatcagaacaacaatttgaatctttaaaacaaggtgctacagtatttgaattcactgcaggctggtgtccagattgtagagtgatagaaccagatttaccggaattagaagcgagatatcctatgtttgacttcgtatcagtagaccgtgataaatttatggatatttgtattgaaaatggtattatgggtattccaagttttctagtatataaaaatggagaactgcttggaagttatattggaaaagaacgaaaatcaattgaacagatagatgcatttttagctcaatacgtgtaa

SEQ ID NO: 406591 - DNA, 858 bp, Staphylococcus aureus
atgaatacctttcaaatgagagataaattaaaggaacgtttaagccatttagacgttgattttaaatttaatcgtgaagaagaaactttgcgtatttatcgaacagataataacaaaggtatcacgattaaacttaacgctatagtcgcaaaatatgaagataaaaaagaaaaaattgtagatgaaattgtttattacgttgatgaagctattgcacaaatggcagataaaacccttgagagtatatcatctagtcaaattatgcctgtcattagagcgactagctttgataaaaaaactaaacaaggtgttccttttatctatgatgagcatactgcagaaacagcagtttattatgcagtcgatttagggaaatcatatcgtctaattgacgaaagcatgttagaggatttgaagttaactgaacaacaaataagagaaatgtctctgtttaatgttagaaaattgtcaaattcatatacgactgatgaagtaaaaggtaatattttttattttattaactcaaatgacgggtatgatgcaagtaggatactaaatactgcatttttaaatgaaattgaggcacaatgtcaaggcgaaatgctcgtagcagtgccacaccaagatgtgttaattattgcagatatacgcaataaaacaggatatgatgtgatggcacatttaacaatggaatttttcactaaaggtctagttccaattacatcattatcctttggatataaacagggtcatcttgaaccgatatttattttaggtaaaaataataaacaaaaaagagatccaaacgtgattcagcgtttagaagcaaatcgtcgtaaatttaataaagataaatag

SEQ ID NO: 406592 - DNA, 597 bp, Staphylococcus aureus
atgaatttattttacaatcctaaatatgtaggagatgtcgcatttttacaaattgaaccagttgaaggtgaattaaactacaataaaaaaggtaatgttgttgaaattactaatgaaggtaatgttgtaggttataatatttttgaaatttcaaaagatataacaattgaagaaaaaggtcatattaaattaactgatgaacttgtaaatgtattccaaaagcgtatttcagaagctggttttgattataaattaaatgctgatctatcaccgaaatttgtagttggctacgttgaaactaaagacaaacatcctgatgcagataaattaagtgtactaaatgtaaacgttggaaatgacacattacaaattgtatgtggcgcgcctaacgttgaagctggacagaaagttgttgttgctaaagtaggtgcagtgatgcctagcggtatggtaattaaagatgctgaattacgtggtgttgcctcaagcggtatgatttgttcaatgaaagaattgaatttacctaatgcacctgaagaaaaaggtattatggtattaaatgacagctatgaaattggacaagcattttttgaataa

SEQ ID NO: 406593 - DNA, 3825 bp, Staphylococcus aureus
atgagctggtttgataaattattcggcgaagataatgattcaaatgatgacttgattcatagaaagaaaaaaagacgtcaagaatcacaaaatatagataacgatcatgactcattactgcctcaaaataatgatatttatagtcgtccgaggggaaaattccgttttcctatgagcgtagcttatgaaaatgaaaatgttgaacaatctgcagatactatttcagatgaaaaagaacaataccatcgagactatcgcaaacaaagccacgattctcgttcacaaaaacgacatcgccgtagaagaaatcaaacaactgaagaacaaaattatagtgaacaacgtgggaattctaaaatatcacagcaaagtataaaatataaagatcattcacattaccatacgaataagccaggtacatatgtttctgcaattaatggtattgagaaggaaacgcacaagccaaaaacacataatatgtattctaataatacaaatcatcgtgctaaagattcaactccagattatcacaaagaaagtttcaagacttcagaggtaccgtcagctatttttggcacaatgaaacctaaaaagttagaaaatggtcgtatccctgtaagtaaaccttcagaaaaagttgagtcagataaacaaaaatatgataaatatgtagctaagacgcaaacgtctcaaaataaacaattagaacaagaaaaacaaaatgatagtgttgtcaaacaaggaactgcatctaaatcatctgatgaaaatgtatcatcaacaacaaaatcaatgcctaattattcaaaagttgataatactatcaaaattgaaaatatttatgcttcacaaattgttgaagaaattagacgtgaacgagaacgtaaagtgcttcaaaagcgtcgatttaaaaaagcgttgcaacaaaagcgtgaagaacataaaaacgaagagcaagatgcaatacaacgtgcaattgatgaaatgtatgctaaacaagcggaacgctatgttggtgatagttcattaaatgatgatagtgacttaacagataatagtacagatgctagtcagcttcatacaaatggcatagagaatgaaactgtatcaaatgatgaaaataaacaagcgtcaatacaaaatgaagacactaatgacactcatgtagatgaaagtccatacaattatgaggaagttagtttgaatcaagtatcgacaacaaaacaattgtcagatgatgaagttacggtttcgaatgtaacgtctcaacatcaatcagcactacaacataacgttgaagtaaatgataaagatgaactaaaaaatcaatccagattaattgctgattcagaagaagatggagcaacgaataaagaagaatattcaggaagtcaaatcgatgatgcagaattttatgaattaaatgatacagaagtagatgaggatactacttcaaatatcgaagataataccaatagaaacgcgtctgaaatgcatgtagacgctcctaaaacgcaagagtacgcagtaactgaatctcaagtaaataatatcgataaaacggttgataatgaaattgaattagcaccgcgtcataaaaaagatgaccaaacaaacttaagtgtcaactcattgaaaacgaatgatgtgaatgataatcatgttgtggaagattcaagcatgaatgaaatagaaaagaataacgcagaaattacagaaaatgtgcaaaacgaagcagctgaaagtgaacaaaatgtcgaagagaaaactattgaaaacgtaaatccaaagaaacagactgaaaaggtttcaactttaagtaaaagaccatttaatgttgtcatgacgccatctgataaaaagcgtatgatggatcgtaaaaagcattcaaaagtcaatgtgcctgaattaaagcctgtacaaagtaagcaagctgtgagtgaaagaatgcctgcgagtcaagccacaccatcatcaagatctgattcacaagagtcaaatacaaatgcatataaaacaaataatatgacatcaaacaatgttgagaacaatcaacttattggtcatgcagaaacagaaaatgattatcaaaatgcacaacaatattcagagcagaaaccttctgttgattcaactcaaacggaaatatttgaagaaagtcaagatgataatcaattggaaaatgagcaagttgatcaatcaacttcgtcttcagtttcagaagtaagcgacataactgaagaaagcgaagaaacaacacatccaaacaatactagtggacaacaagataatgatgatcaacaaaaagatttacagtcatcattttcaaataaaaatgaagatacagctaatgaaaatagacctcggacgaaccaacaagatgttgcaacaaatcaagctgtacaaacatctaagccgatgattcgtaaaggcccaaatattaaattgccaagtgtttcattactagaagaaccacaagttattgagtcggacgaggactggattacagataaaaagaaagaactgaatgacgcattattttactttaatgtacctgcagaagtacaagatgtaactgaaggtccaagtgttacaagatttgaattatcagttgaaaaaggtgttaaagtttcaagaattacggcattacaagatgacattaaaatggcattggcagcgaaagatattcgtatagaagcgcctattccaggaactagtcgtgttggtattgaagttccgaaccaaaatccaacgacagtcaacttacgttctattattgaatctccaagttttaaaaatgctgaatctaaattaacagttgcgatggggtatagaattaataatgaaccattacttatggatattgctaaaacgccacacgcactaattgcaggtgcaactggatcagggaaatcagtttgtatcaatagtattttgatgtctttactatataaaaatcatcctgaggaattaagattattacttatcgatccaaaaatggttgaattagctccttataatggtttgccacatttagttgcaccggtaattacagatgtcaaagcagctacacagagtttaaaatgggccgtagaagaaatggaacgacgttataagttatttgcacattaccatgtacgtaatataacagcatttaacaaaaaagcaccatatgatgaaagaatgccaaaaattgtcattgtaattgatgagttggctgatttaatgatgatggctccgcaagaagttgaacagtctattgctagaattgctcaaaaagcgagagcatgtggtattcatatgttagtagctacgcaaagaccatctgtcaatgtaattacaggtttaattaaagccaacataccaacaagaattgcatttatggtatcatcaagtgtagattcgagaacgatattagacagtggtggagcagaacgcttgttaggatatggcgatatgttatatcttggtagcggtatgaataaaccgattagagttcaaggtacatttgtttctgatgacgaaattgatgatgttgttgattttatcaaacaacaaagagaaccggactatctatttgaagaaaaagaattgttgaaaaaaacacaaacacaatcacaagatgaattatttgatgatgtttgtgcatttatggttaatgaaggacatatttcaacatcattaatccaaagacatttccaaattggctataatagagcagcaagaattatcgatcaattagagcaactcggttatgtttcgagtgctaatggttcaaaaccaagggatgtttatgttacggaagcagatttaaataaagaataa

SEQ ID NO: 406594 - DNA, 1314 bp, Staphylococcus aureus
atgacacactatcattttgtcggaattaaaggttctggcatgagttcattagcacaaatcatgcatgatttaggacatgaagttcaaggatcggatattgagaactacgtatttacagaagttgctcttagaaataaggggataaaaatattaccatttgatgctaataacataaaagaagatatggtagttatacaaggtaatgcattcgcgagtagccatgaagaaatagtacgtgcacatcaattgaaattagatgttgtaagttataatgattttttaggacagattattgatcaatatacttcagtagctgtaactggtgcacatggtaaaacttctacaacaggtttattatcacatgttatgaatggtgataaaaagacttcatttttaattggtgatggcacaggtatgggattgcctgaaagtgattatttcgcttttgaggcatgtgaatatagacgtcactttttaagttataaacctgattacgcaattatgacaaatattgatttcgatcatcctgattattttaaagatattaatgatgtttttgatgcattccaagaaatggcacataatgttaaaaaaggtattattgcttggggtgatgatgaacatctacgtaaaattgaagcagatgttccaatttattattatggatttaaagattcggatgacatttatgctcaaaatattcaaattacggataaaggtactgcttttgatgtgtatgtggatggtgagttttatgatcacttcctgtctccacaatatggtgaccatacagttttaaatgcattagctgtaattgcgattagttatttagagaagctagatgttacaaatattaaagaagcattagaaacgtttggtggtgttaaacgtcgtttcaatgaaactacaattgcaaatcaagttattgtagatgattatgcacaccatccaagagaaattagtgctacaattgaaacagcacgaaagaaatatccacataaagaagttgttgcagtatttcaaccacacactttctctagaacacaggcatttttaaatgaatttgcagaaagtttaagtaaagcagatcgtgtattcttatgtgaaatttttggatcaattagagaaaatactggcgcattaacgatacaagatttaattgataaaattgaaggtgcatcgttaattaatgaagattctattaatgtattagaacaatttgataatgctgttattttatttatgggtgcaggtgatattcaaaaattacaaaatgcatatttagataaattaggcatgaaaaatgcgttttaa

SEQ ID NO: 406595 - DNA, 492 bp, Staphylococcus aureus
atggattggattttaccaattgctggaattatcgctgcgattgcattcttaattttatgtatcggtatcgtagctgtattaaattctgttaagaaaaacttagattatgttgcaaaaacacttgacggtgtagaaggtcaagttcaaggtattactcgtgaaacaacagatttacttcataaagtaaaccgtttaactgaggatatccaaggtaaagtagatcgtttaaactcagttgtagatgctgttaaaggtatcggtgactcagtacaaacgttaaacagctctgtagatcgtgtaacaaattcaattacacataatatttctcaaaatgaagataaaatctcacaagttgttcaatggtcaaatgttgcaatggaaattgcagacaaatggcaaaatagacactaccgtcgtggaagtgcaaattacaaagctaataatgtagcaactgatgcaaatcatagctatacttctagagtagataaataa

SEQ ID NO: 406596 - DNA, 1359 bp, Staphylococcus aureus
atgacgcagcaacaaaatgataaaagaacattaaaaaataaacacacttatcaaaatgaaccactaccaaaccgtaaagattttgttgttagttttataactggcgcgcttgttggttcagctttaggtttgtattttaaaaataaagtttatcaaaaagcagatgatttaaaagtcaaagaacaagaactgtcgcaaaagtttgaagaaagaaaaacgcaacttgaagaaacggttgcctatacaaaagaacgtgttgaaggatttttaaacaaatctaaaaatgagcaagcggcattaaaggcacaacaagcagcgataaaagaagaagcaagtgcaaataatttaagtgatacatcacaagaagcacaagagattcaagaagctaaaagagaagcacaagcagaagcggataaaagtgtggctgtatcaaataaagaatcaaaagcagtggcattgaaagcacaacaagcagcgataaaagaagaagcaagtgcaaataatttgagtgatacatcacaagaggcacaagagattcaagaagctaaaaaagaagcacaagcagaaacagataaaagtgcagctgtatcaaatgaagaaccaaaagcagtggcattgaaagcacaacaagcagcgataaaagaagaagcaagtgcaaataatttaagtgatatatcacaagaggcacaagaggttcaagaagctaaaaaagaagcacaagcagagaaagacagtgacacattaactaaagatgcaagtgcagcaaaggtagaagtatcaaaaccagagtcacaagctgaaagattagcaaacgctgcaaaacagaagcaagctaaattaacaccaggttcaaaagagagtcaattaactgaagcgttatttgcagaaaaaccagttgctaaaaatgacttgaaagaaattcctcaattagttactaaaaagaatgatgtatcagagacagagacggttaatatagataataaagacactgttaaacaaaaagaagctaaatttgaaaatggtgttattacacgtaaagctgatgaaaaaacaactaataatacagctgttgacaagaaatcaggtaaacaatctaaaaaaacaacaccttcaaataaacgaaatgcatcaaaagcatctacaaataaaacttcaggtcagaaaaagcaacataataagaaatcatcacaaggtgcaaagaaacaaagtagttcaagtaagtcaactcaaaagaataatcaaactagtaataagaattcaaaaacaacaaatgctaaatcatccaatgcatcaaaaacgccaaatgctaaagttgagaaagctaaaagtaaaatagagaaacgtacattcaatgactaa

SEQ ID NO: 406597 - DNA, 1092 bp, Staphylococcus aureus
atgagtaataaattagaatcatacagaagtgagattgtatcactgaatcatcaaattttagacttattatctaaacgtggtgaactagcacaaaaaattggggaagaaaaattaaaacaaggtacacgtatttatgatccacaacgtgaaaaagaaatgcttaacgacttaatcgatagtaacaaaggaccattcaacgataatactattaagcaattatttaaagaaattttcaaagcctctacagatttacaaaaatctgaaaatgaaaaacatttatatgtatcacgtaagttgaaacctgaagatacgattgtaacatttgataatgggggcattattggagacggcaataaatcatttgtatttgggccatgttcagttgaatcatttgaacaagttgaagctgttgctaaaaacttacatgctaaaggtgaaaaatttattcgtggcggtgcatttaaaccacgtacatcaccatatgatttccaaggcctaggtgttgaaggacttaaaatacttaaacagattaaagataaatatgatttaaatgttgtcagcgaaatcgtaaatccaaatgattttgaagtggctgatgagtatttagacgtattccaaattggtgcacgtaatatgcaaaacttcgagttattaaaagaagctggccgtacgaaaaagcctattctattaaaacgtggtttatctgctacaatcgaagagtttgtttatgcagctgaatacattgcttcacaaggtaatcaaaacattattttatgtgaacgtggaatccgaacttatgaaaaggcgacacgtaacactttagatatttcagcagtaccaattttaaaacaaggtacacacttaccagtcatggtagatgttacgcatagtacaggtcgtaaagatatcatgttaccaactgcgaaagcagcattagcagttggtgctgatggagttatggctgaggtgcatccagatccatctgttgcacttagtgatgcgggtcaacaaatggatttagatgaattccaagcattttatgatgaattaaagcctttagctgatttatataacgctaaaaagttaaaataa

SEQ ID NO: 406598 - DNA, 990 bp, Staphylococcus aureus
atgacagttactatatatgatgtagcaagagaagcgcgtgtctctatggccacagtgtcgcgtgttgttaatgggaaccaaaatgttaaagcagaaactaaaaataaagttaacgaagtcattaagcgtttgaattatcgtccaaatgctgttgctagaggtttagctagtaaaaagacaacaacagtaggtgtgatcattccagatatatctaatatctattattcacaacttgctcgtggacttgaagatattgcaacaatgtataaatatcactcaattatttcaaattcagataacgatcctgaaaaggaaaaagaaatttttaataacttattaagtaaacaggttgatggtattattttccttggtggtacaattactgaagaaatgaaagaattgataaatcaatcatctgtacctgtagtagtatcaggaacaaatggtaaggatgcacatatagcatcagttaatattgattttactgaagctgcgaaagaaattacgggagaattaattgaaaaaggcgctaaatcatttgctttagtaggtggagaacattctaaaaaagctcaagaagatgttttagaaggtttaactgaagtgttaaataaaaatggccttcaattaggtgatacattgaattgttctggtgctgaaagttataaagaaggcgtaaaagcttttgccaaaatgaaaggcaatttgccagatgccattttatgtatcagcgacgaagaagcaattggtattatgcatagtgcaatggatgctggtattaaagttccagaggaattacaaattattagtttcaataatacacgattagttgagatggttagaccacaactttctagtgttattcaaccattatatgatatcggtgcagtagggatgcgcttattaacaaaatatatgaacgatgaaaagatagaagaaccaaatgtagttttacctcacagaattgaataccgaggaactacaaaataa

SEQ ID NO: 406599 - DNA, 1170 bp, Staphylococcus aureus
atgcaacaacattcatcaaaaactgcatatgtttattcagataagttattacaatatcgatttcatgaccaacatcccttcaatcaaatgcgtttaaaattaacaacagagctacttttgaatgcaaatttattgtctccagaacaaatagtacaacctagaattgcaacagatgacgaattaatgttaattcataaatatgattacgtcgaagctattaagcatgcttcacatggcattatcagtgaagatgaggctaagaaatatggattaaatgatgaagagaatggtcaatttaagcatatgcaccgccatagtgccacaattgttggaggcgctttaactttagcagatcttattatgtcaggcaaagtattaaatggttgtcacttaggtggtggtttgcatcacgctcaacctggtcgagcaagtggtttttgtatatacaatgatattgcaattaccgcacaatacttagctaaagaatacaatcaacgcgttttaatcatagataccgatgcacatcatggagatggtacacaatggagtttctatgccgataaccatgttactacttattctatccatgaaaccggaaaatttcttttcccaggctctggtcactatactgagcgcggtgaagatatcggctatggacacactgtaaatgtcccacttgaaccgtatacagaagatgcatcatttttggagtgttttaaattaacagttgagcctgtcgtaaagagttttaaacctgatattattctaagcgtaaatggtgtcgatatacattatcgtgatccactaactcatctaaattgtacgttacattcattatatgaaattccatattttgtaaaatatttagctgattcttatacgaatggaaaggtaattatgtttggtggcggaggctacaatatttggagagtcgtaccacgtgcatggagtcatgtattcttaagtttaattgatcaaccaattcaaagtggttatttaccgttagaatggattaataaatggaaacattattcatctgaattattacctaaaagatgggaagatcgtttaaatgattatacctatgtcccccgcacaaaagaaattagtgaaaaaaataaaaaattagctttacatatagcgagttggtacgaatctactcgtcaataa

SEQ ID NO: 406600 - DNA, 633 bp, Staphylococcus aureus
atgaatcatttaaagacgtatcaatccgaagattattacattcatgacaagcaatttgttattgaaggtcctttaacacacgaagatttgaaagcgcttactttcgatgcgcatttaaccgcatttagagatgctgaagatcagtataaagctttgttagaaattacaacattaccagaaggtagaatttatgttgctcgccaagatcaactcattgtgggttatgtcactttccactatcctgatgaaattgagcgctggtctacaggtaagcttccatatttaatcgaattgggggcaattgaagtcagcatcaattttaggcaattacaacttgcagaaaagctgatacaacttagcctttctacaccagaattcgagaattatatcgttataactacagaatattactggcattgggatttaaaaaattcaaagttagatgtatttgactataaaaaattaatgcagcggttaatggcaactggtggacttgaaatattcgctacagatgatccagaaataacaagtcatccagctaattgtttaatggcaagaattggcaaaaacattacattagaacagcaacaagcgtttgatgatattcgttatatgaatcggtttttcttttaa

SEQ ID NO: 406601 - DNA, 1707 bp, Staphylococcus aureus
atgaaagtcgaagtttataaaggagcgcaaggtaaacataaccttaaagattatgaagaaacatataatacttttgattggaaagacgtagaacaagcattttcttggagtgaaactggaaaaatgaacatggcatatgaatgcatagatcgccatgtagatcaaggattaggggataaaatagcgttaaattacaaagatgagcacagaaaagaatcgtatacttataaagatatgcaacggttatctaataaagcagcgaatgttttgtctgaacatgcagaagttgacaaaggtgacagagtatttatatttatgtcgcgtacacctgaactatattttgcgttgttaggtgttttaaaaattggtgcaattgttgggccgttatttgaagcatttatggaaaaggcagttgcggatagattagagaacagtgaagctaaagtgttaattactaataaggcattgttacctcgagtacctgtagataaattaccaaacttgaaaaaaattgttgtcgtagatgaggatgtagaagacaattacatagacttcattagtttgatggaaactgctagcgatgaatttgacattgaatggttaaagtcggatgatggtttgattttacattatacatcaggttctactgggcaacctaaaggtgtattgcatgttcaacaagcaatgttagtgcactatatttctggaaaatatgtattagatttacaagaagatgatgtttattggtgtacagcagatccaggttgggttacaggaacatcttatggtatttttgcaccatggttaaatggcgctacaaattgtatagctggtggtcgcttttcgccagaacagtggtatagtatgattgaagattttaaagtgacgatttggtatacggcaccaacagctttaagaatgttaatgagtgctggtgacgatattgttgagaaatatgacttgtcatcgttacgttcgattctatcagtaggtgagcctttaaatcctgaagttataaaatgggcgaaaaaagtatacggtttaacggtgttagatacttggtggatgacagaaacaggtggacatatgattgttaactatccaacgatggacgtcaagcttggctcaatgggcaaaccattacctggtattcaagctgcaattatcgatgatgcagggaatgaattaccaccaaatcgaatgggcaaccttgctataaaaaaaggctggccatcaatgatgtatcgtatctggaagaatccagaaaaatataaatcatattttattggagactggtatgtatctggtgattcggcatataaagatgaagatggttacttctggttccaaggacgtgttgatgatgtaattatgacagctggtgaacgagttggaccatttgaggttgagtctaaattggttgaacacgaagcagttgccgaagcaggaattattggtaaacctgatccggttcgcggtgaaataattaaggcgtttgttgcactgagaaaaggatatgaaccaacagacgaattaaaagaagaaattcgtatatttgttaaagaaggtttgtcggcacatgcagcaccacgtgaaatcgaatttaaagataaattacctaaaacacggtcaggtaaaattatgagacgtgtattaaaagcttgggaattaaatttagatgctggggatttaagtacaatggaataa

SEQ ID NO: 406602 - DNA, 1668 bp, Staphylococcus aureus
ttgactcatttatcagatttagatattgcgaatcaatcaacactacaaccaattaaggatattgctgcatcagtaggtatttcagaggatgcattagaaccttatggtcattacaaagctaaaatcgacattaataaaattacgccaagagaaaacaaagggaaagttgttttagtaactgcgatgagcccaacaccagctggtgaaggtaaatcaacggttacagttggtttagctgatgcattccatgagttaaataaaaacgttatggttgcattaagagagcctgctttaggaccaacatttggtatcaaaggtggtgcgactggtggtggttatgcgcaagtcttacctatggaagatatcaacttacatttcaacggagatttccatgcgattacaactgcaaataatgcattgtctgcgtttatcgataatcatattcaccaaggtaacgaattaggaatcgatcaaagacgtattgagtggaaacgtgtattagatatgaatgatcgtgcacttagacatgtaaacgttgggttaggtggacctacaaatggtgtaccacgtgaagatggctttaatattacagtagcgtctgaaattatggcgattttatgtttaagtagaagtattaaagacttaaaagataaaattagtcgtattactattggttacactagagatcgcaagccagttacagttgcagatttaaaagtggaaggtgcacttgcaatgattttaaaagatgcaataaaaccaaacttagtacaatcaattgaagggacacctgcattagttcatggtggaccatttgcgaatatcgcacacggttgtaactcaattttagcaactgaaacagcacgtgatttagctgatatcgttgtaacggaagctggatttggttcagacttaggcgctgaaaaattcatggacattaaagtgcgtgaagcaggatttgatccggcagctgtcgttgttgttgcgacaattcgtgcgttaaaaatgcatggtggtgtagcgaaagataatttaaaagaagaaaatgtagaagcagtaaaagcaggaattgttaatttagagcgtcatgttaataatattaaaaaattcggtgtagaaccggttgttgcaattaatgcatttatacatgataccgatgcagaagtagaatatgtaaaatcttgggctaaagaaaataacgtacgaattgccttaactgaagtttggaaaaaaggtggtaaaggtggcgttgacttagcaaatgaagtattagaagtcattgatcaacctaattcatttaaacctttatatgaattagaattaccattagagcaaaagattgaaaagattgtgactgaaatctatggcggttcaaaagtaacgtttagcagtaaagcgcaaaaacaattaaaacaatttaaagaaaatggttgggataattacccagtatgtatggcgaaaacacaatattcattctcagatgatcaaacgttgttaggtgcaccatcaggatttgaaattacaattcgtgaattagaagcgaaaacaggtgcaggatttatcgtagcgttgacaggtgcaatcatgactatgcctggtttacctaaaaaaccagcagcattaaacatggatgttactgatgatggtcatgcaattgggttattctaa

SEQ ID NO: 406603 - DNA, 2688 bp, Staphylococcus aureus
atgaacaaacatcacccaaaattaaggtctttctattctattagaaaatcaactctaggcgttgcatcggtcattgtcagtacactatttttaattacttctcaacatcaagcacaagcagcagaaaatacaaatacttcagataaaatctcggaaaatcaaaataataatgcaactacaactcagccacctaaggatacaaatcaaacacaacctgctacgcaaccagcaaacactgcgaaaaactatcctgcagcggatgaatcacttaaagatgcaattaaagatcctgcattagaaaataaagaacatgatataggtccaagagaacaagtcaatttccagttattagataaaaacaatgaaacgcagtactatcactttttcagcatcaaagatccagcagatgtgtattacactaaaaagaaagcagaagttgaattagacatcaatactgcttcaacatggaagaagtttgaagtctatgaaaacaatcaaaaattgccagtgagacttgtatcatatagtcctgtaccagaagaccatgcctatattcgattcccagtttcagatggcacacaagaattgaaaattgtttcttcgactcaaattgatgatggagaagaaacaaattatgattatactaaattagtatttgctaaacctatttataacgatccttcacttgtaaaatcagatacaaatgatgcagtagtaacgaatgatcaatcaagttcagtcgcaagtaatcaaacaaacacgaatacatctaatcaaaatacatcaacgatcaacaatgctaataatcaaccgcaggcaacgaccaatatgagtcaacctgcacaaccaaaatcgtcaacgaatgcagatcaagcgtcaagccaaccagctcatgaaacaaattctaatggtaatactaacgataaaacgaatgagtcaagtaatcagtcggatgttaatcaacagtatccaccagcagatgaatcactacaagatgcaattaaaaacccggctatcatcgataaagaacatacagctgataattggcgaccaattgattttcaaatgaaaaatgataaaggtgaaagacagttctatcattatgctagtactgttgaaccagcaactgtcatttttacaaaaacaggaccaataattgaattaggtttaaagacagcttcaacatggaagaaatttgaagtttatgaaggtgacaaaaagttaccagtcgaattagtatcatatgattctgataaagattatgcctatattcgtttcccagtatctaatggtacgagagaagttaaaattgtgtcatctattgaatatggtgagaacatccatgaagactatgattatacgctaatggtctttgcacagcctattactaataacccagacgactatgtggatgaagaaacatacaatttacaaaaattattagctccgtatcacaaagctaaaacgttagaaagacaagtttatgaattagaaaaattacaagagaaattgccagaaaaatataaggcggaatataaaaagaaattagatcaaactagagtagagttagctgatcaagttaaatcagcagtgacggaatttgaaaatgttacacctacaaatgatcaattaacagatttacaagaagcgcattttgttgtttttgaaagtgaagaaaatagtgagtcagttatggacggctttgttgaacatccattctatacagcaactttaaatggtcaaaaatatgtagtgatgaaaacaaaggatgacagttactggaaagatttaattgtagaaggtaaacgtgtcactactgtttctaaagatcctaaaaataattctagaacgctgattttcccatatatacctgacaaagcagtttacaatgcgattgttaaagtcgttgtggcaaacattggttatgaaggtcaatatcatgtcagaattataaatcaggatatcaatacaaaagatgatgatacatcacaaaataacacgagtgaaccgctaaatgtacaaacaggacaagaaggtaaggttgctgatacagatgtagctgaaaatagcagcactgcaacaaatcctaaagatgcgtctgataaagcagatgtgatagaaccagagtctgacgtggttaaagatgctgataataatattgataaagatgtgcaacatgatgttgatcatttatccgatatgtcggataataatcacttcgataaatatgatttaaaagaaatggatactcaaattgccaaagatactgatagaaatgtggataaagatgccgataatagcgttggtatgtcatctaatgtcgatactgataaagactctaataaaaataaagacaaagtcatacagctgaatcatattgccgataaaaataatcatactggaaaagcagcaaagcttgacgtagtgaaacaaaattataataatacagacaaagttactgacaaaaaaacaactgaacatctgccgagtgatattcataaaactgtagataaaacagtgaaaacaaaagaaaaagccggcacaccatcgaaagaaaacaaacttagtcaatctaaaatgctaccaaaaactggagaaacaacttcaagccaatcatggtggggcttatatgcgttattaggtatgttagctttattcattcctaaattcagaaaagaatctaaataa

SEQ ID NO: 406604 - DNA, 906 bp, Staphylococcus aureus
atgacgaatcaagacaacaatcatcaattgaatcatcgtatatatcattttgaaaagatatataaagctatcaaacatgtcattgtttttatatttatgattttcattgccatcgttgctatcgctgtgattgcgatgtctttatattttcatcatttaactaaaacgtccgactcattatcagatgatgctttaataaaaaaagttcgacaaatacctggcgatgaattattagatcataataacaaaaatttattatatgagtataaccattctcaaaactcactcattataggccctaaaacatcaagtccaaatgtcattaaagcattaacgtcatctgaagacactttattttataaacatgatggcatcttaccaaaggcgattttaagagcaatgatacaagatatttttaatactgatcaaagttcaggtggtagcacaattacacaacaacttgttaaaaatcaagttcttaccaacgaaaaaacatatagtagaaaagcaaatgaacttcgcctagcaattagattagaacacctactctcaaaagatgaaattatatatacatatttaaatatagttcccttcggtagagattataatggcgctaatatttccggaattgcatccgcttcatatagtctatttggtattccaccaaaagatttatcaattgcacaatctgcataccttatcggtttgttgcaaagcccatatggctatacaccctacgaaaaagatggaacgttaaaatcggataaagatttgaaatatagtattcaaagacaacattatgtattaaagcgtatgttaatcgaagatcaaatcactgaaaaagaatacaacgacgcattaaaatatgatattaaatcacatttgttaaatcgaaaaaagcgttaa

SEQ ID NO: 406605 - DNA, 1263 bp, Staphylococcus aureus
atgacgaatgtattaattgaagatttaaaatggagaggtcttatttatcaacaaactgatgaacaaggtattgaagatttattaaataaagaacaagtgacgttatactgcggtgccgatccaacggcagatagtttacatattggtcacttactaccattcttaacattaagacgttttcaagaacatggacatcgtcctatcgttttaattggcggtggtacaggtatgattggtgatccatcaggtaaatcagaagaacgtgtgctacaaacagaagaacaagtagataaaaatatcgaaggtattagtaagcaaatgcacaatatttttgaatttggaacagaccatggtgcagtgcttgttaataatagagactggttaggacaaatctcattaattagttttttacgtgactatggtaaacacgtcggcgttaattacatgttaggtaaagattcaatccaaagtcgtttagaacatggtatttcatatacagaattcacatacacgattttacaagctattgatttcggtcatttgaatagagaattgaattgtaagattcaagtaggtggatcagatcaatggggtaatatcacaagtggtattgaattaatgcgtcgtatgtatggtcaaacagacgcatacggtttaactattccgcttgtaactaaatcagatggtaagaaatttggtaagtctgagtcaggtgctgtttggttagatgctgaaaaaacaagtccttatgaattttatcaattctggattaatcaatcagacgaagatgtaattaaattcttaaaatactttactttcttaggaaaagaagaaattgatcgcttagaacaatctaaaaatgaagcaccgcatttacgtgaagctcaaaaaacattagctgaagaagtaactaaatttattcatggtgaagatgcattaaatgatgcaatccgtatttcacaagcattatttagtggtgatttaaaatcattatcagcgaaagaattaaaagatggatttaaagatgtgcctcaagtgacattatcaaatgacacaacaaatatcgttgaagtccttattgaaacaggcatttctccttctaaacgacaagcacgtgaagatgttaacaatggtgcgatttatattaatggtgagagacaacaagatgttaattatgctttagcaccagaagataaaattgatggcgaatttacgattattcgtcgcggtaagaaaaaatacttcatggttaactatcaataa

SEQ ID NO: 406606 - DNA, 1275 bp, Staphylococcus aureus
atgtcagattttaatcatacagatcattctacaacaaaccatagccaaacacctagatacagaagacctaaatttccatggtttaaaacagtcatcgttgcattgattgctggaattattggtgcacttctagtacttggtataggcaaagtattaaatagtacaattttaaataaagatggttcaactgttcagacaacaaataataaaggtggcaatcaattagacggtcaaagcaagaaattcggtaccgttcatgaaatgataaaatctgtctcccctacaattgttggagttattaacatgcaaaaagcatcaagtgtagacgacttattaaaaggcaaatcatctaaaccatctgaagctggagtaggttcaggtgttatctatcaaataaacaacaattcagcttatatcgttacaaacaatcatgttattgatggcgcaaatgaaattagagtccaattacataataaaaaacaagttaaagcgaaattagttggtaaagatgcagtaactgatattgctgtacttaaaattgaaaatacaaaaggtattaaagcgattcaatttgccaactcttcaaaagtacaaactggcgatagcgtattcgcaatgggtaacccattaggattacaatttgctaactctgtaacatctggtatcatttcagcaagcgaacgtacgattgacgctgagacaactggtggcaatacaaaagttagcgttcttcaaacagatgctgctattaacccaggtaactcaggtggcgcattagtagatattaatggtaatttagttggtattaactcaatgaaaattgctgcgacacaagttgaaggtatcgggtttgctattccaagtaatgaagttaaagtaacaattgaacaacttgtaaaacatggtaaaattgaccgcccttcgattggtattggtttaattaatttgaaagatattcctgaagaagagcgcgagcaacttcatactgatagagaagacggtatttatgtcgccaaagctgatagtgatattgatcttaaaaaaggtgatattattacagaaattgatggcaagaaaattaaagatgatgttgatttaagaagctatttatatgaaaataaaaaacctggtgaatcagtcactgttaccgttatccgtgatggtaaaacaaaagaagttaaagtgaaattaaaacaacaaaaagaacaaccaaaacgtcaaagccgatcagaacgtcaatcacctggccaaggcgatagagatttctttagataa

SEQ ID NO: 406607 - DNA, 618 bp, Staphylococcus aureus
atgtattcagtgattagtaagattttgaatttcattttagttaaaatgtcaaaatcattatacgtaatcggtaaagataatattcctaaggatagtaaatatgtcgtaacttgtacgcatgaaagttataacgaagtcattatgctaggtatggcattatatcctaatcaaattcattatatggctaaaaaagaattattcaaaaataaatggattggtaaatttttaacgtctttaaatgcatttcctgtagatcgtgaaaatccaggacctagtactttaaaacgcccaatcaatttgttgaaagataataagacagttggtatcttcccaacaggttctcgcacatcgcaagaaggtgcacctttgaaacgtggtgcttcaacaattgcaatgttaagtaagtcaccaatattacctgttgcttatgttggtcctactaagattcacggtcttttaacaggacaagcatacataaatattggcaaaccaatcgatattaacgatttacctaaagatttaaaacgaaacgagcgtatcgattatattacaaaagagattgaaacacgaacagcaaagttacaacaagaattgcatgaaattgtaaaaagtttataa

SEQ ID NO: 406608 - DNA, 1467 bp, Staphylococcus aureus
atgtataaatttttccaaaatttagggcgttcgttaatgttaccagttgccattttaccggctgcagcaattattgccggaattggtaatacgttaaatgcacttcatgcgacgccgaaaatcgcaatgttctttactacggtaggtactacgattttagagcaattaggtattttatttgcaattggtgtagctataggaatggcaaagaaaaatgatggtgcagtcgcgcttgcagctacgttaggatattttttagttacagttgtattatcaccaatgaaattagcgcctttattaggaatgaaagcttcggaaataaattcagcttttgaaaagatgaataatggcaatgtctttgttggtattgtaataggtttaatagcagcttatgcatacaataagtttagtgaaacagaattaccattagcattatcattttttagtggtaaacgtctagttccaattatgactgcattttactgtacatttttagttgtcatattgttattcttatggccactactttattcatggattgtaaaatttggtgaatctatagtcggtttaggatcgtttggagctttcatatatggtgttgccaatagattattaattcctacaggattacatcatgcactgaatagtgtgttctggtttgatacgattggtattaatgatattggtaaattccaaagtggcaaagatgctataaaaggtattacaggacgctatcaagcgggattcttcccaatcatgatgttcggtattccagcggctgcgttagcaatgtatcatacagctaaaactactcagaaaaaacaagtttacggttggttcctagcgagttcagttgcagcatttttcgttggtgttacagagccgattgagtttgcatttatgtttgttgcgccaatcttatatgttgttcatgcgttattaacaggattatctttatttatcgcagctacattccattggacagctggattttcatttagtgcaggtttgatagattatgtgttatcactaattaatccagtatcaaatcatccattgatgttgcttgttcaaggtgttgtatttttcatcttatactatgtgattttccgtgtagtaatccaagtatttaacttgaatacgattggtagaggtgaaaatgaattagttgacccaacagttgtaaaagataatattgctcctggtgaaaatgatattaaacaaagtaaatatcatcaacatgctatacaaatattagaaggtttaggcggtcaagagaatattgttaatttaaccaattgtgcaacaaggttgcgtctagagttaaaagacacatctattattgataaacagaagattaaaaacgccggtgcagttggtgttactgttaatggcaaacattcaactcaagttattgtcggtacacacgtacagcaggttgctgatgaaattgaaaaacatttataa

SEQ ID NO: 406609 - DNA, 1131 bp, Staphylococcus aureus
gtgaagaaaattttatttgatgttgatggcgtttttttaagtgaagaacgttgtttcgatgtctctgcattaacggtatatgaattattaatggataagtgttatttaggtcttcattcacatatagattgggaaactttgactgataacgatatacaagacattaggaatcgaatttttcaaaaagataagattttaaacaaattaaaatcgctagggctgaattcaaattgggatatgttatttatcgtttttagtattcatttaattgatattttgaaaaagttatcacatgatgaaattgaggcattcatgtatcaagatgagcctgtcgaattgaagttgcaaaatataagcacaaacttagcagactgttttaatttaaatgaacaactacctttacaatttttggataatgtaaaagttggtaaaaataatatttatgctgctttggaagagtttgcaacaacagagttacatgtttcggatgctactttatttagtttgaagggtgcattatggacgttagcgcaagaagtttatcaagaatggtatttaggatcgaagttgtatgaagatgttgaaaagaaaatagcacgaactacttttaagacaggttatatttatcaagaaattattttgagaccagtagatgaagttaaggtacttctgaatgatttaaaaggtgctggtttcgaattaggtattgcaacaggtcgtccttatactgagactgttgtgccatttgaaaatttaggattgttaccatattttgaagctgattttattgcaacagcaagtgatgttttagaagcagagaatatgtatccgcaagcacgaccattaggaaagccgaatccttttagttatatcgcagctttatatggtaataatcgcgataaatatgaatcttatatcaataagcaagataacattgtaaataaagatgacgtatttatagtaggcgattcgttagctgacttattaagtgctcaaaaaataggtgcaacgtttattggaacattaacaggtttaaaaggtaaggatgctgcaggtgagttagaagcgcatcatgccgactatgttattaatcatttaggtgaacttagaggtgtactagataatttgtaa

SEQ ID NO: 406610 - DNA, 1605 bp, Staphylococcus aureus
atgaagcaatttaatgtactcgttgcagatcccatatcaaaagatggtatcaaagcattattagatcacgaacaattcaatgtagatattcaaactggcttgtccgaagaagcattaatcaaaattataccttcataccatgctttaatcgttcgtagtcaaactacggttactgaaaatatcataaatgctgctgattctttaaaagtaatcgcacgcgccggtgttggtgtagataatattaatattgatgctgcaacattaaaaggtattttagttattaatgccccagatggtaatacgatttcagctactgaacatacactggcaatgttattatcaatggcacgaaatattccgcaagcacaccaatcacttacaaataaagaatggaatcgaaatgcatttaaaggtactgagctttatcataaaacattaggtgtcattggtgctggtagaattggtttaggtgttgctaaacgtgcgcaaagtttcggaatgaaaatactagcttttgacccttacttaacggatgaaaaagcaaaatctttaagcattacgaaggcaacagttgatgagattgcccaacattctgatttcgttacattacatacaccactaacaccgaaaacaaaaggcttaattaatgctgtcttttttgccaaagcaaaacctagtttgcaaataatcaatgtggcacgtggtggtattattgatgaaaaggcgctaataaaagcattagacgaaggacaaattagtcgggcagctatcgatgtgtttgaacatgaacctgcaactgactcgcctcttgttgcacatgataaaattattgttacacctcatttgggtgcttcaacagtcgaagctcaagaaaaagtggcaatttctgtttcaaatgaaatcatcgaaattttaattgatggtactgtaacgcatgcagtgaatgcacctaaaatggacttaagcaatatagatgatactgtaaaatcattcatcaatttaagccaaacagttggtgaattagctattcaattaatgtacaatgcaccaagctctattaaaattacgtacggtggcgacttagcctctattgatagtagtttattaacacgtacaattattactcatattttaaaagatgatcttggtcctgaagtcaatattatcaatgctctaatgttgttaaatcaacaacaagtgacattaaatattgaaaataataaagcagagacaggttttagtaactacttagaggtagaactatcaaacgatagcgattccgttaaagttggcgcttctgtctttacaggtttcggtccaagaattgttagaattaataatttttctgtagacttaaagccaaatcaatatcaaattgtgtcatatcataatgatactccaggtatggtaggaaaaactggcgcattgttaggtaaatacaatatcaacattgcatctatgactttaggtagaactgaagcgggcggagatgcgctaatgattttatccgttgatcaacctgtttcaaacaatataattgatgaacttaaacaagttggtgaatacaatcaaattttcacaactgaattgacggtacagtcataa

SEQ ID NO: 406611 - DNA, 1161 bp, Staphylococcus aureus
atgtattatcatcaaccgttgttattaacacctggcccaacccctgtacctgatgccattatgagagaaattcaagcacctatggttggtcatcgttctaaagattttgaagacatcgcacaacaagcatttcaaggtctaaagccaatatttgggagtcaaaatgatgtacttattttaacatctagcggtacaagcgtcttggaggctagtatgttgaacattgtaaaccctgaagatcacttcgttgtcattgtttcaggtgcctttggtaaccgatttaaacaaattgcacaaacttattacaaaaatgtgcatatttatgacgtaacatggggagaagctgtagatgtcaaagatttcatcaatttcctttcaactttaaatgttgaagttaaagcagtatttagtcaatattgcgaaacatctacgacagtgctacaccctattcacgagttaggaaatgccattaatcaatttaatagtaatatttattttgtagttgacggcgtaagttgcattggtgctgttgatgttgacattaacaaagataaaattgatgtacttgtttctggtagtcaaaaagcaattatgttacctccaggattagcttttgtagcttatagccaccgtgcaaaagaacatttcaaagaagtaactacgccaaaattttatctagacttaaataaatacatttcgtcacaagctgacaattctacaccgttcacaccaaatgtgtctttatttagaggtgtaaatgcatacgttgaaaccgtaaaagcagaaggtttcaatcacgtaatagcacgacactatgcaattagaaatgcattaagaagcgccttaaaagcattagatttaactttattagtcaatgataaagatgcatctccaacggttacagcattcaaacctaatacaaatgatgaagtgaaaataatcaaagatgaacttaaaaatcgctttaaaataacaattgctggtggtcaaggccatcttaaaggtcaaattttaagaattggtcatatggggaaaattagtcctttcgatattttatcggtagtatctgctttagaaattattttaactgaacaccgtaaagttaactatatcggtaaaggtatatcaaaatatatggaggttattcatgaagcaatttaa

SEQ ID NO: 406612 - DNA, 447 bp, Staphylococcus aureus
ttgcatcaacatgactttaaagtccaaacttcttggcaaggtggtcgtaacaatgtcggaaacgttcaaggcgacatactttcagagaatatttctatacctgcttctttaggtggtgttggtataggaacaaatcccgatgaaatgttagtatcagccgcttcatcatgttatatcatctcattagcagctactcttgaacgtgcaaagttcacagatatttcaattgaacaacaatcgattggaacagcttgtttaaataacggaaaattcagtatgtcaaaaattgtgcaccatcctcaaattcaaattccaagtgatcaaatagcacaattagaaaagcgattaccaaaattgataacaattgcagataataattgcatgatttcaaatgctgtaagaaataatgtggacataaaaatctatcccatcattcaggccaaataa

SEQ ID NO: 406613 - DNA, 744 bp, Staphylococcus aureus
atgactctgaataaactgaaagatgaattacaaattgtttcgcaccgtggattgccgagtgattttcctgaaaatacaatggtcggttatcgagaggtaatggggctcaatgttgctatgttagaaatagatgttcatttgaccaaagaccaacattttgttgtgatacatgatgaaacaattgatagaacatcggatggtaaggggcgtattgctgattacacattatcgcaattaaaatcatttgattttggtagttataaagatgttgcttttaagggagaacgaatacccacgttagatgaagtactttcattatgcttaaagtatgataaaaagctattgattgaattgaaaagtccgaatttatatccagaaatagaatgtaaattgctggcatttttggaagaaaagaaagtcgatgcgacacaagtagttatacaatcttttgatatcgaatgcatcgaaaagttaaacacattgggcagtatatatgaattaggtgtgctttgtagtaaacgtaattattggtataaaaagccaaacttttcaagaattgctcaaattgctagttatgttaatcctaattatgcattagtgaccagaaaatttgttgataaagcacatcatcatcaattacaggttatgccatacacagttaataaattgaaaactggagaaaaattaagacaaatgggtgtagatggattaattacagataatccgaaattatttattaagtga

SEQ ID NO: 406614 - DNA, 603 bp, Staphylococcus aureus
atggctcgattcagaggttcaaactggaaaaaatctcgtcgtttaggtatctctttaagcggtactggtaaagaattagaaaaacgtccttacgcaccaggacaacatggtccaaaccaacgtaaaaaattatcagaatatggtttacaattacgtgaaaaacaaaaattacgttacttatatggaatgactgaaagacaattccgtaacacatttgacatcgctggtaaaaaattcggtgtacacggtgaaaacttcatgatcttattagcaagtcgtttagacgctgttgtttattcattaggtttagctcgtactcgtcgtcaagcacgtcaattagttaaccacggtcatatcttagtagatggtaaacgtgttgatattccatcttattctgttaaacctggtcaaacaatttcagttcgtgaaaaatctcaaaaattaaacatcatcgttgaatcagttgaaatcaacaatttcgtacctgagtacttaaactttgatgctgacagcttaactggtactttcgtacgtttaccagaacgtagcgaattacctgctgaaattaacgaacaattaatcgttgagtactactcaagataa

SEQ ID NO: 406615 - DNA, 465 bp, Staphylococcus aureus
atgacaacaattaacccaacaaactacacattattaaagaaacaagcagcaagccttattgaagatgaacatcacatgattgctattttaagtaacatgtctgccttattaaatgataatctagatcaaattaattgggttggcttttacttattggaacaaaatgaacttatacttggacctttccaaggacaccccgcttgtgtccacattccaattggaaaaggtgtatgtggtacagccgtttcagaacgtcgtacacaaattgtagctgatgttcatcaattcgaaggacatatcgcttgtgatgctaatagtaagtctgagattgtcgttccaattttcaaagatgataaaattatcggcgtcttagatatcgatgcccctataacggatcgatttgatgacaatgacaaagaacatcttgaagcaattgttaaaattattgaaaagcaactcgcataa

SEQ ID NO: 406616 - DNA, 1695 bp, Staphylococcus aureus
atggtgttatatatcattttggcaataattgtgattatattgattgctgtaggtgtattattctatttacgttcaaataaacgacaaattattgaaaaagcaatcgaacgtaaaaatgaaattgagacgttaccttttgatcaaaaccttgcacaattatctaagttgaatttaaaaggtgaaacaaaaacgaaatacgatgcaatgaaaaaggacaacgtagaaagtacaaataagtatctagctcctgtggaagaaaaaatccataatgctgaggctttattagataaatttagtttcaacgcatctcaaagtgaaattgatgatgcaaatgagttgatggatagttacgaacaaagctatcagcaacaattagaagatgtaaatgaaattattgcgttatacaaagataatgatgaattatatgacaaatgtaaggttgattatcgtgaaatgaaacgtgatgttttagcaaatcgtcatcaatttggtgaggcagcaagtctacttgaaactgaaattgaaaaatttgagccaaggttagagcaatatgaagtactaaaagctgatggtaattatgtacaagcgcacaaccatatagctgccttgaatgaacaaatgaaacagctaagatcttatatggaagaaataccagaattaattagagaaactcaaaaagaattacctggtcaattccaagatttaaaatatggttgccgtgatcttaaagttgaagggtatgatctggatcacgtgaaagtagacagtacattacaaagcttaaaaacagagcttagtttcgttgaaccattaattagccgcttagaattagaagaagctaatgataaactagctaatatcaatgataagttagatgacatgtatgatttaattgaacatgaagttaaagctaaaaatgatgtcgaagaaacaaaagatatcattacggataacttattcaaagctaaagacatgaattatacattgcaaacagaaattgaatatgtacgtgaaaactactatataaatgaatctgatgctcagagtgttcgtcaatttgaaaatgaaattcaaagtttaatttctgtatatgatgatattttaaaagaaatgtctaaatctgctgtgcgatatagcgaggttcaggataatttacaatatttagaagatcatgtcacagttattaatgacaaacaagaaaagctacaaaatcatctgattcaattgcgtgaagatgaagcagaagcagaagacaatctgctacgagtacaatcgaagaaagaagaagtgtatcgtcgattacttgcttctaacttaacaagcgttcctgaaaggtttatcatcatgaaaaatgaaattgatcatgaagttcgtgatgttaacgaacaatttagtgaacgtccaatacacgttaaacagttaaaagataaagtgtctaaaattgtgattcaaatgaatacatttgaagatgaagcaaatgatgttcttgttaatgctgtttatgcagagaaattaattcaatatggaaatagatatcgtaaggactatagcaatgttgataagagcttaaatgaagctgaacgattatttaaaaataatcgctataagcgtgcgattgaaattgcagagcaagctcttgaaagtgttgagccaggtgttactaaacatattgaagaagaagttattaagcaatag

SEQ ID NO: 406617 - DNA, 1167 bp, Staphylococcus aureus
atgattaatgaaagagaagtgtttattttgatatatctagataatgcggcaacgacgaaagcatttgaagaagtgttagatacttatttaaaagtaaatcaatcaatgtattataatccgaatagtccgcataaagctggtttgcaggcaaatcaattactacaacaagcaaaaacccaaattaatgcaatgattaattcaaaaacaaattatgatgttgtattcactagtggtgcaactgaatccaataatcttgctttaaaaggtattgcctatcgtaaatttgatacagcgaaggaaataattacatccgtgttagagcatccgtccgtattagaggttgtaagatatttggaagcacacgaaggatttaaagttaaatatgttgatgtaaagaaagatggcagtattaacttagaacacttcaaagaattaatgtcagacaaagtcggtttagtaacatgtatgtatgtaaataatgtaactggacaaatacagcctattccacaaatggctaaagttataaaaaattatcctaaggcacattttcatgtagatgcggttcaagcattcggcaaaatttcaatggatctcaataacatagatagtattagtttaagtggacacaagtttaatggtttaaaaggacaaggcgtcttacttgtaaatcacattcaaaatgttgaaccaactgtccatggtggtggtcaagaatatggcgttagaagtggaacagttaatttgccaaatgatattgcaatggttaaagcgatgaagatagctaatgaaaactttgaagcattgaatgcatttgttactgagttaaataatgacgtccgtcaatttttaaataaatatcatggagtttatattaattcttcaacttcaggttcaccattcgttttaaatattagttttcctggcgtaaaaggtgaagtattagttaatgctttttcaaaatatgacattatgatatctacgacaagtgcttgttcatctaaacgtaataaattaaatgaagtattggctgcaatgggattatcagacaaatctattgaaggtagtataagattatcatttggggctactacaactaaagaagatatagcgaggtttaaagaaatatttatcatcatttatgaggaaattaaggagttgctaaaataa

SEQ ID NO: 406618 - DNA, 1224 bp, Staphylococcus aureus
atgaagtatgatcacttgcttgttagatacggggagttaacattaaagggttcaaatagaaagaaatttgtaaatcaattaagaaataatgtaaataagtcattaaaaggacttgatgggtttgtcgttaaaggcaaacgagatcgtatgtatattgaacttgaagaccatgcagatataaatgaaataacatatcgattatcaaaaattttcggtattaaatctattagtccagtattaaaagtagaaaaaacaatagaggcaataagtgcagcggcaattaaatttgcgcagcaatttgaagaaaacagcacatttaaaattgatgtgaagcgtgccgataaaaatttcccaatggatacgtatgaattacagcgtgaattgggtggtgcagtattgaagcacttcgacaatatttcagtgaatgtcaaacgtccagatcatgaaattcgagtggaagttagattagatgcaatttatatgtatgaagaagttgttccgggttcaggtggattaccagttggtactggtggtaagacgttactaatgctttcaggcggtatagactcaccagttgctgggatggaagtgatgagacgtggcgtaacaattgaagcgattcatttccatagtccaccatttacaagtgatcaagcaaaagaaaaagttattgaattgacacgtattttagctgaacgtgttggaccaattaaattgcatattgtaccatttacagaattgcaaaaacaggtaaataaagttgtacatccaagatatacaatgacttcaacgagacgtatgatgatgcgtgttgctgataaattagtacatcaaataggggctttagctattgtaaatggtgaaaacctagggcaggtagccagtcaaacacttcatagcatgtatgcaattaataatgtaacttctactcctgtattacgtcctttattaacttacgataaagaagaaattattattaaatcgaaagaaattggtacatttgaaacatctattcaaccatttgaagattgttgtacaattttcacccctaaaaatccagtaaccgaaccaaactttgataaggtagtccaatatgaaagtgtctttgattttgaagagatgattaatcgtgctgttgaaaatattgaaacacttgaaataactagtgattataaaactattaaagaacagcaaacaaaccaattaataaacgactttttataa

SEQ ID NO: 406619 - DNA, 771 bp, Staphylococcus aureus
atggatttgaacttaacgatgattataatcataattttatttggttttatcgcggcgtttatagattcggttgtagggggtggcggtttaatttctacgccagcattattagcaatcggtctaccaccatctgtggctttaggtacaaataaattggcaagttcgtttggttctttaactagtacgataaagtttataaggtccggtaaagtggacttatatgttgttgccaaattatttggttttgtatttttggcatctgcatgtggcgcatatattgcaacgatggttccgtcacaaatattgaaacctttaatcatcattgcactttcgtcggtgtttatattcacattacttaaaaaagattggggcaatacacgcacgtttactcaatttacatttaagaaagccataatatttgcagcactttttatattaatcggcttttatgatggatttgtaggtgggggaacaggttcatttatgctttttgtattgttagtctttggttttgattttttaagtgcagcaggaaatgctaaagttttgaactttgcttctaatataggtgcgcttgtattatttatggtattaggacaagtagattatgtaataggtttaattatggctataagtatgattgctgggtcatatgctggggctcattttgctattaaacaaggtgttggttatgtaaaagtattatttattattattactgctattttaattttaaaaaatgcttttgattatattcaacaatttgtataa

SEQ ID NO: 406620 - DNA, 495 bp, Staphylococcus aureus
atgactgaaataacattcaaaggtggaccaatccacttaaaaggtcaacaaattaatgaaggtgattttgcacctgattttacagtgttagataatgacttaaatcaagtaacattagcagattatgctggtaaaaagaaattaattagtgtggtaccatcaattgatacaggtgtttgtgatcagcagactcgcaaattcaactctgatgcttctaaagaagaggggattgtgcttacaatttcagcagacttaccattcgcacaaaaaagatggtgcgcttcagcaggtttagacaatgtcattacattaagtgaccaccgtgacttatcatttggtgaaaactatggcgttgttatggaagaacttcgcttattagctcgtgcagtatttgtattagatgcagataataaagttgtttataaagaaatcgttagtgaaggtactgatttcccagattttgatgctgctttagctgcatacaaaaatatttaa

SEQ ID NO: 406621 - DNA, 948 bp, Staphylococcus aureus
atggcagaacaacaaacaattatggaacgcttgtttcatacattagatgaaaaagctaaaacattaaataatgaaaatggccaaagttttattgaaaatcttgggctagcaatggaacaagtatataccaatgaaagaggattgttagaacaatcgacgttacaagatcgacgtaaagcattccaatttgcatatttaagtttaatgcaggaagaaaagatacaagcaaatcatcaaattacaccagattcaattggattgatactaggatttttagttgagcgttttatgaacaaccaagaagaattacatattgttgatattgcaagtggtgccggtcatttaagtgctactgtaaaagaagtgttacctgaaattgcggttatgcatcatttaattgaagttgatccagttttatcacgtgttagtgtacatttagcaaacttcttagaaattcctttcgatgtgtatcctcaagatgccatcatgccactaccattagaagaagcagatatcgttattggtgattttccagtaggctattatccaattgatgaaagaagtaaggagtttaagctaggttttgaagaaggacatagttattcacattatttattaatagaacaagcaataaatgcattaaaagatgctggatatgcctttctagtggtaccaagtaatatttttacaggtgaacatgtaaaacagcttgaaaaatatattgcaacagagacagagatgcaagcatttttaaatttaccaccaactttatttaaaaatgaaaaagcgcgaaaatctatattaattttacaaaagaaaaaatcgggtgaaacaaagccagttgaagtattattggcaaatattcctgatttcaaaattccttcacaatttcaaggatttatgacagagttaaatcagtggatggacacaaatcgtcctaaaaaataa

SEQ ID NO: 406622 - DNA, 1203 bp, Staphylococcus aureus
atgtcaaaattaatcttggctatcaatgctggtagttcatcattaaaatttcaattaattagaatgcctgaagaggaattagtaacaaaaggtttagtagaaagaatcggattgaaggattcaatttttacaattgaagtcaacggggaaaaagttaaaacagtacaagatatcaaggatcacgttgaggcagttgatatcatgttggatgcttttaaagcgcacaatattattaatgatattaacgatatcgatggaacaggtcaccgtgttgtacatggtggtgaaaaattccctgaatcagtagctattactgatgaggttgaaaaggaaattgaagaattaagcgaattagcaccgcttcacaacccagctaacttgatgggtattcgtgctttccgtaaattattaccaaatatccctcatgtggcaatttttgatacagcattccatcaaacaatgcctgaaaaagcatatctatatagcttgccatatcattattataaagattatggcattcgtaagtatggtttccatggtacaagccataaatttgtatcacaaagagcggcagaaatgttagataagccaattgaagatttacgtattatttcatgtcacattggtaatggagcatcaattgcagctatcgatggcggtaaatctattgatacatcaatgggcttcacaccacttgctggtgtaacaatgggtactcgttctggtaatattgaccctgctttaattccatttattatggaaaaaacaggtaaaactgctgaacaagtattggaaatcttaaacaaagaatcaggtttattaggattatcaggtacatctagtgatttacgtgacttatcagaagaagctgaatcaggtaaagcacgttcacaaatggctttagatgtatttgcttctaaaattcacaaatatattggatcatatgctgcgagaatgcatggtgttgatgttatcgtatttacagcaggtatcggtgaaaactcagtagaaattcgtgcgaaagttcttgaaggcttagaatttatgggtgtttactgggatcctaagaaaaatgaaaacttactacgtggtaaagaaggatttattaactatcctcattcaccagttaaagttgtcgttattccaacagatgaagaaagtatgattgcccgtgatgttatgacattcggtggtttaaaataa

SEQ ID NO: 406623 - DNA, 501 bp, Staphylococcus aureus
atgattacttacaaaaatattttaatcgcagttgacggttcacatgaagcggaatgggcatttaacagagcagttggtgttgctaaacgtaacgatgcgaagttaacaattgtgaatgtaattgattcaagaacgtattcttcttatgaagtttatgatgctcaatttactgaaaaatctaagcattttgcagaagaattattaaatggttataaagaagtagctactaacgctggtgttaaagatgtagaaacgcgtctagagtttggctctcctaaatctatcattcctaaaaagcttgcacatgaaattaatgcagacttgattatgagtggtacatcaggcttaaatgccgtggaaagatttattgttggttctgtatcagaatctatcgttcgtcatgcgccatgtgacgtgttagttgttcgtactgaagagttaccagcagacttccaaccacaagttgcaacaactcaattacgtgaaaaatatcaaaattaa

SEQ ID NO: 406624 - DNA, 1119 bp, Staphylococcus aureus
atgaaaattggtataccaagggagattaaaaataatgaaaatcgtgttggtttatcaccaagtggtgtgcacgctttagtagaaagtgggcatactgttttagtggaaacaaatgcgggttcaggatcattctttgaagatgtagattacaaagaagcaggtgctgagattgttgctgaacaagcaaaagtttgggatgtggatatggttattaaagttaaagaaccacttgaatctgaatatccatattttaaagaagggcttgtattattcacttatcttcatttagcaaatgaagaaaaattaacacaagctttgatagatagaaaagtaattagtattgcatatgagactgtgcagttaccagaccgatctttaccattgttatcaccaatgagtgaggtagcaggaagaatgtcagctcaagttggcgcagagttcctacaaaaacttaatggtggtatgggaattctactaggtggtgtcccaggagtacctaagggtaaagtaactattatcggtggtggtcaagcaggaacaaatgcagctaaaattgcactaggactaggtgcagatgttacgattttagatgttaatccaaagcgtttacaacaattagatgatttattcggtggacgtgtacatacaattatgtcaaatccgttgaatattgagttgtatgttaaacaaagtgatttagtaataggtgcagttttaattccaggtgctaaagcgccaagacttgtaacagaagacatgattaaacaaatgaaaaatgggtcagttattattgacattgctattgatcaaggcggtatttttgaaacaactgataaaattacgacacatgatgatcctacatatattaagcatggtgtggttcattatgcagttgcaaatatgccaggtgcagtaccgcgtacttcgacgttagctttaaataatgctacgctaccttatgcgctcatgctagctaataaagggtatagagaagcatttaaatcaaatcaaccattatcattaggtttaaatacttacaaaggtcacgtaaccaataaaggcgttgcagaggcatttgaaatggaatataaatctgtagaagaagcattacaattataa

SEQ ID NO: 406625 - DNA, 1056 bp, Staphylococcus aureus
atgacaaaaatatcaaaaataatagacgaattgaacaatcaacaagctgatgcagcatggattacaacaccgttgaatgtatattattttactggataccgtagcgaaccccatgaaagattatttgcattattgattaagaaagatggtaaacaagtactattttgtccaaaaatggaagtcgaagaagtcaaagcatcacctttcacaggtgaaatcgttggatatttagacactgaaaaccctttttcactttatcctcaaacaatcaataaattactaattgaaagcgagcacttaacagtagcacgccaaaaacaattaatctctggtttcaatgtcaattcattcggagatgttgatttaacaatcaaacaattgagaaatattaaatccgaagatgaaattagcaaaatacgtaaagctgctgagttagcagataagtgtatcgaaataggtgtttcttatttaaaagaaggtgtgactgaatgtgaagtagtcaaccatattgagcaaactatcaaacaatatggcgtcaatgaaatgagttttgatacgatggttttatttggagatcatgccgcatcacctcatggcacaccaggagatcgcagattaaaaagcaatgaatatgtactatttgatttaggtgtaatttatgagcattattgtagcgatatgacacgtactattaaatttggtgaacctagcaaagaagcacaagaaatttataatattgtattagaagcagaaacatctgcaatccaagcaattaaacctggaataccattaaaagatatcgatcatatcgctagaaatattatttcagaaaaaggttatggtgaatatttccctcatcgcttaggtcatggcctaggattacaagaacatgaatatcaagatgtttcaagtactaattctaatttgttagaagctggcatggttattacaatcgaaccaggtatttatgtacctggtgttgcaggtgtaagaattgaagatgacatacttgtcactaatgaaggatatgaagtattaacacattacgaaaaataa

SEQ ID NO: 406626 - DNA, 690 bp, Staphylococcus aureus
atgaagttatcatttcatggtcaatcaacgatttatttagaagggaacaacaaaaaggttatcgtagatccgtttatttcaaataaccctaagtgtgatttgaatattgaaacagtgcaggtagactatatcgttttaacgcacggtcattttgatcattttggtgatgttgtggaactagcaaagaaaacaggagcaacagtaattggaagtgcagaaatggctgactatctttcttcatatcacggtgttgaaaatgttcatggtatgaatattggtggtaaagcaaactttgatttcggaagcgttaaatttgttcaagcatttcatagttcaagttttacacatgaaaatggtattccagtttatttaggtatgccaatgggtatcgtgtttgaagttgaaggaaaaacaatttatcatactggtgatacaggtctgtttagtgacatgtcacttattgcgaaacgtcatccagttgatgtatgttttgtaccaattggagataattttacgatgggtattgatgatgcaagttatgctattaatgaatttattaaaccaaaaatttctgtaccgattcattatgatacattcccattaatcgaacaagatccacaacaatttaaagatgctgttaatgtaggggacgtgcaaattttaaaaccaggtgaatctgttcagttttaa

SEQ ID NO: 406627 - DNA, 414 bp, Staphylococcus aureus
atgtataaaaatatattacttggtgtagacactcagttaaaaaatgaaaaagcactaaaagaagtgtctaaattagctggcgaaggtacagtcgtaacagttttaaacgcaatcagcgaacaagatgctcaagcatcaattaaagcaggtgttcatttaaacaaacttactgaagaacgaagcaagcgattggaaaaaacacgcaaagctttagaagattatggtattgattatgaccaaataattgttcgtggtaatgcaaaagaagaactattaaaacatgctaatagcggtaaatacgaaattgttgttttaagtaaccgtaaagcagaagacaaaaagaaatttgtacttggaagtgtcagccacaaagtagcaaaacgtgcgactatccctgtattaatcgttaaataa

SEQ ID NO: 406628 - DNA, 1299 bp, Staphylococcus aureus
atgacaaaacatgaacaaattttagattatattgaatcgttatctataggctctaaaatttcggtgcgtaaaatcgctaaatttttaaacgtatctgaagggacagcatatcgtgcaattaaagatgctgataaaatgggcatggtcgcaacgatagatcgtgttggtacggttcgaatcgaaaaacgtaatcgtaatgaaattgaacatttaacttttaatgaaattgtcaatattattgatggccaagtgttaggtggcaacaaaggtatcactaagatggtatctaaatttgcaattggagcaatggaactcaaagatattttaaagtatattggtccaaagacattattgattgtcggaaatcgtgaagatgtgcagattgaagctttaaaaagaggtacggctatattaattactggtggatttaagccatctaataaagttattaattttgcgaatgaacatgatttacctgttctatcatcaagttatgatacattcctagttgcaaatattatcaacaaagcactttttaatcagaaaatacgaaaagatatcttaatagttcaagatataatgacgccattagatgatttatctgtgctgtttgatacgatgaaaatagcagattataagcgtatggcgaatcgaactggccatacaagatttccggtagtcaatgagtcgtataaattagtaggtattgtaacaagtcgagagatgattaatacaaaggacgacgacgaaatagataaagtgatgacgcgaaatcctatttatgtaaatgctatgagtacagtagcaagttgtgcgcatatgatgatttgggaaggtattgaattgattcctgtcgtttcgagtaataaaaagacagtgggtgtgattaatagacaagatgttttaaagtctatgcaacttttaggaagacagcctcagatgggtgaaacaattaacgatcaaatcgccaaatatataacaatgaatcaagatggaattacagtagaagtttcaccacttttaatcaatcattacggaacagtaagtaaagcggcatttgtaagtattatagaagaaacaatacaatatgaaatgcgtaaatttaaaaaaggtaatgtcatgatagagaacttaaatatcgtgtatattaaaacagtacctattgaatcacatataacagtgcgctttggcatactagacgtcggaagaaacttcgccaaaatagaagtgaacatgcatagtcaaaacgacaaagtagcgagcgctctcgtgatatgccaaatgtttgacgaagtatag

SEQ ID NO: 406629 - DNA, 942 bp, Staphylococcus aureus
atgattagtactttgaatgaaattatgaaatgtatcgaagacaacgatacaattattatacacagacatgttagaccagatcctgatgcatatggttcacaacttggtttaaaatactatattcagcagaaatttccgcaaaagcaagtatttgcagtgggtgaagcggaatcatcattaagttttattggagagttagataacattgatgataaaacatatcaagatgcgcttgtaattgtatgtgatactgccaatgctccacgaattgacgatgaacgttatagtacaggtcgtaaacttattaaaatagatcatcatcctgcagttgatcagtatggtgatattaatttagttaatacgaacgcgtcatctacaagtgaaatcatttacgatttaatctcacattttaatgatgaagcaattgttaataaagatatcgcgagcgttttatatcttggtatcgtcggtgatactgggcgattcctttttaacaatacctcagaacatactatggaaattgctggaaagttaattgggcatgatattgatcataatgcgcttttaaataaaatgatggagaaggacccaaaaatgttgccgtttcaaggttatgttttacaacatttcgaacttatggatgatggattctgccaagttaaaataactgaagatgtattggagcaattcggtattcagccaaatgaagcatctcagtttgttaatacaattgctgacatcaaaggcttgaaaatatgggtatttgcagtcgatgaaggtaatgaaatcagatgtcgattacgttctaaagggcaattgattattaatgatattgcgcaagattttggtggcggtggtcatccgaatgcgtcaggagtttcagtggacagctgggatgaatttgagcaacttgctacagctttacgcacaaaacttaactaa

SEQ ID NO: 406630 - DNA, 3198 bp, Staphylococcus aureus
atggtggcatatttaaatattcatacggcttatgatttgttaaattcaagcttaaaaatagaagatgccgtaagacttgctgtgtctgaaaatgttgatgcacttgccataactgacaccaatgtattgtatggttttcctaaattttatgatgcatgtatagcaaataacattaaaccgatttttggtatgacaatatatgtgacaaatggattaaatacagtcgaaacagttgttctagctaaaaataatgatggattaaaagatttgtatcaactatcatcggaaataaaaatgaatgcattagaacatgtgtcgtttgaattattaaaacgattttctaacaatatgattatcatttttaaaaaagtcggtgatcaacatcgtgatattgtacaagtgtttgaaacccataatgacacatatatggaccaccttagtatttcgattcaaggtagaaaacatgtttggattcaaaatgtttgttaccaaacacgtcaagatgccgatacgatttctgcattagcagctattagagacaatacaaaattagacttaattcatgatcaagaagattttggtgcacattttttaactgaaaaggaaattaatcaattagatattaaccaagaatatttaacgcaggttgatgttatagctcaaaagtgtgatgcagaattaaaatatcatcaatctctacttcctcaatatgagacacctaatgatgaatcagctaaaaaatatttgtggcgtgtcttagttacacaattgaaaaaattagaacttaattatgacgtctatttagagcgattgaaatatgagtataaagttattactaatatgggttttgaagattatttcttaatagtaagtgatttaatccattatgcgaaaacgaatgatgtgatggtaggtcctggtcgtggttcttcagctggctcactggtcagttatttattgggaattacaacgattgatcctattaaattcaatctattatttgaacgttttttaaacccagaacgtgtaacaatgcctgatattgatattgactttgaagatacacgccgagaaagggtcattcagtacgtccaagaaaaatatggcgagctacatgtatctggaattgtgactttcggtcatctgcttgcaagagcagttgctagagatgttggaagaattatggggtttgatgaagttacattaaatgaaatttcaagtttaatcccacataaattaggaattacacttgatgaagcatatcaaattgacgattttaaaaagtttgtacatcgaaaccatcgacatgaacgctggttcagtatttgtaaaaagttagaaggtttaccaagacatacatctacacatgcggcaggaattattattaatgaccatccattatatgaatatgcccctttaacgaaaggggatacaggattattaacgcaatggacaatgactgaagccgaacgtattgggttattaaaaatagattttctagggttgagaaacttatcgattattcatcaaatcttaacacaagtcaaaaaagatttaggtattaatattgatatcgaaaagattccgtttgatgatcaaaaagtgtttgaattgttgtcgcaaggagatacgactggcatattccaattagagtctgacggtgtaagaagtgtattaaaaaaattaaagccggaacactttgaagatattgttgctgtaacttctttgtatagaccaggtccaatggaagaaattccaacttacattacaagaagacatgatccaagcaaagttcaatatttacatccgcatttagaacctatattaaaaaatacttacggtgttattatttatcaagagcaaattatgcaaatagcgagcacatttgcaaacttcagttatggtgaagcggatattttaagaagagcaatgagtaaaaaaaatagagctgttcttgaaagtgagcgtcaacattttatagaaggtgcaaagcaaaatggttatcacgaagacattagtaagcaaatatttgatttgattctgaaatttgctgattatggttttcctagagcacatgctgtcagctattctaaaattgcatacattatgagctttttaaaagtccattatccaaattatttttacgcaaatattttaagtaatgttattggaagtgagaagaaaactgctcaaatgatagaagaagcaaaaaaacaaggtatcactatattgccaccgaacattaacgaaagtcattggttttataaaccttcccaagaaggcatttatttatcaattggtacaattaaaggtgttggttatcaaagtgtgaaagtgattgttgatgaacgttatcagaacggcaaatttaaagatttctttgattttgctagacgtataccgaagagagtcaaaacgagaaagttacttgaagcactgattttagtgggagcgtttgatgcttttggtaaaacacgttcaacgttgttgcaagctattgatcaagtgttggatggcgatttaaacattgaacaagatggttttttatttgatattttaacgccaaaacagatgtatgaagataaagaagaattgcctgatgcacttattagtcagtacgaaaaagaatatttaggattttatgtttcgcaacacccagtagataaaaagtttgttgccaaacaatatttaacgatatttaaattgagtaacgcgcagaattataaacctatattagtacagtttgataaagttaaacaaattcgaactaaaaatggtcaaaatatggcattcgtcacattaaatgatggcattgaaactttagatggtgtgattttccctaatcagtttaaaaagtacgaagagttgttatcacataatgacttgtttatagttagcgggaaatttgaccatagaaagcaacaacgtcaactaattataaatgagattcagacattagccacttttgaagaacaaaaattagcatttgccaaacaaattataattagaaataaatcacaaatagatatgtttgaagagatgattaaagctacgaaagagaatgctaatgatgttgtgttatccttttatgatgaaacgattaaacaaatgactactttaggctatattaatcaaaaagatagtatgtttaataattttatacaatcctttaaccctagtgatattaggcttatataa

SEQ ID NO: 406631 - DNA, 1230 bp, Staphylococcus aureus
atgtcattaagagatgaagcattggaaatgcacaaacgtaatcaaggtaaattagaagttaaaccaaatgtaaaagttactaataaagaggaattaagtttagcatactcacctggcgttgctgaaccgtgtaaagatatttatgaagataaaagaaaagtatatgattacacaattaaaggaaatacagttgcagttattactgatggaacagcggtattaggtttaggtaacattggacctgaagcaagtattcctgtaatggaaggtaaagcagtattattcaaaagcttcgctggtatcaatggggtgcctattgcgttaaatacaactgataccgaagaaatcattaaaacagttaagttgttagaacctaattatggtggtattaatttagaggatatttcggcaccacgttgttttgaaattgaagaacgattgaaaaaagaaactaatattccggtattccatgacgatcaacatggtacagcaattgtaacattggcaggtttggtaaatgcattgagagttgttaacaaagatattgctaaaataaaagttgtactaaatggtgctggtgcagcaggaatagccattgttaaattactatacgcgtatggtgtaagaaatatggttatgtgtgactcaagaggcgcaatttttgaaggacgttcatatggtatgaatcctacgaaagatgttgtagcaaaatggacaaataaagataagattgaagggtctttagaagaagtcgtaaaagatgcagatgtatttatcggggtttctgtagctaatgcgctgtcacaagatatggttaagagtatggcagataatccaattatatttgcaatggctaatccaaatcctgaaataatacctgatgatgccaaagcggcaggtgcacgagttgttggtacaggacgttcagactatcctaaccaaattaataatgtattagctttccctggtatttttagaggtgcattagaggttgaagctacacatataaatgaagaaatgaaaaaggcagctgtagaagcgattgctgatttaatcgatagttctgaattaaatgaagactactgtatcccaggaccgtttgataaacgtgtagcgccatcagttgctcgtaatgttgctaaagcggcaatggaatctggagtagctaggattgaagttgatccgcaagatgtgtatgataaaacaatgaaacttacagatttacaataa

SEQ ID NO: 406632 - DNA, 858 bp, Staphylococcus aureus
atgtttaaagatttttttaatcgaacaaagaaaaagaaatatcttacagtacaagactctaaaaataatgatgtgcctgcaggtattatgactaagtgtccaaagtgtaagaaaattatgtacacaaaagaattagctgaaaatttaaatgtgtgctttaattgtgatcatcatattgctttaactgcgtataaacgtatagaagcaatttctgatgaaggatcatttacagaattcgataagggaatgacctctgcgaatccattagattttccaagttatttagaaaaaattgaaaaggaccaacaaaagacaggtcttaaagaagcagttgtgactggtacagcacaactagatggtatgaaatttggcgttgctgtcatggattcacgttttagaatgggaagtatgggatcggttatcggtgaaaagatatgtcgcatcattgattactgcactgagaaccgtttaccatttattcttttctctgcaagtggtggtgcacgtatgcaagaaggtattatttccttgatgcaaatgggtaaaaccagtgtatctttaaaacgtcattctgacgctggactattatatatatcatatttaacacatccaactactggtggtgtatctgcaagttttgcatcagttggtgatataaatttaagtgagccaaaagcgttgataggttttgcaggtcgtcgagttattgaacagacaataaacgaaaaattgccagatgatttccaaactgcagaatttttattagagcatggacaattggataaagttgtacatcgtaatgatatgcgtcaaacattgtctgaaattctaaaaatccatcaagaggtgactaaataa

SEQ ID NO: 406633 - DNA, 945 bp, Staphylococcus aureus
atgttagattttgaaaaaccactttttgaaattcgaaataaaattgaatctttaaaagaatctcaagataaaaatgatgtggatttacaagaagaaattgacatgcttgaagcgtcattggaacgagaaactaaaaaaatatatacaaatctaaaaccatgggatcgtgtgcaaattgcgcgtttgcaagaaagacctacgaccctagattatattccatatatctttgattcgtttatggaactacatggtgatcgtaattttagagatgatccagcaatgattggtggtattggctttttaaatggtcgtgctgttacagttattggacaacaacgtggaaaagatacaaaagataatatttatcgaaattttggtatggcgcatccagaaggttatcgaaaagcattacgtttaatgaaacaagctgaaaaattcaatcgtcctatctttacatttatagatacaaaaggtgcatatcctggtaaagctgctgaagaacgtggacaaagtgaatctatcgcaacaaatttgattgagatggcttcattaaaagtaccagttattgcgattgtcattggtgaaggtggcagtggaggtgctctaggtattggtattgccaataaagtattgatgttagagaatagtacttactctgttatatctcctgaaggtgcagcggcattattatggaaagacagtaatttggctaaaattgcagctgaaacaatgaaaattactgcccatgatattaagcaattaggtattatagatgatgtcatttctgaaccacttggcggtgcacataaagatattgaacagcaagctttagctattaaatcagcgtttgttgcacagttagattcacttgagtcattatcacgtgatgaaattgctaatgatcgctttgaaaaattcagaaatatcggttcttatatagaataa

SEQ ID NO: 406634 - DNA, 969 bp, Staphylococcus aureus
atgaagaaaattgcagttttaactagtggtggagattcacctggaatgaatgctgccgtaagagcagttgttcgtacagcaatttacaatgaaattgaagtttatggtgtgtatcatggttaccaaggattgttaaatgatgatattcataaacttgaattaggatcagttggggatacgattcagcgtggaggtacattcttgtattcagcaagatgtccagagtttaaggagcaagaagtacgtaaagttgcaatcgaaaacttacgtaaaagagggattgagggccttgtagttattggtggtgacggtagttatcgcggtgcacaacgcatcagtgaggaatgtaaagaaattcaaactatcggtattcctggtacgattgacaatgatatcaatggtactgattttacaattggatttgacacagcattaaatacgattattggcttagtcgacaaaattagagatactgcgtcaagtcacgcacgaacatttatcattgaagcaatgggccgtgattgtggagatctagcattatgggctggattatcagttggtgctgagacaattgtagttccagaagtgaaaacagatattaaagaaatagctgataaaattgaacaaggtattaaacgtggtaagaaacactcaatcgttcttgtagcagaaggttgtatgactgcgcaagattgtcaaaaagaattatcacaatacatcaatgttgataatagagtgtctgtgttaggtcacgttcaacgtggtggtagcccaacaggtgcggatagagttttagcatcacgtttaggtggatatgcggtagacttattaatgcaaggtgaaacagctaagggtgttggaattaagaacaataaaattgtagcaacatcttttgatgaaatttttgatggtaaagatcataaatttgattatagtctatatgaacttgctaacaagttatctatataa

SEQ ID NO: 406635 - DNA, 1758 bp, Staphylococcus aureus
atgagaaaaactaaaattgtatgtacaattggaccagcttcagaatcagaagaaatgattgagaaattaatcaatgctggtatgaacgttgcacgattaaacttttcacatggtagtcatgaagagcataaaggtagaattgatacaattcgtaaagtagctaaaagattagacaaaattgtagcaattttattagatacaaaaggtccagaaattcgtacgcataatatgaaagacggtatcattgaacttgaacgtggcaacgaagttattgttagcatgaatgaagttgaaggaacacctgaaaagttctcagtaacatatgaaaacttaattaacgatgttcaagtaggttcatacattttacttgatgatggcttaattgaattacaagttaaagatattgaccatgctaaaaaagaagttaaatgtgatattttaaactctggtgagcttaaaaacaaaaaaggtgttaacttacctggcgtaagagtaagtttacctggtattacagaaaaagatgctgaagatatccgtttcggtattaaagaaaatgttgacttcattgcagcaagtttcgtacgtcgtcctagtgatgttttagaaattcgtgaaattttagaagaacaaaaagctaacatttcagtattccctaaaattgaaaaccaagaaggtattgataatattgcggaaattcttgaagtgtctgatggtttaatggttgcacgtggtgacatgggtgttgaaattccacctgaaaaagtaccaatggttcaaaaagatttaatcagacaatgtaacaaattaggtaaaccagttattacagctacacaaatgttagattctatgcaacgtaacccacgtgctacacgtgcagaagctagtgacgttgccaacgcaatctatgatggtacagatgcagtaatgttatctggtgaaactgctgctggtttatatcctgaagaagctgttaaaacaatgagaaatattgctgtatcagctgaagcagcccaagattacaaaaagttattgtcagatcgtactaaattagttgaaacttcattagtgaatgctatcggtatttcggttgcacatacagctttaaacttaaatgttaaagcaattgtagctgctactgaaagtggttcaacggcacgtactatctccaaatatcgtccacattcagacattattgcggtgactccaagtgaagaaactgcacgtcaatgttcaattgtttggggagttcaacctgtagttaaaaaaggacgtaagagtacagatgcattgttaaacaatgcagttgcaacagctgttgaaactggtagagtatctaatggtgatttaatcattattactgctggtgtaccaactggtgaaactggaactactaatatgatgaaaatccacctagttggtgacgaaattgctaatggtcaaggtattggacgtggatcagttgttggtactacgttagttgctgaaactgttaaagatttagaaggtaaagatttatctgacaaagttatcattactaactcaatcgatgaaacgtttgtaccttatgtagaaaaagctttaggcttaattacagaagaaaatggtattacatcaccaagtgcaattgttggtttagaaaaaggtattccaacagttgtaggtgtagaaaaagctgttaaaaacataagcaataacatgttagttacgattgatgctgctcaaggtaaaatctttgaaggatatgcaaacgtactataa

SEQ ID NO: 406636 - DNA, 297 bp, Staphylococcus aureus
gtgccagcaggttatacactcgataaaaacaatgtaccgtataaaaaagagactggttattacacagttgccaatgttaaaggtaataacgtgagggatggctattcaactaattcaagaattacaggtgtattacccaataacgcaacgatcaaatatgacggcgcatattgcattaatggctatagatggattacttatattgctaataatggacaacgttgttatatagcgacaggagaggtagacaaggcaggtaatagaataagtagttttggtaattttagcgcactttga

SEQ ID NO: 406637 - DNA, 351 bp, Staphylococcus aureus
atgaaaattagaaaatctatacttgcgggaactttagcaatcgttttagcatcaccactagtaactaatctagataaaaatgaggcacaagctagcacaagcttgccaacatcgaatgaatatcaaaacgaaaagttagctaatgaattaaaatcgttattagatgaactaaatgttaatgaattagctactggaagtttaaacacttattataagcgaactataaaaatttcaggtcaaaaagcaatgtatgctcttaagtcaaaagactttaagaaaatgtcagaagcaaaatatcaacttcaaaagatttataatgaaattgacgaagcactaaaaagtaaatattaa

SEQ ID NO: 406638 - DNA, 201 bp, Staphylococcus aureus
atgatggtgaaaaaaacaaaatccaattcactaaaaaaagttgcaacacttgcattagcaaatttattattagttggtgcacttactgacaatagtgccaaagccgaatctaagaaagatgatactgatttgaagttagttagtcataacgtttatatgttatcgaccgttttgtatccaaactggagacttttaacataa

SEQ ID NO: 406639 - DNA, 1755 bp, Staphylococcus aureus
atgaaatttaagtcattgattacaacaactttagcattaggtgttttagcattaacaggtgcaaactttaataataatgaagcgtctgccgcagctaagccattagataaatcatcaagttcgttacaccatggatattctaaagtccatgttccatatgcaatcactgtgaacggtacaagccaaaatattttatcaagcttaacatttaataagaatcaaaatattagttataaagatttagaggatagagttaaatcagttttaaaatcagacagaggtattagtgatatagatttaagactatcgaagcaagcgaaatatactgtttactttaaaaatggaacaaagaaagttatcgatttgaaagcaggtatttacacagctgatttaattaatacaagtgaaattaaagctattaatattaacgtagatactaaaaagcaagttgaagataaaaagaaagataaagcaaattaccaagttccatacacaatcactgtgaacggtacaagccaaaatattttatcaaacttaacatttaataagaatcaaaatattagttacaaagatttagaggataaagttaaatcagttttagaatcaaatagaggtattaccgatgttgatttaagattatcgaagcaagcgaaatatacagttaattttaaaaatggaacgaagaaagttatcgatttgaaatcaggtatttacacagcgaatttaataaattcaagtgatattaaaagtatcaatattaacgtagatacaaaaaaacatatcgaaaataaagctaaaagaaactatcaagttccatattcaattaatttaaatggtacatctacaaacattttatcgaatctttcattttcaaataaaccttggacaaattacaaaaatttaactagtcaaataaaatcagtactgaagcatgatagaggtattagtgaacaagatttaaaatatgctaagaaagcttattatactgtttattttaaaaatggtggtaaaagaatcttacagttgaattcaaaaaattacacagcaaacttagttcatgcgaaagatgttaagagaattgaaattactgttaaaacaggaactaaagcgaaagcagacagatatgtaccatacacaattgcagtaaatggcacatcaacaccaattttatcagatttaaaatttacaggtgacccacgtgtaggctacaaagatatctctaaaaaagttaaatcagtattgaagcatgatagaggtatcggggaacgtgaattaaaatatgcaaaaaaagcaacttacacagtacattttaaaaatggaacgaaaaaagtgattaacataaattcaaatattagccaactgaatctgctttatgttcaagatattaaaaagatagatattgatgttaaaacaggaactaaagcgaaagcggatagctatgtaccatatacaattgcagtaaatggcacatcaacaccaattttatcaaaacttaaaatttcgaataaacaattaattagttacaaatatttaaatgacaaagtgaaatctgtattaaaaagtgaaagaggcatcagtgatcttgacttaaaatttgcgaaacaagcaaaatatacagtatatttcaaaaatggaaagaaacaagtagtgaatttaaaatcagacatctttacacctaatttatttagtgccaaagatattaaaaagattgatattgatgtaaaacaatacactaaatcaaaaaaaaataaataa

SEQ ID NO: 406640 - DNA, 1287 bp, Staphylococcus aureus
atgaatcctttagcccaaagcttaaatgaacaacttcaacagtcaaatgcaactgcctttacaatgttatctgacttaggtcaaaatatgttttatccaaaaggcattttatctcaatctgctgaagcaaagagtacaacatataatgcaactataggtatggcgacaaacaaagacggaaaaatgtttgcatcatctttagatgcaatgtttaatgatttaactccagatgaaatattcccttatgcgccaccacaaggcatcgaagaattacgtgatttatggcaacaaaaaatgttgcgtgacaatccagagctatcaatcgacaacatgtcactaccaattgttacgaatgcattaacacatggtttatctttagttggcgatttatttgtaaatcaaggtgacactatcttgttaccagagcataattggggtaattacaaacttgttttcaatacgagaaatggtgcaaaccttcaaacatatcctatctttgataaagacgggcattatactactgattcacttgtagaagctttacaatcatacaataaagataaagtcattatgattttaaattatcctaataatccgacaggttacacacctacgcataaagaagtgactaccatcgtcgatgcaattaaagcattagctgataaaggtacaaaagttatagctgttgtggatgacgcatactatggtttattctatgaagatgtgtatactcaatcattatttactgcattatctaatttaaattcaaatgcaatattacctgttcgtttagatggtgcaacaaaagaatttttcgcatggggattccgtgttgggtttatgacatttggaacgtctgatcaaacaactaaagaagtattagaagccaaagtaaaaggtcttatacgaagtaacatttctagtggacctcttccaacacaaagcgctgttaagcatgtattaaaaaataataaacaattcgataaagaaatcgaacaaaatattcaaacattaaaagaacgctatgaagtcactaaggaagttgtctatgctgatcaatatcattcacattggcaagcctatgactttaactctggatactttatggcaataaaagttcatgatgttgaccctgaagaacttcgtaaacatttaattgaaaaatattcaattggtgttattgcacttaatgcaacagatattcgtattgcgtttagctgtgtagaaaaagaagatatcccacatgtatttgattcaattgctaaagcgattgatgacttaagataa

SEQ ID NO: 406641 - DNA, 177 bp, Staphylococcus aureus
ttgaaacatctaacaaaaatatttgtagtacttgcaattattttatttattattggttattatttacaagcaactaatcatgaaagccaaggtataaaattattattagcagcgattatgtttatgatttgtgcttttataagtagaagtaatgatcgacgtaaaaatagtaaatag

SEQ ID NO: 406642 - DNA, 381 bp, Staphylococcus aureus
atgaaaataattttaaaaaacaatagtgattttccgatttatgaacagattaagcaacaagtaaaacaaaatattttaaagggacatgttgctcctggagagcatttgccgtcaatgagagaacttgccaaagatcttcaagtaagtttgattactaccaaacgtgcttatgaagatttagagaaagacggttttgttacaacaattagaggaaaagggacctttgttaaggagcaagatagttctattttaaaagagaaacaattttttaccattgaaaatttggttaaagaattggttaatgaagcgcaagccatcgaaatgtcacttgaggaactgcaggatattttaacgttcatttatgaggaggaatcatcatga

SEQ ID NO: 406643 - DNA, 897 bp, Staphylococcus aureus
atgaatgccatagaattaagtaatgttaattattcaagtgatcagtttaatttaaagaatatctctttcaaagttcctcaaggattcgtcactggttttattggtagaaatggcgctggtaaaaccacaataataaggttaattatggatttgtatcaaccacaaactggtgttattagagtattagaagaggatatggctctcaatccgatagagttaaagaatagaattgggtttgtttactctgaaaattattttaatgagagatggactacgaagcaacttgaaaaaatgattgcccctttttatcgtaaatgggaccatcaagtatttgaattttatcttgaaaagttcgatttaccaatcaataaatcaataaaaacattttcgactgggatgaaaatgaaattatcactagcagttgcattttcacatcatgctgaattgtatatttttgatgagcctacttcaggtcttgatcccttagctagaaatgagctattggagataattcagcaagaattaattgatgaaaataaaacaatattcatgtcgacacacattatctcagatttagaaaaaatagctgattatatcattcacttaagtgacggtgaagttatcttaaatggttcaaaagaacaactgttacaaagatatcaagttgtgagtggtgctattgaggaccttgatgatgaattagcatctctacttatttatgaagaacataagcgtacgggatttataggattaacagaacatgcgcaagtatttaaagaaattttaggtcataaagtgaatatcactacaccttctattgagaacttaatggtttatcttgaaaagagaaaacctaaatatcatgaaaacatcaaattgatggaagaaggtttttaa

SEQ ID NO: 406644 - DNA, 681 bp, Staphylococcus aureus
atgaaggcattgttaattaggaattttaaattacgacgatatacacttatcatctatgttctattattaaccttatatcctttttatataatgcttgactcaacaaagttcttttacttattgcaatcttttataagtccaacaatattgattatttggattttagatgctggtcacttatttagactcaatcgtagattaggtggtaatgattcatattatttttatatgagtttaccagtgtcaaaaaaacaattgcttaatgccaactatattacatgcattgttttaacattaattggaacgcttgttattagtttatatgcttatgaagcagatgtgattgaaccaaattcaatctatttttcaactgcatatgcatttgtcatatctaacttcttgtctataccaattgcatttagtcaatttacagaattgcgtagagtcaaagtgccatatggtatatacgtgtttactattatcattttagttccatttttattttcaattgcaatagtattggtgaattattttgttctaagtcaatcatcattcccagatttatattcatatattttaaatattggttttctaattataagcattgttatacttattgttaattattttaaacagctcaataaaataaatactagaaaatttaaaggaggcagtcgatga

SEQ ID NO: 406645 - DNA, 873 bp, Staphylococcus aureus
atgaaattagaacatattacaaaaaaatacggctcaaatgtcgttttaaatgatattgattttgactttggcgatagtagaattgtcggattaataggaaaaaacggtgttggtaaaacaaccgttatgaaagtaatgaatggtaatattattaaatttgatggaaaagtagatattgataatgcagataatatcggttttttaattgagcatcctaaattatatgataataaatcaggattgtataacttgaaattatttgcacaagtattaggtaagggttttgataaagcatacacagacaaaattatagatgcatttggtatgagaccttatattaaaaagaaagttaagaaatattcaatggggatgaagcaaaagttagcaattgcagtatctttaatgaataaacctaaatttttaatcttggatgagcctacaaatggtatggatccagatggctcaattgatgtgctgactacaattaagtctttagtaaatgaacttgatatgagaattctaatatcaagtcataagttagaagatattgaattaatttgtgatagagctgtatttttaagagacggacattttgttcaagatgtaaacatggaggaaggtgttgcatctgacacaacgatagttactgttgatcataaagactttgatagaactgaaaaatatcttgcagagcatttccaattacaaaatgtcgacaaagcagacggacatttaatgatcaatgcacaaaaaaattatcaagttatactaaaagcattatctgaattagatatttatccgaaatatattgaaacacgtaaaagttcattgcgtgatacgtacttcaatataaatcaaagaggtgataaataa

SEQ ID NO: 406646 - DNA, 741 bp, Staphylococcus aureus
atgagaattttaaatttagttaagtatgatttttatagtatatttaaaagtcctttaacatatttagcgatactagtcgtatctagtttgattgcaactcaaagtatacttatggcaaattcgatggataacccgaaacatattattgtctatggatctgtatttgctgcagcaaaatggttattgttaataattggattaatgtttgttgttaagacaattacgcgtgatttttcacaaggtacaattcaactatatatgagtaaagttaaaacacgcgttggatacattatttcgaaaacaatttcaattattttaatttcaatattatttgcattaattcattatgtgattttgattgttgtgcaggcatctagtaatggaaaaaatttggcgttttctaaatatgtagataatttatggttcttcctaatctttttactattctttggcttgtttttattcttaatcacacttgcatcacaaaaaacagcaatgatattttcattaggtgtatttttagtactcattgtaccgtttattaaaccttttattacatttatcccaagatacggtgaaaaagttttagatgcttttgattatatcccttttgcttacttaactgataaaatgattagctctaactttgattttagcaattggcaatgggtaatttcattaggttctatagtgatattcttcattttgaatatcttatatgtcgctaaaaaagacatttaa

SEQ ID NO: 406647 - DNA, 564 bp, Staphylococcus aureus
atgacaaatttagaaacttatttcaaaaatagccaacccttaaatgaatacattgatggaatgaagacaaatcaagataccgttctcagtatctatcaatcatttgagttaccagaagatgattcacgcatcaaaaaaataaaagagatgaattattctaaagtattagtaattactgaagactggtgtggagatgcaatgatgaatctcccaattctaaaacacatcagtgaagcattaaatttagaagtacgcgtgttccatagagatgatgatacaaaactgatcgatcaatatttaacaaatggtaaatcacgtgcaattcctatcttcgtattcttgaatgatcaattcgaacaagaaacagtttggggaccaagagcaaatgaagtccaaaaatttgtaactgatgttcgtgctgataaattaccgagcaaagatcatccagactatgcagatttagaaaaagaaacacacttagttatatcaaaccgctataaaactgacgcttcattttggaaagcagtttataattccatcctaaataaattagaaaataaataa

SEQ ID NO: 406648 - DNA, 525 bp, Staphylococcus aureus
atgctatatttaaataagtacaaagaaagggtgacatcagtgcgtattcaaaatcgctgggttgtgtttatattatttttaatctgttcttttggtgtattaattggtttatatcaatatcgtcatacgaaaactgtggatttgtctaatcttgaaataaacgatattaaattaaatgagaagtttgataaaaaaggctatgaagtaaataaaaaaattaagtttgatcgttttaaattttataacagtaaagctcaccctgatcttaccgttaaagtgagagaaaaggataacatcgttaaggggataatattagtaagagatgaaaagatacatactaattttgatgggggaattggttcgccgataaataacgcgattgaaaatcttggattcggatataaaagaacaaaagttggcaatgatttctcatcggtaaagtatattgatagagataaccatttaaaattaaacttactttatcaagatttagaaattaaacgtattgaattttttagtaaatag

SEQ ID NO: 406649 - DNA, 843 bp, Staphylococcus aureus
atgaagaaattcttttttattgggcttttagtgtttgttgtcttttttacagcagcaaccattatttggttcagctatgataaaaacaaatatggtactaaacaatatgataaaacattcaaagacgatgcttttgacaatgtatctataaatttggatagtacagaacttcgtataaaacgggggaatcaatttagagttaaatatgatggtgacaatgatatattaattaatatagtagataagacgttgaagattagtgataaaaggtctaagacaagaggatatgcaattgatatgaatccttttcatgagaataagaaaacgttaacgattgaaatgcctgataaaatgattaaacgtttaaatctatcatctggagcaggaagtgttagaatcagtgatgttgatttagagaacacaagtattcaaagcattaacggtgaagtagttattaaaaactcaaatcttgacgcactagattcaaagacaaataatagttctacttatattagtaaaagtaacattaaaaatagcaatattaaagttgttattggtacgctacaaatcgacaagagtcaaattaaacaatccatatttttaaacgatcatggtgacattgaatttaaaaacatgccatcaaaagtagatgcaaaagcttctactaaacaaggagatattcgttttaagtatgatagtaaacctgaagacactatactaaagctaaatccgggaacgggtgatagcgtagttaaaaataaaacatttactaatggtaaagttgggaaaagcgacaatgttttagaattttatacgattgatggtaatatcaaagttgaataa

SEQ ID NO: 406650 - DNA, 1113 bp, Staphylococcus aureus
atgacattcaatatacatacgattactatttatttacaatatattacaactaaaaagaaaggggccgatgatatgcaacaagtgacatcagatatcatgacttttagaggttcacatttcgagttaggtgttaaaactggtaaatggcttcaacaaacacctcttctaaaaaatcgagaaaaagaatggaaaaaacgtgtcccacgtttcgatatagatgtaaatgaaacttatcaaatattccaaacatacgcacctcaaatatgggaagaattaatgggactacaaagtatactcaaaatgccaacacgccaaattattttaaactttggacattatcgttttaccgatttaaaagaaagtggttgcacggtctttcaaggcaaagacttcatggttagaaattatgattaccaccctgcaacttatgatggtcgctacttactttatcaacctacagatagcggtttagctcaaattggtcctgtatcaagggtaactggaagaatggatggtatgaatgagtcaggattaactatgggctataactttatgcaccggaagaaaccagcaaatggttttgtatgttatatgattggtcgtctaattcttgaaaattgccgaaatgtaacagaagcaatccaattattgaaagaaataccacacagaagctcatttagctacatactgatggacaaatcattgaaccatgcaattgttgaagtgacaccgagatcaatagatgttcgttatgataatatatgtacaaatcattttgaaatattaacacatgaaaatcgtaattatacaaaagaatctaaagaaagactggcgcgtaccatttcacaaactaatgataatttagatatgactacagcatttaagttattcaataatcctcagtatgaaatttacagtaaactattcaaaagctggtctggcaccatccatacatcaatgtatcaacctgaaacattaactgcatattttacattgggagaaaatgcgccaccagaaataatagatttcaaatcatggttagatggtcaagaccttaatatcactcactttactggcaatatagataccgacttaacttttgccaacaaataa

SEQ ID NO: 406651 - DNA, 174 bp, Staphylococcus aureus
atgtggaattttattaaatgtgtgtttaaattcgtatttagcttagttgctattacaacattagttgctggtgttggtgtagtagcatttgcttatatctttaaaaaagattttgaagatattgaaagaaaaactaaagaaattatttctgatattgaaagtaaaaataactaa

SEQ ID NO: 406652 - DNA, 213 bp, Staphylococcus aureus
atgtataaaaattataacatgacccaacttacactaccaatagaaacttctgttagaattcctcaaaatgatatttcgcgatatgttaatgaaattgttgaaacgatacctgatagcgaattcgatgaattcagacatcatcgtggcgcaacatcctatcatccaaaaatgatgttaaaaatcatcttatatgcatatactcaatctgtttaa

SEQ ID NO: 406653 - DNA, 402 bp, Staphylococcus aureus
atgacaagttatgaagaagaaactgattatcgtaacgttccaagagaattactagataacaatatacctatgggaagaggcatgattaaatgggctccttttgcaacattacccgaacaattcgaaacgattcaacaatacattatcgaccaaaacaaaattacacgtcctgtattatcagatgatcaattggctgagctaaacattcggctacacgaggcgctacaatatgcccaacctgtagaagttaaattttataataatggctttgtagattcagtacgcttaaccatttatcgtattgatgctattaattatgaaattgatggttatgtttacaatcagcaacaacgtcaaaaaatttctatctttgatatcttagatattgtcttgttaccttaa

SEQ ID NO: 406654 - DNA, 1029 bp, Staphylococcus aureus
atgacaaatggatatattggttcttacactaaaaagaatggtaaagggatttatcgttttgaattaaacgaaaatcagtcacgtattgatttattagaaacaggatttgaattagaagcgtctacatatttggtgcgtaataatgaagttttatatggaatcaacaaagaaggagaacaatgcggtgttgcaagtttgaaaattgatgacaatggtgaattgcatttattaaataaatgtttgtcttcaaaagctggtacaggttgttatgtatcgatttcagaagataaacgatatttatttgaagcggtatatggtgctggcatcatacgtatgtatgaattaaatacgcacacaggtgaaattatacgtctaattcaagaacttgcacatgattttccaacaggtacacatgaaagacaagatcatccacacgcacattatattaatcaaactccagatggtaagtacgttgcagtaacagatttaggtgctgatcgtatcgttacttataaatttgatgacaacgggtttgaattttataaagaatctttatttaaagatagtgatgggacaagacatattgaatttcatgataatggaaaatttgcttatgtcgtacacgaattatcaaatactgtgagtgttgcagaatataatgacggtaaatttgaagagctcgagcgtcatttaacaattcctgaaaactttgatggagatactaaacttgcagcagtgcgtttatctcatgatcaacaattcttatatgtatctaatagagggcatgatagcattgcaatttttaaagttcttgataatggtcaacacttagaactagtaacaattactgaaagtggtggtcaattcccaagagattttaatattgcctcatcagatgaccttttagtttgtgctcatgagcaaggagattcagttgtaactgttttcgaaagaaataaagaaacaggtaaaattacgctatgtgataacactcgtgtagcatctgaaggtgtatgtgtcatattttaa

SEQ ID NO: 406655 - DNA, 1380 bp, Staphylococcus aureus
atgaatatcattgagcaaaaattttatgacagtaaagcttttttcaatacacaacaaactaaagatattagttttagaaaagagcaattaaagaagttaagcaaagctattaaatcatacgagagcgatattttagaagcactatatacagatttaggaaaaaataaagtcgaagcttatgctactgaaattggcataactttgaaaagtatcaaaattgcccgtaaggaacttaaaaactggactaaaacaaaaaatgtagacacacctttatatttatttccaacaaaaagctatatcaaaaaagaaccttatggaacagttttgatcattgcaccatttaactatccttttcaactagtgttcgaacctttaatcggtgctattgcagcaggtaatacggcaattattaaaccatctgagttgacgcctaatgttgcacgagtgattaaacggttaatcaatgaaacatttgatgcaaattacattgaagttattgagggaggaattgaagaaacgcaaacgttaattcacttaccttttgactatgtcttctttacaggaagtgaaaatgtaggcaaaatcgtttatcaagctgccagcgaaaatttagttcctgtgacattagaaatgggcggtaaatctccagtcatcgttgatgaaacagcgaatattaaagttgctagtgagcgcatttgttttgggaaattcactaatgccggccaaacatgtgttgcaccagattacattttagtacacgaatctgtaaaagatgatttaatcacagccctatcaaaaacgttgcgtgaattttatggtcaaaatatacaacaaagtccagattatggccgcattgtaaaccttaaacattatcatcgtctgacttcattacttaacagtgcacaaatgaatattgtatttggtggtcatagtgatgaggatgaacgttatatagaaccaacattgttagatcacgttacaagtgattcagcaattatgcaagaagaaatttttggtcctatcttaccgattttaacgtatcagtcattggatgaagcaatagcctttattcaccaaagaccaaaacctttgagtttatatttatttagcgaagatgaaaatgctacacaacgtgtaataaacgagctatcatttggcggcggcgctattaatgatacattgatgcacctagcgaatcctaaattaccatttggtggtgttggcgcctcaggtataggacgctatcatggtaaatattcattcgacacttttacacatgaaaaaagctacattttcaaatctacacgattagaatcaggtgtccatttaccaccatataaaggtaaatttaaatacatcaaagctttctttaaaaattaa

SEQ ID NO: 406656 - DNA, 930 bp, Staphylococcus aureus
atggctaaaacatatattttcggacataagaatccagacactgatgcaatttcatctgcgattattatggcagaatttgaacaacttcgaggtaattcaggagccaaagcataccgtttaggtgatgtgagtgcagaaactcaattcgcgttagatacatttaatgtacctgctccggaattattaacagatgatttagatggtcaagatgttatcttagttgatcataacgaattccaacaaagttctgatacgattgcctctgctacaattaagcatgtaattgatcatcacagaattgcaaatttcgaaactgctggtcctttatgttatcgtgctgaaccagttggttgtacagctacaattttatacaaaatgtttagagaacgtggctttgaaattaaacctgaaattgccggtttaatgttatcagcaattatctcagatagcttacttttcaaatcaccaacatgtacacaacaagatgttaaagcagctgaagaattaaaagatattgctaaagttgatattcaaaagtacggcttagatatgttaaaagcaggtgcttcaacaactgataaatcagttgaattcttattaaacatggatgctaaatcatttactatgggtgactatgtgactcgtattgcacaagttaatgctgttgaccttgacgaagtgttaaatcgtaaagaagatttagaaaaagaaatgttagctgtaagtgcacaagaaaaatatgacttatttgtacttgttgttactgacatcattaatagtgattctaaaattttagttgtaggtgctgaaaaagataaagttggcgaagcattcaatgttcaattagaagatgacatggccttcttatctggtgtcgtttctcgaaaaaaacaaatcgtacctcaaatcactgaagcattaacaaaataa

SEQ ID NO: 406657 - DNA, 561 bp, Staphylococcus aureus
atgacacatcgcgcactattagttgttgactattcatatgactttatcgcagacgacggcttactaacatgcggtaaacctggacaaaatattgaagattttattgtttctcgtatcaatgactttaattattatcaagaccatatattctttttaatggatttacattatttacatgacattcatcatcctgaaagtaaattattcccaccacacaatatcgtagatacaagtggtagagaattatacggtaaagtaggtaaattatacgaaacaattaaagcgcaacctaatgtacatttcattgataaaacgcgctatgattcgttctttggtaccccgcttgatagtttattgagagaaagaagtattaatcaagtcgaaatcgttggtgtatgtaccgatatttgcgtgttacatacagcaatttctgcatacaacttaggttataaaatttcagtacctgctgagggagtggcttcatttaatcaaaaagggcatgaatgggcacttgcacatttcaaaaactcattaggtgcagaggtagaacaacacgtttaa

SEQ ID NO: 406658 - DNA, 1098 bp, Staphylococcus aureus
atgtatatcaatatgaaagattatgggttaacaggcataaacaaaactaaagatactcgagcaatacaacgtgcgttaaatcgtggaagatgtaaaccaacgacagtttatataccgaaagggacgtatgatatttgcaaaccattaacgatatatggcaatacaacacttttgttagataatgaaactattttacgccgatgtcattctggtcctttattaaaaaatggtcgtcgctttggtttttatcgtggttataatggacacagtcatattcatattaaaggcggcaagtttgatatgaatggtgtatcgtatccttataacaatacagctatgtgcattgggcatgctgaagatattcaattaataggtgtgaccattaagaatgtagtgagtggtcatgcaattgatgcttgtgggattaacggactctatattaaaagctgttcatttgaaggattcatagactatagtggcgaacgcttttattctgaagcaatacaattagacattcaagtacctggtgcttttccaaaattcggaacgacagatggtacgataacgaaaaatgtcattatcgaagattgttattttggaccttcagaattgcccgaaatgggaagttggaatcgtgctattggctcacatgcaagtagacataatcgatactatgagaatattcatattagaaataatatatttgaagatatacaaggttatgcattaactcccttgaagtataaagatgctttcattattaataataagtttattaactgtgagggtggcattagatatttaggagttagagatggtaaaaatgcagcagatgtgatgacaggaaaagacttaggttcccaagcaggcataaatatgaatataattggaaatgaatttaaaggatcaatgtctaaagatgcgatacatgtacgtaattataataatgttaaacataaagatgtattaatcgttgggaatacattcaataattcgactcaatcaattcatttagaagatattgatacagtgtttttaagtcctgttgaagcgggtattcaagttactacaatcaatgtagatgaaataaaaaagtaa

SEQ ID NO: 406659 - DNA, 1563 bp, Staphylococcus aureus
atggcttatttcaatcaacatcaatcaatgatatcgaaaaggtatttaacattcttttcaaaatcaaagaaaaagaaaccgtttagtgcgggacaacttattggactaatattaggtccattacttttcctattaacattattattctttcatccacaagacttaccttggaaaggcgtctatgttttagcgattactttatggattgcgacttggtggattactgaagcaattcctattgcagcaacgagcttattaccaattgtgttattaccattaggtcatatacttacaccagaacaagtatcatccgaatatggcaatgatattatctttttgtttttaggtggatttattttggcaattgcaatggaaagatggaatttacatacgagagtagcgttgacaattattaatttgattggtgcaagcacttcaaaaatattacttggattcatggtggcaacaggattcttatctatgtttgtatcgaacactgcagctgtaatgattatgattccgattggtttagcaattattaaggaagcacatgatttacaagaagccaatacgaatcaaacaagtattcaaaagtttgaaaaatctctagttttagcaattggctatgcaggtacgattggtggcttgggtacattaatcggaactccgccattaattattttaaaaggacaatacatgcaacattttggacatgaaattagttttgctaaatggatgattgtagggattccaacggtcattgttttgttaggtattacttggctctatttaagatatgttgcgtttagacatgatttgaaatatttacctggtggtcagacgttaattaaacaaaagttagacgagcttggcaaaatgaagtatgaagaaaaggtagtacaaactatctttgtacttgctagcttattatggattacaagagagtttcttctgaaaaaatgggaagttacgtcatctgttgcagatggtacgattgctatttttatatcaatattattatttattattccagctaaaaatactgaaaaacatcgccgtatcattgactgggaagttgcaaaagagctcccttggggtgtattaattttatttggtggcggtttagcattagcgaaaggtatttctgaaagtggtttagcaaaatggttaggcgaacagttgaaatcattaaatggtgttagtccgattcttattgtaattgtcataacaatctttgtcttatttttaactgaagtgacatctaatactgcaactgcaacgatgattttaccgattttagcaacgttgtctgttgctgttggagtgcatccattactacttatggcacctgcagctatggcggctaactgtgcatacatgttaccagtagggacaccaccgaatgcaattatctttggttctggtaaaatatctatcaaacaaatggcatcagtaggattctgggtaaacttaatcagtgcaataattattattttagtcgtgtattatgtaatgcctatagttttaggtattgatataaatcaaccactgccattgaaatag

SEQ ID NO: 406660 - DNA, 795 bp, Staphylococcus aureus
atgcaattatattatttaggccctaaaggtacattttcatatttggcttgtcgtcagtatttttctgaaaatgaagcaacttttcaaccaaagtcaaatttttttgaagtcatcaaggcagttgcagatgatgacacatcgattggtgttgtccctattgaaaattctatagaaggaacaatcaacattgtggcagatgcacttgcacagcaagatgtctttgcacacggtgaaatacgtttagatattaactttgcattatatggtaatggaacagattccatttctgatattaaaaaagtgtattctattgcaccagcaatcagtcaaacaacaaattacatacatcaacatcaatttgactatgattatgtcgacagtacaattcaaagtttgactaaaattgaaaatggcgttgcagcaattgcacctttaggtagtggcgaagcttatggttttacacctattgatacacatattgaagactatccacataacgtgacacgttttttagttataaaaaatcagcagcaatttgatcaaaatgcgacatcattgatgtttttaattacaccaatgcatgataaacctgggttgttagcaagtgtgcttaatacatttgctttgtttaatattaatttatcctggattgagtctcgtcctttaaaaacacaattaggtatgtatcgatttttcgttcaggctgattctgcaattacaaccgatataaagaaagtcattgctattttagaaaccttagatttcaaagtagaaatgattggtgcttttaattaa

SEQ ID NO: 406661 - DNA, 1077 bp, Staphylococcus aureus
atgttatttaaagaggctcaagctttcatagaaaacatgtataaagagtgtcattatgaaacgcaaattatcaataaacgtttacatgacattgaactagaaataaaagaaactgggacatatacacatacagaagaagaacttatttatggtgctaaaatggcttggcgtaattcaaatcgttgcattggtcgtttattttgggattcgttaaatgtcattgatgcaagagatgttactgacgaagcatcgttcttatcatcaattacttatcatattacacaggctacaaatgaaggtaaattaaagccgtatattactatatatgctccaaaggatggacctaaaattttcaacaatcaattaattcgctatgctggctatgacaattgtggtgatcctgctgaaaaagaagttacacgcttagcaaatcacttaggttggaaaggaaaaggtactaattttgacgtgttaccactgatttaccaattacctaatgagtcagttaaattttacgaatatcctacttcattaattaaagaagtacctattgaacataatcattatccaaaattaagaaaattgaacttaaaatggtatgcagtccctatcatttccaatatggacttaaaaatcggtggcattgtatatccaactgcaccctttaacggttggtatatggtaactgaaattggcgtacgtaactttattgatgattaccgttacaatttactagaaaaagttgcagatgcgtttgaatttgatacacttaaaaataattcatttaataaagatcgagcacttgttgaattgaactatgctgtgtatcattcctttaaaaaagaaggcgtatcaattgtcgatcatttgaccgctgcaaagcaattcgaactattcgaacgtaacgaagcacaacaaggtcgtcaagttaccggaaaatggtcttggctagcaccgccattatctccaacattgacgtcaaattatcatcacggatatgacaatacagtaaaagatccaaactttttctataaaaagaaagaatcaaatgctaaccagtgccctttccatcattaa

SEQ ID NO: 406662 - DNA, 1470 bp, Staphylococcus aureus
gtgtaccaattagaagacgacagtttaatgttacataatgacttatatcaaataaatatggctgaaagttattggaatgataatattcatgaaaaaatggctgtatttgatttgtattttagaaaaatgccatttaatagtggctatgctgtttttaatggtttaaaacgcgtcattgattttatagaacattttggattttcagaatctgatttggaatatttaaagtctattggctacaaggatgatttcttatcatatttaaaagatttaaaattcacaggcagcatccgttcgatgcaagaaggcgaattatgctttggtaacgaaccattgttacgcgtagaagcaccattgattcaagcgcaattaatagaaacaattttattaaacattgtaaatttccatacattaattacaacaaaggctagcagaattcgtcaaattgcatcaaatgataaattaatggagtttggtacacgtcgtgcgcaagaaattgatgcagcattgtggggcgctagagctgcttacatcgggggctttgattctacaagtaatgttagggcggggaaattatttggtatacctgtgtctggtacacatgcacatgcatttgtccaaacttatggagacgaatatgttgccttcaaaaaatatgctgaaagacataaaaattgtgtgttcctagtagatacattccatactttaaaatctggcgtgccaaatgcaataaaagttgcaaaagaattaggtgacaaaattaactttgtaggtattcgattagattctggagatatcgcttatttatctaaagaggcaagacgtatgcttgatgaagcaggatttactgaaactaaaattatcgcgtctaatgatttggatgaagaaacgattacgagtttgaaagcacaaggtgcaaaagtagattcttggggcgttggtacaaagctgattacaggatacgatcaaccagcattaggtgcagtatataaacttgtagctattgaaaatgaagatggttcatatagtgatcgtattaaattatcaaataacgctgaaaaggttacgacgccaggtaagaaaaatgtatatcgcattataaacaagaaaacaggtaaggcagaaggcgattatattactttggaaaatgaaaatccatacgatgaacaacctttaaaattattccatccagtgcatacttataaaatgaaatttataaaatctttcgaagccattgatttgcatcataatatttatgaaaatggtaaattagtatatcaaatgccaacagaagatgaatcacgtgaatatttagcactaggattacaatctatttgggatgaaaataagcgtttcctgaatccacaagaatatccagtcgatttaagcaaggcatgttgggataataaacataaacgtatttttgaagttgcggaacacgttaaggagatggaagaagataatgagtaa

SEQ ID NO: 406663 - DNA, 822 bp, Staphylococcus aureus
atgagtaaattacaagacgttattgtacaagaaatgaaagtgaaaaagcgtatcgatagtgctgaagaaattatggaattaaagcaatttataaaaaattatgtacaatcacattcatttataaaatctttagtgttaggtatttcaggaggacaggattctacattagttggaaaactagtacaaatgtctgttaacgaattacgtgaagaaggcattgattgtacgtttattgcagttaaattaccttatggagttcaaaaagatgctgatgaagttgagcaagctttgcgattcattgaaccagatgaaatagtaacagtcaatattaagcctgcagttgatcaaagtgtgcaatcattaaaagaagccggtattgttcttacagatttccaaaaaggaaatgaaaaagcgcgtgaacgtatgaaagtacaattttcaattgcttcaaaccgacaaggtattgtagtaggaacagatcattcagctgaaaatataactgggttttatacgaagtacggtgatggtgctgcagatatcgcacctatatttggtttgaataaacgacaaggtcgtcaattattagcgtatcttggtgcgccaaaggaattatatgaaaaaacgccaactgctgatttagaagatgataaaccacagcttccagatgaagatgcattaggtgtaacttatgaggcgattgataattatttagaaggtaagccagttacgccagaagaacaaaaagtaattgaaaatcattatatacgaaatgcacacaaacgtgaacttgcatatacaagatacacgtggccaaaatcctaa

SEQ ID NO: 406664 - DNA, 603 bp, Staphylococcus aureus
atgtcattcgtaacagaaaatccatggttaatggtactaactatatttatcattaacgtttgttatgtaacgtttttaacgatgcgaacaattttaacgttgaaaggttatcgttatattgctgcatcagttagttttttagaagtattagtttatatcgttggtttaggtttggttatgtctaatttagaccatattcaaaatattattgcctacgcatttggtttttcaataggtatcattgttggtatgaaaatagaagaaaaactggcattaggttatacagttgtaaatgtaacttcagcagaatatgagttagatttaccgaatgaacttcgaaatttaggatatggcgttacgcactatgctgcgtttggtagagatggtagtcgtatggtgatgcaaattttaacaccaagaaaatatgaacgtaaattgatggatacgataaaaaatttagatccgaaagcatttatcattgcgtatgaacctcgaaacatacatggtggattctggactaaaggcattcgtcgtagaaagcttaaagattatgaaccagaagaactggaaagtgtagtagaacatgaaattcaaagtaaatga

SEQ ID NO: 406665 - DNA, 174 bp, Staphylococcus aureus
atgaaattcaaagtaaatgagaatgaaacaattgctgattgtttgtcacgaatgaaaatgcaagggtatatgccggtaaaacgtattgaaaaacccgtgtttcaagagcaaaaagatggcacggttgaagtatcacatcaagaaatcgtttttgtaggtaagaaaatccaataa

SEQ ID NO: 406666 - DNA, 327 bp, Staphylococcus aureus
atggaacaaattgaattatttagtattgataaattcaaatgtaattcagaggctaagtattatcttaatattattgagggagaatggcatcctcaagatttaaatgatagtcctttaaaatttattctcagtacctcagacgattctgattacatttgcaaatatataaatacagaacacaaacaactcacattatataataaaaataatagctcaattgttattgaaatatttataccaaatgataataaaatactactaacaattatgaacacagaagctttgggaacttctcctagaatgactttcattaagcataagtcataa

SEQ ID NO: 406667 - DNA, 1167 bp, Staphylococcus aureus
atgaaaagaaactttccaaaattaatagctttaagtttaatattttctttaagtgttacccctattgcaaacgctgagagcaattcaaatatcaaagcaaaagataagaagcatgtgcaagttaatgtcgaggacaagagtgttcctactgacgtacgtaatttagcgcaaaaagactatctttcttatgttacttcacttgataaaatctataataaagagaaagcctcgtatacacttggtgaaccttttaaaatttataaattcaacaaaaagagtgatggtaattattattttccagttttgaacactgaaggtaatatcgattatatagttacaatttcaccaaaaatcactaagtattctagttcatcttctaaatacacaatcaatgtttctccatttttatctaaagtcttaaatcaatataaagatcaacaaattactattttgacaaactcaaaaggttactatgtggttactcaaaatcataaagctaaactagtactaaaaacaccacgtctagaagataaaaagttaaaaaagactgagagtatacctactggcaataatgtaacgcaactaaagcaaaaagcttctgtcactatgccaactagtcaatttaaaagtaataattatacttacaacgagcaatatataaataaacttgagaatttcaagataagagaaactcaaggtaacaatggttggtgtgcaggctatacgatgtctgaattactaaatgcgacttataatactaacaaatatcatgcagaagctgtgatgagatttttacacccaaacttacaaggacaacgattccaatttactggtttaacgccaagagagatgatttattttggacaaactcagggaagaagtccacaacttcttaatagaatgactacatataatgaagttgacaatcttactaaaaataataaaggaattgctgttttaggtagtagagtagaatcaagaaatggtatgcacgcagggcatgccatggcagttgttgggaacgctaaattagataatggacaagaggttataattatatggaatccatgggataatggttttatgactcaagatgctaaaaacaatgttattccagtatccaatggcgaccattatcgatggtattcatctatttatggttattaa

SEQ ID NO: 406668 - DNA, 1296 bp, Staphylococcus aureus
atgattgaacgctattctagagaagaaatgtctaatatttggactgatcaaaatcgctatgaagcatggttagaagtggaaattttagcatgtgaagcatggagtgaattaggacatataccgaaagctgacgtacaaaaaattcgtcaaaacgcaaaggtaaatgtcgaacgtgcacaagaaattgaacaagaaacgcgccatgatgttgtagcctttactagacaagtttctgaaacgctaggtgaagaacgtaagtgggtacattatggtttaacttctactgatgttgtagatacagctttaagtttcgttattaaacaagcaaatgacattattgaaaaagatttagaaagatttatcgacgttttagctgaaaaagcaaaaaattataaatatacattgatgatgggacgtacacatggagtgcatgcagaaccaactacatttggtgtcaaaatggcattgtggtacacggaaatgcaacgtaacttacaacgtttcaaacaagtaagagaagaaattgaagtagggaaaatgagtggtgcagtaggtacttttgctaacattcctcctgaaatagaaagttatgtgtgtaaacatttaggtattggcacagcgcctgtatcaacgcaaacattgcaacgcgatcgacatgcatactatattgcgacattagcattaatcgcgacatcactagaaaaatttgccgttgaaatacgtaaccttcaaaaaaccgaaacgagagaagttgaagaagcatttgcaaaaggccaaaaaggttcatctgcaatgcctcataaacgaaatccaattggttctgaaaatatcacaggtatttcaagagtcattcgtggttatattactacagcttatgagaatgtgccattatggcatgaaagagatatttctcattcttctgctgagcgtattatgttaccagatgttacaatagcactagattatgcattgaatcgtttcacaaatattgtggaccgtttaactgtatttgaagataatatgcgtaataacatagataaaacatttggtctgattttctcacaacgtgtcttattagcattaattaataaaggtatggttcgtgaagaagcatacgacaaagtacaaccaaaagcgatgatatcttgggaaacgaaaacaccgttccgtgaattaatcgaacaagatgagtctattacaagtgttttaacaaaagaagaattggatgaatgtttcgatcctaaacatcatttgaatcaagttgacactattttcgaacgcgctggattagcataa

SEQ ID NO: 406669 - DNA, 303 bp, Staphylococcus aureus
atgcaaattgaaaaattacgaggtgcagcgttagatgaattgtttgatgcaatactaacgttagaaaatagagaagaatgttaccaatttttcgatgatttgtgtactgtaaatgaaattcaatcactgtctcaaagattacaagttgctaaaatgattaagcaaggttatacctatgcaacgattgaacaagaatctggagcatcgactgcaacgatttctagagtgaagcgttcattacaatggggtaatgatgcttatacaatgattttagatcgtatgaatattgaaacaaatgaataa

SEQ ID NO: 406670 - DNA, 693 bp, Staphylococcus aureus
atgtatgacattaaaaaatggcgccatatttttaaattagacccagctaaacatatttcagatgatgatttagatgcgatttgtatgtctcaaacagatgcaattatgattggtggaactgatgacgttactgaagataatgtcattcatttaatgagcagagtaagaagatacccattgcctttagtacttgaaatatcaaacatcgaaagtgtaatgcctggttttgatttttattttgtacctacagtactgaacagtacagatgttgtatttcacaatggtacattattagaagcgcttaaaacatatggacatagtatagattttgaggaagtaatatttgaagggtatgtcgtgtgcaatgctgatagcaaagtggcaaaacataccaaagcaaatacagatttaacaacagaagatttagaagcatatgcccaaatggtcaatcatatgtatcgattaccggttatgtatatagagtatagtggcatttatggcgacgtatcaaaggttcaagctgtctcagaacatctaacagaaacgcaacttttttatggtggcggtatttcctcagaacaacaagcgacagagatggcagctattgcagatacaattatcgtcggtgatattatttataaagatattaaaaaagctttaaaaacagtaaaaataaaggagtctagtaaatga

SEQ ID NO: 406671 - DNA, 2193 bp, Staphylococcus aureus
atgaatgcgttattaaatcatatgaatacagagcaaagtgaagctgtaaagacaacagaaggaccattgttaattatggcaggtgctggttcagggaagacacgtgttttaacacatagaattgcttatttattagacgaaaaagatgtctcaccatacaatgttttggctattacttttacaaataaagctgcaagagaaatgaaagaacgtgttcaaaaattagtaggtgatcaagcagaagttatttggatgtcaacattccactcaatgtgtgttcgtattttacgtcgtgatgcagatcgaattggtatagaacgcaattttacgataattgatcctacagaccaaaaatctgttattaaagacgtcttaaaaaatgaaaatattgatagtaaaaagtttgaacctcgtatgtttatcggtgcgatcagtaatttgaaaaatgaacttaaaacacctgcagatgctcaaaaagaagccacagattatcactcgcaaatggtagcaacggtttatagtggatatcaacgccaattgtcacgtaatgaagcgttagattttgatgaccttattatgacaacgattaacttatttgagcgtgtaccagaagttctagaatattatcagaacaaattccaatatattcatgtagatgagtatcaagatactaataaagcacaatacacattagttaaattattagcaagtaagtttaaaaacttatgtgttgtaggtgactcagatcagtcaatttatggttggcgtggtgctgatattcaaaatatcttatcatttgaaaaagactatccagaagcgaatacaatctttttagagcaaaattatcgttcgacgaaaacgattttaaatgcggctaacgaagtgattaaaaataattctgaacgtaagccaaaaggactgtggactgcaaatacgaatggtgagaaaattcattactatgaagcaatgacggaacgtgatgaagcggaatttgtaatacgagaaattatgaagcatcaacgtaatggtaagaaatatcaagatatggcaattttatatagaacgaatgcacaatcacgtgtacttgaggaaacattcatgaaatctaatatgccatacacaatggttggtggccaaaagttctatgaccgtaaagaaatcaaagatttattaagttatttgcgtataattgccaatagtaatgatgacattagtttgcaacgtattattaatgttccaaaaagaggtgtaggtccttcatctgttgaaaaagttcaaaactatgcacttcaaaacaatatcagtatgtttgatgcacttggagaagctgattttatcggattgtcaaaaaaggtgacacaagagtgtcttaatttttacgagttaatccaaagcttgataaaagaacaagaatttttagaaattcatgaaatagttgatgaagtattacaaaagtctggctatcgagaaatgcttgaacgtgaaaatacattagaatctcgaagtagattagaaaacatcgatgaatttatgtcagtaccaaaagactatgaggaaaataccccattagaagaacagtcattaattaactttttaacggatttatcgttagtagctgatattgatgaggcagatactgaaaatggcgtaacactaatgacgatgcactcggctaagggccttgaatttccaattgtctttataatggggatggaagaatctttattcccacatattagagcgattaagagtgaagatgatcatgaaatgcaagaagaacgtcgtatttgttatgtagcaattacaagggctgaagaggtgttatatatcactcatgcgacatcaagaatgttatttggtcgccctcagtcaaatatgccatccagatttttaaaggaaattccagaatcactattagaaaatcattcaagtggcaaacgacaaacgatacaacctaaggcaaaaccttttgctaaacgcggatttagtcaacgaacaacgtcaacgaaaaaacaagtattgtcatctgattggaatgtaggtgacaaagtgatgcataaagcctggggagaaggcatggtgagtaatgtaaacgagaaaaatggctcaatcgaactagatattatctttaaatcacaagggccaaaacgtttgttagcgcaatttgcaccaattgaaaaaaaggaggattaa

SEQ ID NO: 406672 - DNA, 2004 bp, Staphylococcus aureus
atggctgatttatcgtctcgtgtgaacgagttacatgatttattaaatcaatacagttatgaatactatgtagaggataatccatctgtaccagatagtgaatatgacaaattacttcatgaactgattaaaatagaagaggagcatcctgagtataagactgtagattctccaacagttagagttggcggtgaagcccaagcctctttcaataaagtcaaccatgacacgccaatgttaagtttagggaatgcatttaatgaggatgatttgagaaaattcgaccaacgcatacgtgaacaaattggcaacgttgaatatatgtgcgaattaaaaattgatggcttagcagtatcattgaaatatgttgatggatacttcgttcaaggtttaacacgtggtgatggaacaacaggtgaagatattaccgaaaatttaaaaacaattcatgcgatacctttgaaaatgaaagaaccattaaatgtagaagttcgtggtgaagcatatatgccgagacgttcatttttacgattaaatgaagaaaaagaaaaaaatgatgagcagttatttgcaaatccaagaaacgctgctgcgggatcattaagacagttagattctaaattaacggcaaaacgaaagctaagcgtatttatatatagtgtcaatgatttcactgatttcaatgcgcgttcgcaaagtgaagcattagatgagttagataaattaggttttacaacgaataaaaatagagcgcgtgtaaataatatcgatggtgttttagagtatattgaaaaatggacaagccaaagagagtcattaccttatgatattgatgggattgttattaaggttaatgatttagatcaacaggatgagatgggattcacacaaaaatctcctagatgggccattgcttataaatttccagctgaggaagtagtaactaaattattagatattgaattaagtattggacgaacaggtgtagtcacacctactgctattttagaaccagtaaaagtagctggtacaactgtatcaagagcatctttgcacaatgaggatttaattcatgacagagatattcgaattggtgatagtgttgtagtgaaaaaagcaggtgacatcatacctgaagttgtacgtagtattccagaacgtagacctgaggatgctgtcacatatcatatgccaacccattgtccaagttgtggacatgaattagtacgtattgaaggcgaagtagcacttcgttgcattaatccaaaatgccaagcacaacttgttgaaggattgattcactttgtatcaagacaagccatgaatattgatggtttaggcactaaaattattcaacagctttatcaaagcgaattaattaaagatgttgctgatattttctatttaacagaagaagatttattacctttagacagaatggggcagaaaaaagttgataatttattagctgccattcaacaagctaaggacaactctttagaaaatttattatttggtctaggtattaggcatttaggtgttaaagcgagccaagtgttagcagaaaaatatgaaacgatagatcgattactaacggtaactgaagcggaattagtagaaattcatgatataggtgataaagtagcacaatctgtagttacttatttagaaaatgaagatattcgtgctttaattcaaaaattaaaagataaacatgttaatatgatttataaaggtatcaaaacatcagatattgaaggacatcctgaatttagtggtaaaacgatagtactgactggtaagctacatcaaatgacacgcaatgaagcatctaaatggcttgcatcacaaggtgctaaagttacaagtagcgttactaaaaatacagatgtcgttattgctggtgaagatgcaggttcaaaattaacaaaagcacaaagtttaggtattgaaatttggacagagcaacaatttgtagataagcaaaatgaattaaatagttag

SEQ ID NO: 406673 - DNA, 1200 bp, Staphylococcus aureus
atgaagcgtacattagtattattgattacagctatctttatactcgctgcttgtggtaaccataaggatgaccaggctggaaaagataatcaaaaacataacaatagttcaaatcaagtaaaagaaattgcaacggataaaaatgtacaaggtgataactatcgtacattgttaccatttaaagaaagccaggcaagaggacttttacaagataacatggcaaatagttataatggcggcgactttgaagatggtttattgaacttaagtaaagaagtatttccaacagataaatatttgtatcaagatggtcaatttttggacaagaaaacaattaatgcctatttaaatcctaagtatacaaaacgtgaaatcgataaaatgtctgaaaaagataaaaaagacaagaaagcgaatgaaaatttaggacttaatccatcacacgaaggtgaaacagatcctgaaaagattgcagaaaaatcaccagcctatttatctaacattttagagcaagatttttatggtggtggagatacaaaaggtaagaatattaaaggtatgacgattggtttagctatgaatagtgtttattactataaaaaagaaaaagatggatcgacttttagtaaaaaactagatgatagcgaagttaaaaagcaaggtaaacaaatggctagtgagatattatcaaggttacgtgaaaatgatgatttaaaagatataccaattcattttgcaatttataagcaatcaagtgaagattcaatcacaccaggtgaatttatcactcaagcgactgcagaaaagagtcaaacaaagcttaatgaatggcataatatcaatgaaaaatcagctttattaccttcttcaacagcagcagattatgatgaaaatttaaataataatttcaagcaatttaatgataatttgcaatcatatttttctaatttcacacaagcagtagggaaagttaaatttgttgataaaaagccacaacgattagtagtagatttaccaatcgattactatggacaagctgaaacaattggtattacacagtacgttactgaacaagcgaataaatatttcgataaaatcgataactatgaaattcgtattaaagatggtaaccaaccacgtgctttaattagtaagacaaaagatgacaaagaaccgcaagttcatatttacagtaattaa

SEQ ID NO: 406674 - DNA, 1539 bp, Staphylococcus aureus
atgcttacaatggggacagcattaagtcaacaagtagatgccaattggcaaacttatattatgattgccgtctacttcttgatactaatcgttattggcttttacggttacaagcaagcaactggtaacctaagcgagtacatgttaggtggacgtagtattggaccgtatattactgcattatcagctggagcttcagatatgagtggatggatgattatggggctacctggttctgtctatagcactggtctatcagctatgtggattacaatcggtttaacattaggtgcttatataaattactttgttgttgctcctagacttcgtgtttataccgaattagctggagatgcaattacattaccagatttctttaaaaatcgtttaaacgataaaaataatgtgttaaagattatttctggattgattatcgtagtattctttacattatatacacattctggtttcgtatctggtggtaaactatttgaaagtgcttttggattagattatcatttcggtttaatattagttgctttcattgtcattttctatactttctttggtggatatttagctgtatcaattacagatttcttccaaggtgtcattatgttaattgcgatggttatggtccctattgttgctatgatgaatttaaacggctggggaacgtttcatgatgtagcagctatgaaacctacaaatttaaatttatttaaagggttatcatttataggaattatctctctattttcatggggattaggttatttcggtcaacctcatatcattataaggtttatgtctattaaatcacacaagatgctacctaaagctagacgtttaggtattagctggatggctgttggtttattaggcgctgtggctgttggtttaacaggtattgcattcgtacctgcttatcatattaaactagaagatcctgagacattattcatcgtgatgagtcaagtactcttccatcctcttgtaggtggtttcttacttgctgcgattctagctgcaattatgagcacgatttcttcacaattacttgtaacatctagttcactaacggaagacttttataaattaattcgtggtgaagaaaaagctaaaacgcaccaaaaagaatttgttatgattggaagattatctgtattagttgtagcaattgttgccatcgcgattgcatggaatccaaacgacacaattctaaacttagtaggtaacgcttgggccggatttggtgcatcgttcagtccacttgtgctatttgcactttactggaaaggtttgacacgtgccggtgctgtaagtggaatggtttcaggtgccttagtcgttatcgtttggattgcgtggattaaaccattggcacatatcaacgaaatattcggcttatatgaaattattcctggatttattgtaagtgtaatcgttacatatgttgtaagtaaacttactaaaaaacctggtgcatttgttgaaactgacttaaacaaagttcgtgacatcgttagagaaaaataa

SEQ ID NO: 406675 - DNA, 303 bp, Staphylococcus aureus
atgacaaaagtaacacgtgaagaagttgagcatatcgcgaatcttgcaagacttcaaatttctcctgaagaaacggaagaaatggccaacacattagaaagcattttagattttgcaaaacaaaatgatagcgctgatacagaaggcgttgaacctacatatcacgttttagatttacaaaacgttttacgtgaagataaagcaattaaaggtattccacaagaattagctttgaaaaatgccaaagaaacagaagatggacaatttaaagtgcctacaatcatgaatgaggaggacgcgtaa

SEQ ID NO: 406676 - DNA, 1458 bp, Staphylococcus aureus
atgagcattcgctacgaatcggttgagaatttattaactttaataaaagacaaaaaaatcaaaccatctgatgttgttaaagatatatatgatgcaattgaagagactgatccaacaattaagtcttttctagcgctggataaagaaaatgcaatcaaaaaagcgcaagaattggatgaattacaagcaaaagatcaaatggatggcaaattatttggtattccaatgggtataaaagataacattattacaaacggagtagaaacaacatgtgcaagtaaaatgttagaaggttttgtgccaatttacgaatctactgtaatggaaaaactacataatgaaaatgccgttttaatcggtaaattaaatatggatgagtttgcaatgggtggttcaacagaaacatcttatttcaaaaaaacagttaacccatttgaccataaagcagtgccaggtggttcatcaggtggatctgcagcagcagttgcagctggcttagtaccatttagcttaggttcagacacaggtggttcaattagacaaccggctgcatattgtggcgttgtcggtatgaaaccaacatacggtcgtgtatctcgatttggattagttgcttttgcatcttcattagaccaaattggtccattgactcgaaatgtaaaagataatgcaatcgtattagaagctatttctggtgcagatgttaatgactctacaagtgcaccagttgatgatgtagactttacatctgaaattggtaaagatattaaaggattaaaagttgcattacctaaagaatacttaggtgaaggtgtagctgatgacgtaaaagaagcagttcaaaacgctgtagaaactttaaaatctttaggtgctgtcgttgaggaagtatcattgccaaatactaaatttggtattccatcatattacgtgattgcatcatcagaagcttcgtcaaacctttctcgttttgacggaattcgttatggttatcattctaaagaagctcattcattagaagaattatataaaatgtcaagatctgaaggtttcggtaaagaagtaaaacgtcgtattttcttaggtacatttgcattaagttcaggttactatgatgcttactataaaaaatctcaaaaagttagaacattgattaaaaatgactttgataaagtattcgaaaattatgatgtagtagttggtccaacagcgcctacaactgcgtttaatttaggtgaagaaattgatgatccattaacaatgtatgccaatgatttattaacaacaccagtaaacttagctggattacctggtatttctgttccttgtggacaatcaaatggccgaccaatcggtttacagttcattggtaaaccattcgatgaaaaaacgttatatcgtgtcgcttatcaatatgaaacacaatacaatttacatgacgtttatgaaaaattataa

SEQ ID NO: 406677 - DNA, 1428 bp, Staphylococcus aureus
atgcattttgaaacagttataggacttgaagttcacgtagagttaaaaacggactcaaaaatgttttctccatcaccagcgcattttggagcagaacctaactcaaatacaaatgttatcgacttagcatatccaggtgtcttaccagttgttaataagcgtgcagtagactgggcaatgcgtgctgcaatggcactaaatatggaaatcgcaacagaatctaagtttgaccgtaagaactatttctatccagataatccaaaagcatatcaaatttctcaatttgatcaaccaattggtgaaaatggatatatcgatatcgaagtcgacggtgaaacaaaacgaatcggtattactcgtcttcacatggaagaagatgctggtaagtcaacacataaaggtgagtattcattagttgacttgaaccgtcaaggtacaccgctaattgaaatcgtatctgaaccagatattcgttcacctaaagaagcatatgcatatttagaaaaattgcgttcaattattcaatacactggtgtatcagacgttaagatggaagagggatctttacgttgtgatgctaacatctctttacgtccatatggtcaagaaaaatttggtactaaagccgaattgaaaaacttaaactcatttaactatgtacgtaaaggtttagaatatgaagaaaaacgccaagaagaagaattgttaaatggtggagaaatcggacaagaaacacgtcgatttgatgaatctacaggtaaaacaattttaatgcgtgttaaagaaggttctgatgattaccgttacttcccagagcctgacattgtacctttatatattgatgatgcttggaaagagcgtgttcgtcagacaattcctgaattaccagatgaacgtaaagctaagtatgtaaatgaattaggtttacctgcatacgatgcacacgtattaacattgactaaagaaatgtcagatttctttgaatcaacaattgaacacggtgcagatgttaaattaacatctaactggttaatgggtggcgtaaacgaatatttaaataaaaatcaagtagaattattagatactaaattaacaccagaaaatttagcaggtatgattaaacttatcgaagacggaacaatgagcagtaaaattgcgaagaaagtcttcccagagttagcagctaaaggtggtaatgctaaacagattatggaagataatggcttagttcaaatttctgatgaagcaacacttctaaaatttgtaaatgaagcattagacaataacgaacaatcagttgaagattacaaaaatggtaaaggcaaagctatgggcttcttagttggtcaaattatgaaagcgtctaaaggtcaagctaatccacaattagtaaatcaactattaaaacaagaattagataaaagataa

SEQ ID NO: 406678 - DNA, 948 bp, Staphylococcus aureus
atgaggaaacgtgctagaatcatttataacccgacatcaggtaaagagctatttaaaagagaattacctgatgccttaataaaattagaaaaagcgggatatgaaacgagtgcatatgcaaccgagaaaataggtgatgccacacttgaagcagaaagagctatgcatgaaaattatgatgtattaatcgctgcaggtggtgatggaacattaaatgaagtagttaatggtatcgcagaaaagcctaatcgtcctaagctaggtgtcattcctatgggtactgttaatgactttggacgtgcattgcatatacctaatgacatcatgggggcacttgatgtcatcattgaaggtcattctactaaagtagatattggtaaaatgaataatcgatactttattaatttagctgcaggcggacaattgacgcaagtctcttatgaaacaccgagtaaattgaaatctattgttggtccatttgcttattacatcaaaggtttcgaaatgttacctcaaatgaaagctgtagatttaagaattgaatatgatggtaatgttttccaaggagaagcattattattctttttaggtttaacaaattcaatggcaggatttgaaaaattagtgccggacgctaagttagatgacggctattttacgttaattatagttgaaaaatcaaaccttgcagaacttggtcatattatgactttagcttcaagaggagaacatactaagcatcctaaagttatttatgaaaaagcaaaggcaattaatatttcatcattcacagacttacaactaaatgtagatggagaatatggtggtaaattaccagcgaatttcttaaatctagaacgtcatatagatgtctttgcacctaatgatattgtaaatgaagagttaataaataatgatcatgttgatgacaatttaatcgaagaataa

SEQ ID NO: 406679 - DNA, 1362 bp, Staphylococcus aureus
ttgcaagcaatagctaaaaatgacataaaaacgggaacagttgttgatttaacgcatgaaggccatggtgtcgtaaaaatagatcgctttcctattttcataccacaagctttaattaatgaacaaattgaatataaaattatcaaagtaaaaaagaactttgcgataggtaagttgcttaatataaatacgagaagtgagaatcgtgttgcaccgccatgtatatattatgaacgttgtggtgggtgccaacttcaacacttatcatacgaagcacaacttgaaatgaaaaaggaacaagtgattaatttgtttcagcgaaaagcgcattttgataattctaagattaacgatacagttggcatgacagatccttggagatatcgaaacaagtcccagattccagttggtaagaatgaacagaatgaagttattatgggcttttatcgtcaaagaagccatgacattattgacatggaaagttgtttaatacaagattcacaacatcaagaagtgatgaatgaagttaaatctattttaaaagatttaaatgtaagtatttatcaagaacaattgaaaaaaggtttaatgagacatttggttgtaagaacaggatatcatacagacgaaatgatgattatttttgtaactaatggtaaaaagtggccacaaaaaaatgctgttgttgagaagatattagatgcatttcctaatgtgacaagcattaaacaaaacattaatgatagccactctaatgttattatgggacgtcaatctataacgctatatggtaaagatacaattattgatcaattaacagatagtacatttaaaataagtgatcagtcattctaccaaattaattctgaacaaacagagaaattatataataaagcaattgagtatgcgcaattgacaggtaatgaagttgtattagatacctattgtggtattggaacaatagggctatatatggcaccacttgcaaaacatgtatacggtgttgaagtagtaccttctgcaattgaagacgcacaacaaaatgcgactataaaccaatgcaataatacaacttttgtctgtgggaaagctgaagaagttattttacaatggaaagcacaagggattaaaccagatgttgtaatggttgatccgccaagaaagggctgtgacgaaacgtttattcagactttgcttacattagaacctaagcgtattgtctatatttcatgtaatcccgcaacacagcaacgtgatgcattattattagctgaaaaatatcaacttgaagaggtaacaccggtagatatgtttccacaaacaacacatgttgagacagtggcattattcaatttgaaatag

SEQ ID NO: 406680 - DNA, 531 bp, Staphylococcus aureus
atgcataaaattgatttaacgacaaataattttcaaatgcgaaggtttattatcttgcaacttgttattgcgttattcgtgattttatttacgtataagtgggcgttaggtgtcacagcggttgtcgatcaaaatatcatcatcaatcttgtatatgggtttgctggattcattattttattgattttacatgaacttatccatagagcattatttcttttatttaaaaaagatagcaaacctatgtttaatataaaaaaagacagaatcttattccaaacagcagatgcttgcttcaacaaatggcaattctcaattattatgctgtcaccactaatcctattaagtactggcttgcttattttaattaaggtatttggttattcatcacttatttttatgtttagtatgcataccgcttattgctttatagatattctgcttgttgcattaacaatatctagtagttttaaatatgttcaacaagatgaagatagtatttatttgtatcatcaaaagccgactcaataa

SEQ ID NO: 406681 - DNA, 1071 bp, Staphylococcus aureus
ttgactgagagacgaattattcatatagatatggactatttttttgcacaagtcgaaatgagagataaccccaaattgaaagggaaaccagtcattgttggtggtaaagcaagcagtaggggtgttgtctctacggcatcctatgaagcacgaaaatacggcgtccattcagcaatgcctatgtcacaagcgcataaattatgtccaaatggatactttgtcacaagtaattttggtgcttaccgagaaacatctgcgcagattatgtctattttccgaagttatacagataaggtagaaccgatgtcattggatgaagcgtatttagatattacagaattagtgagaccagaccttcctgcttcgaaaattgctcagtatattagaaaagatattctagagcagacacatttaacagcatctgcaggtgtttcttataacaaatttttagctaaattagcgagtggtatgaataaacctgatggtatgactgtgattgattatcaaaatgtccatgatattttgatgacattggatattggagattttccaggcgtaggtaaagcttccaaaaaagtaatgcatgataatggtatttttaacggtagagatttatatgagaaaacggaatttgaattaatacgtttgtttggaaaaagaggtcggggtttatataacaaggcacgcggtattgaccatagtgaagtgaaatcatcaagagtaagaaaatcagtagggactgaacgcacatttgcaacagacgtgaatgatgatgaagagattttaagaaaagtatgggaattgtcaggtaaaacagctgaacgtctaaataaattacagaagtcagctaaaactgtaacggttaaaattaaaacttatcaatttgaaacgctatctaaacagatgagtttaagagattcggttagttctgaagaagatatttataatattgcatatttactttataacgatttaaaagaccctgatgtaccaattcgacttattggtgtcactgtaggtaatttagaacaatcaacttataaaaatatgacgatatatgactttatataa

SEQ ID NO: 406682 - DNA, 555 bp, Staphylococcus aureus
atgatacaagatgcgtttgttgcacttgattttgaaacagcaaatggtaaacgtacaagtatttgttctgtcggaatggttaaagtcattgatagtcaaataacagaaacatttcatactcttgtgaatccgcaagactatttttcacaacaaaatattaaaattcatggcatacaaccagaagatgttgaaaatgcacctacgtttgactacgtatttccatatatgatgcaatttattgcagatttacctgttgtcgcacataacgcggcatttgatatgaacgtcttacatcaaagcattcaaaatattggtttaccaactccaaatttaacttacttttgtagttatcaacttgctaaaagaaccgttgattcgtatcgatacggtttaaaacatatgatggagttttatcaattagattttcatggtcatcatgatgcattgaatgatgccaaagcatgcgcaatgattacttttaggctactgaaaaattatgaaaatttaacatatgtaactaatatttatggtaaaaatctaaaagataaaggctag

SEQ ID NO: 406683 - DNA, 501 bp, Staphylococcus aureus
atgttaagtaaaaatttattagaagcattaaatgatcaaatgaaccatgagtactttgcagcacacgcatatatggcaatggcagcatactgtgataaagaatcgtacgaaggatttgcaaacttcttcattcaacaagctaaagaagaacgtttccatggacaaaagatttataactatattaacgacagaggtgcacatgcagaattcagagcagtttcagcaccaaaaattgacttttcaagcatactagaaactttcaaagacagcttatctcaagaacaagaagtaacaagacgtttctataacttatctgaaatcgctcgtcaagataaagattatgcaactatctcattcttaaactggttcttagatgaacaagtcgaagaagaatcaatgtttgaaactcacatcaattatttaactcgtatcggcgatgacagcaatgcattatatctttacgaaaaagaacttggcgctcgtacattcgacgaagaataa

SEQ ID NO: 406684 - DNA, 1314 bp, Staphylococcus aureus
atgagacagtggacggcaatccatctagcgaaattggcgcgtaaagcaagtagagcagtaggtaaaagaggaacagatttacctggacaaatcgctagaaaagtggatacagatatattaagaaaattagcagagcaagttgatgatattgtatttatcagtggaacaaatggtaaaacaacgacttcaaacttaattggacatactttaaaagcaaataatattcaaattatacacaataatgaaggtgctaatatggctgcaggtataacttctgcattcatcatgcaatcaacacctaagactaaaattgcggtaatcgaaattgatgaaggttcgattccacgtgtgttaaaagaagttacaccttcaatgatggtatttactaatttctttagagatcaaatggatcgcttcggtgaaattgatattatggttaataacattgcagagacaattagtaataaaggcatcaaattattgctaaatgctgatgatccatttgtgagtcgtttgaaaatcgcaagtgatacgattgtgtactatggtatgaaagcacatgcccatgaatttgaacaaagtacgatgaatgaaagtagatattgtccaaactgtggtcgcttattgcaatacgattatattcattataatcaaattggtcattatcactgtcagtgtggtttcaaacgagagcaagcaaaatatgaaatatcaagttttgatgtggcaccgtttttatatttaaatatcaatgatgaaaaatatgatatgaaaattgcaggtgactttaacgcttataacgcgttagcagcatatactgttttaagagagctagggttaaatgaacaaacaattaaaaatggctttgaaacgtatacatcagacaatggtcgtatgcagtactttaaaaaagaacgaaaagaagcgatgatcaatttagctaaaaatcctgcaggaatgaatgcaagtttatcagttggtgaacaattagaaggcgaaaaagtgtatgttatttcgctaaatgataacgctgcagatggtcgagatacttcatggatttatgatgcagattttgaaaaattatctaagcaacaaattgaagctatcatcgtgacaggtacacgagcagaagaacttcaattgcgattgaagttagcagaggttgaagtaccaattatagttgagcgtgatatttataaagcaacggcaaagactatggattataaaggtttcacagttgcaataccaaactatacatcattagcgcctatgcttgaacaattaaaccgttcgtttgaaggaggtcaatcataa

SEQ ID NO: 406685 - DNA, 732 bp, Staphylococcus aureus
atgcatgaattgactatttatcattttatgtcagataaattgaatttatacagtgatataggaaatattattgctttaagacaacgtgctaaaaaacgaaatattaaagttaatgtcgtagaaatcaatgaaacagaaggtattacctttgatgaatgtgatattttctttatcggtggtggaagtgatagagaacaagcattagcaacaaaagaattaagtaaaattaagacaccacttaaagaagcgattgaagatggtatgccgggattaacgatttgtggaggctatcaatttttagggaaaaaatatatcacgcctgatggtacagaattagaagggttaggtattttagatttttatactgaatcaaagacaaaccgattaacaggagatattgttatcgaaagtgatacttttggaactattgtaggttttgaaaatcacggtggtagaacatatcatgatttcggtacacttggtcatgttacttttggttatggtaataatgatgaagataaaaaagaaggcattcattataaaaatttattaggtacttatttacatggaccaattttacctaaaaattacgaaatcactgattatctgttagaaaaagcttgtgaacgtaagggtattccgtttgagcctaaagaaatagataatgaagcggaaatacaagcgaaacaagtattaatagacagagcaaatagacagaagaaatctcgttaa

SEQ ID NO: 406686 - DNA, 414 bp, Staphylococcus aureus
atgaagcctactaaagtgatattaaaagatgcatcttatttacatagcaaaacatcgataacatttattttaaaagatgtagttatcgaagaagataataaaatttattatttcgacactagtgcaactttcgaagatcaagaagttaaatttgaatttgcactctttgatagtgacatggacaatttgaaacatatggattgcgacaatcctgttactgaaatatattttatagaacctgatttacattttacaattattgattttaatcaagaactgctttgtatttatattgattttgattctggtttaaggcattcaaacatggcaacagaatctggtatttcattaaggataaatgttgctaaatcagattttactaaatttattaatgaattagcctctttacattaa

SEQ ID NO: 406687 - DNA, 987 bp, Staphylococcus aureus
atgaacgatcaatggtataaacatttaattggtgccagaacaattaaaactggtattgccatttttttaacagctgtcttttgtatggcactagatttaacacccatctatgccattttaacagctgtagtcacaattgaaccaactgccaaggcatcacttattaaaggttatcgtagattacctgctacggtaattggtgcaggctttgcagtattatttacatatttattcggcgatcaatcaccttttacatatgcattgagtgcaacgttcacgattttattctgtacaaaactcaaattgcaagttggtacgaatgtcgctgtactaacatcattagctatgattccaggtattcatgatgcctacatattcaactttttgtctcgaacattgacagcaattattggactcgtgacatcaggtttaattaacttcatggtgtttccacctaagtattatggtcaggtcgaagaaaaattaagtaagacagatgccttgatgtataaattattttacaatcgctgccaagaacttatcttatcaagactgcaatctgataaaagcgaaaaagcatataaaaatattttcaatttaaataatcaagttgaaacgttaataagttatcaacgtgatgaattaagctatcataagaaaaaagaatgtgattggaaattactcaatcaattaactaaacgtgcatatacgaatcgtttgtttatcactcatttatcaaatatcatttacttgcctaaaaatactcgtgttaacttttcaggtgacgaaaaaatggcattgctaaaaattagtagtagcatcaaagatatattttatgatggttcttttaagagagaagatgattctgtagaaactttacgttcgactataaaagcacttgaaattagtggtgaaaatcaaattaaaagtcatatactatacgaagttctaatgatttatcgactgctagacagcagatatgcttaa

SEQ ID NO: 406688 - DNA, 759 bp, Staphylococcus aureus
atgattgtaaaaacagaagaagaattacaagcgttaaaagaaattggatacatatgcgctaaagtgcgcaatacaatgcaagctgcaaccaaaccaggtatcactacgaaagagcttgataatattgcgaaagagttatttgaagaatacggtgctatttctgcgccaattcatgatgaaaattttcctggtcaaacgtgtattagtgtcaatgaagaggtggcacatgggattccaagtaagcgtgtcattcgtgaaggagatttagtaaatattgatgtatcggctttgaagaatggctattatgcagatacaggcatttcatttgtcgttggagaatcagatgatccaatgaaacaaaaagtatgtgacgtagcaacgatggcatttgagaatgcaattgcaaaagtaaaaccgggtactaagttaagtaacattggtaaagcggtgcataatacagctagacaaaatgatttgaaagtcattaaaaacttaacaggtcatggtgttggtttatcattacatgaagcaccagcacatgtacttaattactttgatccaaaagacaaaacattattaactgaaggtatggtattagctattgaaccgtttatctcatcaaatgcatcatttgttacagaaggtaaaaatgaatgggcttttgaaacgagcgataaaagttttgttgctcaaattgagcatacggttatcgtgactaaggatggtccgattttaacgacaaagattgaagaagaatag

SEQ ID NO: 406689 - DNA, 387 bp, Staphylococcus aureus
atgaactatgttgaacgttatattgaacagtttttgagagcaacagtaagaaataatatcaagcactaccttttaatgctagatgaaaaaatgaaaaatttagatgattatatgcgttatttaattactaaaaaagaacaacttagcaagttaattgacagtctaatgctaacattagaaaataaatatattgatattgctgaagcatttcaaattcaatgtgcaagagaaatcaataatcaagaaattgaaaatattaaatcagagttgaataaagttgaagcatattatgcacaaattgaaactcaaattcaacaaacttcaactgaaaaaatagcaacagaaaaaacatcgtatctaataaattatatgaacgctgtggcatag

SEQ ID NO: 406690 - DNA, 702 bp, Staphylococcus aureus
atgacacacaaatatatatcaacgcaaatgttgatcatttttactgcattaatgattattgccaatttttactacatattttttgaaaaaattggctttttactcgttctattattgggatgtgtattagtttatgtaggatatctttattttcataaaatacgtggccttttggcgttttggataggcgcgctattaattgcattcacattattgtctaataagtatacaatcatcatcttgttcgtctttttattattacttattgtgcgttatttaatacacaagtttaaaccaaaaaaagtagttgcgacggatgaggttatgacttcaccatcttttattaaacaaaagtggtttggtgagcaacgtacaccagtttatgtatataagtgggaagatgtacaaattcaacatggaattggcgacctacatattgacttaacaaaagctgcaaatattaaggaaaataataccattgttgttagacacattttaggtaaagtgcaggttatattgccggttaattacaatattaatttacatgtagctgctttttatggaagtacttacgtgaatgaaaaatcatataaagttgaaaataacaatattcatattgaagaaatgatgaaaccggataactatacagttaatatctacgtatcaacgtttatcggagacgtagaggtgatttatcgatga

SEQ ID NO: 406691 - DNA, 1044 bp, Staphylococcus aureus
atgaaccactacattagaacaattggttcaatgctcatcttagtatatagcatgctagctgcatttctgttcatcgataaagtttttgtaaatatcatctattttcaaggtatgttttatacacaaatattcggaataccagtttttttatttttaaatctcatcatcatattattgtgtattattgttggttcggtactcgcttacaaaatcaatcagcaaaatgattggattaagacgcaaattgagcgttcaatggaaggcgaaacagttggcattaatgatcaaaatatagaaatatatagtgaaacgttagatttataccatacactcgtacctttaaatcaagaattgcataagttgcgacttaaaactcaaaacttaaccaatgaaaattataatattaatgatgtgaaagttaaaaagattattgaagatgaacgtcaaagactagcacgagaacttcacgattctgttagtcagcaactttttgcggcaagtatgatgctatctgctatcaaagaaacgaagttagaaccaccattagaccaacaaattcctattttagagaaaatggttcaagattcgcagttagaaatgcgtgctttgctgttacatttaagaccgcttggtttaaaagacaaatctttaggtgagggtattaaagatttagttattgatttacaaaaaaaagtgccaatgaaagttgtgcatgaaatacaagattttaaagtgcctaaaggtattgaagatcatttgttcagaattacacaggaagcaatttcgaatacattgcgtcattcaaacggtacaaaagtgacagtagaattgtttaataaagacgattatttattgttgagaattcaagataatggtaaaggttttaatgttgatgaaaaattagaacaaagttatggacttaaaaatatgcgtgaaagagctttggaaattggtgcaacgttccatattgtatcattgccagattcaggtacacgtatcgaggtgaaagcacctttaaataaggaggattcgtatgacgattaa

SEQ ID NO: 406692 - DNA, 630 bp, Staphylococcus aureus
atgacgattaaagtattgtttgtggatgatcatgaaatggtacgtataggaatttcaagttatctatcaacgcaaagtgatattgaagtagttggtgaaggcgcttctggtaaagaagcaattgccaaagcccatgagttgaagccagatttaattttaatggatttacttatggatgacatggatggtgtagaagcgacgactcagattaaaaaagatttaccgcaaattaaagtattaatgttaactagttttattgaagataaagaggtatatcgtgcattagatgcaggtgtcgatagttacattttaaaaacaacaagtgcaaaagatatcgccgatggagttcgtaaaacttctagaggagaatctgtttttgaaccggaagttttagtgaaaatgcgtaaccgtatgaaaaagcgcgcagagttatatgaaatgcttacagaacgagaaatggaaatattattattgattgcgaaaggttactcaaatcaagaaattgctagtgcatcgcatattactattaaaacggttaagacacatgtgagtaacattttaagtaagttagaagtgcaagatagaacacaagctgttatctatgcattccaacataatttaattcaatag

SEQ ID NO: 406693 - DNA, 1218 bp, Staphylococcus aureus
atgtcgaaaaaggatcactcttcttcaaaataccttaattctgttaaggaagcgcaagaggagtcaaaaaagaaaaataaaagtaatcccaaaattgatgttgatcgtacatatattgaacctcaacaattccaatctaagaaacctaaaaaagatgatcaggttttcttcttatcaagattaaataaacctgcaaaatataagaaagactctaatttcttatcatatctcatctatcgcataggaaaagatgatgcctcaggactagcagcacaaatgacttaccatttcgtacttgctatgttccctatgttgcttttcctattaacattattaccatttttcaatattaagcagagtcaaattactaatatgttaagcaatgcacccgctgaaacatctactctaattaagagtgtaattggtgatataactcaaaactccagtggtggcttattatctatcggtttgattttagcaatttggtcagcttcaaatggaatgactgcaattatgaattctttcaatgttgcttacgatgtagaagatagccgtaatggaatcgtattaaaactactaagtgttgtcttcactgtagttatgggcgttgtgtttgtagttgctctagcattaccaacgcttggttctgtaattagtcatttcctattcggtccacttggatttgacgaacaagtgaaatggatttttaaccttattagaattgtgttaccaatcattattatatttatcatatttatcgtgttatattcggttgcacctaacgttaaaacgaagcttaagtcagtattaccaggtgcagtatttacttcaattatttggttagctggttcatttggttttggttggtatatttcaaattttggtaactattctaaaacatatggcagtatcgcgggtatcatcattttgttactatggttatatatcacaagttttattataattgtcggtgctgaaatcaatgcaatcattcatcagcgtagtgtaattaaaggtaaaacacctgaagaagcagcattagaacatgatgacaataataaaaatcattataatgagaacactagatacgaatatgatgaagatagtaatgcaacacatcaacgtacgtatcatgttgatgaacatcctagtgatacctatccagaagatgataaaaatataaaagacaaaatcgttgataagcttaaaaaagactaa

SEQ ID NO: 406694 - DNA, 276 bp, Staphylococcus aureus
atggaaaataaatttgttcctggtattttaattggtgccgtaattggtggtgcaattagtttagctgataaatctacacgtcaagctttagttcaatcagttaaagatgcaaaaaatggtaaccgcaatcgtaagccttctaaagtcagcaagattaaagacgaagttttatactggaaagatgttgttgaagaaattcgtcgtaataatcctgaattagaacgttcattaaaggatgcgaaagaaacatttgttaatagaaaaaatcaacgctaa

SEQ ID NO: 406695 - DNA, 465 bp, Staphylococcus aureus
atggtagatgtagcatttgtctgtcttggcaatatatgtcgttctccaatggcagaagcaatcatgcgacaaagacttaaagacagaaatattcatgatattaaagtacattcaagaggtactggtagctggaatttaggagagccacctcatgaaggtacacaaaaaattctcaacaaacacaatattccatttgatggcatgattagtgaattattcgaagcgacagatgattttgattacattgtggctatggatcaaagtaacgttgataatattaaatctatcaatcctaatcttaagggacaattgttcaaactgttagaatttagtaatatggaagagagtgatgtaccagatccatactacacgaataattttgaaggtgtatacgacatggtattatcatcttgtgataatttaatagactacatcgtaaaagatgcaaatttgaaagaggggtag

SEQ ID NO: 406696 - DNA, 207 bp, Staphylococcus aureus
gtggctatgacaaatgaagagaaagtattagctattagagagaagttaaatattgttaatcaaggattattagatcctgaaaaatataaaaatgcaaatgaagaagaattaacagatatatatgattttgttcaatcaagagaaagattgtcgccaagtgaagtgacagctattgctgacgctttaggacaattgcgacacgaatag

SEQ ID NO: 406697 - DNA, 1248 bp, Staphylococcus aureus
ttgactaattacaaagaaaagttacaacaatacgctgaactattagttaaggttggtatgaatgttcaaccaaaacagccagtatttattagatcatcagtagaaacattagaattaacgcatttaattgtagaagaagcatatcattgtggcgcttcagatgtacgtgttgtatatagcgatccaaccttaaaacgcttaaaatttgaaaatgaatctgtggaacattttgctaatcatgagataaaatcatatgatgttgaagcgagaatggattacgttaaacgtggcgctgctaatttagcacttattagtgaagatcctgatttaatggatggtatcgatagccaaaaattacaagcatttcaacaacaaaacgcacgcgcatttaaaggatatatggaaagtgtacaaaaaaatcaatttccatgggtcgtagctgcttttccatctaaagcttgggcgaagagagtgtatcctgaactatctgtagaagaagcatatattaagtttattgacgaggtattcgatattgtgcgaattgatggtaacgatccagttgaaaattggcgtcaacacatcgctaatttaagtgtttacgctcaaaagttacaacaaaaaaattaccatgcgttgcattatgtatctgaaggtactgatttaacagtaggtttagcgaaaaatcatatctgggaagatgctacaagttatgttaacggcaaggaacaagcttttattgctaatataccaactgaagaagtatttacagcaccagatcgaaatagagtagatggatatgttactaataaattgcctttaagttataatggcacaattatcgatcaatttaaattgatgtttaaagatggagagattattgatttttcagctggaaaaggtgaagcggtattgaaagatttaatcaatactgatgaaggttcaagaagattaggtgaagtagcattagtacctgatgattcaccgatatcaaatcgtaataccattttttacaatactttatttgatgaaaatgcagcatgtcatttagcgattggatctgcttacgcctttaatattcaaggtggaacggaaatgactgttgaggaaaagattgcaagcggattaaatgattcaaatgtacatgtcgatttcatgattggtagtagtgatttgactatttatggcatattcgaagatggttcaaaagaactagtatttgaaaatggaaattgggcatcaacattttaa

SEQ ID NO: 406698 - DNA, 531 bp, Staphylococcus aureus
atgacaaatcaggacagaccaatgaaatctatgtcagaatcaaaatgttataaaaatagacaagttttccctcaagatacgaatcaccatcatacaatgtttggtggtacattgatggctaatattgatgaaattgcagcaatcacagctatgaaacatgctggtgcgcaagtagttaccgcatctacagactcagtagatttcttaaagccgattaaaacaggggacatattacaatacgtagcgatggtttcatacgctgggactagttcaatggaagtggtcgttcaaattagaattgacgatgtatttaataacaagcatgatttagctgcattaagttacttaacatttgttgcgttagatgatgaaggcaaacctaaacatgtacctggtgtatatccagaagatgatgttgaaaaatggttttatgatacagcaccacaacgtgttgaacgaagaaaagcacgtcgcattgaaagtaaacaaacaattgaatatttagctcaagtgcaacatattagagactaa

SEQ ID NO: 406699 - DNA, 1146 bp, Staphylococcus aureus
atgcgtaataacaagcctaaaataagaattcataatgacccatgggaagcatataacgatgttaaagaacatggccaattaactttaagtaacatcgaatttacaactacaaatctttgtaatatgcgttgtagccactgtgcagttggttatactttacaaactgtcgaccccgagcctttagatatggacttaatttatcgtagacttgatgaaattccaaatctgcgaacgatgtctattacaggtggcgaaccaatgttttctaaaaagtctattagaaatgttgttaaacctctattaaagtatgcacatcatcgaggtatatatacacaaatgaattcaaacctaacattgcctcaagatcgttatttagatattgctgaatatatcgatgttatgcatatctcacacaactggggaacaactgatgaattcgcaaatgttggctttggcgcaatgaagaagcaaccaccgttaaaagctaagttaaaattatatgaacaaatgatttcgaatgcacgtacattatcagaacaaggaatgtttgtatctgcggaaacaatgctcaatcaaagtacgctaccacatttacgaaaaatacatcaagaagtcgttcatgatatgaaatgtagcagacacgagattcaccctatgtatccagctgactttgcaagtcaattaaatgtgttaactctagcggaaatgaaaaagacaattcatgatatattggatttcagagatgaagatatttggatgttatttggtactttgcctgtgtttccatgcttaaaggatgatgaagatcaaaagttactatcacgtttaagaaatgctaaaaatgtaacgactagaaatgacccggatggccgtagtcgtttaaatgtcaatgtatttacaggtaatgtaatcgtaactgatttcggagatgaaacaggtacaatttcgaatatacaaaaagataaattaacagatgtatttgataaatggttatcctctgatcttgctaaatcattaaattgtcattgttccgagtttagttgtttaggaccaaatgttcttgttaaaaatatgtactatccgaatatggattttaaagataatgagcgtcatatgcacaaacaaccacaaattatacaattttaa

SEQ ID NO: 406700 - DNA, 1047 bp, Staphylococcus aureus
atgccagtatataaggatgataatacaggtaaatggtatttttccattagatataaagatgtatacggtaataacaaacgaaaaatgaagcgtgggtttgaacgtaagaaagatgccaaactagctgaaagcgaatttatacaaaatgttaaatatggatactcggacaatcaaccctttgaatatatattttttaatcgtttaaaaaatgaaaatctttctgcacgctcaatagaaaagcgaactacagaatataatactcacataaaagaaaggttcggaaatatccctattggcaaaatcactactacgcaatgtactgctttcaggaattatttgttaaacgatgcaggtctttctgttggctatgcacgatctgtgtgggcaggttttaaagcagttatcaattacgccaaaaagcattacaagctcttatacgaccccacattatcggtaactcctattcccagaacaaaaccacaagctaaatttatcactcgtgaagaatttgatgaaaaagtagaacaaatcacaaacgatacttctcgtcagctaactaaactgttattttattctggtcttagaataggcgaagctttagctttgcagtggaaagattacgataaaataaaaggcgaaattgacgtaaataagaaaatcaatttaagtaatagagaaattgaatataatctaaaaaaagaaagttctaaagggataatacctgtaccaaaattaattagagagatgcttaaaaacatgtataatgaatcttctaaaagatataaatattttgacgaaaactattttatattcggggggttagaacctattagatacgttacctattcgtatcattttaaatctgtattcccgaatctaaaaatacaccatttaagacactcgtacgcaagctatttaattaataatggtgtagatatgtatttattaatggaattaatgaggcactctaacattacagaaacaattcaaacgtactctcatttatatactgataaaaaacatcaagctatgaacatatttgattaa

SEQ ID NO: 406701 - DNA, 2826 bp, Staphylococcus aureus
atgaataataaaaagacagcaacaaatagaaaaggcatgataccaaatcgattaaacaaattttcgataagaaagtattctgtaggtactgcttcaattttagtagggacaacattgatttttgggttaagtggtcatgaagctaaagcggcagaacatacgaatggagaattaaatcaatcaaaaaatgaaacgacagccccaagtgagaataaaacaactaaaaaagttgatagtcgtcaactaaaagacaatacgcaaactgcaactgcagatcagcctaaagtgacaatgagtgatagtgcaacagttaaagaaactagtagtaacatgcaatcaccacaaaacgctacagctaatcaatctactacaaaaactagcaatgtaacaacaaatgataaatcatcaactacatatagtaatgaaactgataaaagtaatttaacacaagcaaaagatgtttcaactacacctaaaacaacgactattaaaccaagaactttaaatcgcatggcagtgaatactgttgcagctccacaacaaggaacaaatgttaatgataaagtacatttttcaaatattgacattgcgattgataaaggacatgttaatcagactactggtaaaactgaattttgggcaacttcaagtgatgttttaaaattaaaagcaaattacacaatcgatgattctgttaaagagggcgatacatttacttttaaatatggtcaatatttccgtccaggatcagtaagattaccttcacaaactcaaaatttatataatgcccaaggtaatattattgcaaaaggtatttatgatagtacaacaaacacaacaacatatacttttacgaactatgtagatcaatatacaaatgttagaggtagctttgaacaagttgcatttgcgaaacgtaaaaatgcaacaactgataaaacagcttataaaatggaagtaactttaggtaatgatacatatagcgaagaaatcattgtcgattatggtaataaaaaagcacaaccgcttatttcaagtacaaactatattaacaatgaagatttatcgcgtaatatgactgcatatgtaaatcaacctaaaaatacatatactaaacaaacgtttgttactaatttaactggatataaatttaatccaaatgcaaaaaacttcaaaatttacgaagtgacagatcaaaatcaatttgtggatagtttcacccctgatacttcaaaacttaaagatgttactgatcaattcgatgttatttatagtaatgataataaaacagctacagtcgatttaatgaaaggccaaacaagcagcaataaacaatacatcattcaacaagttgcttatccagataatagttcaacagataatggaaaaattgattatactttagacactgacaaaactaaatatagttggtcaaatagttattcaaatgtgaatggctcatcaactgctaatggcgaccaaaagaaatataatctaggtgactatgtatgggaagatacaaataaagatggtaaacaagatgccaatgaaaaagggattaaaggtgtttatgtcattcttaaagatagtaacggtaaagaattagatcgtacgacaacagatgaaaatggtaaatatcagttcactggtttaagcaatggaacttatagtgtagagttttcaacaccagccggttatacaccgacaactgcaaatgtaggtacagatgatgctgtagattctgatggactaactacaacaggtgtcattaaagacgctgacaacatgacattagatagtggattctacaaaacaccaaaatatagtttaggtgattatgtttggtacgacagtaataaagatggtaaacaagattcgactgaaaaaggaattaaaggtgttaaagttactttgcaaaacgaaaaaggcgaagtaattggtacaactgaaacagatgaaaatggtaaataccgctttgataatttagatagtggtaaatacaaagttatctttgaaaaacctgctggcttaactcaaacaggtacaaatacaactgaagatgataaagatgccgatggtggcgaagttgatgtaacaattacggatcatgatgatttcacacttgataatggctactacgaagaagaaacatcagatagcgactcagattctgacagcgattcagactcagatagcgactcagattcagatagcgactcagattcagacagcgattcagacagcgactcagactcagatagcgattcagattcagacagcgactcagactcagacagcgattcagactcggatagcgactcagactcagatagcgactcagattcggatagcgactcagactcagatagcgattcagattcagatagcgattcggactcagacagtgattcagattcagactcagatagcgactcagattctgacagcgattcagactcagacagcgactcagactcagacagtgattcagattcagacagcgactcagattcagatagcgactcagactcagatagcgactcagactcggatagcgattcagattcagacagcgactcagattcagatagcgattcggactcagacaacgactcagattcagatagcgattcagattcagatgcaggtaaacatactccggctaaaccaatgagtacggttaaagatcagcataaaacagctaaagcattaccagaaacaggtagtgaaaataataattcaaataatggcacattattcggtggattattcgcggcattaggatcattattgttattcggtcgtcgtaaaaaacaaaataaataa

SEQ ID NO: 406702 - DNA, 567 bp, Staphylococcus aureus
atgaaaggattaattattattggcagtgcacaagtgaattcacatacaagtgcactagcaagatacttaactgagcattttaaaacacatgatattgaagcggaaatattcgatttagcagaaaaaccgttaaatcaattagatttttcaggaacaacaccgtctattgatgaaatcaaacaaaatatgaaagatttaaaagagaaagcaatggcggcggactttttaatattaggaacgccaaactatcatggttcatattctggaatattgaaaaatgcattagatcatctaaatatggattattttaaaatgaaacctgtaggcttaataggaaatagtggtggtattgttagttcagagccattgtcacatttaagagtaatcgtcagaagtttactaggcattgctgtaccaactcaaatagcaacacatgattctgattttgctaaaaatgaagatggttcatattacttaaatgatagtgaattccaattacgagcaagattatttgtcgatcaaattgtatcttttgtgaataatagtccatatgaacatttaaaataa

SEQ ID NO: 406703 - DNA, 870 bp, Staphylococcus aureus
atgataaaactaatagccactgatatggatggcacgctacttaatgcagcacatgaaatttctcaacctaatattgatgcgattaaatacgctcaagaacaagggataacggttgttatcgcgacaggtcgagcattttatgaagcacaagcaccagttgctgacacagatttaacagtaccatatatttgtttgaatggtgctgaagtacgtgatgaaactttcaatgtaatgagcacttcacaccttaataaatcgttagtacacaaaattacaaatgttttaaaagatgcaggtatttattatcaagtatacacgagtcgtgcgatttatactgaagatccacaaagagatttagacatttacatagatattgctgagcgtgcaggtcaacatgcaaacgttgagcgtattaaaaatggtattcaaagacgcatagataatggtacgttgaaagttgttgataattatgatgctattgaaaacatacctggtgaattaattatgaaaatattagcatttgatggaaatttagaaaaaattgacaaagctagtaaaattttagctgaatctccgaatttagctatatcatcatcttcgagaggaaatatagaaataacgcattcagatgcacaaaaaggtattgcgctagaaacaattgccgaaagattagggattgaaatgaaagaagtcatgtcaataggtgacaatttaaatgacttatcaatgttagagaaagttggctatccagttgcgatggaaaatggtgcagaagaagttaaaaaaatagcgaaatatgtcacagatacgaatgaaaatagtggtgttggaaaagctattatgaaattattacgtgaacaacaagtttaa

SEQ ID NO: 406704 - DNA, 471 bp, Staphylococcus aureus
atgacaaatgatatatattttatgacattagcgattgaagaagctaaaaaagcagctcaactaggcgaagtacctataggtgctatcatcactaaagatgatgaagttatcgctagagcacataatttaagagaaacactacaacaaccaacggcgcatgctgaacatattgcaattgaacgtgcagccaaagtgttaggtagttggcgtttagaaggttgcacattatatgtaaccttagaaccatgtgtcatgtgcgcaggaacaattgtaatgagtcgcattccaagagtcgtctatggcgcagatgatcctaaaggtggttgtagtggcagtttaatgaatttattgcaacaatctaattttaatcatcgtgcaattgttgataaaggtgtacttaaagaagcatgtagcacattattaacaacattttttaaaaacttaagagccaataagaaatccaccaattag

SEQ ID NO: 406705 - DNA, 618 bp, Staphylococcus aureus
atgaacaaaccttttatagcaattgaaggtcctattggcgtaggtaaatcttcacttgcacacaaattaagtcaaactttagatttttatgaagaaaaagaaatcatcacagaaaatccatttttatcagacttttatgaagatatctctaaatggagttttcaaactgaaatgttctttttatgcaatagatataagcaatttcaagatgtaacacaactaaatcaaggtgtagttagtgattatcatatacataaaaataagatatttgctaaaaatactttgagttctgttgaatttcagaaattcagtaaaatttatgatattttaactgaagatatgattatgccgaatatgattatctttttagatgcagaccttgatgtgttaaaatctagaattgctaaacgtaaccgtagttttgagcatcaaatagaagatgaatatctgttaaagttaaaaaaagattatcgtgagtattatgagtccttacaaagtaatggttcaaatgtagttttaatcgatacaacttctattgattttcttaaaaatgaacaagattacgaagatatattacatattatattacctatgataggagatattaccaatgaataa

SEQ ID NO: 406706 - DNA, 663 bp, Staphylococcus aureus
atgaataattacggtattccacaaaatgccattataaccattgcaggtacagttggtgttggaaaatcaacactaacgcaagcacttgcagataaattaaactttaaaacgtcttttgaaaatgtcgaacataatccatatttagataaattttacagcgattttgaacgatggagtttccatttgcaaatttacttcttagctgaacgttttaaagaacaaaagcgtatgtttgaatatggtggtggctttgtccaagatcgatcaatttatgaagatgttgatatttttgcaaaaatgcatgaagaagaaggcacaatgagtaaagaagatttcaaaacatattcagacttatttaatgccatggtcatgacaccttattttcctaaacctgatgtaatgatttatttagaatgtaactatgatgaggtcattgatcgtattattgaacgtggtcgcgaaatggaaattaatacagaccctgaatactggaaaaagctatttaaacgctatgacgattggattaatagctttaatgcatgtccagttgtacgtatcaatattaatgaatatgatatccataaggaccccgaatctttaaatcctatgataaacaaaattgctcgaattattcaaacatatcgacaagtagatacacgataa

SEQ ID NO: 406707 - DNA, 684 bp, Staphylococcus aureus
atggaatggatattatttgataaagatggtacgttaattgaatttgatagaagttgggaaaaaataggggtacgatttgtacaatcattgcttgagactttcccagtacataataaagaagctgctttaagacaactcggtgtcattaaagaatctattgatccaaaatcagtgatgggttcaggatctttacaacaaattatccaggcatttaatgatgtgacgggacaagatacaaccgactggtccaagtcaacaagtcaaaagctggtagatgaacgtattcctgaaattaattgggtagaaggtgttaaagaagcacttatcgatttgaaagcaaaaggctatcaacttggtattgttacgagtgatactaaaaaaggtgtagaacaatttttagcacataccaatgctacctcgttgttcgatttgatcatttctaccgaagcggatgcctatgagaagccaaatcctaaagtattatcgcctttatttgagcaatataatgtagatcctcagaaagtagctatagtaggagacactgctaatgatatgaagacagcaagtaatgcaaatttaggtatggcaataggtgtattaacaggtattgcaacaaaagaagaattacatgaagctgatattattttaaatagtgcggcagatattttagaagctttaaattaa

SEQ ID NO: 406708 - DNA, 1077 bp, Staphylococcus aureus
atgtcacaagcagttaaagttgaacgacgagaaacattaaaacaaaaaccaaatacatctcaactaggttttggtaaatattttactgattatatgttgagttatgattatgatgcagataaaggatggcatgatttgaagatagtaccttatggtcctattgaaatttcacctgctgcacaaggtgttcattatggtcaatcggtattcgaaggattaaaagcatataaaagagatggggaagttgcacttttccgtcctgaagaaaattttaagcgtcttaataactcgttagcacgattagaaatgcctcaagtagacgaagcagaattgttagaggggctaaaacaattagttgatattgaaagagattggattcctgaaggggaaggtcaatcattatatattcgtccatttgtttttgcaacagaaggggcacttggcgttggtgcatcacatcagtataaattattaattattttatctccttcaggtgcatattatggtggtgaaactttaaaaccaactaaaatctatgtagaagatgaatatgtgcgtgctgttcgtggcggtgtaggctttgcaaaagttgcaggtaactatgcggcaagtttattagcacaaactaatgcaaataaattaggttatgaccaagtattatggcttgatggtgttgaacagaaatatatcgaagaagttggtagcatgaacattttcttcgttgaaaatggcaaagtaattacaccagagttgaatggcagtattttacctggtattacacgtaaatctattatcgaattagctaaaaacttaggatatgaagtcgaagagcgccgcgtttcaatcgatgaattattcgaatcatatgataaaggtgagttaacagaagtatttggtagtggtactgcagcagttatttcacctgtgggtacattgagatacgaagatcgtgaaatcgttattaataataatgagactggtgaaattactcaaaaattatacgacgtctatactggtattcaaaatggtactttagaagataaaaatggttggagagtcgttgtaccaaaatattaa

SEQ ID NO: 406709 - DNA, 966 bp, Staphylococcus aureus
atgaaaaaaattatgattactggtgcattaggacaaattggtacagaattagttgttaagtgcagagaaatttatgggacagataatgttcttgctacagatattagggaacctgaagcagactcacctgtacaaaatggaccatttgaaatcttagacgtaacagatcgtgaccgtatgtttgagttagttagggactttgaagcggatagtctaatgcatatggcagcattattatcagcaactgctgagaaaaatccaattctagcttgggatttaaatatgggtggattaatgaatgcattagaagctgcaagaacttataatttgcactttttcacaccaagttcaattggtgcatttggagactcaactcctaaagttaatacgccacaagtaacgattcagcaacctacgacaatgtatggtgtaaataaagtagctggagaattattgtgtcaatactatttcaaacgttttggtgtagatacaagaagtgttagattcccaggtttaatctcgcatgttaaagagccaggtggcggtactacagactatgctgttgaaatatacttcaaagcagtaagagagggtcattatacaagcttcatagataaaggcacgtatatggatatgatgtatatggatgatgcaattgaagcaattattaaacttatggaagcagacgacgctaaattagaaactagaaatggttataatttgagcgcaatgagttttgatccagagatggtaaaagaagcaattcaagaatactatcccaattttacattagattacgatgttgatcctattagacaaggtatcgctaatagttggccggattctattgatacaagctgttcacgtggcgaatggggatttgatcctaaatatgatttagcgagcatgactaaattaatgttagaagctattgaacaaaaagatactgttaaaaataataactaa

SEQ ID NO: 406710 - DNA, 1638 bp, Staphylococcus aureus
atgtcttatagcattggaattgattatggaactgcttcaggccgtgtgtttttaattaatacaactaacggtcaagtagtatcaaaatttgtgaaaccatatacacatggtgtcattgagagtgaattaaatggtttgaaaataccacatacatatgcacttcaaaatagtaatgattatttagaaattatggaagaaggaatatcatatatagtacgtgaatcaaaaatagatccagacaatatagtaggtattggtatagactttacttcatctactattatttttactgacgaaaaccttaacccggtacataacttaaaacaatttaaaaacaatccacatgcgtatgtgaaactttggaaacatcatggtgcatataaagaggcagagaaattatatcaaactgctattgaaaataataataagtggttaggccattatggatataatgttagtagtgaatggatgattcccaaaataatggaggtcatgaatcgagcaccagaaattatggaaaaaacggcttatattatggaagcgggcgattggattgtaaataaattaactaataaaaatgtacgctcgaattgtggattaggtttcaaagcattttgggaagaagaaacagggtttcattatgatttatttgataaaatagaccccaaattatcaaaagtaattcaagataaagtatctgcaccggttgttaatattggtgaagcagtagggaaactggatgataaaatggcacagaaattaggattatcaaaagaaactatggtaagtccttttattattgatgcccatgctagtttattaggtattgggtctgaaaaagataaagaaatgactatggtgatgggaacaagcacatgccatcttatgttaaatgaaaagcaacatcaagtgccaggtatatcaggttctgtaaaaggagcaattattccagaattatttgcttatgaagcggggcaatcagcagtaggtgatttgtttgagtatgtcgctaagcaagcaccaaagtcatatgtagatgaagcagaaaatagaaatatgactgtatttgaattaatgaatgaaaagataaaacatcaaatgccaggtgaaagtgggctcattgctcttgattggcataatggaaatcgaagtgtattaagtgatagcaatttaacaggttgtatctttggattaactttacaaactaagcatgaggatatttatagagcatatttagaagctacagtatttggtactaagatgattatgcaacagtatcaagattggcatatggaagtagaaaaggtatttgcatgtggcggtatacctaaaaagaatgctgttatgatggatatctatgcgaatgtactgaataaaaaactaattgttatggatagtgagtatgcaccagcaataggcgcagcaatattaggtgcagtcagtggtggcgcacataattcaattaatgacgcagttgatgctatgaaagagccaattttatacgaaattaatccagaagcggaaaaagtacaaaggtatgaaacattatttaaagcttataaggctttacatgatatccatggttataaaaaagctaatataatgaaagatatccagagtttaagagttgagggataa

SEQ ID NO: 406711 - DNA, 879 bp, Staphylococcus aureus
atgtcacaagatgtaaatgaattaagtaagcaaccaacgccagataaagcagaagataacgcatttttcccatcaccatattcccttagtcaatatacagcacctaaaacagattttgatggtgttgaacacaaaggtgcctataaagatggtaaatggaaagtattgatgattgctgctgaagagcgatatgtattattggaaaatggaaaaatgttctctacgggtaatcatcctgttgaaatgttattacctttacatcatttaatggaagcaggttttgacgttgatgttgcgacattatctggttatccagttaaattagaattatgggctatgccaactgaagacgaggcagttataagtacttataataaattgaaagaaaaattaaaacagccaaaaaaattagcagatgtgattaaaaatgaattaggacctgattcagactatttatctgtctttatcccaggcggacatgctgcagttgttggtatttctgaaagtgaggacgttcaacaaacattagattgggcattagacaatgaccgctttatagttacattatgtcatggaccagcagcactactttcagcagggcttaacagagaaaaatctccattagaaggatactctgtttgtgtcttccctgactcattagatgaaggtgcaaatattgaaataggttatttacctggacgcttgaaatggttagttgctgatttattaactaaacaaggattaaaagtagttaacgacgatatgacaggaagaacgttaaaagatcgtaaattattaacaggtgacagtcctttagcttcaaatgagttaggaaaattagcagttaatgaaatgttaaatgcaatacaaaataaataa

SEQ ID NO: 406712 - DNA, 1188 bp, Staphylococcus aureus
gtggttcaatcattacatgagtttttagaggaaaatataaattatctaaaagaaaatggtttgtataatgaaatagatacaattgaaggtgcaaacggaccagaaatcaaaatcaatgggaaatcatacattaacttatcttcaaataattatttaggactagcaacaaatgaagatttgaaatcagctgcaaaagcagctattgatacacatggtgtaggtgcaggcgctgttcgtacaatcaatggtacattagatttacacgacgaattagaagaaacactagcaaaatttaaaggaacagaagctgcaatagcttatcaatcaggatttaattgtaatatggctgctatttcagctgtcatgaataaaaatgatgctattttatcagatgagcttaatcatgcatcaattattgatggatgtcgcttatctaaagctaaaattattcgagttaaccattcagacatggatgatttacgtgcgaaagcaaaagaagcagttgaatcaggtcaatacaataaagtgatgtatatcactgatggcgtttttagtatggatggtgatgtggctaaattacctgaaattgtagaaattgcagaagaatttggtttattaacttatgttgacgacgctcatggttcaggtgttatgggtaaaggcgctggtacggttaaacattttggtttacaagataaaatcgatttccaaataggtacgctttctaaagcaattggtgtcgttggcggttatgtagcaggtacaaaagagttaatagattggttaaaagcacaatcacgaccattcttattctctacatcattagcacctggggataccaaagcaataactgaagcagttaaaaagttaatggattcaactgaattacatgataaattatggaacaatgcacaatatttaaaaaatggattgtcaaaattaggatatgatacaggtgagtcagaaactccaattacaccagtaattattggtgatgaaaaaacaactcaagaatttagtaagcgtttaaaagacgaaggtgtctatgtgaaatctatcgttttcccaacagtaccaagaggtacaggacgtgtaagaaatatgcctacagctgcacatacaaaagacatgttagatgaagcaattgcggcttatgaaaaagtaggaaaagaaatgaagttgatttaa

SEQ ID NO: 406713 - DNA, 1176 bp, Staphylococcus aureus
gtgttagattggttccaactagcaaataataaagaaaataaaacaattcaactcagacgttatttacaccaatatcctgagttatcttttgaagaatttcaaacacatgattatattgttaaccaattaagccagttatcttgtgatattgaaactcctatcggccgcaatggtatcaaagccacatttaaaggcttgggcacaggacctaccattgcattaagagctgactttgatgcgttacctgtcgaggaattaaacgatgtgccttataagtctaaaaatccaggatgtatgcatgcgtgtgggcatgatggtcatacagcaattttacttactgtagcagagattttagatgaacataaacatttattagaaggtaatgttgtattaatattccagtacggtgaagaaatcatgccaggtggttctcaagaaatgatagatgctggatgtctggaaaatgtagatagaatttacggtacacatttatggagtggttatcctactggaactattcattcacgtgcgggggcaatcatggcctctccagatgaatttagcgtcacatttaaaggtcgtggtggtcatggtgccaaacctcatgaaaccattgacccaatagtaatcatggcagagttcattttaagtgcacaaaaaataatttcacgtacgatcgatccagttaaacaagctgtactttcatttggaatgattcaagcaggcaccacagatagcgttattcctgatcaagcattttgtaaaggtacagttagaactttcgattcagatatacagaatcatgtaatggacaaaatggataagcttctacaaggtttagcaatagcaaatgatattaactatgatttgaattatattaaagggtatttgcctgtccataataacgagaaagcatatcaagttattaaagaagcaacaaatgacttacatgtacgctttaatgaatcagatttaatgatgattggagaagatttttcacattatttgaaagtacgaccaggtgcattctttctgactggttgtggtaatgaaagtaaaggtattacagcgccacaccataatcccaaatttgatattgatgaaaaatcattaaaatacgctgtagctgtatttttaaaaatcatagaattagagcaagtatttaaaacaaattaa

SEQ ID NO: 406714 - DNA, 1185 bp, Staphylococcus aureus
atggcaaaagaaaaattcgatcgttctaaagaacatgccaatatcggtactatcggtcacgttgaccatggtaaaacaacattaacagcagcaatcgctactgtattagcaaaaaatggtgactcagttgcacaatcatatgacatgattgacaacgctccagaagaaaaagaacgtggtatcacaatcaatacttctcacattgagtaccaaactgacaaacgtcactacgctcacgttgactgcccaggacacgctgactacgttaaaaacatgatcactggtgctgctcaaatggacggcggtatcttagtagtatctgctgctgacggtccaatgccacaaactcgtgaacacattcttttatcacgtaacgttggtgtaccagcattagtagtattcttaaacaaagttgacatggttgacgatgaagaattattagaattagtagaaatggaagttcgtgacttattaagcgaatatgacttcccaggtgacgatgtacctgtaatcgctggttcagcattaaaagctttagaaggcgatgctcaatacgaagaaaaaatcttagaattaatggaagctgtagatacttacattccaactccagaacgtgattctgacaaaccattcatgatgccagttgaggacgtattctcaatcactggtcgtggtactgttgctacaggccgtgttgaacgtggtcaaatcaaagttggtgaagaagttgaaatcatcggtttacatgacacatctaaaacaactgttacaggtgttgaaatgttccgtaaattattagactacgctgaagctggtgacaacattggtgcattattacgtggtgttgctcgtgaagacgtacaacgtggtcaagtattagctgctcctggttcaattacaccacatactgaattcaaagcagaagtatacgtattatcaaaagacgaaggtggacgtcacactccattcttctcaaactatcgtccacaattctatttccgtactactgacgtaactggtgttgttcacttaccagaaggtactgaaatggtaatgcctggtgataacgttgaaatgacagtagaattaatcgctccaatcgcgattgaagacggtactcgtttctcaatccgtgaaggtggacgtactgtaggatcaggcgttgttactgaaatcattaaataa

SEQ ID NO: 406715 - DNA, 2082 bp, Staphylococcus aureus
atggctagagaattttcattagaaaaaactcgtaatatcggtatcatggctcacattgatgctggtaaaacgactacgactgaacgtattctttattacactggccgtatccacaaaattggtgaaacacacgaaggtgcttcacaaatggactggatggagcaagaacaagaccgtggtattactatcacatctgctgcaacaacagcagcttgggaaggtcaccgtgtaaacattatcgatacacctggacacgtagacttcactgtagaagttgaacgttcattacgtgtacttgacggagcagttacagtacttgatgcacaatcaggtgttgaacctcaaactgaaacagtttggcgtcaggctacaacttatggtgttccacgtatcgtatttgtaaacaaaatggacaaattaggtgctaacttcgaatactctgtaagtacattacatgatcgtttacaagctaacgctgctccaatccaattaccaattggtgcggaagacgaattcgaagcaatcattgacttagttgaaatgaaatgtttcaaatatacaaatgatttaggtactgaaattgaagaaattgaaattcccgaagaccacttagatagagctgaagaagctcgtgctagcttaatcgaagcagttgcagaaactagcgacgaattaatggaaaaatatcttggtgacgaagaaatttcagtttctgaattaaaagaagctatccgccaagctactactaacgtagaattctacccagtactttgtggtacagctttcaaaaacaaaggtgttcaattaatgcttgacgctgtaattgattacttaccttcaccactagacgttaaaccaattattggtcaccgtgctagcaaccctgaagaagaagtaatcgtgaaagcagacgattcagctgaattcgctgcattagcgttcaaagttatgactgacccttatgttggtaaattaacattcttccgtgtgtattcaggtacaatgacatctggttcatacgttaagaactctactaaaggtaaacgtgaacgtgtaggtcgtttattacaaatgcacgctaactcacgtcaagaaatcgatactgtatactctggagatatcgctgctgcggtaggtcttaaagatacaggtactggtgatactttatgtggtgagaaaaatgacattatcttggaatcaatggaattcctagagccagttattcacttatcagtagagccaaaatctaaagctgaccaagataaaatgactcaagctttagttaaattacaagaagaagacccaacattccatgcacacactgacgaagaaactggacaagttatcatcggtggtatgggtgagcttcacttagacatcttagtagaccgtatgaagaaagaattcaacgttgaatgtaacgtaggtgctccaatggtttcatatcgtgaaacattcaaatcatctgcacaagttcaaggtaaattctctcgtcaatctggtggtcgtggtcaatacggtgatgttcacattgaattcacaccaaacgaaacaggcgcaggtttcgaattcgaaaacgctatcgttggtggtgtagttcctcgtgaatacattccatcagtagaagctggtcttaaagatgctatggaaaatggtgttttagcaggttatcctttaattgatgttaaagctaaattatatgatggttcataccatgatgtcgattcatctgaaatggccttcaaaattgctgcatcattagcacttaaagaagctgctaaaaaatgtgatcctgtaatcttagaaccaatgatgaaagtaactattgaaatgcctgaagagtacatgggtgatatcatgggtgacgtaacatctcgtcgtggacgtgttgatggtatggaacctcgtggtaatgcacaagttgttaatgcttatgtaccactttcagaaatgttcggttatgcaacatcattacgttcaaacactcaaggtcgcggtacttacactatgtacttcgatcactatgctgaagttccaaaatcaatcgctgaagatattatcaagaaaaataaaggtgaataa

SEQ ID NO: 406716 - DNA, 471 bp, Staphylococcus aureus
atgcctcgtaaaggatcagtacctaaaagagacgtattaccagatccaattcataactctaagttagtaactaaattaattaacaaaattatgttagatggtaaacgtggaacagcacaaagaattctttattcagcattcgacctagttgaacaacgcagtggtcgtgatgcattagaagtattcgaagaagcaatcaacaacattatgccagtattagaagttaaagctcgtcgcgtaggtggttctaactatcaagtaccagtagaagttcgtccagagcgtcgtactactttaggtttacgttggttagttaactatgcacgtcttcgtggtgaaaaaacgatggaagatcgtttagctaacgaaattttagatgcagcaaataatacaggtggtgccgttaagaaacgtgaggacactcacaaaatggctgaagcaaacaaagcatttgctcactaccgttggtaa

SEQ ID NO: 406717 - DNA, 414 bp, Staphylococcus aureus
atgccaactattaaccaattagtacgtaaaccaagacaaagcaaaatcaaaaaatcagattctccagctttaaataaaggtttcaacagtaaaaagaaaaaatttactgacttaaactcaccacaaaaacgtggtgtatgtactcgtgtaggtacaatgacacctaaaaaacctaactcagcgttacgtaaatatgcacgtgtgcgtttatcaaacaacatcgaaattaacgcatacatccctggtatcggacataacttacaagaacacagtgttgtacttgtacgtggtggacgtgtaaaagacttaccaggtgtgcgttaccatattgtacgtggagcacttgatacttcaggtgttgacggacgtagacaaggtcgttcattatacggaactaagaaacctaaaaactaa

SEQ ID NO: 406718 - DNA, 255 bp, Staphylococcus aureus
ttgtctaaggaaaaagttgcacgctttaacaaacaacattttgtagttggtcttaaagaaacgcttaaagcgttaaagaaagatcaagttacatctttgattattgctgaagacgttgaagtatatttaatgactcgcgtgttaagccaaatcaatcagaaaaatatacctgtatcttttttcaaaagcaaacatgctttgggtaaacatgtaggtattaacgtcaatgcgacaatagtagcattgattaaatga

SEQ ID NO: 406719 - DNA, 3624 bp, Staphylococcus aureus
ttgattgatgtaaataatttccattatatgaaaataggattggcttcacctgaaaaaatccgttcttggtcttttggtgaagttaaaaaacctgaaacaatcaactaccgtacattaaaacctgaaaaagatggtctattctgtgaaagaattttcggacctacaaaagactgggaatgtagttgtggtaaatacaaacgtgttcgctacaaaggcatggtctgtgacagatgtggagttgaagtaactaaatctaaagtacgtcgtgaaagaatgggtcacattgaacttgctgctccagtttctcacatttggtatttcaaaggtataccaagtcgtatgggattattacttgacatgtcaccaagagcattagaagaagttatttactttgcttcttatgttgttgtagatccaggtccaactggtttagaaaagaaaactttattatctgaagctgaattcagagattattatgataaatacccaggtcaattcgttgcaaaaatgggtgcagaaggtattaaagatttacttgaagagattgatcttgacgaagaacttaaattgttacgcgatgagttggaatcagctactggtcaaagacttactcgtgcaattaaacgtttagaagttgttgaatcattccgtaattcaggtaacaaaccttcatggatgattttggatgtacttccaatcatcccaccagaaattcgtccaatggttcaattagatggtggacgatttgcaacaagtgacttaaacgacttataccgtcgtgtaattaatcgaaataatcgtttgaaacgtttattagatttaggtgcacctggtatcatcgttcaaaacgaaaaacgtatgttacaagaagccgttgacgctttaattgataatggtcgtcgtggtcgtccagttactggcccaggtaaccgtccattaaaatctttatctcatatgttaaaaggtaaacaaggtcgtttccgtcaaaacttacttggtaaacgtgttgactattcaggacgttcagttattgcagtaggtccaagcttgaaaatgtaccaatgtggtttaccaaaagaaatggcacttgaactatttaaaccattcgtaatgaaagaattagttcaacgtgaaattgcaactaacattaaaaatgcgaagagtaaaatcgaacgtatggatgatgaagtttgggacgtattggaagaagtaattagagaacatcctgtattacttaaccgtgcaccaacacttcatagacttggtattcaagcatttgaaccaactttagttgaaggtcgtgcgattcgtctacatccacttgtaacaacagcttataacgctgactttgacggtgaccaaatggcggttcacgttcctttatcaaaagaggcacaagctgaagcaagaatgttgatgttagcagcacaaaacatcttgaaccctaaagatggtaaacctgtagttacaccatcacaagatatggtacttggtaactattaccttactttagaaagaaaagatgcagtaaatacaggcgcaatctttaataatacaaatgaagtattaaaagcatatgcaaatggctttgtacatttacacactagaattggtgtacatgcaagttcgttcaataatccaacatttactgaagaacaaaacaaaaagattcttgctacgtcagtaggtaaaattatattcaatgaaatcattccagattcatttgcttatattaatgaacctacgcaagaaaacttagaaagaaagacaccaaacagatatttcatcgatcctacaactttaggtgaaggtggattaaaagaatactttgaaaatgaagaattaattgaacctttcaacaaaaaattcttaggtaatattattgcagaagtattcaacagatttagcatcactgatacatcaatgatgttagaccgtatgaaagacttaggattcaaattctcatctaaagctggtattacagtaggtgttgctgatatcgtagtattacctgataagcaacaaatacttgatgagcatgaaaaattagtcgacagaattacaaaacaattcaaccgtggtttaatcactgaagaagaaagatataatgcagttgttgaaatttggacagatgcaaaagatcaaattcaaggtgaattgatgcaatcacttgataaaactaacccaatcttcatgatgagtgattcaggtgcccgtggtaacgcatctaactttacacagttagcaggtatgcgtggattgatggccgcaccatctggtaagattatcgaattaccaatcacatcttcattccgtgaaggtttaacagtacttgaatacttcatctcaactcacggtgcacgtaaaggtcttgccgatacagcacttaaaacagctgactcaggatatcttactcgtcgtcttgttgacgtggcacaagatgttattgttcgtgaagaagactgtggtactgatagaggtttattagtttctgatattaaagaaggtacagaaatgattgaaccatttatcgaacgtattgaaggtcgttattctaaagaaacaattcgtcatcctgaaactgatgaaataatcattcgtcctgatgaattaattacacctgaaattgctaagaaaattacagatgctggtattgaacaaatgtatattcgctcagcatttacttgtaacgcacgacatggtgtttgtgaaaaatgttacggtaaaaaccttgctactggtgaaaaagttgaagttggtgaagcagttggtacaattgcagcccaatctatcggtgaaccaggtacacagcttacaatgcgtacattccatacaggtggggtagcaggtagcgatatcacacaaggtcttcctcgtattcaagagattttcgaagcacgtaaccctaaaggtcaagcggtaattacggaaatcgaaggtgtcgtagaagatattaaattagcaaaagatagacaacaagaaattgttgttaaaggtgctaatgaaacaagatcataccttgcttcaggtacttcaagaattattgtagaaatcggtcaaccagttcaacgtggtgaagtattaactgaaggttctattgaacctaagaattacttatctgttgctggattaaacgcgactgaaagctacttattaaaagaagtacaaaaagtttaccgtatgcaaggtgtagaaatcgacgataaacacgttgaggttatggttcgacaaatgttacgtaaagttagaattatcgaagcaggtgatacgaagttattaccaggttcattagttgatattcataactttacagatgcaaatagagaagcatttaaacaccgtaagcgtcctgcaacagctaaaccagtattacttggtattactaaagcatcacttgaaacagaaagtttcttatctgcagcatcattccaagaaacaacaagagttcttacagatgcagcaattaaaggtaagcgtgatgacttattaggtcttaaagaaaacgtaattattggtaagttaattccagctggtactggtatgagacgttatagcgacgtaaaatacgaaaaaacagctaaaccagttgcagaagttgaatctcaaactgaagtaacggaataa

SEQ ID NO: 406720 - DNA, 3552 bp, Staphylococcus aureus
ttggcaggtcaagttgtccaatatggaagacatcgtaaacgtagaaactacgcgagaatttcagaagtattagaattaccaaacttaatagaaattcaaactaaatcttacgagtggttcctaagagaaggtttaatcgaaatgtttagagacatttctccaattgaagattttactggtaatttgtcattagagtttgtggattaccgtttaggagaaccaaaatatgatttagaagaatctaaaaaccgtgacgctacttatgctgcacctcttcgtgtaaaagtgcgtctaatcattaaagaaacaggagaagttaaagaacaagaagtctttatgggtgatttcccattaatgactgatacaggtacgttcgttatcaatggtgcagaacgtgtaatcgtatctcaattagttcgttcaccatccgtttatttcaatgaaaaaatcgacaaaaatggtcgtgaaaactatgatgcaacaattattccaaaccgtggtgcatggttagaatatgaaacagatgctaaagatgttgtatacgtacgtattgatagaacacgtaaactaccattaacagtattgttacgtgcattaggtttctcaagcgaccaagaaattgttgaccttttaggtgacaatgaatatttacgtaatactttagagaaagacggcactgaaaacactgaacaagcgttattagaaatctatgaacgtttacgtccaggtgaaccaccaactgttgaaaatgctaaaagtctattgtattcacgtttctttgatccaaaacgctatgacttagcaagcgtgggtcgttataaaacaaacaaaaaattacatttaaaacatcgtttatttaatcaaaaattagctgagccaattgtaaatactgaaactggtgaaattgtagttgaagaaggtacagtgcttgatcgtcgtaaaatcgacgaaatcatggatgtacttgaatcaaatgcaaacagcgaagtgtttgaattgcatggtagcgttatagacgagccagtagaaattcaatcaattaaagtatatgttcctaacgatgatgaaggtcgtacgacaactgtaattggtaatgctttccctgactcagaagttaaatgcattacaccagcagatatcattgcttcaatgagttacttctttaacttattaagcggtattggatatacagatgatattgaccatttaggtaaccgtcgtttacgttctgtaggtgaattactacaaaaccaattccgtatcggtttatcaagaatggaaagagttgtacgtgaaagaatgtcaattcaagatactgagtctatcacacctcaacaattaattaatattcgacctgttattgcatctattaaagaattctttggtagctctcaattatcacaattcatggaccaagcaaacccattagctgagttaacgcataaacgtcgtctatcagcattaggacctggtggtttaacacgtgaacgtgctcaaatggaagtacgtgacgttcactactctcactatggccgtatgtgtccaattgaaacacctgagggaccaaacattggattgattaactcattatcaagttatgcacgtgtaaatgaattcggctttattgaaacaccatatcgtaaagttgatttagatacacatgctatcactgatcaaattgactatttaacagctgacgaagaagatagctatgttgtagcacaagcaaactctaaattagatgaaaatggtcgtttcatggatgatgaagttgtatgtcgtttccgtggtaacaatacagttatggctaaagaaaaaatggattatatggatgtatcgccgaagcaagttgtttcagcagcgacagcatgtattccattcttagaaaatgatgactcaaaccgtgcattgatgggtgcgaacatgcaacgtcaagcagtgcctttgatgaatccagaagcaccatttgttggtacaggtatggaacacgttgcagcacgtgattctggtgcggctattacagctaagcacagaggtcgtgttgaacatgttgaatctaatgaaattcttgttcgtcgtctagttgaagagaacggcgttgagcatgaaggtgaattagatcgctatccattagctaaatttaaacgttcaaactcaggtacatgttacaaccaacgtccaatcgttgcagttggagatgttgttgagtataacgagattttagcagatggaccatctatggaattaggagaaatggcattaggtagaaacgtagtagttggtttcatgacttgggacggttacaactatgaggatgccgttatcatgagtgaaagacttgtgaaagatgacgtgtatacttctattcatattgaagagtatgaatcagaagcacgtgatactaagttaggacctgaagaaatcacaagagatattcctaatgtttctgaaagtgcacttaagaacttagacgatcgtggtatcgtttatattggtgcagaagtaaaagatggagatattttagttggtaaagtaacgcctaaaggtgtaactgagttaactgccgaagaaagattgttacatgcaatctttggtgaaaaagcacgtgaagttagagatacttcattacgtgtacctcacggcgctggcggtatcgttcttgatgtaaaagtattcaatcgtgaagaaggcgacgatacattatcacctggtgtaaaccaattagtacgtgtatatatcgttcaaaaacgtaaaattcatgttggtgataagatgtgtggtcgacatggtaacaaaggtgtcatttctaagattgttcctgaagaagatatgccttacttaccagatggacgtccgatcgatatcatgttaaatcctcttggtgtaccatctcgtatgaacatcggacaagtattagagctacacttaggtatggctgctaaaaatcttggtattcacgttgcatcaccagtatttgacggtgcaaacgatgacgatgtatggtcaacaattgaagaagctggtatggctcgtgatggtaaaactgtactttatgatggacgtacaggtgaaccattcgataaccgtatttcagtaggtgtaatgtacatgttgaaacttgcgcacatggttgatgataaattacatgcgcgttcaacaggaccatattcacttgttacacaacaaccacttggcggtaaagcgcaattcggtggacaacgttttggtgagatggaggtatgggcacttgaagcatatggtgctgcatacacattacaagaaatcttaacttacaaatccgatgatacagtaggacgtgtgaaaacatacgaggctattgttaaaggtgaaaacatctctagaccaagtgttccagaatcattccgagtattgatgaaagaattacaaagtttaggtttagatgtaaaagttatggatgagcaagataatgaaatcgaaatgacagacgttgatgacgatgatgttgtagaacgcaaagtagatttacaacaaaatgatgctcctgaaacacaaaaagaagttactgattaa

SEQ ID NO: 406721 - DNA, 609 bp, Staphylococcus aureus
atgagtcattattacgatgaagatccaagtgtaattagcaatgaacaacgtattcaatatcaattaaaccatcataaaattgatttaataactgataacggagtgttttcgaaagataaagtagattatggttcagatgttcttgttcaaacttttttaaaagcgcatccacctggtccaagtaagcgaattgccgatgttggttgtggttacggaccaattggtttgatgattgctaaagtatcaccacatcattcaattacaatgctagatgttaatcacagagcgctagccttagttgaaaaaaacaaaaaattaaatggtattgataatgtgatcgtaaaggaaagtgatgctttgtctgctgtggaagacaaaagttttgattttattttaaccaatccaccaataagagcagggaaagaaaccgtgcatcgtatattcgagcaagcattacatagattagactcgaacggtgaactattcgttgtaattcagaagaagcaaggtatgccatctgcaaagaaaagaatgaatgaactttttggaaatgtagaagtggtaaataaagataaaggatattacattctgagaagtataaaagcttga

SEQ ID NO: 406722 - DNA, 369 bp, Staphylococcus aureus
atggctaatcatgaacaaatcattgaagcgattaaagaaatgtcagtattagaattaaacgacttagtaaaagcaattgaagaagaatttggtgtaactgcagctgctccagtagcagtagcaggtgcagctggtggcgctgacgctgcagcagaaaaaactgaatttgacgttgagttaacttcagctggttcatctaaaatcaaagttgttaaagctgttaaagaagcaactggtttaggattaaaagatgctaaagaattagtagacggagctcctaaagtaatcaaagaagctttacctaaagaagaagctgaaaaacttaaagaacaattagaagaagttggagctactgtagaattaaaataa

SEQ ID NO: 406723 - DNA, 501 bp, Staphylococcus aureus
atgtctgctatcattgaagctaaaaaacaactagttgatgaaattgctgaggtactatcaaattcagtttcaacagtaatcgttgactaccgtggattaacagtagctgaagttactgacttacgttcacaattacgtgaagctggtgttgagtataaagtatacaaaaacactatggtacgtcgtgcagctgaaaaagctggtatcgaaggcttagatgaattcttaacaggtcctactgctattgcaacttcaagtgaagatgctgtagctgcagcgaaagtaatttctggatttgctaaagatcatgaagcattagaaattaaatcaggcgttatggaaggcaatgttattacagcagaagaagttaaaactgttggttcattaccttcacacgatggtcttgtatctatgcttttatcagtattacaagctcctgtacgcaacttcgcttatgcggttaaagctattggagaacaaaaagaagaaaacgctgaataa

SEQ ID NO: 406724 - DNA, 693 bp, Staphylococcus aureus
atggctaaaaaaggtaaaaagtatcaagaagcagctagtaaagttgaccgtactcagcactacagtgttgaagaagcaattaaattagctaaagaaacaagcattgctaactttgacgcttctgttgaagttgcattccgtttaggaattgatacacgtaaaaatgaccaacaaatccgtggtgcagttgtattaccaaacggaactggtaaatcacaaagtgtattagtattcgctaaaggtgacaaaattgctgaagctgaagcagcaggtgctgactatgtaggtgaagcagaatacgttcaaaaaatccaacaaggttggttcgacttcgatgtagtagttgctacaccagacatgatgggtgaagttggtaaattaggtcgtgtattaggaccaaaaggtttaatgccaaaccctaaaactggaactgtaacaatggatgttaaaaaagctgttgaagaaatcaaagctggtaaagtagaatatcgtgctgaaaaagctggtatcgtacatgcatcaattggtaaagtttcatttactgatgaacaattaattgaaaacttcaatactttacaagatgtattagctaaagctaaaccatcatctgctaaaggtacatacttcaaatctgttgctgtaactacaacaatgggtcctggagttaaaattgatactgcaagtttcaaataa

SEQ ID NO: 406725 - DNA, 423 bp, Staphylococcus aureus
gtggctaaaaaagtagataaagttgttaaattacaaattcctgcaggtaaagcgaatccagcaccaccagttggtccagcattaggtcaagcaggtgtgaacatcatgggattctgtaaagagttcaatgcacgtactcaagatcaagcaggtttaattattccggtagaaatcagtgtttatgaagatcgttcatttacatttattacaaaaactccaccggctccagtattacttaaaaaagcagctggtattgaaaaaggttcaggcgaaccaaacaaaactaaagttgctacagtaactaaagatcaagtacgcgaaattgctaacagcaaaatgcaagacttaaacgctgctgacgaagaagcagctatgcgtattatcgaaggtactgcacgtagtatgggtatcgttgtagaataa

SEQ ID NO: 406726 - DNA, 549 bp, Staphylococcus aureus
atgtctgaagaagttggcgcaaagcgttggtatgcagtgcatacatattctggatatgaaaataaagttaaaaagaatttagaaaaaagagtagaatctatgaatatgactgaacaaatctttagagtagtcataccggaagaagaagaaactcaagtaaaagatggcaaagctaaaacgactgttaaaaaaacattccctggatatgttttagtggaattaatcatgacagatgaatcatggtatgtggtaagaaatacaccaggcgttactggttttgtaggttctgcaggtgcagggtctaagccaaatccattgttaccagaagaagttcgcttcatcttaaaacaaatgggtcttaaagaaaagactatcgatgttgaactcgaagttggcgagcaagttcgtattaaatcaggtccatttgcgaatcaagttggtgaagttcaagaaattgaaacagataagtttaagctaacagtattagtagatatgtttggccgagaaacaccagtagaagttgaattcgatcaaatagaaaagctttaa

SEQ ID NO: 406727 - DNA, 183 bp, Staphylococcus aureus
atggctaaaaaagaaagtttctttaaaggcgttaagtctgaaatggaaaaaacaagttggccgacgaaagaagagctatttaaatatactgtaattgtagtttctactgttatattcttcttagtctttttctatgccttagatttaggaattacagcattgaaaaatttattatttcgttag

SEQ ID NO: 406728 - DNA, 570 bp, Staphylococcus aureus
ttgaaatacgatttgacaactcaagacagtacaatcaaacgtaacaatgcaataaatgataaagacttcgaaaagttagtaatggatctacaaccattaattattcgacgcatcaaaacatttggatttaatcattatgatttagaagacttatatcaagaaatacttatacggatgtataggtcggtccaaacatttgattttagtggagagcagcctttcacaaattatgttcaatgtttaattacgtctgtaaagtatgattatttgagaaaatatttagctacaaataaaagaatggataatttgattaatgaatatagagttacgtatccatgtgcaataaagcgttttgatgttgaaaacaattatttgaataaattagcaattaaagagttgatttgtcagtttaagtatttgagtgcatttgaaaaagatgtcatgtatttaatgtgtgaacaatataagccgagagaaattgctcaattgatgcatgtaaaagagaaagtgatttataatgccatacaacgatgtaaaaataaaataaaacgttatttcaaaatgatttga

SEQ ID NO: 406729 - DNA, 525 bp, Staphylococcus aureus
atgaaagaacgttacttaatcattgatggatacaatatgataggacaatcaccaacgctaagcgccattgcaaaagagaatttagaagaagctagaatgcaattaatagatgcaattgcaaattataatgcagttatttcagatgaaattatttgtgttttcgatgcttatgaccaatcgggtgttgaaagagaatacatgtatcatggcgttaaaacgatttttaccaaggaaaaagaaacagctgatagtttcatagaacgttatgtttatgaactttatgacaagcatactaagcatattacagttgtaacaagtgatatgagtgagcaacatgctatctttggatcaggtgcatatagaatatcatctcgcgaaatgtggagagatttaaaagaaaatgaaattgatgtgagtaaatcattagatgatataagtgaaaacaagccaagaactcgaattccgttatcttctgaaatccttgcagaatttgaaaaaatacgaagaggacatcataagaaatga

SEQ ID NO: 406730 - DNA, 747 bp, Staphylococcus aureus
gtggaagatacggttattgttggtaggcatgctgttagagaagcgattattactgggcatccgataaataagatattgattcaagaaggtattaaaaagcaacaaattaatgaaattttaaaaaatgcaaaagatcaaaaaatcattgttcaaactgtaccaaaatctaaattagattttttagcaaatgcaccacatcagggtgttgcagcgcttattgcaccatatgaatatgctgacttcgatcaatttttaaaacagcaaaaagaaaaagaaggtttattgacagtacttatattagacggcttagaagacccacataacttgggatcaattttaagaacagccgatgcaacgggagttgatggtgttattattcctaaacgtcgttcagttacactaacgcaaacagttgcaaaagcctcaacaggtgcaattgaacatgtaccagttattcgagtgacaaatttagctaaaactatcgatgaactaaaagataatggcttttgggtagctggcactgaagctaataatgcaacagattatagaaatctagaagcggacatgtcattggctattgtaattggtagcgaaggacagggtatgagtcgcctagtaagtgataaatgcgatttttatattaagattccaatggttggacatgtaaacagtttgaatgcttcggttgcagcaagtttaatgatgtacgaagtatttcgaaaaagacatgatgttggagaaatataa

SEQ ID NO: 406731 - DNA, 405 bp, Staphylococcus aureus
gtggataatcaacaagataatcacattaaattattgaatccattgaccttagcatatatgggagacgcagtcttagatcaatatgtacgtacctatatcgttttaaagcttaaaagtaagcctaataaactacatcaaatgtctaaaaaatatgtatctgccaaaagtcaggcgcaaacgttagaatatttaatggagcaagaatggtttacagacgaagaaatggatattttgaagcgagggcgtaacgcgaaaagtcatactaaagctaaaaacactgatgttcaaacatatcgtaaaagttcagcgatagaagcagtgataggttttctttatttagaaaaaagagaagaacgattagaggcattattaaataaaataataacaatagtaaacgaaaggtag

SEQ ID NO: 406732 - DNA, 1401 bp, Staphylococcus aureus
atgattacattatataatacgcttacacgtcaaaaagaagtgttcaagcctatagaaccagggaaagtaaaaatgtatgtatgtggtcctactgtatataactacattcatattggtaacgcaagaccagcaattaattatgacgtagtgagacgttactttgaataccaaggatataatgtagaatatgtatcaaattttacagacgtagatgataaattaattaaacgttctcaagaattaaatcagtctgttcccgaaattgcagaaaaatatatcgctgcttttcatgaagatgttggtgcgttaaatgttagaaaagcgacttcaaatccaagggtaatggaccatatggatgacattattcaatttattaaagatttggtggatcaaggttatgcatatgaaagtggtggcgatgtttactttagaacacgtaaatttgaaggttatggtaaattaagtcatcaatccatagatgacttaaaagtgggtgctcgtatagatgcaggagagcataaagaagatgcacttgattttacattgtggaaaaaagcgaagcctggcgagattagttgggatagcccatttggtgaaggtagaccaggatggcatatagaatgttctgtaatggcatttcatgagctaggacctacaattgatatacatgcgggtggttcagatttacaatttccacatcatgaaaatgaaatagcacaatcagaagcacataatcatgcgccatttgctaattattggatgcataatggtttcattaatattgataatgaaaaaatgagtaaatcactaggcaactttattttagttcacgatattattaaagaagttgatccagatgtactaagattctttatgattagcgtacattatagaagcccaattaactataatctagaattggtagaatcagcacgtagtggactagagcgtattcgcaatagttatcaattaattgaagagcgcgcacaaattgctactaatattgaaaatcaacagacatatattgatcaaattgatgcgattttaaatcgttttgaaacagttatgaatgatgattttaatacagctaatgcaattacagcttggtatgatttagcaaaacttgcgaataaatatgtactagagaacacaacatcaacagaagtaattgataaatttaaagcagtttatcaaattttcagcgatgttttaggtgtaccgttaaaatctaaaaatgcagatgaattattggatgaagatgttgaaaaattaatcgaagagcgtaatgaagcaaggaaaaacaaagattttgcacgagcagatgaaattcgagacatgctgaaatcacaaaacattatattagaagacacacctcaaggggttagatttaaacgtggataa

SEQ ID NO: 406733 - DNA, 681 bp, Staphylococcus aureus
atgtatttacgtagttcaatcattgaggaggaaatgatcttgttaaaaagaatgagagacgatataaaaatggtatttgagcaggatccagcggcacgttcaacattagaagtcattacaacgtatgcaggtttacatgcagtttggagtcatttgattgcacataagttatacaaccaaaaaaaatatgttgcagcacgcgcgatatctcaaatttcaagatttttcacaggtatagaaatccatccaggtgctaaaattggaaagcgtctatttatagatcatggtatgggcgttgtaataggagaaacatgtacaattggtgataatgtgacaatctatcaaggcgtgacacttggtgggacagggaaagaaagagggaaaagacacccagatataggagacaatgttttaatagcagccggtgcgaaagttttaggaaatattaaaataaattcaaatgtaaatattggtgcaaattcagttgttttacaatcagttccaagttattcaacggttgttggtataccaggacatattgttaagcaagatggtgttcgagttggaaaaacatttgatcatcgccatctacctgatccaatttatgaacaaattaagcatttagaacgacaacttgaaaagactaggaatggagagattcaagatgattacattatataa

SEQ ID NO: 406734 - DNA, 1455 bp, Staphylococcus aureus
atgagcgatcgtataagagtaagatatgcaccaagtccaactgggtatcttcatattggtaatgcaagaacagcattattcaattacttgtatgctaaacattacaacggagattttgtgattcgaattgaagatactgataaaaaacgtaatttagaagatggagaaacatcacaatttgataatcttaaatggttaggattagattgggatgagtctgtagataaagacaatggctacggaccatatcgtcaatctgaacgtcaacatatctaccaaccattaatagatcagttactagcagaagataaagcatataaatgctatatgacagaagaagaattagaagctgaacgtgaagcgcaaatcgctcgtggtgaaatgcctcgctatggtggtcaacatgcgcatttgactgaagaacaacgtcaacaatttgaagcagaaggacgccaaccatcaattcgtttccgagtacctcaaaaccaaacgtattcatttgatgatatggtaaaaggaaatatttcatttgattcaaatggtattggtgactgggttatcgtaaaaaaagatggcattccaacgtacaattttgcagtagctatagatgatcattacatgcaaatttcagatgtaattcgtggtgatgatcatatttcaaacacgcctaaacaaattatgatttatgaagcatttggctgggagccacctcgttttggtcatatgtcattaattgttaatgaagaacgtaaaaagttaagtaaacgtgatgggcaaattttacaatttattgagcaatatcgtgacttaggttatttacctgaagcgttatttaattttattgcgttattaggttggtctcctgaaggtgaagaagaaatcttttctaaagaagaatttatcaaaatctttgatgaaaagcgtttgtcaaaatcaccagcatttttcgataagcaaaaattagcatgggttaataaccaatatatgaaacaaaaagatactgaaacagtattccaattagcattacctcatttaattaaagcaaatttgattcctgaggtgccgtcagaagaggatttatcttggggacgcaaattaattgcgctttatcaaaaagaaatgagttatgccggtgaaattgtacctttatcagaaatgttctttaaagaaatgccagctcttggtgaagaagaacaacaagtgattaatggagagcaagtaccagagttaatgacgcacttattcagtaaattagaagcacttgaaccatttgaagcggctgaaattaaaaagacaattaaagaagttcaaaaagaaacaggaataaaaggcaagcaattatttatgcctattcgtgttgctgtaacaggccaaatgcatggtcctgaattaccaaatacaattgaagtacttggtaaagaaaaagtgctaaaccgtttaaaacaatataagtaa

SEQ ID NO: 406735 - DNA, 1074 bp, Staphylococcus aureus
gtgaatatcgttaaactaatggttattattatttacttaattattgggagcgcattaggaataattattattcctgaaattgcaaatgatcttggattacaaaactccagctttttaaaaaatcactatgtagatggcattatcggtagtatttttatgttcttaatttttggtgtatttattagacgagttactaacgctataaaaggtttagaacattttattatgcgtagaagtgctgttgaaatactattcgcaacaataggtttaataatcggattacttatttctgttatggtgtcgtttatattagaatcaattggcaactctatttttaatcatttcattcctgtcataattacgatattactatgttatttcggtttccaatttggccttaaaaaacgagatgaaatgttaatgtttttacctgagaatatagcgcgttccatgtcacaacatactaaaagtgctacgccaaaaattatcgacacaagcgcaattattgatggtcgtattttagaagtcattcgttgcggttttatcgatggcaatattttaattccacaaggtgttattaatgaattacaaattgttgcagattcaaatgacagtgttaaacgtgaaaagggtaaaagaggcttagatattttaaatgaattgtatgatttagactatcctacaaaggttatacatccaactaaaacacatagtgatattgatacgatgttattaaaattagcaaaacaatatcatgcaagtattataacgacagatttcaacctaaataaagtttgtcatgtacatggtatcaaagcattaaatgttaatgatttatcagaagcaatcaaacctaatgtacatcaaggtgatcaactgcatattttactgacaaaaatgggtaaggagcctggtcaggcagtaggatatctagatgatggtacgatggtagttgttgataatgctaaaaatcttattggcagtcatgtcaatttagaagtagtcagcttattgcaaacatcttcaggaagaattgtttttgctaaaaaaatcgaagatacagtatcattataa

SEQ ID NO: 406736 - DNA, 1365 bp, Staphylococcus aureus
ttggccaagaaaaaagtgatttttgaatgtatggcttgtggttatcaatctcctaaatggatggggaaatgtcctaattgtggcgcttggaatcaaatggaggaaattgttgaaaaagcagccaatcctaaacatggagttaaaaccaaggaattagcaggtaaagtacaaaaattaaatagtattaaacatgaaacaacgccgagagtgttaacagattcagcagaattcaaccgtgtattaggtggaggtattgtgagcggatcgttagtacttattggtggggatccaggtattggtaagtcaacgttacttttacaaatttgtgcatcgttatctcaaaagaaaaaagtactatatattactggagaagaatcgcttagtcagactaaattacgtgcagagcgattagatgaagattcaagtgaattgcaagtattagctgaaacagatcttgaagttatttatcaaacagtaaaagaagaacaacctgatttattagtagtggattcgattcaaacaatatatcatcctgaaatcagctctgcgccaggttctgtttcacaagttcgtgaaagtacacaaagtttaatgaatattgctaaacaaatgaacattgcaacttttatagtgggtcatgtaacgaaagaaggtcaaattgctggcccaagattgctagaacacatggttgatactgtgctttattttgaaggcgatgaacaccacgcatatcgaattttgcgagctgttaaaaaccgttttggttcaacgaatgaaatgggaatcttcgaaatgaagcaaagtggattaaaaggtgtaaataatccatctgaaatgtttttagaagaacgttcaacaaatgttccaggttcaacaattgttgcaaccatggagggaaccagaccacttttaatagaagttcaagcgctggtaactccaacgacttttaacaatccgagacgaatggcaacagggattgatcataatcgattaagtttgttgatggctgttttggaaaagaaagaaaattatctattacaacaacaagatgcttatatcaaagtagctggcggtgtaaagttaacggagccagcagttgatttaagtgtaattgtagcaactgcatctagctttaaagataaagctgtcgacggattagattgctatattggagaagttggtttaacgggtgaggtacgtcgtgtatctcggatagaacaacgcgtgcaagaggctgcaaaactaggtttcaaacgtgtaattattcctaaaaataatataggcggatggacatatcctgaaggtatacaagtaataggtgtaactactgtacatgaagtattgtcatttgctcttcattcataa

SEQ ID NO: 406737 - DNA, 2457 bp, Staphylococcus aureus
atgttatttggtagattaactgagcgtgcacagcgcgtattagcacatgcccaagaagaagcaattcgtttaaatcattcaaatataggaacagaacacctattattggggttaatgaaagaacctgaaggaattgctgcaaaagtattagaaagttttaatatcactgaagataaagtaattgaagaagttgaaaaattaatcggacatggtcaagatcatgttggtacattgcattatacacctagagctaaaaaagtcattgaattatcgatggatgaagctagaaaattacatcacaattttgttggaacggaacatattttattaggcttgattcgtgaaaatgaaggtgttgcagcaagagtttttgcaaatctagatttaaatattactaaagcacgtgcacaagttgtgaaagctttaggaaaccctgaaatgagtaataaaaatgcacaagctagtaagtcaaataatactccaactttagatagtttagctcgtgacttaacagtcattgccaaagacggtacattagatcctgttataggacgtgataaagaaattacacgtgtaattgaagtattaagtagacgtacgaaaaacaatcctgtgcttattggagagccaggtgttggtaaaactgctattgctgaaggtttagcgcaagccatagtgaataatgaggtaccagagacattaaaagataagcgtgttatgtctttagatatgggaacagtagttgcaggtactaaatatcgtggtgaatttgaagagcgtctgaaaaaggttatggaagaaatccaacaagcaggtaatgtcatcctatttattgatgagttgcatactttagttggtgctggtggtgctgaaggtgctatcgatgcttcgaatattttgaagccggcattagcacgtggtgaattacaatgtattggtgctactacattagatgaatatcgcaaaaatattgaaaaagacgcggctttagaacgtcgtttccaacctgtacaagttgatgaaccttcagtagtagatacagttgctattttaaaaggattaagagatcgttacgaagcacaccatcgtattaatatttcagacgaagctattgaagcagctgttaaattaagtaacagatacgtttcagatcgtttcttaccagataaagcaattgatttaattgatgaagcaagttctaaagtaagacttaagagtcatacgacacctaataatttaaaagaaattgaacaagaaattgaaaaagttaaaaatgaaaaagatgccgcagtacatgctcaagagtttgaaaatgctgctaacctgcgtgataaacaaacaaaacttgaaaagcaatatgaagaagctaaaaatgaatggaagaatgcacaaaatggcatgtcaacttcattgtcagaagaagatattgctgaagttattgcaggatggacaggtatcccattaactaaaatcaatgaaacagaatctgaaaaacttcttagtctagaagatacattacatgagagagttattgggcaaaaagatgctgttaattcaatcagtaaagcggttagacgtgcccgtgcagggttaaaagatcctaaacgaccaattggtagctttatcttccttggaccaactggtgttggtaaaactgaattagctagagctttagctgaatcaatgtttggcgatgatgatgcgatgatccgtgtagacatgagtgaatttatggaaaaacacgcagtgagccgattagttggtgctcctccaggatatgttggtcatgatgatggtggacaattaactgaaaaagttagacgtaaaccatattctgtaattttatttgatgaaattgaaaaagctcatccagatgtatttaatattctattacaagttttagatgatggacatttgacagatacaaaaggacgtacagttgatttcagaaatacaattatcataatgacatcaaacgttggggcacaagaattacaagatcaacgatttgctggattcggtggttcaagtgatggacaagattatgaaacaattcgaaaaacgatgttaaaagaattaaaaaattcattccgtccagaatttttaaaccgtgtagatgatatcattgtattccataaactaacaaaagaagaattaaaagaaattgtaacaatgatggttaataaattaacaaatcgattatctgaacaaaacataaatattattgtaactgataaagcgaaagacaaaatcgcagaagaaggatatgatccagaatatggtgcaagaccattaattagagcgatacaaaaaactatcgaagataatttaagtgaattaatattagatggtaatcaaattgaaggtaagaaagttacagtagatcatgatggtaaagagtttaaatatgacattgctgaacaaacttcagaaactaaaacaccatcgcaagcataa

SEQ ID NO: 406738 - DNA, 1011 bp, Staphylococcus aureus
atgatgacgcataatattcatgataatatcagccaatggatgaaaagtaatgaagaaacaccaattgttatgtcttctagaattcggttagcgcgtaatttagaaaatcatgtgcatccactaatgtatgctactgaaaatgatggatttagagttataaatgaggtacaagatgccttgccaaactttgaattaatgcgtcttgatcaaatggatcaacaaagtaaaatgaaaatggttgcaaagcatttgattagtcctgaactaataaaacaaccagcagccgcagtattagtgaatgacgatgaatctttaagtgtcatgataaatgaagaggaccatattcgtattcaagctatgggaactgacacgacattacaggctttatataatcaagcttcatcaattgatgatgaattagatcgaagccttgatataagttatgatgaacaacttggttatttaactacatgtcctaccaatataggtactggtatgagagcaagcgtgatgctacatttgccaggtctatctattatgaaaagaatgacacggattgctcaaaccattaatcgttttggatatacaatcagaggtatttacggtgaaggttcgcaagtttatggacatacttatcaagtatccaaccaacttacacttggtaaatctgagttagaaatcatagaaacattaacagaagttgttaatcaaatcattcatgaagaaaaacaaatacgacaaaagttagacacttataatcaattagaaacacaagaccgtgtttttcgctcgctaggtattttacaaaactgtagaatgataactatggaagaggcttcttatagattaagcgaagttaaacttggtatagatttaaattacattgaattacaaaactttaaatttaatgaattgatggtagctatacagtcaccatttttattagatgaagaagatgacaaatctgtaaaagaaaaacgagcagatatactaagagaacatataaagtag

SEQ ID NO: 406739 - DNA, 567 bp, Staphylococcus aureus
gtgctttgtgaaaattgtcaacttaatgaagcggaattaaaagttaaagttacaagtaaaaataaaacagaagaaaaaatggtgtgtcaaacttgtgctgagggacaccatccgtggaatcaagctaatgaacaacctgaatatcaagaacatcaagataatttcgaagaagcatttgttgttaagcaaattttacaacatttagctacgaaacatggaattaattttcaagaagtagcgtttaaagaagaaaaacgttgcccatcatgtcatatgactttgaaagatattgcacatgttggtaaatttgggtgtgctaattgttatgcaacatttaaagatgacatcattgatatcgtccgcagagttcaaggtggacaatttgagcacgttggaaagacaccacattcttcacataaaaagatagctttaaagcgaaaaatcgaagaaaagaatgaatatttgaaaaaacttattgaaatccaagattttgaggaagcagccattgttagagatgaaattaaagcactaaaagctgagagtgaggtgcaacatgatgacgcataa

SEQ ID NO: 406740 - DNA, 471 bp, Staphylococcus aureus
gtgatatacatgcacaatatgtctgacatcatagaacaatacatcaaacgtttatttgaagagtcgaatgaagatgtcgttgaaattcagagagcgaatatcgcacagcgttttgattgcgtaccatcacaattaaattatgtaatcaaaacacgattcactaatgaacatggttatgaaatcgaaagtaaacgtggtggtggtggttacatccgaatcactaaaattgaaaataaagatgcaacaggttatattaatcatttgcttcagctgattggaccttctatttctcaacaacaagcttattatattattgatgggcttttagataaaatgttaataaatgaacgtgaagctaaaatgattcaagcagttattgatagagaaacgctatcaatggatatggtttctagagatattattagagcaaatattttaaaacgtttgttaccagttataaattattactaa

SEQ ID NO: 406741 - DNA, 1215 bp, Staphylococcus aureus
atgcatattctaattgggattatcggaattatcttctttttagcacttgcgtttctatttagctcagacaggaaaaatattcgctggaaatatgtaggaattttacttgcaattcagcttatctttgcatttatcttgcttaaaactacaatgggaatcaaggttattggtggtatttcaaacggttttaactacttattattaaaagcagcagatggtgttaactttgtattcggtggtattcaatatatcgatcctaagcaaccaccattcttcttcagtgtattattacctatcgtatttatttcagcgattatcggtatccttcaatacacaaagattttacctttaatcattaatgttttaggattcttaatttctaaaattaatggtatgggacgtttagaatcatacaatgcagttgctgcagcaattttgggacaatctgaagtatttatttcaattaaaaaacaattaccatacatacctaagcaacgtttatacacattaacagcttcagcaatgtcgactgtttctgcttcaattatcggtgcatactttaccttaattgaacctaaatatgttgtaacggctgttgtcttaaacttatttggtggtttcatcatcgcttcaattattaacccttataaagttaatgaagaagatgacaaattattagttgaagaaactgaagaaagacaacaatcattcttcgaaatgctaggagaatatattttagatggatttaaagtagctgtcattgtaggcgcaatgttaatcggatacattgccattatcgctctattaaatggaattgtaagcaatatctttagtacagtttcaggtggcgctatttcttgggatttccaaacattaattggttttgtctttgcaccatttgcattcttagtcggtgtgccatggcaagatgcagttcaagccggttcagttatggcgacaaaactattatctaacgaatttgtagcaatgcaagcacttggtaaacttagtgatttatctgaacacgcaaaaggtgttacatctgtattcttagtatcatttgctaactttagctctatcggtattatttcaggtgcgattaaatcacttaatgacaaaaaaggagatacagttgcccgctttggtttgaaattattattcggtgcaacactagtatctttcatttcagctgcaatcgctggattctttatttaa

SEQ ID NO: 406742 - DNA, 561 bp, Staphylococcus aureus
atgaaaataggtgtattagcattacaaggtgcagtacgtgaacatattagacatattgaattaagtggtcatgaaggtattgcagttaaaaaagttgaacaattagaagaaatcgagggcttaatattacctggtggcgagtctacaacgttacgtcgattaatgaatttatatggatttaaagaggctttacaaaattcaactttacctatgtttggtacatgcgcaggattaatagttctagcgcaagatatagttggtgaagaaggataccttaacaagttgaatattactgtacaacgaaactcattcggtagacaagttgacagctttgaaacagaattagatattaaaggtatcgctacagatattgaaggtgtctttataagagccccacatattgaaaaagtaggtcaaggcgtagatatcctatgtaaggttaatgagaaaattgtagctgttcagcaaggtaaatatttaggcgtatcattccatcctgaattaacagatgactatagagtaactgattactttattaatcatattgtaaaaaaagcatag

SEQ ID NO: 406743 - DNA, 888 bp, Staphylococcus aureus
atgagtaaaattattggatcagacagagtcaaaagaggtatggctgaaatgcaaaaaggcggcgttattatggatgtcgttaatgctgagcaagcaagaattgcagaagaagctggcgcggtagcagttatggcattagaacgagtaccttctgatattagagctgctggtggtgttgcacgtatggcaaaccctaaaattgtagaagaagtaatgaatgctgtttctattccagtcatggctaaagcacgtattggtcatatcactgaagcaagagtattagaggcgatgggtgttgactatattgatgaatcagaagtgttaacaccagcagatgaggaatatcacttaagaaaagatcaatttacagtaccatttgtatgtggatgtcgtaatttaggtgaagctgcgcgtagaattggtgaaggtgctgctatgttacgtactaaaggtgaaccaggtacaggtaatattgttgaagctgtaagacatatgagacaagttaattcagaagttagtcgattgactgtaatgaatgatgatgagattatgacttttgcgaaagatatcggtgcgccttatgaaattttaaaacaaattaaagacaatggtcgtttaccggtagttaactttgcagctggtggcgttgcgactcctcaagatgctgctttaatgatggaattaggtgctgacggtgtattcgttggatcaggtatttttaaatcagaagatccagaaaaatttgctaaagcaattgttcaagcaacaacacattaccaagactatgaactaattggaagattagcaagtgaacttggcactgctatgaaaggtttagatatcaatcaattatcattagaagaacgtatgcaagagcgtggttggtaa

SEQ ID NO: 406744 - DNA, 1383 bp, Staphylococcus aureus
ttgaaaaacactttataccatcaactttatgaaaaattaaaaaaacaaataattgaaggtcaatttaaagaaggcgataaattttattctaaaagacaattaagcaaacatttatctattagccaaacaaccgtagagcatgcatatcaacttctattagacgaaggttacatttattcaagacctcgctctggatattttgtgtccgaaattgaatctttaacaattttaaacaatcaacctatcccctctctttttgatgatgattcatataaaccaaaagcgagtgatgaagcttatgattatgcttttaatttggatgaaatagatacgaaacatttccctatagaacttttcagaaagtattccaaagatctttatgatacaaatcatttaaatcaattacgtagaggacattttcaaggagaattacatttgcggtttcaactggcattttatttatttactaatcgtggcgtaatttgtgatcctaatcaaattataattggctcatctaccgaacaattagtaaatcaattagtcgatttactttatacttcaacatttattatcgaaaaacctagttatccaccaatcaaaaatattttagataaaaaacaagttgaatatgaacaaattgaagttgaagataatggaataaacgtagatgaagttattaaatcacaaaaaaatatagtatatataacgccttcccatcaatttccaactggatatgtgatggacttaaaaaaacgaactcaattaatacaatgggctcaagaaaaagaagaacgatttattatagaagatgattatgattccgagtttagatatttcggcaaacccattccagcaattcaaggtctatattcaagaggagaaaaagtgatttatatcagtacattttcaaagtctatttttcctagctgtcgagttgcatatatggtgttaccctattctataatgaaaaaatatcattctcaaaatcacattgaaggcaacactgtacctgttcatatgcaaaaccttattgcaacgtttatatcttccggtggttttgaaaggcatttaaataaaatgagacgaatttatcgtagaaaactaacctatattttaaaaagattgaaaccttacaaagagcagcttgatattcaaggtgctgaaacgggtatgcattttacaattacagtaaaaaatggattaacattacaagagtgtcttgatagagcaaacaaagtaaagttaaaattacaagtttataattttgatgatgatcaagactataagaaaacccctaaatttatattaggctttggcggtatagacgatgatgctttaaaaccgcatgtagacgctctaataaaatcattaattataaagtaa

SEQ ID NO: 406745 - DNA, 342 bp, Staphylococcus aureus
atggacataatcgcgatttgtatcgcaatttttagtttcttactgactgcacttaaatattatttagactatatgaaagattctcttaacatcgatgttatacctaccagaagctttaattacttggtcgatgacaaatcaagttacaacgatataacatttattaatttcacaaagtttcccatttctgttattgacgttgaatttgatattaaaaataaagtaaatgaacaaaaaacgttcaaacctatacgatataaagataaaaactactccattccatttactttaggaccttatgaaagtgtagaatgtactttttgctcgaagaatatccagtga

SEQ ID NO: 406746 - DNA, 261 bp, Staphylococcus aureus
atggaacaaatcacgttaaccaaagaagagtgtgtcgaacaatgcatcaataaagacttaaaacttttagattatcgagttcaacaaattttagaaggtgttctatcagaaagtaccacatacggtgatgcaagaaataaattagaaacattgaaaattattgctgaatctcattttaaaaccgaacatgcttcagttatttacaaattagcattgaaaaagttagacgaaaaaatcaacgccactccaattaaagagtga

SEQ ID NO: 406747 - DNA, 243 bp, Staphylococcus aureus
atgatatacaatttcgattatagtttgctgtacgaaagaatggcagagtatagatatagccaaagttctttagcgaacgcaatccctatttcaaggacatctattaatcacaagttgcaaggaaaaaatttatttacacaatgggaaataaaacgaatctgtgaattattagaaatcccaccaacaaaagtaggtagatatttttttgaacaaaatgtacagaaaactgtacaaatgtcgtaa

SEQ ID NO: 406748 - DNA, 717 bp, Staphylococcus aureus
atgaacagttttaaggatagattaaagcaaattatgtctgaacggaagatatctcaatcagagctatcaagaaggactggtattggtagaaactcaattagcgattatttaaacggaaaatatgaagcgaaacaagacaaagtctttgaactagcaaaggctttaaacgttaacgaagcgtggcttatggggtttgatatttctaagaatagaaaaattgaaaataacgacatcacttccatatacagtaaactcacgcctccaagacaaagcaatgtactaaaatatgcgactaatcaattagaagaacaaaataatgacagtgataatctggtagatttcaattcttacattcaagaaaaatccgaagtggatatatatggttgtgcgtcagctggtattggcgaaagattatataacgagcctatttcaaaagaattcgtaagaggttatgtccccgcacatgatatagctttaaaagtaaatggagactcaatggagccgttatttaaaaacggacaaattatattcattgaaaaatctcacactatcaaagatggacaaataggcgtctttattataaatggagatgcttacgtaaagaaagtttatgtagaagataatagattaacgttggtttctttaaataaaaagtataaagatttatatttttatgataacgaaagtgtgaggttagttggaaaagttattttatag

SEQ ID NO: 406749 - DNA, 855 bp, Staphylococcus aureus
atgaaacctagaaagcaagatgaaaaaatattatcagatcaatacagttactttgaaccaataatcagcgacagttgcgacataaaattcgacgaaaacaagaggagaatgggttctatattcatttcacatgaagagatttgttttataaggaaagaagaagattatatattcaaaatctcattatcagaggtgatagattataacactgttgttactatttggaaaaaccaagcttttttaacattaaacgataatagaaaattaacagtttatttcgtaacaaactctcctttaacaggattcatctcaattttaaaaacttatatgcaattatctaagaataaggaaacaattatctcgaatgattgtctacctattaatgatgatgaacaaactaaagttgaaattttcgacgtcgtaggattaaattatgaaggtcgtagaaaagaattaaagaaacttatcaagaaaatgaaaaataacgacgatttctttttcttatatagtgatttgaaaggaaatgaacttaaagaagaattactttatgaagacaaggtgtatgaaatttctgattacgaggttattcctggtgtattcttacaaaaagaaccggataatccttatgatgaaaacgcgataaaagttatgatttcaaatgaatactctgaatttcacgttggatatgtacctagagagtatgcttcaagattagtcaatcatatggacaacatcgtttcttgtaacgcatatattaatggtggtaagtataaaactttagattatttagaagagaaaatcgttactaaagaatcagactatggattacgagtacatttagaatacaaagtttga

SEQ ID NO: 406750 - DNA, 147 bp, Staphylococcus aureus
atggattttaaagaagttgacattaacattgaagagtgggaaatggttgaaatccccttttatacagaagaagaactgacttataggttgaataatggtttacctataactaaaagtgaacttgaagaacaggagtcgaaaaaatga

SEQ ID NO: 406751 - DNA, 186 bp, Staphylococcus aureus
atgagttcttataaagaaattgaacacttacacatcaatactggtggtaaagagcttactcaagaacaaatagaagaagccaaagcttttatagacagtcaagaatttaaagatatgattcgagaagctaaagagtcacgtcaaagagttatggagtctaaaattaccgatagaactaaaatgtga

SEQ ID NO: 406752 - DNA, 183 bp, Staphylococcus aureus
atgaaaataactaattgcaaaataaaaaaagaaactatagtatatgaagttttaactagtggtaatcaaccattcacttatgagttacctaaagatttatcgtcacataatgcgcgtaaatacttggaatttatttcacaaaaaatagatggcgataagttaaccaaagaagattcattatga

SEQ ID NO: 406753 - DNA, 714 bp, Staphylococcus aureus
atgacgcataatatagaaaaacgcattaataaattaaaaacttctggaaatccaaaatttaaaaaattagattcagatattcactatttactcaagagatttgaaggtgaaaaaaaccataaaggtttttatccaaagtttaaacaaggagaaatagtttttgtagatttcggtataaacgttaataaagaattctctaattcacactttgcaatagtgatgaataaaaatgattctaatacggaagatatagtaaatgttattcccttatcttctaaagaaaacaaaaagtatttaaagatgaattttgatttgaaatgggagtattatttaagattgtttttaaatttaattagcgcgcaaaataattcagctatattaaaagaagttttcgataaaaaataccaaaaaaacaacacagaattcatcactaaagattattttagtgaatttatatctgatagtttagaaattgaaaataaattaaataaaattgacagaaacattaataacatagtatcagcaattgataaggtaaaaaaattaaaaggtaatagttacgcttgcataaattctttccagccgattagtaagtttcgcataagaaaagttttaccccaaaaaattaaaaatccagtaatagattcttcggatattatgttactgataaatagaattaataataatatattgcagattcctgatataagatga

SEQ ID NO: 406754 - DNA, 1038 bp, Staphylococcus aureus
atgaaaacacgttgttacgatggtaaaaaatggcaatatgaatttaagtatgaaggaaaaagataccgtaagaaaggttttagaacaaagcgtgaagctaattctgctggactagacaagttaaatgagttaagaagtggttttaatatagataactatataactcttgaagaatacttcgaaaattggattaaaacgtataaacaacctgttgttaaagaaaatacctaccgtcattatagaaatgcattacaacatatacaaaaacataaaataggtaaaatggagttatcaaagataaatagacaagtttatcagaaattcataaacgattattcaaaagaacacgcaaaagaaactataagaaaaacaaacggtgctattcggtcagctttagatgacgcattatatgatgggcttatttttaaaaatcccgcttataaagttaattataaagccggaaaacctacgaagtcagaacaagaaaaattcatctcggtaactgaatatgaaatactaaaagatcacgtcagaaagaagagaactcgttcatcattagcgctattcataatgatttgtacgggttgtcgtgtcagtggtgcaagaaatataaagattgagcatatcaaccaagtgaaaaacactatatttattgacgagcgaaaaaccgatacttcccctagatatatcagtatcgctaaatctgatatgaaacacattatggacgtcataagtacatttgcaattagctatgatggttacattttcaaagaagccggatctataattaaccttcatgctatcaataatgctttgaaatcagcctgtagagtcaataatataccaattattacatcgcacgcattaagacacactcattgttcttatttactagcaaaaggtgtatctatacattacatttctaaaagattaggtcataaaaatatagcaataactacatccgtgtattctcatttgttagaagaaaaatttaatgaagaggacaaaaaaacaactaaaattttagaaagtatgtaa

SEQ ID NO: 406755 - DNA, 825 bp, Staphylococcus aureus
atgtatccaaactgggggcaatataaacgcgctgatttaatcggacaatcttcttatattaaaaataatgatgtcgtaatattcaatgaagcatttgataatggtgcatcagacaaattattaagtaatgtgaaaaaagaatatccttatcaaacacctgtactcggccgttctcaatcagggtgggacaaaactgaaggtagctactcatcaactgttgcagaagatggtggcgtagcgattgtaagtaaatatcctattaaagaaaaaatccagcatgttttcaaaagcggttgtggattcgataatgatagcaacaaaggctttgtttatacaaaaatagagaaaaatggtaagaacgttcacgttatcggtacacatacacaatctgaagattcacgttgtggtgctggacatgatcgaaaaattagagctgaacaaatgaaagaaatcagtgactttgttaaaaagaaaaatatccctaaagatgaaacggtatatataggtggcgaccttaatgtcaataaaggcactccagagttcaaagatatgcttaaaaacttgaatgtaaatgatgttctatatgcaggtcataatagcacatgggaccctcaatcaaattcaattgcgaaatataattaccctaatggtaaaccagaacatttagactatatatttacagataaagatcataaacaaccaaaacaattagtcaatgaagttgtgactgaaaaacctaagccatgggatgtatatgcgttcccatattactacgtttacaatgatttttcagatcattacccaatcaaagcctatagtaaatag

SEQ ID NO: 406756 - DNA, 1017 bp, Staphylococcus aureus
atgattaaacaactatgtaaaaatatcacaatttgtacgttagcactatcgactactttcactgtattaccagctacttcatttgcaaagattaattctgaaatcaaacaagtttctgagaagaatcttgatggtgatactaaaatgtatacacgtacagctacaacaagtgatagtcaaaaaaatattactcaaagcttacaatttaatttcttaactgaacctaattatgataaagaaacagtatttattaaagcaaaaggtacaattggtagtggtttgagaattttagacccaaatggttattggaatagtacattaagatggcctggatcttattcagtttcaattcaaaatgttgatgacaacaacaatacaaatgtgactgactttgcaccaaaaaatcaggatgaatcaagagaagttaaatatacgtatggttataaaacaggtggagatttttcgattaatcgtggaggcttaactggaaatattacaaaagagagtaattattcagagacgattagttatcaacaaccatcatatcgtacattacttgatcaatctacgtcacataaaggtgtaggttggaaagtagaagcacatttgataaataatatgggacatgaccatacgagacaattaactaatgatagtgataatagaactaaaagtgaaattttttctttaacacgaaatggaaatttatgggcgaaagataatttcacacctaaagacaaaatgcctgtaactgtgtctgaagggtttaatccagaatttttagctgttatgtcacatgataaaaaagacaaaggtaaatcacaatttgttgttcattataaaagatcaatggatgagtttaaaatagattggaatcgccatggtttctggggctattggtctggtgaaaaccatgtagataaaaaagaagaaaaattatcagcattatatgaagttgattggaagacacataatgtgaagtttgtaaaagtacttaatgataatgaaaagaaataa

SEQ ID NO: 406757 - DNA, 1056 bp, Staphylococcus aureus
atgaaaaataaaaaacgtgttttaatagcgtcatcattatcatgtgcaattttattgttatcagcagcaacgactcaagcaaattcagctcataaagactctcaagaccaaaataagaaagaacatgttgataagtctcaacaaaaagacaaacgtaatgttactaataaagataaaaattcaacagcaccggatgatattgggaaaaacggtaaaatcacaaaacgaactgaaacagtatatgatgagaaaacaaatatactccaaaatttacaattcgactttatcgatgatccaacttatgacaagaatgtattacttgttaaaaaacaaggctcaattcattcaaatttaaagtttgaatctcataaagaagaaaaaaattcaaattggttaaagtatccaagtgagtaccatgtagattttcaagtaaaaagaaatcgtaaaactgaaatattagaccaattgccgaaaaataaaatttcaactgcaaaagtagacagtacattttcatatagctcaggtggtaaattcgattcaacaaaaggtattggacgaacttcatcaaatagctactccaaaacgattagttataatcagcaaaattatgacacaattgccagcggtaaaaataataactggcatgtacactggtcagttattgcgaatgacttgaagtatggtggagaagtgaaaaatagaaatgatgaattattattctatagaaatacgagaattgctactgtagaaaaccctgaactaagctttgcttcaaaatatagatacccagcattagtaagaagtggctttaatccagaatttttaacttatttatctaatgaaaagtcaaatgagaaaacgcaatttgaagtaacatacacacgaaatcaagatattttgaaaaacagacctggaatacattatgcacctccaattttagaaaaaaataaagatggtcaaagattaattgtcacttatgaagttgattggaaaaataaaacagttaaagtcgttgataaatattctgatgacaataaaccttataaagaaggataa

SEQ ID NO: 406758 - DNA, 1224 bp, Staphylococcus aureus
atgacaacttttagtgaaaaagaaaaaattcaattactagcagatattgttgaactacaaactgaaaataataatgaaatagacgtttgtaattatttaacagatttattcgaaaagtacgatattaaatctgaaattttgaaagttaatgaacaccgcgccaatatcgttgcagaaatcggtaacggctcacctatactcgcattgagtggtcatatggatgttgttgatgcaggaaatcaagataattggtcatatcccccttttcaactgacagaaaaagatggcaaattatatggccgaggcactacagatatgaaaggcggtttaatggctttggtcgtatctctaatcgaattaaaagaacaaaatgaattgcctcatggaacgattagattactggctactgctggcgaagagaaagaacaagaaggtgccaaattattagctgataaaggctatttagacgatgtcgatggcttaattattgctgaaccaactggatctggaatttattatgcacataaggggtctatgtcatgtaaagtaactgcaactggtaaagctgtccatagctcagttccatttattggtgacaatgcaattgatacactgcttgaattttataatctatttaaagaaaaatattcagagcttaaacaacaagatactaaacatgaattagatgttgcgcctatgttcaaatcattgattggaaaagaaatttctgaagaggatgcaaattatgcatctggtcttacagctgtatgttcgattataaatggcggcaaacaatttaactctgtaccagatgaagcttcacttgaatttaacgtaagaccagttcctgagtatgataacgactttatagaatcgtttttccaaaatatcattaatgatgtggatagcaataagctttcactcgatattccaagcaatcaccgacctgtaacaagcgataaaaatagcaaattaattactacgattaaagatgtagcttctagttatgtagaacaagacgaaatatttgtttcagcgcttgtaggtgcaacagatgcctctagtttcttaggagataataaggacaatgttgatttagccatttttggaccaggtaatccattaatggcacatcaaatcgatgaatatattgaaaaagatatgtatctgaaatatattgatatttttaaagaggcttccattcaatatttaaaagaaaaataa

SEQ ID NO: 406759 - DNA, 846 bp, Staphylococcus aureus
atgaagcaactggttggaattcccgaatcaatgttaattcctttgatagctcgagcaaaagagtacgaaaacgaaaaaccaataataaaagacgcactatcaaaaaaaatatttgatggtttagatgatatgtacaaaaatgttacatgtgatgacatgtctcaaattggaattagtatacgtactgtgataatagattgtgttactaagaggcttatcaaggataataaagatttaatcgtggtcaatataggttgtggcttagatacaaggtttcaaagatttaataaagaaaaaatatcatggatagatttagatgtaccagaatcaatagaaatacgaaaaacattttttaaagaaagtaatagttataagatgatatctaaatctatgctagattacagttggattgatgatgtcaaaaattataaattttttaatagtaagtcagatatattgtttattattgaaggtgtattgatgtattttgatgagagtgtaatgactcaattattggacactattatcaaaaagatgggagatcataatttgacatttgcgattgaattttgctcaaaaacaattgcgaataatacaaagagacatcaatcggtatcaaagttatcctcacaacctgtttttaaatatggttacaatgatttaaaaaaattgaatgaaattttaccaaatacaataagagtaatacatgaatataattattttgactattataagaatcgatggggcttatttggatattgtagatttataccttatttaaaaaaaaggttaaacaataaaatagtacttatgaaatataaagttccaaagagacagagacattaa

SEQ ID NO: 406760 - DNA, 912 bp, Staphylococcus aureus
atgaaaagattaattggaattttattatgtaatttatttattttgactgcgtgttcagcatctgtcgataaaacaagtaactcgacaaagactacagactataaaattgaaaatggtgaaacactgaaagtaccagagaaacctaaaagagttgctgtattaactggattttatgttggtgattttataaagttaggaatcaaaccaattgctgtttcagatataactaaagattcttcaattttaaaaccttatttaaaaggggttgattatattggagaaaatgatgttgaaagagttgctaaagcaaaaccagatttaattgttgtagatgctatggataaaaatataaaaaaataccaaaaaatagcgccaacaatcccatatacatacaataaatacaatcataaagaaatattaaaagaaataggcaagttgactaataatgaagataaagctaaaaaatggattgaagagtgggacgataaaactagaaaagataaaaaagaaattcaaagtaaaattggtcaagcaacagcatctgtgtttgaaccagatgaaaagcaaatatacatatataactctacatggggtcgtggtttggatattgttcatgatgcattcggtatgccaatgacaaagcaatataaagataaattacaagaagataaaaaaggctatgcttccatttcaaaagaaaatattagtaaatatgctggtgattatatatttttaagtaaaccttcgtacggaaaatttgattttgaaaaaacacatacatggcagaatattgaagctgtaaaaaaaggacatgtaatttcatataaagcagaagattattggttcacagatcctattacattagaacatttgagaagtaaattaaaaaaagaaattttaaataaaaaataa

SEQ ID NO: 406761 - DNA, 1308 bp, Staphylococcus aureus
atgaacaaagtccacaaacctttatatttttatttaatgcttttcttctctacaactatcataggtgcacttttattgtatttaccttttactggtaaaaagccaatatcttttttagatgccctatttatagcttcaagtgcatttacagttactggcttgtccccagttgatataggatcacagtttaatatacttggtgagatagtaatactattattaattcaaataggtggtctgggtatcgtgaccgtaaccctattgacactagtatttttaaatagaaagatatcaatgaaaaatagattcttgattatggttacatggaatattgacgaacctggtggtgttattaagctaattaaacacttggctatttatagtttagtcactgaattaattggtatgatttgtttgtgtttatcttttataccaaaatttggtataggcaaaggtttatttttaagcttattcacatcagtatcagcttttaataatgctggatttgccctttttaagaataacttaatagattattctagtgatccaattgtcattattacaatctcaatactcataatatttggaggtattggacattttgtcgtgatagactttattaattgtaaaaaattgagtaaattatctttacattctaaattagtcttaactacaactagtatcctaataattataggagctattacattctttttattagaacagtttaatactatgcaacatatgggactagttgaaaaaatcggaaattcttttttccaatcagtaacaacacgaacagcgggttttaacagtatagatatagcaagcattaacaaatctaccgcattaatgttaatgctacttatgtttattggtggtgcccctctcagtgcagctggaggaattaaaataactacttttgcagttgcgtttatttttgtactaaattatatacgtaaagaaaataatgtttcagtattcaataaagaaatatctgacaaacatataaaactatctattgttaccattaatatctcatttctatttatcagcatcattacttttatattatcgataattaatccgaacatatcattaatcaagttattattcgaagtggtttctgcattcggaacagtagggttaagtatgaaccttaccacagaatatcatggtattactaaaataattattatattcgttatgctttgcggtaaagtaggactattaactttattaagaacatttataccaccaaaaagtcctaaaaattaccgctacactaaaggacaaatttatctataa

SEQ ID NO: 406762 - DNA, 444 bp, Staphylococcus aureus
atgagcataattacaagattgtttaataacagtgattttgaaaaattaaatcaactatgtaaattatatgatgatctaggttatccaacaaatgagaatgatttaaaaaagagactaaagaaaataacgaatcatgatgattacttcctactgcttttgataaaagaaaataaaataattggtttaagtggtatgtgtaaaatgatgttttacgaaaaaaatgcagagtatatgagaatccttgcgtttgttatacattctgaatttaggaaaaaaggttatggaaagagattattagctgattctgaagaattttctaaacggttgaattgtaaagcaataacactaaatagtggtaatagaaatgaaagactatctgcacataaactatatagtgataatgggtatgttagcaatacatctgggtttactaaacaactataa

SEQ ID NO: 406763 - DNA, 342 bp, Staphylococcus aureus
atgggtaataaacaatgcattagtttgaatttattgctttcggatgatactttcgcagtaatttcagtaatgacaactttgggaactgctattttaggaggtatagcaccttcaatatatggtatttttacatcgcctatagataaaaaaagtagttttagggctattagcgattgggagcaagaacaaagaaataatgttaaagatctgatgatgctattaccatttacattacttagtattttaattgtgatttttatttttcagtttgcatattctaaactatttaatacgatagctattataatatttattataatacttgttgttatgtttttttaa

SEQ ID NO: 406764 - DNA, 591 bp, Staphylococcus aureus
atgagtgagttaactgcaaagcaagcacgttttgtgaatgagtatattagaacactgaatgtaacacaaagtgccataaaagcaggatataacgcaaatagcgcacatgtgacagcgtgtaggttattgaaaaagccgcacatcaagcaatatatacaagaacaaaaagataagattatagatgagaatgtattaaccgcaaaagagttattacatgtgctaacgaatgcggcagtcggtgatgaaacagaaacgaaagaagttgtagtcaagcgtggagaatataaagaaaatccacaaagtggcaaagtacaattagtctataatgaacatgttgaactgatagaggtaccaataaaacctagtgatcgtttaaaagctcgtgatatgttgggtaaatatcataaattatttacagataagcatgatataaacggtaatgtacctatattcattaatattggtgaatgggacggaggtgatgaggggttagataaggcagtgaaagatgtatctaacgataatcctaatcatactgtgattgtggatgatataccgttagaagattatgagtcaattaggtttttataa

SEQ ID NO: 406765 - DNA, 1617 bp, Staphylococcus aureus
atggttaaacaattgaaattctctgaagatgcacgtcaagcaatgttacgtggtgttgaccaacttgcaaatgcagttaaagtaacgattggtcctaaaggacgtaatgttgtattagataaagagtttacagcacctttaattacgaatgatggtgtgacgattgctaaagaaatcgaattagaagatccatatgaaaatatgggggctaaactagttcaagaagtcgcaaataagacaaatgaaattgctggtgacggtacgacaactgcaacagtattagctcaagcaatgattcaagaaggcttgaaaaatgttacaagtggtgcgaacccagttggtttacgacaaggtatcgacaaagcagttaaagttgctgttgaagcgttacatgaaaattctcaaaaagttgaaaataaaaatgaaattgcgcaagtaggtgcgatttcagcagcagatgaagaaattggacgttatatttctgaagctatggaaaaagtaggtaacgatggtgtcattacaattgaagaatcaaatggactaaacactgaactagaagtggttgaaggtatgcaatttgatcgtggttatcaatcaccgtatatggttactgattcagataaaatggttgctgaattagaacgcccatacattttagtaacagataagaaaatctcgtctttccaagatatcttacctttattagaacaagtggttcaatctaatcgtccaatcttaattgtagctgatgaagttgaaggcgatgcattaacaaatatcgtgctaaaccgtatgcgtggcacatttacagctgttgcagtaaaagcacctggttttggtgatcgtagaaaagcgatgcttgaagatttagctattttaactggtgcgcaagtgattactgatgatttaggcttagatttaaaagatgcatcaattgatatgttaggtactgcaagtaaagtagaagtaactaaagataataccactgttgttgatggtgacggtgacgaaaacagcattgatgcacgtgttagccaattgaaatctcaaattgaagaaactgaatctgactttgatcgtgaaaaattacaagagcgcttagctaaattagcaggtggtgttgcagttatcaaagtaggtgcagcaagtgaaacagagcttaaagaacgtaaattacgtattgaagatgcattaaattctacacgtgcagcagttgaagaaggtattgttgcaggtggtggtactgcattagtaaatgtttaccaaaaagtaagtgaaattgaagctgaaggtgacattgaaacaggtgtaaatattgtacttaaagcattaactgcaccagttcgtcaaattgctgaaaatgcaggattagaaggttctgttattgtagaacgtttgaaaaacgcagagccgggtgttggttttaacgctgctacaaacgagtgggttaatatgttagaagaaggtatcgttgatccaactaaagtaacacgctcagcattacaacatgctgcaagtgttgcagcaatgttcttaacgactgaagcggttgtagcatcaattccagaaaaaaataatgaccaacctaacatgggtggcatgccaggaatgatgtaa

SEQ ID NO: 406766 - DNA, 285 bp, Staphylococcus aureus
atgctaaaaccaattggaaatcgtgtgattattgagaaaaaagaacaagaacaaacaactaaaagtggtattgttttaactgatagtgctaaagaaaaatcaaacgaaggcgttatcgttgcagtaggaactggacgcctattaaatgatggtacaagagtgactcctgaagtgaaagaaggggaccgtgtcgtgttccaacaatatgctggtacagaagttaaacgagataatgaaacatatctggtattaaatgaagaagatattttagcagttattgaataa

SEQ ID NO: 406767 - DNA, 744 bp, Staphylococcus aureus
atgacaagattatgggcatcattgctaactgttattatttatatattgtctcaatttttaccgcttctcattgtaaaaaaattaccatttgtacaatatagtggcatagaactgactaaagcagtcatttacatacaacttgttctatttttaatcgccgccacgacgattattttaattaatttaaaaattaaaaatccaacaaaattagaattagaagttaaagaacctaaaaaatatatcattccatgggcattgcttggatttgcattggtaatgatttatcaaatggtagtgagcattgtattaacgcaaatttatggtggacaacaagtaagtcctaatacagaaaagctaattattattgctcgaaaaatacctatatttatcttctttgtatctattattggtcctttattagaagaatatgtattcagaaaagtaatctttggagaattatttaatgcgattaaaggtaatcgtatcgtggcatttattattgctacaacagtaagttcattaatatttgcattagcacataatgatttcaaatttattccagtttattttggtatgggtgtcattttttcattagcatatgtttggacaaaacggcttgctgttccaattattatccatatgttacaaaacggatttgtcgttatattccaattacttaatcctgaggctttgaaaaaagccacggaacaagcgaattttatatatcacatttttattccataa

SEQ ID NO: 406768 - DNA, 1254 bp, Staphylococcus aureus
atgtcatatcattggtttaagaaaatgttactttcaacaagtattttaattttaagtagtagtagtttagggcttgcaacgcacacagttgaagcaaaggataacttaaatggagaaaaaccaactactaatttgaatcataatataacttcaccatcagtaaatagtgaaatgaataataatgagactgggacacctcacgaatcaaatcaaacgggtaatgaaggaacaggttcgaatagtcgtgatgctaatcctgattcgaataatgtgaagccagactcaaacaaccaaaacccaagtacagattcaaaaccagacccaaataaccaaaacccaagtccgaatcctaaaccagatccagataacccgaaaccaaaaccggatccaaaaccagacccagataaaccaaagccaaatccggatccaaaaccagatccagataacccgaaaccaaatccagatccaaaaccagaccctaataagccaaatccggatccaaaaccagatccagataaaccaaagccaaatccgaatccaaaaccagaccctaataagccaaatcctaacccgtcaccagatcccgatcaacctggggattccaatcattctggtggctcgaaaaatggggggacatggaacccaaatgcttcagatggatctaatcaaggtcaatggcaaccaaatgggaatcaaggaaactcacaaaatcctactggtaatgattttgtatcccaacgatttttagccttggcaaatggggcttacaagtataatccgtatattttaaatcaaattaataagttgggcaaagattatggagaagttactgatgaagacatttataatattattcgaaaacaaaatttcagcggaaatgcatatttaaatggattacaacagcaatcgaattactttagattccaatatttcaatccattgaaatcagaaaggtactatcgtaatttagatgaacaagtactcgcattaattactggtgaaattggatcaatgccagatttgaaaaagcccgaagataagccggattcaaaacaacgctcatttgaaccgcatgaaaaagacgattttacagtagttaaaaaacaagaagataataagaaaagtgcgtcaactgcatatagtaaaagttggctagcaattgtatgttctatgatggtggtattttcaatcatgctattcttatttgtaaagcgaaataaaaagaaaaataaaaacgaatcacagcgacgataa

SEQ ID NO: 406769 - DNA, 627 bp, Staphylococcus aureus
atgggcttatttaaaaaagataaaaaagcaatgacttttgacaatgcaatggaagaaagacgttcaatatataatttgaaagattcgatatcaattagcgatgacgaattagaatcaatgattgcacatgcagttaaacatgttccttcatcatttaattctcaatcaactagaattgttctcttgttaaatgacaacaataataaattttgggataacacaaaagcaattttaaaagaagtcatgggagagaatcgtgatttcgagccaactgaacaaaaaattgataacttcaaacattcatacggtacaattttgttttatgaagatcaagatgttgtaagtggtttacaagaacaaatgccaaactactatgataattttgcaatatggtcaactcaaacaaatgccatgcatcaatttgcaatttggactgcattagctactaaaggcataggtgcttcattacaacactataatccacttgttgatgagatgacttcaaatgaatttaatattcctaaaagttggaaacttattgctcaaatgccatttggtgatattcgtgaagctgctggcgaaaaaacatttaatccagtggaagatcgtttcgtaataaaaaaataa

SEQ ID NO: 406770 - DNA, 786 bp, Staphylococcus aureus
atgaaagtccaaatttatcaattaccgattgtttttggagatagttctaaaaatgaaactcaaataacgcaatggttcgaaaaaaatatgaatgctgaagtagatgtagtcgttttacctgaaatgtggaataatggctatgatttagagcatttaaatgaaaaagcagataataatctaggacaaagtttttcatttattaaacatttagctgaaaaatataaagtcgatatcgtagctgggtcagtttctaacattagaaacaatcaaatatttaatacagcttttagtgtgaataaaagtggccagctgattaatgaatacgacaaagttcatttagttcctatgttaagagagcatgaatttttaaccgctggcgaatacgtagctgaaccctttcaattgtctgacggtacttatgtgacccaacttatctgttatgatttacgttttccagaattattaagatatcctgctcgtagtggtgctaaaattgcattttatgtggcgcaatggcctatgtcacgtcttcaacattggcattcattactaaaggcacgtgcaattgaaaataatatgtttgtcattggaactaatagcactggattcgatggtaacacagaatatgctggtcattcgatagttataaacccaaatggagatttagttggagaattaaatgaatccgcagatattttgactgtagatttaaacttaaatgaagtagaacagcaacgcgaaaatatacctgtatttaaaagtattaaattagatttgtataaataa

SEQ ID NO: 406771 - DNA, 135 bp, Staphylococcus aureus
atgagttgtttaattttaagaatttttatcttaattaaggaaggagtgatttcaatggcacaagatatcatttcaacaatcggtgacttagtaaaatggattatcgacacagtgaacaaattcactaaaaaataa

SEQ ID NO: 406772 - DNA, 624 bp, Staphylococcus aureus
atgataaaagattgtactaaatcgtataatgacagtgaggagagtggtgtaaaattgaattattttgataataaaattgaccagtttgccacgtatcttcaaaagagaaataacttagatcatattcaatttttgcaagtacgattagggatgcaggtcttagctaaaaatataggtaaattaattgttatgtatactattgcctatattttaaacatttttctgtttacgttaattacgaatttaacattttatttaataagaagacatgcacatggtgcacatgcaccttcttctttttggtgttatgtagaaagtattatactatttatacttttacctttagtaatagtaaattttcatattaactttttaattatgattattttaacagttatttctttaggtgtaatctcagtatatgctcctgcagcaactaaaaagaagcccattcctgtgcaacttattaaacgaaaaaaatattatgcgattattgttagtttaacccttttcattatcacacttatcatcaaagagccatttgcccaattcattcaattaggcatcataatagaagctattacattattacctattttctttattaaggaggacttaaaatga

SEQ ID NO: 406773 - DNA, 141 bp, Staphylococcus aureus
atgaatacattatttaacttattttttgattttattactgggattttaaaaaacattggtaacatcgcagcttatagtacttgtgacttcataatggatgaagttgaagtaccaaaagaattaacacaattacacgaataa

SEQ ID NO: 406774 - DNA, 1293 bp, Staphylococcus aureus
gtggaattattaaatagttataattttgttttattcgtattaactcaaatgatattaatgtttacaataccagctataattagtggtattaagtacagtaaacttgattattttttcatcatagtaatttcgacattatcgttatttctatttaaaatgtttgatagcgcgtccttaatcatattaacttcatttattattataatgtattttgtcaaaatcaaatggtattctattttgttgattatgacttcgcagattattctatactgtgctaactacatgtatatagttatatatgcatatatcaccaaaatttctgatagtatatttgtaatattccctagcttttttgtagtttatgtgactattagtatactattctcatatataataaatagagttctcaaaaaaattagcacaccatatctaatactaaacaaaggatttttaatagttatttcgactatcttactgcttactttttcattatttttcttttattcacaaataaactcggatgaagctaaagtaataaggcagtattcttttatttttattggtatcactatatttttaagtatattaacatttgttatttctcaatttctccttaaagagatgaaatataaacgtaatcaagaagaaattgaaacctattatgaatatacattgaagattgaagctatcaacaacgaaatgcgcaagttccgtcatgattatgtcaatatcttaacgacactttcagaatacattcgagaagatgacatgcctggcctacgtgattatttcaataaaaatattgtacctatgaaagacaatttacaaatgaatgctataaaattaaatggtatcgagaatcttaaagtacgtgaaattaaaggcttaattactgcgaaaattttacgtgcacaagaaatgaatattccgattagtatcgaaatacccgatgaagtaagtagcattaacttgaatatgatcgatttaagtcgcagtattggtattattcttgataatgcaattgaggcatcaactgaaattgatgaccctatcattcgcgttgcatttattgaaagtgaaaattcagtaacgtttattgttatgaataaatgcgctgatgatataccacgcattcatgaattgttccaagaaagtttttctactaaaggtgaaggtcgtggtttaggtctatcaactttaaaagaaattgctgataatgcagacaatgtcttattagatacaattatcgaaaatggtttctttattcaaaaagttgaaattattaacaactag

SEQ ID NO: 406775 - DNA, 717 bp, Staphylococcus aureus
atgaaaattttcatttgcgaagacgatccaaaacaaagagaaaacatggttaccattattaaaaattatataatgatagaagaaaagcctatggaaattgccctcgcaactgataatccttatgaggtgcttgagcaagctaaaaatatgaatgacataggctgttactttttagatattcaactttcaactgatattaatggtatcaaattaggcagtgaaattcgtaagcatgacccagttggtaacattattttcgttacgagtcacagtgaacttacctatttaacatttgtctacaaagttgcagcgatggattttatttttaaagatgatccagctgaattaagaactcgaattatagactgtttagaaactgcacatacacgcttacaattgttgtctaaagataatagcgttgaaacgattgaattaaaacgtggcagtaattcagtgtatgttcaatatgatgatattatgttttttgaatcatcaacaaaatctcacagactcattgcccatttagataaccgtcaaattgaattttatggtaatttaaaagaactgagtcaattagatgatcgtttctttagatgtcataatagctttgtcgtcaatcgccataatattgaatctatagattcgaaagagcgaattgtctattttaaaaataaagaacactgctatgcatcggtgagaaacgttaaaaaaatataa

SEQ ID NO: 406776 - DNA, 960 bp, Staphylococcus aureus
atgagacgtctattttcaataggagaagcgttaattgattttattccaaatgttacaaatgcgaatttaaaagatgttcaaacatttacaaagcaaattggtggcgcgccatgcaatgtagcttgtacagttcaaaagttaggacaacaagcgtatatgattacacaattaggtaatgatgcatttggagatagcattattgaaacgatatcaagtattggtgtagatgtatcaaaagtgtatcgcacgaatgaagcaaacactgcgttagcttttgtgagtttgactgaagcgggcgagcgagatttttctttttatcgtaagccctctgctgatatgttatttgaaccaagttttgtgaatgatattgatgtgaatgaaaatgatgtagtacatttttgttctgttgatttggtcgatagtccgatgagagatgcacattatcaattgattaccaaaacattaaatgcaaatggtactgtcgtatttgatcctaatgtaagattgccattatgggataacgctgaagatttaagacaaactattcatacctttttgccattggcgcatattgtaaaagtttcagatgaagaattagaatttattacaggtattcatgatgaaaatgaagccattcaatcattatttacaggtaatgttactgtagtcatttatacgaagggagcagatggtgctgccgtatatttgaaaaatggtattaatcattatcatagtggctataaggtaaaacctgttgatacaactggggcaggggatgcatttattggtgcagttattagcaggattttagcaaccgatgtgttaaatttaactcagttatttgaaaatgaaggtgaggaaattttagcgtttagcaatcgcgttgctgcaatagtgacaacgaagtatggtgctattaatagtttgccaacattacaagaggttgaacaagcattttaa

SEQ ID NO: 406777 - DNA, 1485 bp, Staphylococcus aureus
atgaccgaatggactagagaagaacgttatcaacgaatcgaggacgttgatactgagtattttaaaacattaaaacaacaagttgatcaatcaaaatttcgtcaacaatttcatatacaaccagaaacaggcttattaaatgaccccaacggacttattttttataaagggaagtattatgtttcacatcaatggttcccattaggcgcagtacatggcttaaagtattggtataactacacgagtgatgacttaataaactttaaagctgaagggccaattttaaatccagatactaaatatgacagccatggtgtatatagcggtagcgcttttgaatataacgggcatttatattatatgtacacaggaaatcatcgagataatcattggcaacgacatgcgagtcagatgatcgcacgattgaaagaagacggttcagttgaaaagtttccaaagccagtaattagccaacaaccagaaggatatacgagtcattttagagatcctaaagtttttaaatatgatgagaaatattatgcaatcattggtgcacaaaataatgatcagcaaggtcgattattactttataatactgaagatataattaattggcattatttaggtgaaataaatacagagttggatgattttggatatatgtgggaatgcccagattactttaatgtagataatcaagatgtcatacttatttgtccacaaggtattgaaccaaaaggcgatcagttcaaaaatatttatcaaagtggttatatacttggaaagtttgatattgaaaagttaacatatgaacatgaaaattttgtcgagcttgataatggttttgatttctatgcacctcaaacatttttagatgaaaaaggccgacgagtactaattggatggatggggttaccggaaatcgaatatcctactgataatgaaggatgggcccattgcttaacaattcctcgtgtattaaatgtagaaaatggtcaacttaagcaacgtccatatccagcgttggaaaaattacgtcacaataaagagacagcattaggctacgcaaataaatttactcgaaaattacatccgtatgaaggtaaacagtatgaattaatcatagatattttggataatgatgctaccgaagtgtactttgaattacgtacatctaagacttcttcaacattaattgcttataacaagcgtgaaaataaaataacattagatcgcagcgacagtggtttattgccgacaaatgttgaaggtacgacgcgtagtacgatattagacacgccattaaagcaattacaaatttttgttgatacatctagtatagaaattttctgtaatgatggagaacgtgttttgacatctcgaattttcccgacagaagacgcactaggtattaaaacatcaacagaatcagggcaagtatatttacaatttactaaatatgatttaaaggatgaacataaatga

SEQ ID NO: 406778 - DNA, 951 bp, Staphylococcus aureus
atgaaaaatatatctgatattgccaaattggcaggcgtttcaaaaagtacagtatctagatttttaaataatggatctgtcagtaaaaaaacaagtgaaaaattaacaagaattatagcagaacatgactatcaaccgaatcaatttgctcaaagtttaagagcgagacaaacacaccttattggtgccattatacctagaatgaattcatatgcagtagatgaaacaatcaaaggattggcaaaacaatgccaaaaatatgaatcacaattaattttaaattacacaggtttaaatatcgaagcagaaatacaagcgcttgaaacattagcacgcagtaaagtagatggtattgttttaatggctacagacataacagagagacatattgaagtcattaataaaatgaatgtaccaatcgttattgttggtcaacaacatgaacaacttcatagtattgtgcatgatgattataaagcaggtcaaattataggcgaatggattggtcaacagggatatcaacaagttgaagtgtttagtgtaagtgaaaaagatattgcagttggtatacatagaaaacgtggtttacttgaccagttagctaaataccaaattaaacctaatatacatgaaacaaattttacttatgtggaagcacaaaaagatgttgcaaatgttttggaaaatgtggagcaagtagatgcggttgttggagcaactgatacgattgcattagctgcctataaatattattctgataaaaaagatgttatgaaaccacatcaaatatatggttttggtggtgacccaatgacacaattagtgtctccatcgataaaaacaattcattataattattttgaagctggccaatgcgcgatggaagagatacaacagatgcttaaaaagcaagatatgccatatagcgtcacagtagatgttaatatttag

SEQ ID NO: 406779 - DNA, 1251 bp, Staphylococcus aureus
atgaatcttaacgatacgatatttatgtttttgtgtacattattagtttggttaatgacaccaggattaagtttattttatggtgggttagttcaatctaaaaatgcgcttaatactgtcatgcaaagtatggcagcaattgtgcttgttacatttgtatggataacagttggttttacaattagttttgggaatgggaatttatggttcggaaattgggaatatacttttcttaatcatgtaggttttgcgactcaagaagatattagcccacatattcctttcgctttgtttatgttatttcaaatgatgttttgtacgattgcaatttctattttatctggttcaatcgctgagaaaatgaagtttattccttatttattattcgtagtaatatggactgctcttgtatacagtccagtagcacattgggtttggggcggcggttggattaacaaactcggtgtattagatttcgctggaggtacggttgttcatattacatcaggtgtttctggtttagtattagctattatgattggaaaaggaaacaaacattctgaatcaacaccacataatcttatcattacgttgattggcggtatattcgtgtggattggttggtatggatttaatgtaggtagtgcttttacatttgataatattgcgatgcttgcatttacaaatactgtcatttcagccagtgcaggtgctataggttggttaattttagaatatatttttaaaaagacgacaagtttacttggacttttactcggtgcattagcaggattagttgtcattactcctgcagcaggatatgtaacatatcttagtgcaacaataatggctttaataggaggtatctgttgttatattgtcattaattacatcaaggtaaaactaaaatatcatgatgcattagatgcatttggtattcatggtgttggtggtattattggtgctgttttaacagcagttttccaaagtaaaaaagccaatcctgacattgagaatggctttatttatactggtgacatacatattatacttgtacaaatattatgtgtaacagcagttgtaatttttagtatagtcatgacgtttattattgcgaaagtaattaaattaattacaccattatctgttacggaacaagaaacgaatataggattagacaagattgttcacggtgaacatgcttactttgaaggtgagctaaatagattcaataaacatattcgatattag

SEQ ID NO: 406780 - DNA, 225 bp, Staphylococcus aureus
atgatacacgaattaggtacagtaggaatggtatgtccatttccgttaattgaagcgcaaaagaaaatggcaacattgcaatctggagatgaattaaaaattgattttgattgcacgcaagcgacggaagccattccaaattgggctgcagaaaatggttatcctgtaacaaactatgaacaaattgataatgcttcatggacaattacaattcaaaaagtttaa

SEQ ID NO: 406781 - DNA, 1080 bp, Staphylococcus aureus
atgtggatgatttttagtggcttaattgtcgggggactcttaggttttgtcatgcaaagaacaagattttgtttaacaggtggctttcgagatatgtatgtgcaaaagaataataagatgttctatgcattattaatcgctattactattcaaagtataggattattgattttgacggcaacagatattttacaaattcctgcacatagttttccaatattgggaacaattataggttcttttatttttggaattggaatagtattggctggaggatgtgcaacaggtacttggtatcgcgctggtgaagggctaattggtagttggattgcattagtattatatgctgttactgcagcaatcactaaaacagggattttaaagccagtaatggataaaattaatcaaccaacgaatgtaaatagtgatatgtctcaaacaactggcattccgttttggggattagtcgttatattaactataatcaccatttttctagttgtaagaacactcaataataagaaagttcgagttgctgttccaaaactaaagcaacgttatacaggtattagatattaccttttcgaaaaacgataccatccatttattgcagcaattgtaattggacttatcgcactcttagcttggccaatgagtgcatcaactggaagaaatgacggtttaggtataacaacgccttcagcaaatttagtacactttttgattacaggtgaaactaaatttattgattggggtgtctttttagttctaggaattttcattggttcatatattgcagctagaggatcaagagaatttaaatggcgattgccagacaagattacaatacgaaacagtgccattggtggcatatgtatgggatttggtgcgtcagttgctggtggttgttctatcggtaacggtttggttgaaacggcaacgatgacttggcaaggatggattgcgctagcatcgatgatagttggtgtatggacaatgagtcattttatctttgttcgtccaatgaaaaaagtacaccaacaatctgcaaaggttaaacagcaaacgcaaatagtatag

SEQ ID NO: 406782 - DNA, 636 bp, Staphylococcus aureus
atgagtgaccaagttaaaattcctcgagcaactttaaaacgtttgccgttatattatagatttgtcagttcattaaaatctaaaggtatagatcgtgtaaattcaaaagcgattagcgatgcgttacaaattgactcggcaacaattcgtcgtgacttttcatattttggcgaattaggtaaaaaagggtacggatataatatagatagtttattggatttctttaaatctgaactaagcgagagtgacatgatcaaaatcgcaattgtcggagttgggaacctagggaaagctttgctcacatataacttttcaatacatgacgatatgacgattacagaagcgtttgacgtaaaagaagatgttattggccagaaaatagggaacgttattgttaaagataacgatgaattaataacaacattgaagaaggaagaaatagatgttgtgattctaactacaccagaaagagttgcacagaaagttgcagatgaactcgtccaagctggtgtgaaaggtattttaaacttcactcctggtagaattaatacgccttcagatgtgcaagtacatcaaattgacttaggtatagaattacagtcattattattctttatgaaaaattacagtgaataa

SEQ ID NO: 406783 - DNA, 1929 bp, Staphylococcus aureus
atgatacttttacaactcaatcatatatcaaaatcgttcgatggtgaagatatatttactgatgttgattttgaagtaaaaactggtgaacgaattggtatcgtaggaagaaatggcgccggtaaatcaacattgatgaaaattatagctggcgtagaaaactatgattctggaaatgtgtcaaaaattaaaaacttaaaactaggttatttaactcaacaaatgactttaaattctaatgcaacagtttttgaagaaatgtcaaaaccatttgaacatattaaacgaatggaaagcttaatcaaagaagaaacagattggttatcaaaacatgcaaatgattacgatagtgatacatataaaacacatatgtcccgttatgaatctttatcgaatcaatttgaacaattagaaggatatcaatatgaaagtaaaattaaaacagtactttacgggttaaattttagtgaagaagatttcaataaacctatcaatgattttagcggtggccaaaaaacacgtttatctttagctcaaatgctattaaacgaacctgatttattacttttagatgaacctactaaccacttagatttagaaacgacaaagtggcttgaagattatctacgttattttaaaggtgcaatcgtcatcatcagccatgatcgttactttttagataaaatagttactcaaatttatgatgtggctttaggtgatgtcaaacgctatgttggtaattacgaggaatttatacagcaacgggatttatattatcaaaaacgaatgcaagaatatgaaagtcaacaagcagaaataaaacgattagaaacttttgttgagaaaaatattacccgtgcttcaacaagtggaatggcaaaaagtagacgtaagattttagaaaaaatggaacgcattgataaaccaatgttagatgccaaaagtgcaaatattcaatttggctttgaccggaatacaggtaatgacgtcatgcatgtaaaaaatttagaaatcggttatcaaactgcaattaccaaacctatgagtatagaggtctctaaaggcgatcatatagcaatcattgggccaaatggtattggaaaatcgaccttaattaaaactattgctaatcaacaaaaagcgcttaatggcgatattactttcggcgcaaatttacaaattggttattatgatcaaaagcaagcagaatttaaatctagtaaaacgattttagattatgtgtgggatcaatatccgttaatgaatgaaaaagatattcgagcagttcttggacgtttcttatttgtacaagacgatgttaaaaagataattaatgatttatctggtggtgaaaaagcacgtttactactagcactacttatgttgcaacgtgacaatgtacttattttagatgaacctaccaaccacctcgatatagattcaaaagaaatgttagagcaagcactccaacattttgaaggaacaatactatttgtttcccatgatcgttactttattaaccaattagcaaacaaggtatttgatttaacaattgatggcggaaagatgtatttaggagattatcaatattacattgaaaaagttgaggaagcggaagcgttgaaagcgcaccaagaagaacagtcagttaacgtacaagcacataaaaagtctatggaacaatcgtcgtatcataaccaaaaagaacaaagacgtgaacaacgcaaacttgaacgacaaatatccgagtgtgaaaatgaaatagaaactttagagactactatcttacaaatagacgagcaattaacccaaccagaagtgtataacaatccacaaaaagcaaacgaattagctatccaaaaacaagatagcgaacaaaaattagaacacgctatgtctaaatgggaagaattacaacaaaaactataa

SEQ ID NO: 406784 - DNA, 1611 bp, Staphylococcus aureus
atgagcacaaatcaaacatttttaatatttgttatagcaattattctacttacatctgtaataggaattgttggacgatacatgagtcgtcaacgtctattaaaatctatggaaacattatggcaaacgatttctccattagaagcttttatcagaccgaactcacatttcgactatgagtataagctctacaaggaaaaatttgaatcacattcattagttgatgataaaacttggtccgacttaaatatgaatgcaatctttcataagatgaattataatttaacagctattggtgaaatgaagctatatgcctgtttacgtggaatgctttcaattacgaacaaatcattacttagtttatttaatgataatgctgaatttagaaaaaacgtaacatatcatttagctttgattggtaaaactgtttatccaacatttccagaccaaatcacaccggtaaaacgtcaaaatatattgtttctatgcccgtttttaccagttatctcatttgcagttatatttattaattcacaagttggtattttattatttcttatgagttgcctatttaatatcattttatcagcaactttaaagcgtacatatgaggatgacttaaaatctatcttttatgcatccaatgttttaaaacaaggctatactatctcaaaaattaaacatgctccacaacctgaagtcaattttaagcaatttagaacagcacgtcatttaacgagtgttttagctgaagttaatgatgaagatatcggagctatggtaattaaactagttaaacttattttcatgcttgattatgttttatttcattcaattcaaaaaagctatacaacacatatgaatgagcttaaaaattgtttcgattacatagctgaattagataatcattatgcattagcaatgtatcgtagaacgctagaatgttatactgaaccacaaattgatgattcaaatgatggcatagtattctctgagttaacacatccactcatagcagatgcagtagccaatgatttctcactatcacaaaatatactgttaactgggtctaatgcttcgggtaaatcaacatttatgaaatccatagcaataaacattattcttgcatcggctatacaaacagttaccgcaagcaaatttgtatatcaacctggaattgtgttcacgtcaatggcaaatgccgatgatgtgttatcaggcgatagttattttatggctgaattaaaatctattaagcgtattgttgaaattccagataatcaaaaaatatactgctttatagatgaaatttttaaaggtaccaacacaactgaacgaattgccgcttcagaatcagtactatcatttttacatgaaaaatctaactttagagttattgcagcaacacatgatattgagttagctgaactcttaaaacaacgttatgaaaattaccatttcaatgaggtaatagaaaataataacatacattttgattacaaaattaagcctggcaaagcaaatacacgtaatgccatcgaattattaaaaatcacttcatttccagcaaaaatatatgaacgagcaaaagataatgtcccgaaaatttag

SEQ ID NO: 406785 - DNA, 1026 bp, Staphylococcus aureus
atgactaaagatatattaatactagctgttgaaacaagttgtgatgaaacaagcgttagtgttataaaaaatggcagagatattttatcaaatacagttttaagtcagattgaaagtcataaacgatttggcggtgtcgttcccgaagtggcaagtagacatcacgttgaaggtataacagcaacaataaacgaggctctaggggatgccgatgtatcaatagaagatattgatgccatagcggttacagaaggccctggactaattggtgcgttactaataggtgttaatgcagccaaagcattggcatttgcttacgataagccacttattcctgttcatcatattgcaggacatatatatgctaatcacatagaagagccattaacattcccgctaattgcacttattgtttcaggtggacatactgaattagtttatatgaaggatcatttatcatttgaagtcattggtgaaacacgagatgacgcagtaggtgaggcttatgataaagtggcacgaacaattggtttaaattatccaggtggtccacaagttgatcggttggctgctgaaggtgaagatacttattcattccctcgtgtttggttggataaagatagttatgattttagttttagtgggttgaaaagtgccgtaatcaatcaacttcacaatcaacgacaaaaaaatattccaatcattgaagctaacgtagcaacgagctttcaaaacagtgttgtagaggtgctcacgtttaaagctattcaagcttgtaaagaatatggtgttcagcgattaattgttgctggtggcgtggcgagtaataaaggattacgtcaatctttagcggatcaatgcaaagtcaatgacattcaattaactatcccaagtcctaaattatgcacagataatgctgcaatgataggcgttgccggccactatttgtatcagcaaggtcgatttgctgatttagcattaaatgggcacagcaatatagatttagaagagtattctgcagaataa

SEQ ID NO: 406786 - DNA, 465 bp, Staphylococcus aureus
ttggatcaacagtcaaaagaacaattaaacattagagagatgactaaagaagatgtgccacaagtctttgatcttgagcgtcggagtttcaatgacagttcttggacaattgacgcattttatcatgaaatagagcaaaataactttgcgaaatattttgtcttagaatttgaacaacaaattattggttatttaggtttatggattgttatcgatcaagctcaaattacaacagttgcaatcgatgataattatagaggctatggtttaggtcaaatgcttttaaaatacggaataaactatgcaagtcacacttgtgatgtgatgagtttagaagtaagagttaataataaagtggcacaacatgtatatgaaaatttaggatttcaatatggtggtaaacgtaaaaattattatggtgaaggtgaggacgcaatggttatgtgggtgaatttaaatgactaa

SEQ ID NO: 406787 - DNA, 663 bp, Staphylococcus aureus
atgaattcgctgctcattgatacatcgaatcaaccattatcagtagcattgatgcaaaacgatgaagttttagctgaaataactacggattctaaacaaaatcattcagtgcaattaatgcctgcgattagtcagctatttgagcagagcaaaatagctaaacagcaattagatgcgattattgttgctgaaggtcctggttcatatactggcttacgtatcggtgttactgttgctaaaacattagcgtatgcgttagatgttaaattatatggtgtttcatcattaaaggcattggcagcaacaatcgatcatactgataaattattggttcctgtgtttgatgcaagacgacaagcagtttatacaggcatattccagtggcaaaatggtcaattagtgactattttagaagatcaatatatgtcgatagaggcattgcgagcttttttagaagatttaaaccaaccatttatttatattgggaaagatactgtaaaattacaagatgaattacaaggtgaagtgattgcgcagctaccaaatgcatcagtcatgtatcaattgctagataaaccttcagacgtacatacatttactcctaaataccataaattagctgaggcggaacgaaattggatcaacagtcaaaagaacaattaa

SEQ ID NO: 406788 - DNA, 495 bp, Staphylococcus aureus
atgaatgaaaagcataatataggagaatcaacattgataaagataaataatttagatgaaatgaatcaatttgctatatttttagttgagcaattgaaaagtggtgatttgattttacttaacggagatttaggagcaggtaaaacaacgttaacgcaatttataggaaaagctcttggtgtaagacgtacgattaattccccgacatttaacatcattaaatcatataggggtaaaaatttaaaattgcatcatatggattgttatcgcttagaagattctgatgaagatttaggatttgatgaatttttcgaagatcaggcaattactgttattgaatggagtcaatttataaaagatttacttccagcgacgcatttatctattaacatttcaacaatatctgaaaatacaagacaaattgagttgttcgcgcaaggagaacattatgaacaaattaaggaggcaattatccatgaattcgctgctcattga

SEQ ID NO: 406789 - DNA, 1689 bp, Staphylococcus aureus
atgcgaagcgacatgatcaaaaaaggagatcaccaagcaccagcaagaagtcttttacatgccacgggcgcgctaaaaagtccaactgatatgaacaaaccatttgtagctatttgtaactcttatattgatattgttcctggacatgttcacttgagagagcttgcagatatagctaaagaagcaattagagaagccggtgccattccatttgaattcaatacaattggtgttgatgatggaatagctatgggacatatcggaatgcgatattctctaccatcacgtgaaattattgcagatgcagctgaaactgtaattaacgctcattggtttgacggcgtattttacattcctaattgtgacaagattacacccggtatgattttagcagccatgaggacaaacgtaccagctatcttttgctctggtggaccaatgaaagctggcttatctgcacatggaaaagcattaacactttcatcaatgtttgaagcagtcggcgcatttaaagaaggatcgatttctaaagaagaatttttagatatggaacaaaatgcctgccctacttgtggttcatgtgctgggatgtttactgcaaattcaatgaactgtttgatggaagttttaggtctaacattaccatacaacggtactgcacttgcagtcagtgatcagcgacgagaaatgattcgccaagcagcttttaaattagttgaaaatattaaaaatgatttaaaaccacgtgatatcgttactcgcgaagcaattgatgatgcatttgcacttgatatggctatgggtggttcaacaaacacggtactgcatacgttagccattgccaatgaagctggtattgattatgacttagagcgcattaatgctattgccaaacgcacgccatatttatcaaaaatagcacctagttcatcgtattcaatgcatgatgtgcatgaagctggtggcgtcccagcaattattaatgaattgatgaagaaagatggcacgttacacccagatagaatcacagttactggcaaaacgttacgtgaaaataacgaaggcaaagaaattaagaactttgatgtcattcaccctcttgatgcaccatatgatgcacaaggcggtttatctatcttatttggtaatatcgcccctaaaggcgcagttattaaagttggcggcgttgatccatctatcaaaacatttactgggaaagcaatttgtttcaattcgcatgatgaagctgttgaagcaatagacaatcgtaccgttcgtgcaggccacgtcgttgtcattagatatgaaggacctaaaggtggaccaggtatgcctgaaatgttagcacctacttcctctattgttggtcgcggcttaggtaaagatgttgcattaattactgatgggcgtttttccggtgccacaagaggtattgcagttggtcatatttcccctgaagctgcatctggtggaccaattgccttaattgaagatggtgatgagattactattgatttaacaaatcgtacattaaacgtaaaccagcctgaagatgttctagcgcgtcgccgagaatctttaacaccatttaaagcgaaagtaaaaacaggttatctagctcgttatactgccctagtaactagcgcaaatacaggtggcgtcatgcaagtccctgagaatttaatttaa

SEQ ID NO: 406790 - DNA, 1770 bp, Staphylococcus aureus
atgtctaaaactcaacatgaagtaaaccaaaatattgaccctttaaaaatggctgaatcacttgaacctgaacaactaaatgaaaaaactttaaatgatatgcgttcaggatcagaagtgctagtagaagctctacttaaagaaaatgtggattatttattcggttatcctggtggtgccgtactacctttatatgacacgttttatgatggtaaaatcaaacatattttagcaagacacgaacaaggtgctgttcatgctgcagaaggttatgcacgtgtatctggtaaaactggcgtcgttgtagttacaagcggtccaggtgcaactaatgtaatgacaggtattacggatgcacattgcgactctttacctctagttgtattcactggacaagttgctacaccaggcattggtaaagatgcattccaagaagcggatattctatctatgacttcaccaattacaaaacaaaattatcaagtgaaacgtgttgaagatatccctaaaatcgtacacgaagctttccatgtagctaattctggacgcaaaggtcctgtagtgattgattttccaaaagatatgggtgttttagctacaaatgtggatttatgcgacgaaatcaatattccaggttatgaagttgttacagaaccagaaaataaagacattgacactttcatctcacttttaaaagaagcgaaaaagcctgtcgtattagccggcgcaggtattaatcaatcaaaatcaaatcaattattaacacagtttgttaataaacatcaaatcccaacagttactactttactaggtctaggtgctgtaccttatgaggatacactatttttaggtatgggaggaatgcatggttcttatgctagtaacatggcattaactgagtgtgatttactcattaatttaggtagccgcttcgatgatagattagcaagcaaacctgatgcctttgcacctaacgccaaaattgtacatgtagatattgatccttcagaaatcaataaagttattcatgtagatttaggtattattgcagactgtaaaagatttttagaatgtttaaatgataaaaatgttgagactatagaacacagtgactgggttaaacattgtcaaaataataagcagaaacacccatttaaacttggtgaagaagatcaagtattttgtaagccacaacaaacaatcgaatatatcggcaaaattacaaatggtgaagcaattgttactacagacgtgggacaacatcaaatgtgggcagctcaattttatccatttaaaaatcacggacaatgggttacaagcggtggtttaggaacaatgggattcggtattccttcgtcaattggtgccaaattagctaatcctgataaaacagtcgtatgtttcgtcggtgacggtggtttccaaatgacaaaccaagaaatggcacttttacccgaatatggtttagatgtcaaaatcgtactaatcaataatggaacattaggtatggttaaacaatggcaagataagttctttaatcaacgcttctcacactcagtatttaatggtcaacctgattttatgaaaatggcagaagcatatggcgtcaaaggtttcttaatcgataagccagaacaactggaagaacaattagatgcagcgtttgcttatcaaggaccagctttaattgaggttcgtatttcccctactgaagctgtaaccccaatggttccgagtggcaaatcaaatcatgaaatggagggcttataa

SEQ ID NO: 406791 - DNA, 255 bp, Staphylococcus aureus
atgacaagaattcttaaattacaagttgcggatcaagtcagcacgctaaatcgaattacaagtgcttttgttcgcctacaatataatatcgatacattacatgttacacattctgaacaacctgggatttctaacatggaaattcaagtcgatattcaagatgatacatcacttcatatattaattaaaaaattaaaacaacaaattaatgttttaacggttgaatgctacgaccttgttgataacgaagcttaa

SEQ ID NO: 406792 - DNA, 1005 bp, Staphylococcus aureus
atgacaacagtttattatgatcaagatgtaaaaacggacgctttacaaggcaaaaaaattgcagtagtaggttatggatcacaaggtcacgcgcatgcacaaaacttaaaagacaatggatatgatgtagtcatcggcattcgcccaggtcgttcttttgacaaagctaaagaagatggatttgatgtgttccctgttgcagaagcagttaagcaagctgatgtaattatggtgctattacctgatgaaattcaaggtgatgtatacaaaaacgaaattgaaccaaatttagaaaaacataatgcgcttgcatttgctcatggctttaacattcattttggtgttattcaaccaccagctgatgttgatgtatttttagtagctcctaaaggaccgggtcatttagttagacgtacatttgttgaaggttctgctgtaccatcactatttggtattcaacaaggcgcttcaggtcaagcacgtaatattgctttaagttatgcaaaaggtattggtgcaactcgtgcaggtgttattgaaacaacatttaaagaagaaactgagacagatttatttggtgaacaagcagtactttgcggtggtgtatcgaaattaattcaaagtggctttgaaacattagtagaagcgggttatcaaccagaattagcttattttgaagtattacatgaaatgaaattaatcgttgatttgatgtatgaaggcggtatggaaaatgtacgttactcaatttcaaatactgctgaatttggtgactatgtttcaggaccacgtgttatcacaccagatgttaaagaaaatatgaaagctgtattaactgatatccaaaatggtaacttcagtaatcgctttatcgaagacaataaaaatggattcaaagaattttataaattacgcgaagaacaacatggtcatcaaattgaaaaagttggtcgtgaattacgcgaaatgatgccttttattaaatctaaaagcattgaaaaataa

SEQ ID NO: 406793 - DNA, 1530 bp, Staphylococcus aureus
atgagtagtcatattcaaatttttgatacgacactaagagacggtgaacaaacaccaggagtgaattttacttttgatgaacgcttgcgtattgcattgcaattagaaaaatggggtgtagatgttattgaagctggatttcctgcttcaagtacaggtagctttaaatctgttcaagcaattgcacaaacattaacaacaacggctgtatgtggtttagctagatgtaaaaaatctgacatcgatgctgtatatgaagcaacaaaagatgcagcgaagccggtcgtgcatgtttttatagcaacatcacctattcatcttgaacataaacttaaaatgtctcaagaagacgttttagcatctattaaagaacatgtcacatacgcgaaacaattatttgacgttgttcaattttcacctgaagatgcaacgcgtactgaattaccattcttagtgaaatgtgtacaaactgccgttgacgctggagctacagttattaatattcctgatacagtcggctacagttaccatgatgaatatgcacatattttcaaaaccttaacagaatctgtaacatcttcaaatgaaattatttatagtgctcattgccatgacgatttaggaatggctgtttcaaatagtttagctgcaattgaaggcggtgcgagacgaattgaaggcactgtaaatggtattggtgaacgagcaggtaatgcagcacttgaagaagtcgcgcttgcactatacgttcgaaatgatcattatggtgctcaaactgctcttaatctcgaagaaactaaaaaaacatcggatttaatttcaagatatgcaggtattcgagtgcctagaaataaagcaattgttggccaaaatgcatttagtcatgaatcaggtattcaccaagatggcgtattaaaacatcgtgaaacatatgaaattatgacacctcaacttgttggtgtaagcacgactgaacttccattaggaaaattatctggtaaacacgccttctcagagaagttaaaagcattaggttatgacattgataaagaagcgcaaatagatttatttaaacaattcaaggccattgcggacaaaaagaaatctgtttcagatagagatattcatgcgattattcaaggttctgagcatgagcatcaagcactttataaattggaaacactgcaactacaatatgtctctagcagccttcaaagtgctgttgttgttgttaaagataaagagggtcatatttaccaggattcaagtattggtactggttcaatcgtagcaatttacaatgcagttgatcgtattttccagaaagaaacagaattaattgattatcgtattaattctgtcactgaaggtactgatgcccaagcagaagtacatgtaaatttattgattgaaggtaagactgtcaatggctttggtattgatcatgatattttacaagcctcttgtaaagcatacgtagaagcacatgctaaatttgcagctgaaaatgttgagaaggtaggtaattaa

SEQ ID NO: 406794 - DNA, 1047 bp, Staphylococcus aureus
atgacttataacattgttgccctacctggtgatggaatcggtccagaaattttgaacggatctctatcattgcttgaaattataagtaataaatataactttaattatcaaatagagcaccacgaatttggtggtgcctctattgatacattcggcgagcctttaactgagaaaaccttaaatgcgtgtaaaagagcagatgctattttactgggtgcaatcggtggacctaaatggacagatcctaacaatcgaccagaacaaggattattaaaattgcgtaaatccttaaatttatttgtaaatatacgccccactaccgttgtcaaaggcgctagttctttatcacctttaaaggaagaacgcgttgaaggcacagatttagttatagtccgtgaattgacaagtggtatttattttggagaacctagacattttaataatcacgaggccttagattctcttacttatacaagagaagaaatagaacgcattgttcacgtagcatttaaattggccgcttcaagacgaggaaaactaacatcagttgataaagaaaatgtattagcttctagtaaattgtggcgcaaagtcgtaaatgaagtaagtcaattatatccagaagtaacagtaaatcacttacttgttgatgcttgtagtatgcatttaatcacaaatccaaaacaatttgacgtcatcgtatgtgaaaacttatttggcgatattttaagtgatgaagcttcagtgattcctggttcacttggtttatcaccttctgctagttttagtaacgatggtccaagattgtatgagcctattcatggatcagcaccagatattgcaggtaaaaacgttgccaatccatttggaatgattctatctttagcgatgtgtttacgtgaaagcttaaatcaaccagatgctgcagatgaattagaacaacatatttatagcatgattgaacatgggcaaacgacagcagatttaggcggcaaattgaatactactgatattttcgaaattctatctcaaaaattgaatcactaa

SEQ ID NO: 406795 - DNA, 1371 bp, Staphylococcus aureus
atgggtcaaacattatttgacaaggtgtggaacagacatgtgttatacgggaaattgggcgaaccgcaactattatacattgatttacaccttatacatgaagttacttctcctcaagcatttgaaggacttaggcttcaaaacagaaaattaagacgcccagatttaacatttgcaacactcgatcacaatgttcctactattgatatattcaatattaaagatgaaattgcaaacaaacaaatcacaacattacaaaaaaacgccatagattttggggtgcatatttttgatatgggttctgatgaacaaggtattgttcacatggtaggacctgagacaggacttacacagcctggcaagacaatcgtttgtggtgactctcacacagcaacacatggagcatttggtgctattgcatttggaattggaacaagtgaagttgaacatgttttcgcaactcaaacgctatggcaaacaaaacccaaaaacttaaaaatcgatattaatggtaccttaccaacaggcgtctatgctaaggacattattctgcatttaattaaaacgtatggtgttgactttggtacaggctatgctttggaatttactggcgaaacaattaaaaacctttcaatggatggtcgaatgactatttgtaacatggctatcgaaggtggtgccaaatacggcataatccaacctgatgatataacatttgaatatgttaaagggagaccatttgccgataacttcgctaaatcagttgataagtggcgtgagctatattctgatgacgacgcgatatttgatcgtgtaattgaacttgatgtttcaacattagaaccacaagtgacatggggaactaatcctgaaatgggtgttaatttcagtgaaccattccctgaaatcaatgatatcaacgatcaacgtgcgtatgattatatggggttagaaccaggtcaaaaagctgaagacatcgacttagggtatgtttttctcggttcatgtacaaatgctagactatcagatttgattgaagctagtcatattgttaaaggaaataaagttcatccaaatattacagctattgtcgtaccaggttctcgtacagtaaaaaaagaagcagaaaaattaggtctagatactatctttaaaaatgcaggatttgaatggcgtgaaccaggatgttcaatgtgtttaggcatgaatcctgaccaagtacctgagggcgtacattgtgcatctacaagtaatcgaaactttgaaggacgacaaggcaaaggtgcaagaacacatttagtatcccctgctatggcagcagcagcagctattcatggtaaatttgtggacgtaagaaaggtggttgtttaa

SEQ ID NO: 406796 - DNA, 573 bp, Staphylococcus aureus
atggcagcaatcaaacctattacaacatataaaggtaaaatagtccctctcttcaacgacaatatcgatacagaccaaatcattcctaaggtacacttaaagcgtatttcaaaaagtggctttggtccatttgcttttgatgaatggcggtacttacctgatggttcagataatcctgatttcaatcctaacaaaccacaatataaaggggcttctattttaattactggagataattttggatgtggttcaagtcgtgaacatgctgcttgggctcttaaggactatggttttcatattattattgcaggaagtttcagtgacatattttatatgaattgcactaaaaatgcgatgttgcctatcgttttagaaaaaagtgcccgtgaacatcttgcacaatatgttgaaattgaggtcgatttaccaaatcaaactgtgtcatcaccagacaagcgtttccattttgaaattgatgaaacttggaagaataaacttgtaaatggcttagatgacattgcaatcaccctacaatatgaatcattaatagaaaaatatgaaaaatcactttaa

SEQ ID NO: 406797 - DNA, 1269 bp, Staphylococcus aureus
atgacagtcaaaacaacagtttctacgaaagatatcgatgaggcatttttaagacttaaagatattgtcaaagaaacacctttacaattagaccattacttatctcaaaagtatgattgtaaagtctatttaaaacgagaagatttacaatgggtacgttcttttaaattaagaggtgcttacaacgctatttctgttttatcagatgaagctaaaagtaaaggtattacatgtgcaagtgcaggtaatcatgctcaaggtgttgcctatacagctaaaaaacttaatttaaacgctgttatctttatgccagtcactacacctttacaaaaggtaaatcaagtaaagttctttggaaatagtaacgttgaagttgtactcactggtgatacatttgatcactgtttagctgaagctttaacttatacaagtgaacatcaaatgaactttatagatccattcaataatgttcatacaatttctggacaaggtacgcttgctaaagaaatgctagaacaagcaaagtctgacaatgttaactttgattatctatttgccgcaattggtggtggcggtttaatttcaggtattagtacttactttaaaacctattcacctaccacgaaaattataggtgttgaaccttcaggtgcaagtagtatgtatgaatctgttgtggtaaataatcaggtagtcacattgcctaatatcgataaatttgtggacggtgcatctgtagctagagttggcgatattacatttgaaattgcaaaagaaaatgtagatgattacgttcaagtagatgaaggtgcagtttgttctacgattttagatatgtattcaaaacaagcaattgtagcagaacctgctggcgcattaagtgtaagtgcgcttgaaaactataaagatcatattaaaggtaaaacagtggtttgtgtcattagtggtggtaataatgatattaatcgaatgaaagaaattgaagaacgttcattactatacgaagaaatgaagcattactttatcttaaatttccctcaacgtccaggtgcattgagagaatttgtaaatgacgtattaggacctcaagacgatattactaaatttgaatacttaaaaaaatcttctcaaaatacaggtactgtcattattggtattcaacttaaagatcatgatgatttaatacaactcaaacaacgtgtaaatcatttcgatccttccaatatttatattaatgaaaataagatgttatattcattgttaatttaa

SEQ ID NO: 406798 - DNA, 1212 bp, Staphylococcus aureus
atgagtaatacacaaaagaaaaatgtgccagaattgaggttcccagggtttgaaggcgaatgggaagagaagcagttaggggatcttacagatagagtaattaggaaaaataaaaacttagaatcgaaaaagcctttaacaatatccggacagttaggtttaattgatcaaacagaatattttagtaaatcagtttcgtcgaaaaatctagaaaattatacactaataaagaatggagaattcgcgtataacaaaagttattctaatggatacccattaggggctattaaaagattaactagatatgatagtggtgtattgtcctctttgtatatttgtttttctattaaaagtgaaatgtctaaagacttcatggaagcatattttgattcgacacactggtatagagaagtttctggaattgcagttgagggtgcaagaaatcacggattattaaatgtttctgtgaatgatttttttactattctaattaaatatccaagtttagaagaacagcaaaaaataggcaagttcttcagcaaactcgaccgacaaattgaattagaagaacaaaagcttgaattacttcaacaacagaaaaaaggctatatgcagaaaattttctcacaggaactgcgattcaaagatgagaatggtgaagattatccagattgggaaaatagcaaaatagaaaaatatttaaaagagagaaacgaacgttctgacaaagggcaaatgctttcagtaactataaatagtggcattataaaatttagtgaattggatagaaaagataattcaagtaaagataaaagtaattataaagtagttaggaaaaatgatattgcatataattctatgagaatgtggcaaggggctagtggtaaatcaaattataatgggattgttagccctgcatatactgtgctttatccaacacaaaatactagctcattatttattggatataagtttaaaacacatagaatgattcataaatttaaaattaattcacaaggattaacatcagatacatggaacttaaaatataaacaattaaaaaatataaatatagatatacctgtattggaggaacaagaaaagataggtgatttctttaaaaaaatggatatattgataagtaaacagaaaatgaaaattgaaatattagaaaaagagaaacaatcctttttacaaaaaatgttcttataa

SEQ ID NO: 406799 - DNA, 678 bp, Staphylococcus aureus
atgaaattaaaaaatattgctaaagcaagtttagcactagggattttaacaacagggatgattacaactactgctcagccagtaaaagcaagtacattagaggttagatcacaagctactcaagacttgagtgaatattataatagaccgttctttgagtatacaaatcagtcaggatataaagaggaaggaaaagtgacgtttactcctaattatcaacttatagatgtaactttaactgggaatgaaaagcaaaattttggtgaagatatttctaatgtagatatatttgttgtaagagaaaattctgatagatctggtaatacagcttcaattggtggtattactaaaacaaacggttcaaattatattgataaagtaaaagatgtaaatttaataattactaaaaacatcgatagtgttacatcaacgtcaacatcatctacatatacaattaataaagaagaaatttcattaaaagaacttgattttaaattaagaaagcatttaattgataaacataacctttataagacagaacctaaagacagtaaaattcgaattactatgaaagatggtgggttctacacatttgaattgaataaaaagttacaaacacaccgtatgggtgatgttattgatggcagaaatatagaaaaaattgaagtgaatttataa

SEQ ID NO: 406800 - DNA, 1509 bp, Staphylococcus aureus
atgagggaaaattttaagttacgtaaaatgaaagtcggtttagtatctgttgcaattacaatgttatatattatgacaaacggacaagcagaagcatctgaaaatcaaaacgctttaatctctaatataaatgtagacaatcaggaaaaacagaataatgtaaatcaagctgttcagcctcaaaataatactaatgaaacatcaaaagtaccggctaattttgtcaaattgaatgatattaaaccaggtgatacttctatacaaggaacaactttaccaaatcaatttatactattaactattgataaaaaagatgtgagctcagttgaagattctgacagcagctttgttatgtctgataaagatgggaattttaagtatgacttaaatggtcgcaaaattgttcataatcaagaaattgaagtgtcttcatcagatccctatttaggtgacgatgaagaagatgaagaagtagaagaaacttcaactgaagaagttggtgctgaggaagaaagtacagaagctaaagctacatatacaacaccgcgatatgaaaaagcgtatgaaataccgaaagaacagctaaaagaaaaagatggacatcaccaagtttttatcgaacctattactgaaggttcaggtattattaaaggccatacctctgtaaaaggtaaagttgctctatctattaataataaatttattaactttgagacaaatgctaatggtggtccaaataaagaagaagcgaaatctggatcagaaggaatctggatgcctattgatgacaaaggatactttaattttgacttcaaaacgaaacgtttcgatgatttagagttaaagaaaaatgatgagatctcattaacatttgcacctgatgacgaagatgaggcattgaagtcattaattttcaaaactaaggtaacgagtttagaagatattgataaagcagaaactaaatatgaccatactaaagtggaaaaagtaaaagtattgaaagatgttaaagaagatttacatgtagatgaaatttacggaagcttatatcatacagaaaaaggtaaaggtattcttgataaagaaggtactaaagtaattaaaggtaagactaaattcgcaaatgcagttgtgaaggtagactctgaactaggtgaaggtcaagaattccctgatttgcaagtcgatgaaaaaggtgaattcagctttgatgtagatcatgctggatttagattacaaaatggagaaacactaaacttcacagtagttgatcctattacaggtgaattattaagtggaaattttgtttctaaaaacatagatatttatgaatctcctgaagaaaaagcagatcgtgagtttgatgaaagaatggaaaacacacctgcatatcataaattacatggtgataaaattgtcggctacgatactaacggattcccgattacctggttttatccattaggtgaaaagaaagttgaacgtaaggcaccaaaattagaaaaataa

SEQ ID NO: 406801 - DNA, 309 bp, Staphylococcus aureus
atgaaatttaaaaaggttttagtagctacggcaatggtaggtgttttagcaactggcgttgttggatatggtaatcaagcagatgcgaaagtttattctcaaaatggactcgtactacatgatgatgcaaacttcttagaacatgaattaagttatattgatgtgttattagataagaatgctgaccaagctacaaaagacaacttaagatcatacttcgccgataaaggactacattcaatcaaagacattatcaacaaagctaaacaagacggctttgatgtttcaaaatatgaacacgtaaaataa

SEQ ID NO: 406802 - DNA, 804 bp, Staphylococcus aureus
atgaagtataaaacagagagacgtgaagcgatgggatatttaaaaaggtttgcattgtacataagcgttatgattttaatatttgcgatagcaggttgtggcaaaggtaatgaaacaaaagaagattcaaaggaagaacaaatcaaaaagagctttgcgaaaacattagatatgtatccaattaagaatctcgaggacttatatgacaaagaaggatatcgagatagcgaatttaaaaaaggtgacaaagggatgtggacgatatatacagatttcgccaaaagtaataaaccgggtgaattggatgatgaaggtatggttttaaatctggataggaatactagaaccgctaaaggccattattttgttactacattttaccggaatggtaaactaccagatgaaaagaattataaaattgaaatgaaaaataataagattattttattagatgaagtaaaagatgataagctcaagcagaaaatagaaaactttaaatttttcggtcaatatgcaaatcttaaagaattgagaaaatataataatggtgatgtttcaattaatgaaaatgttcctagttatgatgttgaatacaaaatgagcaataaagatgaaatagttaaggaattaagaagtcgttataatatttcgactgaaaaatcacctatattaaaaatgcatattgatggggacctgaaaggcagttctgtaggttatagaaagttagaaattgacttttcaaaacgtgaaaacagcaaattatcagtcattgaatttttaagttataaaccagcgaaaaaatag

SEQ ID NO: 406803 - DNA, 801 bp, Staphylococcus aureus
atgcgatatctaaaaaagcttgcatggttcataagtgttattattttgggcatttttataataggttgtgatagttcaagcgatactggggaaaaagcaaaagaagattcaaaggaagaacaaatcaaaaagagctttgcgaaaacattagatatgtatccaattaagaatctcgaggacttatatgacaaagaaggatatcgagatagcgaatttaaaaaaggtgacaaagggatgtggacgatatatacagatttcgccaaaagtaataaaccgggtgtattagataatgaaggtatgattttaaatttggatagaaatacacgtacggccaagggatattattttgtagatactatatatgacaatcatgaaaactcttatagtaaaaattatagagttgagatgaaaaacaataaaattattttattagacaaggtggaagatcaaaaacttaaagaaagaatagaaaactttaaatttttcggacaatatgccgatttcaagagtttgaaaagttacaacaatggcgacgtttcaattaatagtaatgttccaagttatgacgcgaaatttaaaatgagtaataaagatgaaaatgttaagcaattaagaagtcgttataacattcctactgaaaaagctccaatattaaaaatgcatattgatggggacttaaaaggcagttccgttggatataaaaagttagaaatagacttttcaaaagaagaaaatagcgaattatcagtagtcgattcattaaattttcagcctgccaaaaaaaataaagatgatgaatga

SEQ ID NO: 406804 - DNA, 471 bp, Staphylococcus aureus
gtggtcaataaaaagaattggaatgtacacaaatgttataattttgagcgttttataataggttgtgatagttcaagcaataatgcagaaaatcaaagagaagactcaaaagaagaacaaatcaaaaagagctttgcgaaaacgttagatatgtaccctattaagaatctcgaggatttatatgacaaagaaggatatcgtgatggtgagtttgaaaaaggcgataaggggacgtgggtattgtattcagctatggtatcacaaccaaaaggcgagagtttaaaatcacgaggaatgatattaaagttagatagaaataagagaactgctaaaggaagttatattattagagaattgaaagaagataaaaatcatgatgttcaaaaaaatgaaaagaaatatccagtgaaattggtgaataataggatagttttgataaaagatgttaaagacaaaaagttaaaaaaatga

SEQ ID NO: 406805 - DNA, 804 bp, Staphylococcus aureus
atgatgggttatttaaaaagacttgtattgtatatagttattatggttatgagtgtttttataataggttgtgataaatcaagcgatactgcagaaaaatcaaaagaagactcgaaagaaacacaaatcaaaaagagttttgcgaaaacgttagatatgtattcaattaagaatctcgaggaactatatgacaaagaaggctatcgagatggcgaatttgaaaaaggtgacaaagggatgtggacgatatatacagatttcgccaaaagtaataaaccgggtgaactaagtaatgaaggcatggtcttgtacttagatagaaacacacgcacagctaaggggtactactttgtcaggacgttttatcgcaaggataaattacctgatagaaaaaattataaagttgaaatgaaaaataataaaatcattttattagataaagtagaagataaaaagcttaaacaaaaaatagaaaattttaaatttttcagtcaatatgcaaatcttaaagaattgaaaaactacagcaatggtgatgtctcaattaatgagaatgttccaagttatgacgtgaaatataaaatgagtaataaagatgaaaatgttaagcaattaagaagtcgttataatattcctactgataaatcaccggtattaaaaatgcatattgatggtaatttgaaaggaagttccgttggagataggaagttagaaattgatttttcgaaacgtgaaaatagccatttatcagtaatagattctttggattaccagccagcgaaaactaataaagatgatgaataa

SEQ ID NO: 406806 - DNA, 771 bp, Staphylococcus aureus
atgaagtctataaaaaggattggattgtgcataagtctgttgattttaagcatttttgtaacatcttgcgatggtgataataagatcactggagattcaaaagaaacacaaatcaaaaagagcttttcgaaaacgttagatatgtatccaattaagaatctcgaggacttatatgataaagaaggataccgtgatggcgaatttaaaaagggcgacaaaggaatgtggactatatatacagattttgctaaaggcaataaatcagacgaattggatgatgaaggtatggttttaaatctggatagaaatactcgaacggctaagggatattattttgttaagaaattttatgaaaaggataaattacctgatagaaaaaattataaagttgaaatgaaaaataataaaattatcttattagacaaggtagaagatccaaatctaaaaaagagaatagaaaactttaaatttttcggacaatatgcaaattttaaggatttggaaaattacaacaatggcgacgtgtcaataaattggaatgttccaagttatgacgtggaatataaaatgagcaataaagatgaaaatgttaaacaattaagaagtcgttataacattcctactgataaagctccaatgttaaaaatgcatattgacggggacttaaaaggtagttctgttggatataaaaggttagaaatagatttttcaaaagaaggtagggatatttcagtcattgattatttaagttataagccagcgaaaaaatag

SEQ ID NO: 406807 - DNA, 792 bp, Staphylococcus aureus
atggaatatctaaaaaggcttgcattgttaataagtgttattattttgaccatttttataatgggttgtgatagtcaaagcgatactgcagaaaatccaaaagaaggttcaaaagaagcacaaattaaaaagagtttttcgaaaacgttagatatgtatccaattaagaatctcgaggatttttatggcaaagaaggatatcgagatggcgaatttaaaaaagatgataaaggtacttggctaattagatccgaaatagttaaacagccaaagggcaaagtgatgaaaacaagaggtatgcaattatatattaatagaaataccgaaacagccaaaggtttctttgttttgaaagaaataagtgaaaataataatcgtgtaaataaagataaggaggaaaaatacgaagtgaaaatggtaggaaataaaattattcctactgaacaaattaatgacgagaaaataaaaaaagaaattgaaaacttcaagttttttgtgcaatatggaaactttaaaaatttcgaaaaatacaacaatggtgagttttcatataatcctgaagcaccaatttattcggctaaatatcaattacacaacgatgattacaatgtaaggcaactacgtaaaagatatgacatttcaacaaaagaaacaccgaagttacttttgaaaggtggaggagatttaaaaaattcctcagttggtcaaaacgatattgaatttacttttgttgaaagaaaaggtgagaatatttattttaacgatagtgttgaattcataccaagtaagtaa

SEQ ID NO: 406808 - DNA, 777 bp, Staphylococcus aureus
atgaagtgttttcagaaattatacatatttatattaattttaatcgtattaatggcaggatgcgaaagtaataagatcactggagattcgaaagaaacacagatcaaaaagagctttgcgaaaacattagatgtataccctacgaaaaatctagaagatttttatgacaaagaaggatatcgagatggcgaatttaaaaagggtgacaaagggaagtgggttattagatctgaaatgacaacagaactgaaaaatgaaaatatggtatctaaaggtatggtcatacgtttaaatagaaatagtagaacatgcactggtgaatattttgtcaggatagttaaagaagacagtgagggcaaggtatatagtgatgaacgaaaatatccagtgaaaatggaaaataataaaatcattacattaaaaccaatcgatgatgaaaaagtaaaaaaagaaattgaagaatttaaattcttcgtacaatacgggaatttcaaagaattggaaaactataaagacggagaagtgacatataacccagaagcaccaatatactctgcacaatatcaattgaaaaatagtgattataatgtagaacaactacgtaagcgatataatataacgacgaaaaaagcgcctaaattattattgaagggttcaggtaatttaaaaggctcatcagttggatataaaaatattgaatttacctttgttgaaaataaggaagaaaatatttacttcacagatagtattaatttcaacccaagtgaggataaataa

SEQ ID NO: 406809 - DNA, 816 bp, Staphylococcus aureus
atgatggggtatataaaaagaatggctttatacatgagtgtatttcttttaatcatttttattgttggatgtcgaaatatgaaagatgaacagaaaaaagaagaacaaacaaataaaacagattcaaaagaagaacaaatcaaaaagagttttgagaaaacattagatatgtatccaattaagaatctcgaggagttatacgacaaagaaggataccgagatggcgaatttaaaaagggtgataaagggatgtggacgatatatacagatttcgccaaaagtaataaacaaggtggattgagtaatgaaggtatggtcttatacttagatagaaatacacggactgcaaagggacattattttgttaagacattctataataagggcaaattcccagatagaaaaaattataaagttgaaatgaaaaataataaaattatcttattagataaagtagaagatacaaatctaaaaaagagaatagaaaactttaaattttttggacaatatgcaaaccttaaagaattgaaaaactacaacaatggtgatgtctcaattaatgagaatgttccaagttatgacgcaaaatttaaaatgagcaataaagatgaaaatgttaagcaattaagaagtcgttataatattcctactgataaagcaccggtattaaaaatgcatattgatggtaatttgaaaggaagttctgtgggttataaaaagttggaaattgacttttcaaaaggtggaaaaagcgatttgtcagtaatagattctttgaatttccagccggcgaaggtagatgaagatgatgaatga

SEQ ID NO: 406810 - DNA, 762 bp, Staphylococcus aureus
ttgtgcattagtttgttgattttaatcatctttgttacatcttgtgatggtgataataagatcattggagattcaaaagaagaacaaatcaaaaagagctttgcgaaaacgttagatatctaccctattaagaatctcgaggatttatacgacaaagaaggatatcgagatggcgaatttaaaaaagatgataaaggtacttggctaattagatctgaaatgaaaatccaattaaaaggagaaaatctggaatctagaggagcagttttagaaattaacagaaatactagaacggctaaagggcattatattgttagagaagttgttgaagatagcgatggaatgacacacaatcatacaaaaagatatcctgtgaaaatggaaaataataaaatgattccattaaaaccaatcgatgacgaaaaagtaaaaaaagaaatcgaagaatttaacttctttgtacaatacgggaatttcaaagaattggaaaactataaagaggacgaagtgtcatataacccagaagtaccaatttactctgcaaaatatcaattgaaaaacagtgattacaatgttgaacaattaaggaagcgatataatatcccgacgcaaaaagcgcccaaattattattgaaaggctcaggtaatttaaaaggttcatcagtcggatataaaaatattgaatttacctttattgaaaacaaggaagaaaatatttacttcacagatagtatctactttaatccaagcgaggataaataa

SEQ ID NO: 406811 - DNA, 816 bp, Staphylococcus aureus
atgatggagtatataaaaaaaattgctttgtacatgagtgtattacttttaatcatttttattgggggatgtggaaatatgaaagatgaacagaaaaaagaggaacaaacgaataaaacagattcaaaagaagaacaaatcaaaaagagttttgcgaaaacgttagatatgtatccaattaagaatctcgaggatttatacgacaaagaaggatatcgagatggtgagtttaaaaaaggcgataaaggtacgtggactatacttacaggtttttcaaaaagtaacaaaccaggagtattagatgatgaaggcatggtgttatatcttaatagaaatgccaaaaaggcaacaggttattattttgtaaataaagtttatgatgatattagcaaaaatcataatgagaaaaaatatcgtgttgaactaaaaaataataagattgttcttttggataatgtagaagacaaaaaacttaaacaaaaaattgaaaattttaaattttttagtcagtatgctgattttaaagatttaaaaaattatcaagatggaaatataacaactaatgaaaacgtaccgagctatgaagcacaatataaaatgaacaatagtgataaaaatgtaaaaaaacttagagaaatttatccaattacaactaataactctccaaatctaaaattatatatagatggtgatataaaaggaagctcagtaggatataaaaaaatagaatataaattttcaaaagataaaggtcaagagacaacattaagagattatttgaattttggaccgtctgaaggtgagaatgttgagtag

SEQ ID NO: 406812 - DNA, 1329 bp, Staphylococcus aureus
atgttgagtaggaagtataaaatagatttaaaagcaattaatcaaaatactgagtctacaagtgctatttcgaaagcgtcatacgaagttgagaatgctaataataatggtctatcaaaaagagacgtgattaatcaatttaatgatttgaaaaaaatgaaaaaattcccttctaatcttgaatatgttgatagttacactgattctcttactggagtaacaacttctgcttttttaaataaagatacaggcaaagtaactctcgggatgactgggactaatttacaagacgaagcctttaaaaagttaaaagaaggtgaattttcaagacaaaatgttaccaatgctttggaaacagttaaagatggatatgcagatcttaaaatattatattctcctgcatctgatcaaaactatagatatgcgaatacacaagaatttataaataaaataaaaagtaagtatgacattgattttattactggacattcactaggtggaagagatgcggtagttctaggaatgagtaatggtattccgaacattgtggtttataatccagctcctatttctataactagtttgaatcctaattccccagatggaaaacgtttattagaattatataaaaattataaaggtaatattactaggtttgttgcagaaaatgatgcattgacagaaaatctgaagaaatataagcattatgtttttttcggtaatgataaagtctttaaaaatggtaaaggtcatgaaatggaaggctttctgaccgaagaagaacaaaaagctataaaaaaagaacttaaaaaactacaaggttatgcagaagaaaataataagtcatttgtaaagaattcaaataatgctatctctaaattagctagtatagaattacttagagcaaatatgatgactacaaatggaggaggattatcttcttcgcagcaaaaagttttagaaagtttaacagctttaacaattgcgcagtcattcagtcaactgatagacgatgaaattaatcaaatcaaaaaaatgtataatgaaaagaaaaagaaatttggaaaaaattgggaagacgctcaaaaagctggaaaagctgtaggtgaagatttgagtgtaaatggagttctcaatgctttagatgaaggtcaagtgaatgaaagtagtatggtaagagaacctgaacaaatgatatctgcaaaagaaagacaactttcaacgatagggtcttctgtatcaaattatattatgagagttagactcagtattaatgaaatcgttgataaagatcaagtgcttgcatcacaaataggtggattactatga

SEQ ID NO: 406813 - DNA, 324 bp, Staphylococcus aureus
atgatgtttaatcaaattaataataaaaatgaattagaagaatcatatgaatctgagaaaaaacgtatagagaatgaactgcaaaatttaaatgaacttaggcatagaactcgaaaagaaaatgagcgtagttatgatgtttttcaatatttgaagcacgaaatgaattatagtgaagatgcccaaaggaaaatgacgagaaatatagaagcgtatgagcaagaaatcaatgagataattagaaagcaagaatggaaattagaagaatataaagaagacttaaaaaagtcttatgaaaagcagttagataagctaagtgactga

SEQ ID NO: 406814 - DNA, 315 bp, Staphylococcus aureus
atgactctaatagaaccagatatgaccttaagaatgccagatataagtactacagtagaaacacttaatctcatatctaaaatggaagcgcaaaaagaaaatattcgcacagttattgcacctgaacataagcataaatacaaagatattgaaaacggattaaaaggtgaagaaaaagtattaattgaacaaatggcgcaacattgcgaagcttttaaagctaattttaaaggtgcagctcaaggagattgggttaaaagtgccatgtctgagatagacagcattaaggatgacctgaaaaaaattaatagctaa

SEQ ID NO: 406815 - DNA, 195 bp, Staphylococcus aureus
atgttatttgtcattttagttttatatgttactggtattgcatttattctactcagtgtttttggttcaaagactgaaggattatctacgaaacatactttatataccattggcagtgctattataacgattgctattttcatttcaattggctatgccattcaatacttaactgcagcgctttatggtttgtaa

SEQ ID NO: 406816 - DNA, 1203 bp, Staphylococcus aureus
atggctaaaattccagttacggtattaagtggttatttaggctcggggaagacaacgttgttaaatcatattttacaaaatcgagaaggtcgacgtatcgcggtaattgtaaatgatatgagtgaagtaaatatcgataaagatcttgtcgcagatggtgggggactatcgcgtacagatgaaaaattagtcgaactttctaatggttgtatctgttgtacacttagagacgatttattaaaagaagttgagcgtttagtgaaaaaaggtggcatcgatcaaattgttattgagtcaacagggatttcagagccagtacctgttgcacaaactttctcatatattgatgatgaacttggcattgatcttacagcgatttgccgtttagatacaatggttacagttgtggatgctaaccgcttcgtacatgacatcaactcagaagatttattgatggatcgtgatcaaagcgttgacgaaacagatgagcgttcgattgctgatttattaattgaccaagttgaattttgtgatgtattgattattaataaaattgatttaattagtgaagaagaactagcgaagttagaaaaaatgttaagcgcattgcaaccgactgctaaaattattaagacaacaaattctgaagtagatttaaaagaagtcttgaatacgcagcgttttgattttgaaaaagcgagcgagtcagcaggatggatcaaagaacttgagtctggtgggcatgcatcgcatacacctgaaacagaagaatatggtatatcatcgtttgtatataaacgtcgtctacctttccatgctaaaaggttcaatgattggttagaaagcatgccaaataatgtcgttcgatcaaaaggtatcgtatggctagcacaatacaatcacgtagcatgtttattatctcaagcagggtcatcttgcaatattcatccagttacatattgggtggctagtatgtctgaagcgcaacaaacacaaatattagcagaacgtcaagatgtcgcagctgaatgggatccagaatatggcgatcgtcatacacaatttgtcattattggtacagaattagatgaagaaaaattaacaaaagaactcgacgcatgcttagtcaatgcgcaagaaattgatgcagattggcaacaatttgaagatccatatcaatggcaaattagaccagcacgataa

SEQ ID NO: 406817 - DNA, 1485 bp, Staphylococcus aureus
gtgttaagttttcaattgctattttcactgtttgttattgcgcttatcattgcattgataagtggcttgttgtttttagcaccagttatgccaatgagatatattaaattacatttatacatactagtcatgccagtattatttgcagtcattggctttttcggtattcatggtcaacatgtcttaggtccatttaaaatagatcgtttatcttggttattagctggctttgtaatggcgcttggctttattattcaaaagttttcaatgcgatatttactaggtgatcatcattatagacattactttccattgttcactgcgattacgtcgtttgcatctttagcatggatgtctgaagacttaagactgatggcactctgctggggtattacattattatgtttaacattgctgatgaacgttaatcgtttttggaaagtgccacgtgagtctgcgaaattatcaagcatgacatttttatgtggttggcttgcattcgttggagcaattgtaactatttatattgcgactggcgagtggcgggtaccacaacatatagttcatccgacatggtcattgttgacgaatgtactacttgtattagctgtcatgataccggcagcacaatttccttttcatcgatggttgattgaatctgtaacggcaccaacgccagtatcggcaattatgcatgcaggaattgtgaatgcaggtggtgttattctaactcgttttgcgccgatatttgataatggatttgcgttatcattattacttatcctttctagtatttctgtattgttaggatcgggtattagcttagttcaagttgactataaacgccaattagtgggctctacgatgagtcaaatgggctttatgttagttcaatgtgcattgggtgtatattcagcagcgattattcatttaatattgcacggtatttttaaagcaacattatttttacaatcaggttctatcgtgaagcgattcaatattccaaaacaagcatctgctaaagacgcttatggctggattgtcatgggacgtgtattagctattatcgtggcatttctattttggatgagtagtgacagaagtgcatatgaagtgttaagtgcactcattctaggatggtcattacttgtatcttggaatcaaatggtagcctttagtaaaggacgcatggcacgtcttgttggtatgattttgattgcaatcgtgacatttatctacgtcatcacacataattatttttacgctgtattacaaaatataacaacacatgcgacaacgccgcctacagtgagtgtcatcattagtgttgttattttaatctttggcagtttattaagtatttgggtggcgcggcatcgatactctaaggcttttgcggtattgtacgtgtggttagttaatctaggtgaagcacgctcgaaagcgatagaaagtcatccgaattatttgaagaagtatttatag

SEQ ID NO: 406818 - DNA, 2706 bp, Staphylococcus aureus
atgacaacacagttaaatatcaattcagtcattgaaaatgcgaaacgtgttattacaccattatcaccaatttcgatttttgcagcacgaaatccatgggaaggattagaagcggatacgtttgaagatgtcgcaaaatggttacgtgatgttcgagatgtggatattttcccaaataaagcattaatagaaagcgctgtggcacgtggtgaattagatgaaagtgtctttaatcaacttgttactgatatgttacttgaacatcactacaatatcccgcaacactacatcaatctttatattgataacattaaaacattaaaagacgtacctgcatcatatatgaatcattcaaatgttgatgttgttgctgatctactattagaaaaatcaaaacgtgatatggctgaatcatatcatcactatgatgtacgtccgatgagtgatgcaataatagatgaacaaggtgagccacttagcgaacaagtgaatcgtcaaatgattaaatggacgaaactttatatcgatcaatttctatcgagttggacaatgccgaagcgtgagcaaagtttttaccatgcatggttgcatttagcgcaacatgaccatagttttactaaagcacagcgccaagtgattaaaggcttacccaatgatcctgaaatgacgatagagtcagtattaactcatttttcaatagatcaggaagactaccaagcttatgttgaaggacatcttttggcgttaccgggttgggcaggtatgttgtattaccgttcacaacagcatcactttgaacaacatttgttaacggattatttggcaattcggttagttgtcgaacaattgctagttggtgatgagtttaagtcagtcgctaaagattgtgaaagtagatcggaaaattggtttaagcaaactgttgcatcatggtgttactacagtgatatgcctagcgatgtattactacaacatgacgtcaatgaaattcaaacgtttattcattttgcagcaactatgaataaaaatgtatttaaaaatttatggctaattgcctgggaaatgacatacgaatctcagttaaaacaaaaaattaaagcaggtcatgaaagtgtggcgggcgcattagatgtaaaccaagtaaatgtctcagaaaatgataacgctaatcagccacattcagtattgttaaatgacacacaagcagttgatgaaaataatagcgagctaaatcagatgggcacatcaacgaaagcgcaaattgcattttgtatagatgttcgttcagaaccatttcgtagacatatcgaagcagcagggccctttgaaacgattggtattgcaggcttctttggattacctattcaaaaagatgccgtagacgaacaattcaaacatgattcattacctgtcatggtaccgccggcatatcgcattaaagaatttgcagaccgctacgatatgaatgtttatcgacaacagcaacagacaatgtcatcgatgttttacacatttaaattgatgaaaaataatgtcatgcctagtctgttattgcctgaattaagtgggccatttttaagcttaagtaccattgtcaattcgattatgcctagaaaaagtcgcgcgtctttacaaaaaataaaacaaaagtggttgaaaaagcctgaaacaaagttgacgattgatcgtgagtttgaccgaacatcagacttacctgttggatttactgagcaagagcaaattgatttcgcgttacaagcgttgaaattgatggatttaaccgaagcatttgcgccgttcgttgtgttagcaggtcatgctagtcattctcacaataatccacatcatgcatcacttgaatgtggggcttgtggtggcgcatcaagcggttttaatgctaagttattagcgatgatatgtaatcgtccaaatgtcagacaaggattaaaacaatcaggtgtgtatattccagagacaactgtttttgcggtagcagaacatcatacgtctactgatacgttggcatgggtatatgtgccagacacattatcttctattgctttagatgcatatgaatcattgaatgacgcgatgccgatgatttctgaacacgcgaatcgcgaacgtttggacaaactgccaacgattggtcgtgtgaatcatccagtggaagaagcgcagcggtttgcgagtgattggagtgaggtacgtccagaatggggattggctaaaaatgcatcatttataattggacgacgccaattaacaaaaggcattgatttagaagggcggacatttttacacaattatgattggcgtaaagataaagatggcacattattaaataccatcatttctggtccggcacttgtggcacaatggattaatttacaatattatgcgtcgacagttgcgccgcatttttacggaagtgggaataaagcgacacaaaccgtcacgtcaggtgttggtgtcatgcaaggtaatgcgagtgatctgatgtatggcttatcatggcaatctgttatggctgctgatcggacgatgtatcattcgccaattcgtttacttgtcgttattcaggcacccgactatgttgtagcaagactactcgcgaataatgagcatttcgctaggaaggtgtctaatcattggctgcgtttaatgagcgttaatgaggaagggcgttttaaaagttggatttaa

SEQ ID NO: 406819 - DNA, 363 bp, Staphylococcus aureus
atgaaaagaacgaaaggtgaaatcgaagctgaaatcagtaaagccattacgcaatgggaaaaagatttccttggcagaggttccttgtcagttaaatcagacattttaagagatatggtgattattagtttacaaggtatcttaacgccagctgaatatcgtgtatgtagtacgaatgaaggattattaaatattaaacgaacacgttctgaattagttgaatccggtgagcaagatttgaatgatatcatttttaaaattacaggtatcaaagtgatgagcttccatagtgatttaagtacagttacaggtgaacgtattatcgtattcaaacttgaggataatttggaaaagcatatttaa

SEQ ID NO: 406820 - DNA, 675 bp, Staphylococcus aureus
atgatagataaaaaattaacatcaccgaaaatgacagtgcctttatttttaatcgcgctgattgtatttataggtatgttttacagtgtagtgacaaatcaagaatggcttaaaaatatagatatgggatcattaacatggtttacagattatttcggtgagccacaacgtcagtatgttaacaatttgtttaattactatatgacgtttagtgcggaaattggagatgtcaaaggtgtcgtgttgatttccattatcgtcacaatcatactgtttattaaacagaggcatttagcggtttggtttgtgacatatttggtttcaggtgtcatcatgaacaaattaattaaagatactgtattacgtccaagaccatataatcatttagccgttgatacaggcttttcatttccgagtggacattccaacgccagcacattattatatttcgccttaatgatcattattatttcacttgctgctaagacaataacaaaagtgttgagtgcgttggttatgggaatattatggcttagcatattattttgtcgcctttattttcatgcacattacttttcagatgtcattggcggcacgtcactagcaatcatttgggtagcgttattcttaatggtatacccatactttattaatcatcgacgacaacgcgtttag

SEQ ID NO: 406821 - DNA, 735 bp, Staphylococcus aureus
atgagaattaaaacaccgagtccatcgtatttaaaaggcacaaatggacatgcgatattattattacattcatttacaggtacaaatcgggatgtgaagcatcttgcagctgagttaaatgaccaaggatttagttgttatgcaccgaattatccaggtcatggtttattgttgaaagatttcatgacatataatgtagatgattggtgggaagaagttgagaaagcttaccaatttttagtcaatgaaggttatgaatctatcagtgcaacgggtgtgtctttaggtggattaatgacattaaaattggcgcaacactatcctttgaaacgtatcgctgtcatgtcagcaccaaaggaaaagagtgacgatggcttaatagaacatttagtttattatagtcaacgcatgtcgaatattttaaatttagatcagcaagcatcgagtgcgcaattagcagcaattgatgattatgaaggtgaaattacgaagtttcaacattttattgatgatatcatgacaaatttaaatgttattaaaatgccagctaatatattatttggtggtaaagatgcgccatcctatgaaacaagtgcacattttatttatgaacatttaggatcagtagacaaagaattaaatggtctgaaggattcgcatcatttaatgacgcatggagaaggcagagatattttagaagaaaatgttattcgctttttcaatgctttaacataa

SEQ ID NO: 406822 - DNA, 1338 bp, Staphylococcus aureus
atgaaaagacaacaatcacaatggaagtcatcaactggatttattttagctagtgcgggttctgcaatcggtcttggtgccatgtggaaattcccatatatggcagggatttatggcggcggtgcctttctagctatgttcttaatattcaccatttttgttgggttgccattactcattatggaattcactgttgggaaaatgggacggacatatacaacacaaatatatagtaaattaactggtaaaaaatggctcaatatcattggctggaacggtaatttggcagtgtttattttatttggcttctatagtgttatcggtggttggattgtcatttacatcggacaagtattatggcaattagttatatttcaacgcatcaatcatctccaagaaatgaattttgaagcggtaatatcaaatccttggttaaccgttctagggcaaggtatattcatattcgctacgatgattattgtcatgttaggtgttgaaaaaggattagaaaaggcatcgaaagttatgatgccattgctgtttgtctttttaatcgtcattgtgattaagtctttaacattagatggcgccttagaaggtgtgaaatttattttacaaccaagagtatcagagattactgctgatggcatcttgtttgcgctaggtcaatcattctttacgttatcattaggaactacaggtatgattacttatgcgagttatgcctctaaagacatgacgattaagtcatcagctatttctatcgttgttatgaatatctttgtatctgtattggcaggtctagctatatttccggctttacatagttttggctatgaaccacaagaagggcctggattattatttaaagtactgccaatggtctttagtcaaatgcatctaggcacattattctatttgggattcttagtgctgttcttatttgcggctttaacgtcatctatttctttattagaattaaatgtttctaacttcacgaagaatgacaatacaaaacgtaaaaaagtcgcagtgatcggtagtattttagtatttatcattagtattccagcaaccttatcttttggtatcttaaaagatgtaagattcggtgcgggaacgatttttgataatatggatttcatcgtttcgaatgtattgatgccattaggcgcattaggtactacgcttgtcgtaggacaattattagataaaaaattattacaacaatattttggtaaagatcgatttagattattcagtggttggtattacttaattaagtatgcgatgcctgtcgttattattttagtctttatcgtgcaattatttagttaa

SEQ ID NO: 406823 - DNA, 915 bp, Staphylococcus aureus
atgattacttatgatttaattggcaatacaccattagtactgttagaacattatagtgatgataaagttaaaatttatgccaagcttgaacaatggaatcctggaggcagtgttaaagacagactcgggaaatatttagtagagaaggcaattcaagaagggcgtgtgcgtgcaggtcaaactattgttgaagcgactgctggtaatacaggcatagggttagctattgcagcgaatagacatcatttgaaatgtaagatctttgcgccgtatggtttttcagaagaaaagattaatattatgatagcgcttggtgcagaagtttcaaggacgagtcagtctgaaggtatgcatggggcacaattagctgcacgttcctatgctgaaaaatatggtgccgtttatatgaatcaatttgaatccgaacataatccggatacatattttcatacattgggacccgaattgacttcagcattacagcaaattgattattttgtggctggtattggctctggcggtacatttacaggtaccgcacgttatttaaagcaacatcacgtgcaatgttatgccgttgagccagaagggtccgtgttaaatggagggccagctcatgcacatgacactgaaggtatcggttctgagaaatggccgatatttttagagagacgtcttgtagatgggatatttacgattaaagatcaagatgcctttcgaaatgtcaaaagtttggctataaatgaagggttgttagtaggcagttcttcaggtgcagcattacaaggtgcattgaatttaaaagcgcaattatctgaaggtacgattgttgtcgtatttccagatggtagtgatcgatatatgtctaagcaaatatttaattatgaggagaataataatgaacaagaaaactaa

SEQ ID NO: 406824 - DNA, 1143 bp, Staphylococcus aureus
atgaacaagaaaactaaattaattcatggtgggcacacaacagacgattatacaggtgccgttacaacaccaatttatcaaacaagtacatatttacaagatgatattggtgatttacgtcaaggatatgaatattctcgtactgcgaatccaacaagaagttctgtagaaagcgttattgcgacattagaaaatggcaaacatggctttgcatttagttcaggtgttgcagcaatcagtgcagttgttatgctgttggacaaaggagatcatattattttaaattcagatgtatacggcggtacttatcgcgcattgacaaaagtatttacacgatttggcattgaagtggattttgtagatacaacgcatacagattcaattgtacaagcgatacgcccaacaacaaagatgttgtttattgaaacaccttctaatccattattacgtgttactgacattaaaaagtctgctgaaattgcgaaagaacacggtttgatttcagttgttgataacacatttatgacaccttattatcagaatccattagatttaggtatcgatattgtcttacattctgcaacgaaatatttaggtggacatagtgatgtcgttgctggtttagttgcaacatcggatgacaagcttgcagaacgtttagcatttatttcaaattcaacaggtggcattttaggacctcaagatagctatttacttgtgaggggtattaaaacattaggtttacgtatggaacaaattaatcgcagcgttattgaaattattaaaatgttacaagcacatccagctgtgcaacaagtgttccatccaagtattgaaagtcatttaaatcatgatgtccatatggctcaagcggatggccatacaggtgtgattgcatttgaagtgaaaaatacagaaagtgccaaacaattgattaaagcaacatcgtattacacattagctgaaagtttaggtgcagtggaaagtttaatttcagtacctgcattgatgacacatgcatccattccagcagatattcgagctaaagaaggtattacagacggacttgtaagaatttctgtaggtattgaagatactgaagatttagtcgatgatttaaaacaagcactagatactttataa

SEQ ID NO: 406825 - DNA, 1026 bp, Staphylococcus aureus
atgattgagtttcgacaggtaagtaagacctttaataaaaagaagcaaaaaatagatgctttgaaggacgtatcatttacggtcaatcgcaatgatatttttggtgtgattggatatagtggtgcaggaaaaagtacgttggtaagactcgtgaatcatcttgaagctgcctcgaatggacaagtgattgtagatggacatgatattacgaattatagcgataaaatgatgagggatattaagaaagatatcggtatgatatttcagcatttcaatttattaaattcagctaccgtatttaaaaatgtagcaatgccactcattttaagtaagaaaagcaaaacagaaattaagcaacgagtaacggaaatgcttgaatttgtaggattgagtgataaaaaagaccaatttcctgatgaattatctggtgggcagaagcaaagggtggctattgcaagagcgcttgttactaatccgaaaatactcctatgcgatgaagcaacaagcgcattggatccagcaacgactgcttcgatattgacgttattaaagaatgtcaatcaaacctttggcattacaattatgatgattacacatgaaatgcgcgttattaaagacatttgtaatcgtgttgctgtaatggaaaaggggaaagtggttgaaacaggaactgttaaagaggtgtttagtcatcctaaaacgacgattgctcaaaattttgtgtctacagttatacagactgagccaagtacatcattgattcgtcgattgaatgacgaacaagttggcgattttaaagattataaaatcttcgtcgaggaaactcaggtgacacaaccgattataaatgacttgattcaaatttgtggcagagaggttaaaattttattttcatctatgtcagaaatacaaggtaacaccgtatgttatatgtggcttcgatttaatatggatcaacaatttgaagacacggcaataaatcaatatttcaaagagaaaaatattcaatttgaggaggtgcattaa

SEQ ID NO: 406826 - DNA, 660 bp, Staphylococcus aureus
atgtttggttctgatttagacagtgcacagttattacaagcattgtacgaaacgctatatatggtatctattgctttatttttaggagcagtgattggtattccattaggtgtcttattggtaattactcgaaaacaaggcatatggcccaatatagtgatacatcaagttttaaatcctttaatcaatattttaaggtcactaccatttattattttgttaattgcgattgtgccattcacaaaattagtagtaggtacttcaattggtacgactgctgccatcgtgcctttaacagtatatgtggcaccttacattgcaagacttgttgaaaactcattattggaagtagacgaggggattattgaagcggcgaaagcgatgggcgcttcaccactacaaatcattagatattttttaattcctgaagctttaggttcgttagtattagcaattaccactgcgattattggacttattggaagtacggcgatggcaggagctgttggcggtggtggtataggagacttagctttagtgtatggttatcaaagatttgatacgacggtcattattattaccgttattgtattagtcattattgtccaagtgattcaaacgctagggaatgttctagctagattcatacgtagacattaa

SEQ ID NO: 406827 - DNA, 843 bp, Staphylococcus aureus
atgaaaagattgattgggttagttatcgtagcacttgtattattagcagcgtgtggtggtaacaatgataaaaaagtaacaattggtgtcgcatcaaatgacactaaggcttgggagaaggttaaagaattagctaaaaaagatgatattgatgtggagattaagcacttctcagattacaatttaccgaataaagcattaaatgatggtgatattgatatgaatgcattccaacattttgcatttttagatcaatataaaaaggcgcataaaggaacaaagatttcagcattaagtacaacagttttagcaccgttgggcatttactcagataaaattaaagatgtcaaaaaggttaaagatggtgctaaagttgtcattccaaatgatgtgtcaaaccaagcacgtgcacttaaactattagaagcagctggtttaataaaactgaaaaaagatttcggattagcaggcacggtgaaagatataacgtcaaatccaaaacatttaaaaattactgcagtagatgcacaacaaactgcacgtgctttatctgatgtcgatattgcagttattaataacggtgtagcaactaaagcgggtaaagatcctaaaaatgatccgatatttttagaaaaatcaaattcagatgcagtaaagccatatattaatattgttgcagttaatgacaaagacttggataacaaaacatatgctaaaatcgtagaattgtatcattcaaaagaagctcaaaaagcgttgcaggaagatgtcaaagatggagagaaacctgttaatttatctaaagatgagattaaggcaatagaaacgtcattagcaaaataa

SEQ ID NO: 406828 - DNA, 1005 bp, Staphylococcus aureus
gtgcaaaaaaaagtaattgcagctattattgggacaagcgcgattagcgctgttgcggcaactcaagcaaatgcggctacaactcacacagtaaaaccgggtgaatcagtgtgggcaatttcaaataagtatgggatttcgattgctaaattaaagtcattaaacaatttaacatctaatctaattttcccaaaccaagtactaaaagtatctggctcaagtaattctacgagtaatagtagccgtccatcaacgaactcaggtggcggatcatactacacagtacaagcaggcgactcattatcattaatcgcatcaaaatatggtacaacttaccaaaacattatgcgacttaatggtttaaataatttctttatttatccaggtcaaaaattaaaagtatcaggtactgctagctcaagtaacgctgcgagcaatagtagccgtccatcaacgaactcaggtggcggatcatactatacagtacaagcaggtgactcattgtcattaattgcatcaaaatatggtacaacttatcaaaaaattatgagcttaaatggcttaaataatttctttatatatccggggcaaaaattgaaagtaactggtaatgcatctacgaactcaggatctgcaacaacgacaaatagaggttacaatacaccagtattcagtcaccaaaacttatatacatggggtcaatgtacatatcatgtatttaatcgtcgtgctgaaattggtaaaggtattagtacttattggtggaatgctaataactgggataacgcagcggcagcagatggttacactatcgacaatagacctactgtaggttctatcgctcaaacagatgtaggttactatggtcatgttatgtttgtagaacgtgtaaataacgatggtagtattttagtttcagaaatgaactattcagctgcaccaggtattttaacttacagaacggtaccagcttaccaagtaaataattatagatatattcactaa

SEQ ID NO: 406829 - DNA, 270 bp, Staphylococcus aureus
atggcaaaacgttccaaatcacaacgtttatcaagtttactaaatgtcgcaggtttcatagtcgacggctacaatggctataaatatcatgctaaaaataaaaaattagtatatctttcattaggtttaagcactgtaggaaccgtgttagacttttacatttcaattaagtcaccacgtaagttcaaaaaagcagtggcagttgttactttaataacaaacggtgctagattatttacaagcattcgcaaagtaaaacatgaatactaa

SEQ ID NO: 406830 - DNA, 396 bp, Staphylococcus aureus
atgattaaatgtgtctgtttagttgaagaaacagctgataaaatattgcttgttcaagtaaggaatcgcgaaaagtattatttcccgggtggtaaaatagaagaaggggaatcacaagtacacgcgctgttaagagaagtaaaagaagaattaaatttaacattaacaatggatgaaattgaatatgtcgggacaattgtaggtcctgcatatccacaacaggatatgttaactgagttaaatggatttcgcgcattaaccaaaatcgattgggaaaacgtaactatcaataatgaaattacggatatacgctggattgataaagataatgatgcgttgattgcgcctgctgtcaaagtttggattgaaacttatggtggtaaacatgacaaataa

SEQ ID NO: 406831 - DNA, 486 bp, Staphylococcus aureus
atgacaaataatgacaccatcatgttacgacattatgtcccacaagattattcgatgttagaagcttttcaattaagtgaaagtgatttgaagtttgttaaaacgccagaggaaaatattacagctgcaatgtctgataatgaaaggtatcccatcgttgtaatggatggcaggcaatgtgtggccttttttacattacatcgtggaaaaggggtcgcaccatttagcgataaccaagatgcagtatttttcaggtcatttagtgttgatcaacgttatcgtaatagaggaataggtaaagtggtaatggaaaaattggcgtcatttatcacttcaacatttcaggatattaatgagattgtgttaacggttaatactgacaatccacatgccatggcactttatcgccaacaaggatatcaatatatgggagatagtatgttcgtcggaagacctgttcatattatggcgttaactataaaataa

SEQ ID NO: 406832 - DNA, 783 bp, Staphylococcus aureus
atgaatgctgtatttatattggcgttattgctcctctttctgatgataattttcggaggtaaaaagggattcatctcttatttaaccctatttttaaatttcgctattttaattattagtattgtattgattatttttggcgtaccgatttatgtcgtcacattctttttctgcattattattggcgcttgtaatttattcgtactcaatagttacaatgttaaaacacaagctgcatttatcagcactatcgttacaacaatattgttgattacactcatttatttatcggtctacttcggtcatctacaaggcttttcaaccgaacaacaagatgaaacatatgtgtattcaatgaatattggcattgatatggttcaatttatggtgttcactattattcttgctgttattgcagctgtgatagatttaacaattaccattagttcacccatttatgaattgcatcaagtgaatccaacgcttacgcaatacgaattattccaatctggcatgcgtgttggtagagaaattttagcgacatctgcgaacacgatttaccttgccttttttggtggccaacttgctttatttatttggtttttcaaacttaaatattcatttggtcatattataaactcgaaaatatttgcccaagaatttatttctattattttaggcggtattgccgttgcaatcagtattccgattacggcttggattacggcatttttaataaaaagaccatctcgacagcgcaaaaatgatgagtctatcaattaa

SEQ ID NO: 406833 - DNA, 1113 bp, Staphylococcus aureus
ttgaaatatagaaatttatttacaaagccatttaatataattttaggtttgttctgcatcgcattcattggtgctattttatttacattcaataatgagaacttttacaacaaaccaattggtcaaattatagatgtcaaacatgtttcttcgacacctacaaaagatgcacaaaataatcgtgatattaaatataaaaatcaattaaaagtcaaaatattaaatggtcaatttgctggagaaacgacgacgattaatcatcagtacgtcaaatcgcaagcagattctgaggcatttcgcacacacgaaaaagtattattacatatttctaacaagccgagtgatgcttatattatagaaaagaagcgtgataccttaacggttatcatcactggtttgttcttattaactgtattattggttggtcgcaaagtcggactgcaatcgattttatcgttaatcttgaattctattgccatattaatcgcaatttacattcatattcaacatagcaatattaatttattcttactcatgaccattgccatgatctgttcaacaatactcactttattgctcgttacaggctggcatatgcgtacactcattaccatagccagtacaattatcggaacttttttgagtataggtttaacagaattaatcatatatatgacagatggtaaaggcattaaatatgaaacgatgaactttttatcattaccaccgaaagatatcttcctagcctcagtgttaataggttcacttggcgctattatggatgttgcaattacaattgctagtggtatgcatgaaattttacagcgtacgccacacatttcaatgaggagatgggcgcttgctgggcgaaacatcggccaagatattatgggaacaatgactaacatcttattattctcatatttatccggtgcactacctatgtttttaatctttttaaaaaatgccaatacagtgacttatactatttcgatgaattggtcgttagaaattgcgcgcgcactaacaggtggtataggtatcgtacttacaattcctatcacaatattgtttatggaaatatttgaaacattaaggagggcgaaacaatga

SEQ ID NO: 406834 - DNA, 885 bp, Staphylococcus aureus
atggaaattaaacaattaagatattttatcgaggtcgctaaaagagaacatatctccgaaacagcacttgaactaaacattgctcaatcagcgataagccgtcaaattacattattagaacaagaacttaatgtgtctttatttaaaaagcaaggacgcaatattacgctcacatctgaagggaaattattatttaatgaagctctgcgtattattgaacatttagatagcacgattgaacaatttcaaagccatggattaactaaaaataaaagtatctacattggctatgatgagagtgacgtatcccacatgttactaccacttatccaaacgtttcatttacaaaatgatacacatgtcataccgagcttattagaacatgacacaattataaatagcgtattaaatgggaatatagacattggtttcacggaacttacaccagaaatacgtaaacacaaacaattacatatgctacctttattcgaagagcactatcatttatatgcgccttcagacgatccaattacgatggcgacacacccaccattaattcagtttgagcatagtcatatttattgcttggcaccatttgccgaaactgtaaaaaaacaattgcgcaagattactaaatcagatgtatacacaatcagtagccaaccacttgcgcagtatctccttcgtcaaaaagaaggttacatcatttcatcacaaaatatacatttaccagaatctaaatcatggatagatataaaattagatcatactgaattaaaaagaacgatatgtgctattacaaaggagccttatacaaagagtgatattggcatattattaacacttattcagcaattaatgactaaaacgtctacattccattaa

SEQ ID NO: 406835 - DNA, 4500 bp, Staphylococcus aureus
atgcacaatgagaaattaattaaaggcttatatgactatcgtgaggaacatgatgcgtgtggtattggtttttatgcgaatatggataataaaaggtctcacgacatcattgataaatcgcttgaaatgttgcgacgcttagatcacaggggcggggtcggcgcagatggcatcactggtgatggcgcaggtattatgactgaaataccttttgcatttttcaaacaacatgtaacggactttgatatcccaggtgaaggtgaatatgccgtggggttatttttttccaaagaacgcattttaggttctgaacatgaagtagtttttaaaaaatattttgaaggcgaagggttatcaattcttggttatcgtaatgtaccagttaataaagatgccattgctaaacatgtagcagatacgatgccagtcattcaacaagtgtttattgatattagggacattgaagatgttgaaaagcgtttgtttttagcgagaaaacaattagagttctattcgactcagtgcgatttagaattgtattttacgagcttatcacgcaaaacaattgtatataaaggttggttacgatcagaccaaattaaaaaactatatacagatttatcggatgatttatatcaatcaaagctagggttagtgcattcgagatttagtacgaatacattcccgagttggaaaagggcacatcctaaccgtatgttaatgcataatggtgagattaacacgattaaaggtaatgtaaactggatgcgagcacgccaacataaattaatcgaaacattatttggcgaggatcaacataaagtgtttcaaattgtcgatgaggatggtagtgactctgccattgtagataatgcgctagagttcttatcgttagccatggagccagaaaaggcagcgatgttactcatacctgaaccttggttatataatgaagcgaatgatgcaaatgtacgtgcgttttatgaattttatagttatttaatggaaccgtgggatggtcctacaatgatttcgttctgtaacggtgacaaacttggcgcgcttacagatagaaatggattacgtccaggtcgttatacgattactaaagataactttattgtcttttcatctgaagtgggtgttgtggacgtacctgaaagtaatgttgcttttaaaggtcaattgaatcctggaaagttattgcttgttgattttaaacagaataaagtcattgaaaataatgatttaaaaggtgcgattgctggagaattaccatataaagcgtggattgataaccataaagttgactttgattttgaaaatatacaatatcaagattcgcaatggaaagatgagacgttatttaaattacaacgtcagtttgcatacacgaaagaagagattcataagtatattcaggaacttgtagaaggtaagaaggatcctatcggtgcaatgggatatgatgcgccaattgcagtgttgaacgagcgaccagaatcactatttaattactttaaacagctgtttgcacaagttacgaatccaccaattgatgcgtatcgtgaaaaaatcgtaacgagtgaactttcttatttaggtggcgaaggtaacttactagcacctgacgaaacggttttagatcgtattcaattgaaaaggccggtattgaatgaatcacacttagcagcgattgatcaggaacattttaaattaacttatttatcaacggtatatgaaggggatttggaagatgcgttagaagcattaggccgagaagcagtgaatgctgtaaagcaaggcgctcaaattctagtgttagatgatagtggattagttgatagcaatggctttgcaatgccgatgttactcgcaataagtcatgtgcatcaattacttattaaagcagatttacgtatgtctacaagtttagtcgctaaatctggtgagacacgagaagtgcatcatgttgcttgtttactcgcatatggcgcgaatgcaattgtgccatacctagcgcaacgtacagttgaacaactgacattgacagaagggttacaaggcaccgttgtcgataatgttaagacatatacggatgtattgtcagaaggtgtcattaaagtaatggctaagatgggaatttcgacagtgcaaagttatcaaggggcacaaatatttgaagcgattggcttgtctcatgatgtgattgatcgttattttactgggacacagtctaagttatctggtatttcgattgatcaaattgatgctgaaaataaagcacgtcaacaaagtgatgataattatcttgcatcaggtagtacattccaatggagacaacaaggtcaacatcatgcttttaatccggaatctattttcttattgcagcacgcatgtaaagaaaatgactatgcgcaatttaaagcatactctgaagcggtgaacaaaaatagaacagatcacattagacatttacttgaatttaaagcatgtacaccgattgacatcgaccaagttgaaccggtaagtgacattgtcaaacgctttaatacaggggcgatgagttatggatcgatttcagcggaagcacatgaaacgttagcacaagccatgaaccaattaggtggaaagagtaatagtggtgaaggtggcgaagatgcaaaacgttatgaagtacaagttgatggaagcaacaaagtaagtgcgattaaacaagttgcttctgggcgttttggtgtaactagtgattatttacaacatgccaaagaaattcaaattaaagttgcgcaaggtgcaaagcctggtgaaggtggtcaattacctggtactaaggtatatccgtggattgcgaagacaagagggtcaacgccaggtatcggtctgatttcaccaccgccacatcatgatatttattcaatagaagatttagcgcaactgatacatgatttgaaaaatgcgaataaagatgcagatatcgcggtaaaattagtttcgaaaacaggtgttggtaccattgcatctggggtggcaaaagcatttgcagataaaattgtcatcagtggttacgatggtggtacaggggcttcacccaaaacgagtattcagcatgccggtgttccttgggagattggtttagcagaaacacatcaaacattaaaactaaatgacttaagaagtcgtgttaagttagaaacagacagtaagttattaactggtaaagatgtagcgtacgcatgtgcgcttggagcggaagaatttggatttgcaactgcaccattagtggtgttgggctgtattatgatgcgtgtatgccataaagatacatgtccagtaggagttgcaactcaaaacaaagatttacgtgctttatatagaggtaaagcacatcatgttgttaattttatgcattttattgcacaagaattaagagaaattttagcatctttaggtttgaaacgtgtagaagacttagttggaagaactgatttattacaacgatcatcaacattaaaagcgaatagcaaagcggctagtattgatgttgaaaaactgttatgtcctttcgatgggccaaacacaaaagaaattcaacaaaatcataatcttgagcatggatttgatttaacaaatttatatgaagtaacgaagccatatattgctgaagggcgtcgctatacaggtagctttacagtaaataatgaacaacgtgatgtaggggttattacaggtagtgagatttcgaaacaatatggagaagcaggacttcctgaaaatacaattaatgtttatacgaatggtcatgctggtcaaagtcttgcagcatatgcaccgaaaggcttaatgattcatcatactggagatgcgaatgactatgttggtaaaggattatctggtggtacggtcattgtcaaagcaccttttgaagaacgacaaaatgaaattattgctggtaacgtctcattctatggtgcgacaagtggtaaggcatttattaacggtagtgcaggagaaagattctgtattagaaatagtggtgtagatgttgtcgttgaaggtatcggcgaccatggattagagtatatgactggtggacatgtcattaatttaggtgatgtaggtaagaacttcggtcaaggtatgagtggtggtattgcttacgttatcccgtctgatgtagaagcttttgttgaaaataatcaactagatacgctttcgtttacaaagattaaacaccaagaagaaaaagcattcattaagcaaatgctggaagaacatgtgtcacacacgaatagtacgagagcgattcatgtgttaaaacattttgatcgcattgaagatgtcgtcgttaaagttattcctaaagattatcaattaatgatgcaaaaaattcatttgcacaaatcattacatgacaatgaagatgaagcgatgttagctgcattttacgatgacagtaaaacaatcgatgctaaacataaaccagccgttgtgtattaa

SEQ ID NO: 406836 - DNA, 1464 bp, Staphylococcus aureus
atgggtgaatttaaaggatttatgaagtatgacaaacagtacttaggtgaattatcactggtagaccgtttgaagcatcataaagcatatcaacaacgatttactaaagaagatgcctctatccaaggtgcacgatgtatggattgtggaacgccgttttgtcaaaccggacaacagtatggtagggaaacaataggttgtccaattggaaactacattcctgaatggaacgacttagtgtatcatcaagattttaaaactgcttatgaacgcttaagcgaaacaaataactttcctgactttacagggcgtgtatgtcctgcaccatgcgaaagtgcttgtgtgatgaagattaatagagaatcgattgcgattaaaggtattgaacgcacaattattgatgaagcttttgaaaatggttgggtagcgccgaaagttccgagtcgccgtagagatgaaaaagtggcaatcgttggaagcggtccagcaggattagctgctgctgaagaacttaatctactaggatatcaagtaactatttatgaacgtgctagagaatcaggcggtttattaatgtatggtattccgaatatgaaacttgataaagatgtggttcgacgtcgtattaagttaatggaagaagcgggcattactttcattaatggtgttgaagtcggcgttgatattgataaagcaacgttagaatctgagtatgatgccattatattatgtactggtgcacaaaaaggtagagatttacctttagaaggacgcatgggtgatggtatacatttcgctatggattatttaactgaacaaacgcagttgttaaatggagaaattgatgatataacaataactgcaaaagataagaatgtcattatcattggtgctggtgatacaggggcagactgtgtagcgacagcattaagagaaaattgtaaatcgattgttcaatttaataaatatacgaaattgccagaagcaattacatttacagaaaatgcatcatggcctttagcaatgccggtgtttaaaatggactatgcgcaccaagagtacgaagctaagtttggtaaggaaccacgtgcatatggtgttcaaacaatgcgttacgatgttgacgataaaggacacatacgtggtttgtatactcaaattttagagcaaggcgaaaatggtatggtcatgaaagaaggacctgaaagattttggcctgctgaccttgtattattatcaatcggcttcgaaggtacagaaccaacagtaccgaatgcttttaacattaaaacggatagaaatcgaatcgtggcggatgatacaaactatcaaactaataatgaaaaggtatttgctgctggagatgctagacgtggtcaaagtttagttgtatgggcaattaaagaaggtagaggcgtagcgaaagcagtagatcagtatttagctagtaaagtttgtgtataa

SEQ ID NO: 406837 - DNA, 1428 bp, Staphylococcus aureus
atggctgtaaaaagagaagatgtaaaagccatcgtaaccgctattgggggaaaagaaaatcttgaagctgcaacgcattgtgtaacacgattacgtttagtgctgaaggatgaaagtaaagttgataaagacgcattaagtaataacgcgttggtcaaggggcagtttaaagcagaccatcaatatcaaattgtcattggtccaggaacagtcgatgaagtgtataagcagtttattgatgaaacaggtgctcaagaagcttcgaaagatgaagcgaaacaagcagctgcacaaaaagggaatccagtacaacgtttgatcaaattgttgggggatatttttataccaatattacctgcgattgtgacagctggtttgttaatgggaatcaataatttacttacaatgaaaggtttatttggtccaaaagcacttattgagatgtatccacaaattgctgatatttcaaacatcattaatgtgattgcgagtacggcatttattttcttaccagcattaattggttggagtagtatgcgtgtatttggtggtagtccgattctaggcatagtcttaggtttgattttaatgcatccgcaattagtatctcagtatgatttggcaaaagggaatattccgacgtggaacttatttggcttagagattaagcagttgaattaccaaggtcaagtgttgccagttttaattgcagcttacgttctagctaaaattgaaaaaggattaaataaagtcgttcacgattcgataaaaatgttggtcgttggacccgtagcgcttttagttactggatttttagcatttattatcattggaccagttgcgttattgattggtacaggtattacatctggtgttacatttatattccaacatgcaggatggcttggcggagcaatatatggattgttatatgcaccacttgtaattacaggactacaccatatgtttttagcagtagatttccaattgatgggtagcagcttaggcggtacgtatttatggccaattgttgcgatttccaatatttgtcagggctctgcagcatttggagcatggtttgtctataaacgtcgtaaaatggttaaagaagaaggcttggcattaacatcttgtatttctggtatgttaggtgttactgaaccagccatgttcggtgtgaacttacctctgaaatatccatttatcgctgcgatatcaacgtcttgtgtattgggggcaatcgttggtatgaataacgtacttggaaaagttggtgttggtggcgtgccagcattcatttcaattcaaaaagaattttggccagtatatcttattgtgacagctattgctattgttgtaccatgtatactaacaattgtgatgtctcattttagtaaacaaaaagcgaaagaaattgttgaagattaa

SEQ ID NO: 406838 - DNA, 1641 bp, Staphylococcus aureus
gtgtcgaaagaaatagattggagaaaatccgttgtatatcaaatttatcctaagtcgtttaatgatacgacggggaatggtataggagatatcaatggaattatagaaaaattggattatatcaagttattgggtgttgattatatttggttaacaccagtgtatgaatcaccgatgaatgataatggctatgatatcagcaattatttagaaatcaatgaagactttggaacgatggatgattttgaaaagttaatcaaagttgcgcatcaaaaagacttgaaagtgatgttagatattgtcattaatcatacgtcgacggagcatgaatggtttaaagaagcccgtaaatctaaagataacccttatagagattattactttttcagatcatctgaagacgggccgccaacaaattggtattctaaattcggtggtaatgcatggaagtatgattctgagacagatgaatattatttacatttatttgatgtcagtcaagctgatttaaattgggataatccggaagtacgtcaatcgttatatcgcatagtcaatcattggatagacttcggcgttgatggttttcgatttgatgtcattaacttaatttctaaaggtgaatttaaggactctgacaaaataggtaaagaattttatacggatggtcctagagtgcatgagtttctgcatgaattaaatcgtcaaacgtttggtaacactgacatgatgactataggagaaatgtcttcgacgacgattgaaaattgtattaagtatacacaaccagaacgccaagaattgaatagtgtttttaattttcatcatctaaaggttgattatgttgatggtgaaaagtggacaaatgcgaagcttgattttcataagttaaaggaaattctgatgcaatggcaacgaggtatttatgacggtggcggatggaacgcgattttctggtgtaatcatgatcagccacgggtagtgtctagatttggtgatgatacgtcggaagagatgaggatacaaagtgctaaaatgttagctatcgcactgcatatgttgcaagggacgccatatatttaccaaggtgaagaaattggtatgacggacccacattttacatcaatagcacaatatcgtgatgttgaatcgattaatgcctaccatcagttgttaagtgaagggcatgctgaagcggatgtgttagcgattttaggacagaagtcacgagacaattcgagaacgcctatgcaatggagtgatgatgttaatgctggatttacagctggtaagccttggattgatatttcggaaaattatcatcaggtcaacgttagacaagcacttcagaataaagagtctattttctatacgtatcaaaaattaatacaattaagacatacgcatgatattattacgtatggagacattgtgccacgttttatggatcatgatcatttatttgtttatgaacgtcattataagaatcaacaatggctagtaattgcgaatttctcagcatcggctgttgatttgccagaaggattggctagagaaggttgtgttgtgattcaaacaggcacagtggaaaataatacgataagcgggtttggtgcaattgtaatcgaaacaaacgcgtaa

SEQ ID NO: 406839 - DNA, 729 bp, Staphylococcus aureus
atggcgaaacaaaaaaagtttatgaagatttatgaggcgttgaaagaagatatattaaacgggcagattcaatatggtgaacaaattccgtctgaacatgatttggtgcaattgtaccagtcatctcgagagaccgtgcgtaaggcattagatttgttggcattagacggcatgattcaaaagattcatggtaaagggtcacttgtcatttatcaggaggttacagagtttccattttctgaacttgttagttttaaagaaatgcaagaagaaatgggcgtcgcatatttaactgaagttgttgtgaatgaggttgttgaagcgcatgaagttccagaagttcaacatgctttaaacatcaattctagtgaatcactcattcatattgttagaactcgtcggcttaaccaacatgtgaagattgttgatgaagattattttctaaagtcgattgtttcagatataggtaatgatgttgcgagtgattctatttatgattatttggaaaaggtattaaatcttaatattagttattcaagtaagtctattacttttgaaccgtttgatgaacaagcatatcaattgtttggtgatgtatcggtggcttattcagcaacagttcgaagtattgtgtatttagaaaatacaatgccgtttcaatataatatttcaaaacatcttgcaaatgaatttaaatttaatgacttctcaagacgtcgtataaagtaa

SEQ ID NO: 406840 - DNA, 525 bp, Staphylococcus aureus
atgcaaatatatttaagtactttaacagagttagattatgataaatctttaaatagtattgaagaaagttttgatgataatcctgaaacgagttggcaagcacgtgcgaaagtaaaacatttaagaaaatctccttgctataattttgaattagaagtaatagcgaaaaatgaaaataacgatgtcgttggacacgttttattaattgaagtagaaattaatagtgatgataagacgtattatggtttggcgattgcctctttatcagttcatcctgaattacgtggacaaaaattaggtcgtggcttggttcaagcagtagaagagcgtgccaaagcacaagagtatagtacggttgttgtagaccattgttttgactactttgaaaagttgggttatcaaaatgctgctgagcatgacattaaattagaatctggtgatgcaccgttacttgtaaaatatttatgggataatttgacggatgcaccacacggaatcgtaaaatttccagaacatttttattaa

SEQ ID NO: 406841 - DNA, 1698 bp, Staphylococcus aureus
ttgaattatcaagccttatatcgtatgtacagaccccaaagtttcgaggatgtcgtcggacaagaacatgtcacgaagacattgcgcaatgcgatttcgaaagaaaaacagtcgcatgcttatatttttagtggtccgagaggtacggggaaaacgagtattgccaaagtgtttgctaaagcaatcaactgtctaaatagcactgatggagaaccttgtaatgaatgtcatatttgtaaaggcattacgcaggggactaattcagatgtgatagaaattgatgctgctagtaataatggcgttgatgaaataagaaatattagagacaaagttaaatatgcaccaagtgaatcgaaatataaagtttatattatagatgaggtgcacatgctaacaacaggtgcttttaatgcccttttaaagacgttagaagaacctccagcacacgctatttttatattggcaacgacagaaccacataaaatccctccaacaatcatttctagggcacaacgttttgattttaaagcaattagcctagatcaaattgttgaacgtttaaaatttgtagcagatgcacaacaaattgaatgtgaagatgaagccttggcatttatcgctaaagcgtctgaagggggtatgcgtgatgcattaagtattatggatcaggctattgcatttggtgatggtacgttaacattgcaagatgcgttgaatgtcacaggtagcgtacatgatgaagcgttggatcacttgtttgatgatattgtacaaggtgacgtacaagcatcttttaaaaaataccatcagtttataacagaaggtaaagaagtgaatcgcctaataaatgatatgatttattttgtcagagatacgattatgaataaaacatctgagaaagatactgagtatcgagcactgatgaacttagaattagatatgttatatcaaatgattgatcttattaatgatacattagtgtcgattcgttttagtgtgaatcaaaacgttcattttgaagtgttgttagtaaaattagctgagcagattaagggtcaaccacaagtgattgcgaatgtagctgaaccagcacaaattgcttcatcgccaaacacagatgtattgttgcaacgtatggaacagttagagcaagaactaaaaacactaaaagcacaaggagtgagtgtcgctcctgttcaaaaatcttcgaaaaagcctgcgagaggcatacaaaaatctaaaaatgcattttcaatgcaacaaattgcaaaagtgctagataaagcgaataaggcagatatcaaattgttgaaagatcattggcaagaagtgattgatcatgccaaaaataatgataaaaaatcactcgttagtttattgcaaaattcggaacctgtggcggcaagtgaagatcacgtacttgtgaaatttgaggaagagatccattgtgaaatcgtcaataaagacgacgagaaacgtagtagtatagaaagtgttgtatgtaatatcgttaataaaaacgttaaagttgttggtgtaccatcagatcaatggcaaagagttcgaacggaatatttacaaaatcgtaaaaacgaaggcgatgatatgccaaagcaacaagcacaacaaacagatattgctcaaaaagcaaaagatcttttcggtgaagaaactgtacatgtgatagatgaagagtga

SEQ ID NO: 406842 - DNA, 318 bp, Staphylococcus aureus
atgcgcggtggcggaaacatgcaacaaatgatgaaacaaatgcaaaaaatgcaaaagaaaatggctcaagaacaagaaaaacttaaagaagagcgtattgtaggaacagctggcggtggcatggttgcagttactgtaactggtcataaagaagttgtcgacgttgaaatcaaagaagaagctgtagacccagacgatattgaaatgctacaagacttagtgttagcagctactaatgaagcgatgaataaagctgatgagcttactcaagaacgtttaggtaaacatactcaaggcttaaacatccctggaatgtga

SEQ ID NO: 406843 - DNA, 597 bp, Staphylococcus aureus
atgcattatccagaacctatatcaaaacttattgatagctttatgaaattgccaggcattggtccaaagacagcccaacgtctggcttttcataccttagatatgaaagaagacgatgttgttcagtttgccaaagcattagtagatgttaagagagaattaacatattgtagcgtatgtggtcacattactgaaaatgatccatgttatatttgtgaagataagcaaagagatcgttcagttatttgtgttgtggaagatgacaaagatgtcatagctatggaaaaaatgagagaatacaaaggtttatatcacgttttacatgggtctatttcgcctatggatggcattggaccagaagatattaatattccttcattgattgaacgcttgaaaaacgatgaagttagcgaattaatcttagctatgaacccgaacttagagggggaatctacagccatgtatatttctagattagttaagcctataggtatcaaagtgacgagattagcacaagggttatcggtaggtggcgatttagagtatgctgacgaagtaacattatctaaagcaatcgcaggtagaacagaaatgtaa

SEQ ID NO: 406844 - DNA, 936 bp, Staphylococcus aureus
atgactgaaatagattttgatatagcaattatcggtgcaggtccagctggtatgactgctgcagtatacgcatcacgtgctaatttaaaaacagttatgattgaaagaggtattccaggcggtcaaatggctaatacagaagaagtagagaacttccctggtttcgaaatgattacaggtccagatttatctacaaaaatgtttgaacacgctaaaaagtttggtgcagtttatcaatatggagatattaaatctgtagaagataaaggcgaatataaagtgattaactttggtaataaagaattaacagcgaaagcggttattattgctacaggtgcagaatacaagaaaattggtgttccgggtgaacaagaacttggtggacgcggtgtaagttattgtgcagtatgtgatggtgcattctttaaaaataaacgcctattcgttatcggtggtggtgattcagcagtagaagagggaacattcttaactaaatttgctgacaaagtaacaatcgttcaccgtcgtgatgagttacgtgcacagcgtattttacaagatagagcattcaaaaatgataaaatcgactttatttggagtcatactttgaaatcaattaatgaaaaagacggcaaagtgggttctgtgacattaacgtctacaaaagatggttcagaagaaacacacgaggctgatggtgtattcatctatattggtatgaaaccattaacagcgccatttaaagacttaggtattacaaatgatgttggttatattgtaacaaaagatgatatgacaacatcagtaccaggtatttttgcagcaggagatgttcgcgacaaaggtttacgccaaattgtcactgctactggcgatggtagtattgcagcgcaaagtgcagcggaatatattgaacatttaaacgatcaagcttaa

SEQ ID NO: 406845 - DNA, 1440 bp, Staphylococcus aureus
atggcgcaaaagaataataatgtaattccaatgacttttgatgatgcattttatcgtaaaatggctaaacagaagtttaaacaaagagaatataaacgagctgctgaatactttgaaaaagtgttagaattgtcacctgatgatatggaaattcaaattgattatgcacaatgtctagtgcaacttggtattgctaaaaaagcagaacatttattttatgacaatattatttataataggcatctagaagatagcttttatgaattgagtcagctcaacattgaagttaacgaaccaaacaaggcattcttgtttggtattaattatgttattgttagcgacgaccaagattatagagatgaattagatcaaatgtttgatgtgaaatatcaaagtgaagaacaaattgaacttgaagctcaattgtttgtagttcaaatactattccaatatcttttttctcaaggtcgattaaaagatgcaaagaattatgtcttacatcaaccacaagaagttcaagatcatcgtgtagtacgtaatttattggcaatgtgttatttatatctcggtgaatatgatacggctaaagcattgtacgaagcactattacaagaggatagtacagatatatatgcattatgccattatactttgctactttataacactaaggaaaatgaacaatatcaaaaatatttaaaaatattaaacaaagttgtacctatgaatgacgatgaaagttttaaattaggtattgtattaagttatttaaagcagtatcgtgcatcacaacaattgttgtaccctttatataaaaaagggaaatttttatcaattcaaatgtacaatgctttagcatataattattattatttaggtgaagaagacgaaagtcattactactgggataaattgaagcaaatttctaaagtggaaattggacatgcgccttgggtaattgaaaatagcaaagaagtttttgaccaacatattttgccattacttcaaagtgatgacagtcattatcgtttatatggtatttttttattggatcaattaaatggtaaagaaattgtgatgacggaaagtatttggcaggttttggaaaatctaaataattatgagaaattgtatttaacgtatttagttcaaggtttaacgctcaataaattagacttcattcatcgcggcttattaacgctttaccataatgaattatttgtaagtgaaaatgatgtaatggttgcatggattaatcaaggtgaactcataattgctgaaaaagtagatttaactgatgttgagccatatatcggtgcgtttatttatttgtattttaaaaatcaacctcgaaacgttacaaagaagcaaattacaacatggttaggcataacacaatataaactgaacaaaatgattgaatttctcttgagcatatag

SEQ ID NO: 406846 - DNA, 486 bp, Staphylococcus aureus
ttgaggaaatttttatcaaaaacacatcatcatacaaaccctttatggcgtgtataccgtcttgttaaattttcgaaagtttttaagaatgtaattatcattgaattttcgaaatttattccaagtatggtactgaaaagacatatatataaacaacttttaaatattaatatcggtaatcaatcgtcgatagcttataaagtaatgttagatattttttacccagaactgattacgattggtagtaacagtgttattggttacaatgtaacaattttgacgcatgaagcattagttgatgaatttcgttatggaccagtgacgataggatctaacactttgattggtgcaaatgctaccattttacccggtataacgattggtgacaatgtaaaagttgcagctggtacggttgtttcaaaagatataccggataatggatttgcatatggcaaccctatgtatataaaaatgattaggaggtga

SEQ ID NO: 406847 - DNA, 840 bp, Staphylococcus aureus
atgggtattgtatttaactatatagatcctgtggcatttaacttaggaccactgagtgtacgatggtatggaattatcattgctgtcggaatattacttggttactttgttgcacaacgtgcactagttaaagcaggattacataaagatactttagtagatattattttttatagtgcactatttggatttatcgcggcacgaatctattttgtgattttccaatggccatattacgcggaaaatccaagtgaaattattaaaatatggcatggtggaatagcaatacatggtggtttaataggtggctttattgctggtgttattgtatgtaaagtgaaaaatttaaacccatttcaaattggtgatatcgttgcgccaagtataattttagcgcaaggaattggacgctggggtaactttatgaatcacgaggcacatggtggatcggtgtcacgcgcttttttagaacaattacatttgcctaattttataatagaaaatatgtatattaacggccaatattatcatccaacattcttatatgaatccatttgggatgtcgctggatttattatcttagttaatattcgtaaacatttaaaattaggagaaacattctttttatatttaacttggtattcaattggtcgattctttatagaaggattacgtacagatagcttaatgctcacaagtaatattagagttgcacaattagtatcaattcttttaattttaataagtataagtttaattgtatatagaaggattaagtataatccaccgttgtatagcaaagttggggcgcttccatggccaacaaaaaaagtgaagtag

SEQ ID NO: 406848 - DNA, 933 bp, Staphylococcus aureus
atgttaacgacagaaaaactagttgaaacattaaagttagatttaatcgctggtgaagaaggactatcgaagccaattaaaaatgctgatatatcaagaccgggcttagagatggcaggttatttttcacattatgcgtcagatagaatacaactattaggaacaacggaactatcgttttacaatttattaccagataaggatcgcgcaggtcgtatgcgtaaactatgcagaccagaaacgcctgcaattattgtgacacgtggattgcagccaccagaagaattagttgaagctgcaaaagaattaaataccccacttatagttgctaaagatgcgactacaagtttaatgagtcgcttaacaacgtttttagagcatgcacttgcaaagacgacatctttacatggtgttttagtagatgtttacggtgttggtgtactaattaccggtgattcaggaataggtaaaagtgagactgcgttggaattagttaaacgtgggcatagattagtagcagatgataatgtagaaatacgtcaaattaataaagatgaactaatagggaaaccaccaaagttaatagaacatctattagaaatacgtggactaggtattatcaatgttatgactttatttggcgcgggttcaatattaactgaaaaacgaattagattaaatattaatttggaaaactggaacaagcaaaagttatatgaccgcgtaggtcttaatgaagagacgctaagtattttagatactgaaatcactaaaaaaacaatacctgtaagacctggtagaaatgttgcggtaattattgaggtcgctgcaatgaactatcgattaaatatcatgggcattaacacggccgaagaatttagtgaaagattaaatgaagaaattatcaagaacagtcataagagtgaggagtag

SEQ ID NO: 406849 - DNA, 2847 bp, Staphylococcus aureus
atgaaagaaccatccatagtagtaaaaggtgctcgtgcgcataacttgaaagatattgatatcgaactacctaaaaataaattaattgttatgacaggtttatctgggtcaggtaaatcgtcattagcattcgatactatatatgctgaaggacaacgacgttatgttgaatcattaagtgcctatgcgcgtcaatttttaggccaaatggacaaaccagatgttgatacaattgaaggattatcgccagcaatttcaatagatcaaaaaacaacaagtaaaaatccaagatcaactgtagcaacagtaacagaaatatatgattatatacgtttgttatatgcacgtgttggtaaaccttactgtccaaatcacaatatagaaattgaatcgcaaacagtacaacaaatggttgaccgcattatggaattagaggcacgtacaaagattcaattattagcacctgtcatcgctcatcgtaaaggtagtcatgaaaagctaatcgaagatattggtaaaaaaggttatgtacgtttaagaatcgatggcgaaattgttgatgtaaatgatgtacctactttagataagaacaagaatcatacaatagaaattgttgtagaccgattagttgttaaagatggaattgaaacacgactagctgactctatagaaactgccttagagctttcagaaggacaattaacagtcgatgtcattgacggggaagaccttaagttttcagaaagccatgcttgtcctatatgtggattttcaatcggagagttagaaccaagaatgtttagctttaacagtccttttggtgcttgtccgacatgtgatggcttaggccaaaagttaacagtcgatgtagacttggttgttcccgacaaagataagacgctaaacgaaggtgcaatagaaccttggataccgacgagttctgatttttatccaacattgttaaaacgtgtttgtgaagtttataaaatcaatatggataaaccttttaaaaagttaacagaacgtcaacgtgatattttattgtatggttctggtgacaaagaaattgaatttacatttacacaacgtcaaggtggtactagaaaacgaacaatggttttcgagggtgtagttcctaatataagtagacgattccatgaatctccttcagaatatacacgtgaaatgatgagtaaatatatgactgaactaccttgcgaaacttgtcatggaaagcgattgagtcgtgaagcgttatctgtttatgtaggtggtttaaatattggtgaagtagtcgaatattcaatcagtcaagcgctgaactattataaaaacattgatttgtcagaacaagatcaagcgattgcaaatcaaatattgaaagaaattatttcccgactcacttttttaaataatgtgggacttgaatatttaacgttaaacagagcttcaggtacactttcaggtggtgaagcacaacgtattcgattagcaacgcaaattgggtcgcgtttgactggtgtcttatatgtattagatgagccatcaattggactgcatcaaagagataatgatcgattaattaatacacttaaagaaatgagagatttaggaaatactttaattgtagttgaacacgatgatgatacaatgcgtgcggctgattacttagtggatataggtcctggtgctggtgaacatggagggcagattgtgtctagtggtactcctcaaaaggtaatgaaagataaaaaatcattaacaggacaatacttgagtggtaagaaacgtattgaagtacctgaatatcgcagaccggcttcagatcgtaaaatttctatacgtggagctagaagcaacaatcttaaaggggttgatgtggacataccactatcaatcatgacggttgttacaggtgtatcaggttctggtaaaagctcattagtaaatgaagtattatacaaatcattagctcaaaaaattaataaatctaaagtaaagccaggattgtacgataagattgaaggtattgatcaacttgataaaattattgatattgatcaatcaccaataggtagaacgccacgctctaatccagcaacatatactggtgtgtttgatgatatacgtgatgtgtttgcgcaaacaaatgaagctaaaattcgaggatatcaaaaagggcgttttagttttaatgtaaaaggtggacgctgtgaagcttgtaaaggtgacggtattattaaaattgaaatgcattttttacctgatgtttatgttccttgtgaagtgtgtgatggtaaacgatataatcgtgagacactagaggttacttacaaaggtaaaaatattgctgacattttagaaatgactgttgaagaagcaacacaattttttgaaaatattcctaagattaagcgcaagttacaaacactagttgatgttggtcttggatacgtcacattaggtcaacaagctacaacgttatcaggtggtgaggctcaacgtgtgaaacttgcatctgaacttcataaacgttcaactggtaaatctatttatatcctagatgaaccgacaacagggttacatgttgacgatattagtagattattaaaagtattaaaccgattagttgaaaatggtgatactgttgtaattattgaacataacctagatgttatcaaaacagcagactatattatagacttaggtcctgaaggtggtagtggcggtggtactattgttgcgactggcacacccgaagatattgctcagacaaagtcatcatatacaggaaagtatttaaaagaagtacttgaacgagataaacaaaatactgaagataaataa

SEQ ID NO: 406850 - DNA, 1986 bp, Staphylococcus aureus
atggttgaacattatccttttaaaatacattctgattttgagcctcaaggtgaccaaccgcaagcaattaaagaaatcgtggaaggtattaaagcggggaaaagacatcaaactttattaggtgctactggcacagggaaaacatttacgatgagtaatgttattaaagaagttgggaaaccaacgttaattatcgcgcataacaaaacattagcaggacaattatatagtgagtttaaagaattttttcctgaaaacagggtggaatactttgtaagttactatgattattatcaaccagaggcatacgtaccgtctactgacacttttattgaaaaagatgcctcaatcaatgatgaaattgatcaactacgacattctgctacaagtgcattatttgaacgcgatgatgtaattattattgctagtgtaagttgtatatatggtttaggtaatcctgaagaatataaagatttagtagtaagtgttcgagttggtatggaaatggatagaagtgaattacttagaaaacttgtagatgtgcaatatacacgaaatgacatcgatttccaacgaggaacgtttcgagtgcgtggtgatgtagtggaaatattcccagcctctaaagaagaactttgtataagggttgagtttttcggcgatgagattgaccgtatccgagaagttaactacctaacaggtgaagtgttgaaagaaagagaacattttgcgatattcccagcttctcacttcgtaacacgtgaagaaaagttgaaagttgcgattgaacgtattgaaaaagaattggaagaacgattgaaagaattacgagatgagaataaattactagaagcgcaaaggttagaacagcgtaccaactatgatttagaaatgatgcgagagatgggattctgttcaggaattgaaaactattccgtacatttaactttgcgaccactgggttcgacaccatatactttattggattactttggcgatgattggttagtaatgattgatgaatcacatgtgacattaccgcaagttcgaggcatgtataacggagacagagcgcgtaaacaagttttggtggatcatgggtttagattaccgagtgcattagataaccgtccacttaaatttgaagaatttgaagaaaagacaaaacaacttgtgtatgtatctgcaacgcctggaccatacgaaattgaacatacggataagatggttgaacaaattattcgtcctactggtttactggatcctaagattgaggttagacctactgaaaatcaaattgacgatttattaagtgaaattcaaacaagagttgagcgtaatgaacgcctacttgttacaacgctcactaaaaagatgagtgaagatttaaccacatacatgaaagaagcgggtattaaagttaattatctgcattcagaaatcaagacattagaacgaattgaaataattagagacttacgaatgggtacatatgatgttatcgtaggtattaatttattaagagagggtattgatataccagaagtttctctagttgtcatattagatgcagataaagaagggtttttacgttctaaccgctcattaattcaaacaataggtagagctgcgcgtaacgataaaggtgaagtcattatgtatgccgataaaatgactgattcgatgaagtatgcaattgatgagacacaacgtcgtcgagaaatacagatgaaacataatgaaaaacatggtattacacctaaaacaattaataaaaaaatacatgatttaattagtgctactgttgaaaatgacgaaaataatgacaaagcacaaactgtgatacctaagaagatgacgaaaaaagaacgtcaaaagacaatcgacaatatagaaaaagaaatgaaacaagcagcgaaagatttagatttcgagaaagctacagaattaagagatatgttatttgaattaaaagcagaagggtga

SEQ ID NO: 406851 - DNA, 237 bp, Staphylococcus aureus
atgatatggtattttagcgcagcattctttccatgtgtcttggtagtattatttagtgtaataacaagaagtaaatgggtcggtactattctgacattaattttaattggtgcctcaatctataaagagtatttccataacgagtggattatttttattgatgtagtgtcattattagctggttatttaattatagatcaactcgaatttcataaacatcaagatgaagatcgctaa

SEQ ID NO: 406852 - DNA, 651 bp, Staphylococcus aureus
atgggtgtacatcaatattttaaaagattatcagatatggaaagacttataagattacctggaaaatttaaatattttgaacacaatgttgcagcacactcctttaaagtaactaaaattgcacaatatctagcaacagttgaagaatatcatggacgaaagattaattggaaaagcttatatgaaaaagcattaaatcatgatttcgccgaagtgtttactggtgatataaaaacacctgttaaatatgcgagtagtgaattaaaaaaattattttcgcaagttgaagaagaaatggtagagacctttattgaagaagaaattccattacaatatagagatgtttataagcaacgactgcaagaaggtaaagatgattcattagaaggccaaatactttcagttgctgataaaattgatttgctttatgaaacatttggagaaatacaaaaacgtaatcccgaagaattatttttcgaaatttatgaaatgagtctagaaacaattattcaatttgaccatttagcatctgtacaagattttattaataatatcattccagaaatgttgactgaaaactttatacctagaacagaattaagagaaacaaccatgaacattttaaataaaagaaaagaggaaaatgaatga

SEQ ID NO: 406853 - DNA, 840 bp, Staphylococcus aureus
atgaaaaaatctcttacagtgacggtttcgtcagtgttagcttttttagctttaaataatgcagcacatgcacaacaacatggcacacaagtaaaaacacctgttcaacataattatgtatcaaatgttcaagcacaaacgcaatcaccgacaacttatacagtagttgctggcgattcattatataagattgctttagagcatcacttaacgttgaatcaattatattcatacaatcctggtgtaacacctttaatttttcctggtgacgtgatttcacttgtgcctcaaaataaagtgaaacaaactaaagcggttaaatcaccagtaagaaaagcaagccaagctaaaaaggtagtaaaacaacctgtacaacaagcatctaaaaaagtagtagttaagcaagcacctaagcaagcagtaactaagacagttaatgtagcatacaaacctgctcaagtacaaaaatcagtaccaactgtacctgttgcacataactacaataaatcagttgctaacagaggaaacttatatgcttatggaaactgcacatattatgctttcgatcgtcgtgcacaattaggtagaagtataggaagtttatggggcaatgcaaataactggaattacgcagcaaaagttgcaggatttaaagtagataaaacaccagaagttggcgctattttccaaacagctgctggtccatatggacatgttggtgttgttgaatctgtaaaccctaatggaacaattactgtttctgaaatgaactatgctggatttaatgttaaatcttcaagaacaattttaaatccaggaaaatataattacatccactaa

SEQ ID NO: 406854 - DNA, 993 bp, Staphylococcus aureus
atggcagaacctaatttttgggataaccaaacgaaagcgcaagatattatagataaaaataatgcgttaaaagcaatagttaatggttataaaacactacaagcagaagtagatgacatggatgctacttgggatttattacaagaagaatttgatgaagaaatgaaagaagacttagagcaagaggtcattaattttaaggctaaagtggatgaatacgaattgcaattattattagatgggcctcacgatgccaataacgcaattctagagttacatcctggtgcaggtggcacggagtctcaagattgggctaatatgctatttagaatgtatcaacgttattgtgagaagaaaggctttaaagttgaaactgttgattatctacctggggatgaagcggggattaaaagtgtaacattgctcatcaaagggcataatgcttatggttatttaaaagctgaaaaaggtgtacaccgactagtacgaatttctccatttgattcatcaggacgtcgtcatacatcatttgcatcatgcgacgttattccagattttaataatgatgaaatagagattgaaatcaatccggatgatattacagttgatacattcagagcttctggtgcaggtggtcagcatattaacaaaactgaatcggcaatacgaattacccaccacccctcaggtatagttgttaataaccaaaatgaacgttctcaaattaaaaaccgtgaagcagctatgaaaatgttaaagtctaaattatatcaattaaaattggaagagcaggcacgtgaaatggctgaaattcgtggcgaacaaaaagaaatcggctggggaagccaaattagatcatatgttttccatccatactcaatggtgaaagatcatcgtacgaacgaagaaacaggtaaggttgatgcagtgatggatggagacattggaccatttatcgaatcatatttaagacagacaatgtcgcacgattaa

SEQ ID NO: 406855 - DNA, 2532 bp, Staphylococcus aureus
atgggatttttatcaaaaattcttgatggcaataataaagaaattaaacagttaggtaaacttgctgataaagtaatcgctttagaagaaaaaacggcaattttaactgatgaagaaattcgtaataaaacgaaacaattccaaacagaattagctgacattgataatgtcaaaaagcaaaatgattatttagataaaattttaccagaagcatatgcacttgttagagaaggctctaaacgtgtattcaatatgacaccatataaagttcaaattatgggtggtattgcaattcataaaggtgatatcgctgagatgagaacaggtgaaggtaaaacattaacagcgacaatgccaacatacttaaatgcattagctggtagaggtgttcacgttattacagtcaatgaatacttatcaagtgttcaaagtgaagaaatggctgagttatataacttcttaggtttgactgtcggattaaacttaaacagtaagacgacagaagaaaaacgtgaagcatacgcacaagacattacttacagtactaataatgagctaggttttgattacttacgagataacatggtgaattattctgaagatagagtaatgcgtccattacattttgcaatcattgatgaggttgactcaattttaatcgacgaggcacgtacgccattaattatttctggtgaagctgaaaagtcaacgtcactttatacacaagcaaatgtttttgcgaaaatgttaaaacaggacgaagattataaatacgatgaaaaaacgaaagctgtacatttaacagaacaaggtgcggataaagctgaacgtatgttcaaagttgaaaacttatatgatgtacaaaatgttgatgttattagtcatatcaacacagctttacgtgcgcacgttacattacaacgtgacgtagactatatggttgttgatggcgaagtattaattgtcgatcaatttacaggacgtacaatgccaggccgtcgtttctcggaaggtttacaccaagctattgaagcgaaggaaggcgttcaaattcaaaatgaatctaaaactatggcgtctattacattccaaaactatttcagaatgtacaataaacttgcgggtatgacaggtacagctaaaactgaagaagaagaatttagaaatatttataacatgacagtaactcaaattccgacaaataaacctgtgcaacgtaacgataagtctgatttaatttacattagccaaaaaggtaaatttgatgcagtagtagaagatgttgttgaaaaacacaaggcagggcaaccagtgctattaggtactgttgcagttgagacttctgaatatatttcaaatttacttaaaaaacgtggtatccgtcatgatgtgttaaatgcgaaaaatcatgaacgtgaagctgaaattgttgcaggcgctggacaaaaaggtgccgttactattgccactaacatggctggtcgtggtacagatatcaaattaggtgaaggcgtagaggaattaggcggtttagcagtaataggtacagagcgacatgaatctcgtcgtattgatgaccagttacgtggtcgttctggacgtcaaggtgataaaggggatagtcgcttctatttatcattacaagatgaattaatgattcgttttggttctgaacgtttacagaaaatgatgagccgactaggtttagatgactctacaccaattgaatcaaaaatggtatcaagagctgtagaatcagcacaaaaacgtgtagaaggtaataacttcgacgcgcgtaaacgtatcttagaatacgatgaagtattacgtaaacaacgtgaaattatctataacgaaagaaatagtattattgatgaagaagacagctctcaagttgtagatgcaatgctacgttcaacgttacaacgtagtatcaattactatattaatacagcagatgacgagcctgaatatcaaccattcatcgactacattaatgacatcttcttacaagaaggtgacattacagaggatgatatcaaaggtaaagatgctgaagatattttcgaagtcgtttgggctaagattgaagcagcatatcaaagtcaaaaagatatcttagaagaacaaatgaatgagtttgagcgtatgattttacttcgttctattgatagccattggactgatcatatcgacacaatggatcaattacgtcaaggtattcacttacgttcttatgcacaacaaaatccattacgtgactatcaaaatgaaggtcatgaattatttgatatcatgatgcaaaatattgaagaagatacttgtaaattcattttaaaatctgtagtacaagttgaagataatattgaacgtgaaaaaacaacagagtttggtgaagcgaagcacgtttcagctgaagatggtaaagaaaaagtgaaaccgaaaccaatcgttaaaggcgatcaagttggtcgtaacgatgattgtccatgtggtagtggtaaaaaattcaaaaattgccatggaaaataa

SEQ ID NO: 406856 - DNA, 573 bp, Staphylococcus aureus
atgattagatttgaaattcatggagataacctcactatcacagatgctattcgcaactatattgaggaaaaaattggtaagttggaacgttattttaatgacgtaccaaatgcagtggcgcatgttaaagttaaaacttattcaaattcagctactaaaattgaagtaacaattccattgaaaaatgttacgttaagagctgaagagcgaaacgatgatttatacgcaggtattgatttaattaataataaacttgaaagacaagttcgaaaatataaaacacgtattaatcgtaagagccgtgatcgaggagatcaagaagtgtttgttgccgaattacaagaaatgcaagaaacacaagttgataatgacgcttacgatgataacgagatagaaattattcgttcaaaagaattcagcttaaaaccaatggattcagaagaagcggtattacaaatgaatctattaggtcatgacttctttgtattcacagacagagaaactgatggaacaagtatcgtttaccgccgtaaagacggtaaatatggcttgattcaaactagtgaacaataa

SEQ ID NO: 406857 - DNA, 675 bp, Staphylococcus aureus
atgaataattgtttgagttgtggtgctaagttatatgaaaatataaccatttataatttgttcaagaaacctaatagattatgtgacagatgcaaagagaattgggacaatattaaacttgatattaaagcaaggcgatgttcaaggtgcttaaaacacttaaatcaagatgaagcgtattgtttagactgcaagtttctatcggcacactttaatttaatggaacaattatattgtcaatttcaatatgacggtttaatgaaagagatgatacatcagtataaatttttgaaagactattatttatgtgaattattggcacatttgattgaaataccacaaacatcttatgactatattgtgccaattccttcttcgccggcacatgatttatctagaacatttaacccggtagaagcagtactaaaagctaaagggattcgctttgataagattttaaagatgtcaaatagaccaaaacagtctcatttaactaagaaagagcgtctggcagatgaaaatccatttattattgatacggaattagatttaaatggtaaggaaatattactcgttgacgatatttatacaactggattaacaattcatcgtgcagggtgtaaattatatgctaaaaatatcagaaaattcaaagtgtttgcgtttgcacgatag

SEQ ID NO: 406858 - DNA, 1083 bp, Staphylococcus aureus
atggataatgtaacaagatataaaataacagagagttcgcaaagttcatcacaagcatattatcatctctcatttgaattgtcggaacagcagtcttatgcctcagaacatattgttcgagccattagaaagagacaaacgattttgttatatgccgtaacaggtgcaggtaagacagaaatgatgtttcaaggcattcaatatgcaagaatacagggagataatatagctattgtgtcaccacgtgtagatgttgttgtagaaattagtaaacgtattaaagacgcatttcttaatgaagatatagacatactacaccagcaatcaagacaacaatttgaagggcattttgttgtatgcacagtgcatcaactttaccgattcaaacagcactttgatactatttttattgatgaagtcgatgcctttcctttatcaatggataaaaatttacaacaagcattgaagtcatcttctaaagttgaacatgcaacaatttatatgacagcaacaccaccgaaacaacttctgtcagagattccccacgaaaatataattaaattgccagctcgctttcataaaaaatcacttccagttcctaaatatcgttatttcaaacttaataataagaagattcagaaaatgttataccgaattttacaagatcaaattaataatcaacgttatacactggtgttttttaacaatatagaaacaatgattaaaacattttcggtttataagcagaaaattactaaattaacatacgtccatagcgaggatgtttttcgctttgaaaaagttgaacaattaaggaatggacatttcgatgtcatttttactacgacaatattagaacgtggatttacaatggcaaatttggatgttgttgttatcgatgcacatcaatatactcaagaggctttaatacaaattgctggacgtgttggacgaaaattagaatgtcctactggaaaagtattgttttttcatgaaggggtaagtatgaatatgattcaagctaaaaaagagattcaaaggatgaacaaattagcattaaaaagaggttggattgatgaataa

SEQ ID NO: 406859 - DNA, 867 bp, Staphylococcus aureus
atgaaaattgctgtgatgaccgattctacaagttatctgtcgcaggacttaatcgataaatataatattcaaatagcgccattaagtgtgacttttgatgatgggaagaactttacagaaagtaatgaaatagcaattgaagaattttataataaaatggcatcgtctcaaacgattccaacaacaagccaaccagcaattggcgaatggattactaaatatgaaatgttaagagatcaaggttacacagatatcattgtcatttgcttatcaagtgggattagtggaagttatcaatctagttatcaagcaggggaaatggttgaaggtgttaatgtacatgcatttgatagtaagcttgcagcaatgattgaaggatgttatgtattacgtgctattgaaatggttgaagaaggatacgagccacagcaaattattgatgatttaactaatatgcgtgaacacacaggtgcatatttaattgttgatgacttaaagaatttacaaaaaagtggtcgaattactggtgctcaagcatgggttggaacattattgaaaatgaagccagttcttaagtttgaagatggcaagattataccagaagaaaaagttcgtactaaaaagcgtgccattcaaacattagaaaagaaagtattagatattgtaaaagactttgaagaagtaactttatttgtcataaatggagatcatttcgaagatggtcaagcgttatacaaaaagttacaagatgattgtccttcagcttatcaagtagcatactctgagtttggtccagttgttgcagcacatttaggttctggtggattaggtttaggctatgttggcagaaaaataagattaacataa

SEQ ID NO: 406860 - DNA, 642 bp, Staphylococcus aureus
atgacacaaaatatcattactgttaaaaaagaacacattattgaaaatgtgattagtaaatcaagattcattgctcatatcaaacctgttcaaaatgaagatgaagctaaagcatttattgctgcaataaaaaaagaacataaagatgccactcataattgttctgcatatactattggacctgaaatgaatattcaaaaagcgaatgatgatggtgaaccgacaggaactgccggtgtcccaatgttagacatattaaaaaagctcgatgttcataatgcgtgtgtcgtagtaacaagatattttggtggtattaaattaggtggtggcggtttaattcgcgcctatagcggtgctgttagagacgtcatttatgatatcgggcgtgtcgaactacgagaagcagtaccatgtatagtaacactgaattatgatcaaactggtaaatttgaatatgaattagcttcaactcattttatgttaagaaaccaaacttacactgataaggtaagctactatatcgatgtcgttaaaagtgactatgaagcgtttattaactttttaaatcaaatgactgcaggaaatttcgatttgactgaagaaactccaaagcagttacctttcgatataccaactgaataa

SEQ ID NO: 406861 - DNA, 1056 bp, Staphylococcus aureus
atggttacattattactagttgcagtaacaatgattgtcagtttgacgataacaccaattgttattgcaatatcgaaaagattaaatttagttgataaaccaaattttagaaaagtacacactaaacctatttcagttatgggtggtacagtgattctcttttcatttttaataggtatttggattggtcatcctattgaaacagaaatcaaaccacttattattggtgcgattattatgtacgtacttgggcttgtagatgatatctacgatttgaaaccgtatataaaattggctggtcaaattgccgctgccttagtagttgctttttatggtgtgactattgattttatttcgttgccaatgggtacaacgattcattttggatttcttagtattccaattactgtgatttggattgttgctattacaaatgcaattaacttaattgatggactcgatggtttggcgtcgggtgtttctgcaatcggactcattacaatagggttcattgcaattttacaagctaatattttcataacgatgatttgttgtgttttattaggctctttaattgggtttttattttacaatttccatcctgccaaaatatttttaggtgatagtggggctttaatgattggatttatcatcggattcctttctttactcggattcaaaaatattacaattattgcattgttcttcccaattgttatcttagcagttccattcattgatactttgttcgcaatgattcgacgtgtgaaaaaagggcagcatataatgcaagctgataaatcgcatttgcatcataaactattagctttaggctacacacatagacaaacagtattattaatctattcaatctctattttatttagtctttcgagcattattttgtatgtatcgccaccattaggtgttgtattaatgtttgtattaatcatatttagtattgaattaattgttgaatttacaggattaatagataacaactaccgaccaatattaaatttaattagtcgtaagtcatctcataaagaggaatag

SEQ ID NO: 406862 - DNA, 1071 bp, Staphylococcus aureus
atgttcgaagcatttatatacaatatatctgttatagtcgctggaatctatttattccatcgcttacagtattcagaaaacaaacgtatggttttttctaaggcttatgtcactgttttaatgacaatcgtatcattattattatctgtctaccctatcccttatcgtgaagattatttaattcacttaacattcgttcctttattgtttttaggtagatttacaaatatggtctatacattatctgccacagtaattgtagcaattgttgaaattgtagtatttaacaactcgattatgtacggtgttacgttgattgttattgctgcagtaacaagtgctattggaccatttttaaaacaaaatgatgtgctatcattattaatacttaatgttgttacaataatcattttatttggtgtcgcgttagtgagtcctatttacacactatcggaagttatcattttaataccaatttcattaattatcactttagcttcagcgataacatttgtcgatatttggcatttcttctcactcgtaaatcgttatgaaaacgaagataaatatgattacttaacaggcttaggtaatgtaaaagaatttgatagacatttaaatgaaatttcacgaaaagctgaaaaagaacatcaaagtatcgcattattattaatcgatatcgatggatttaaagatgtcaatgatacctactcacacaaatcaggtgatgctgtattaaaacaaatgtctcaattacttaaaaactatgtgccgaatcaatttaaaatttttagaaatggtggcgaagagttctcagttgtcattcacaattattcacttgatcaaagtgttaaattagctgaaaatattcgttcgggtgttgaaaaatcatcattccatttaccaaacaaagaagttattaaattgtcagtgtctatcggtgttggttatttaacagatgacgatccaaaatcacagcgtaaagtgtttaaagatgcagacgatatggtgcatgtagccaaaaatcaagggcgaaacaaagtaatgtttaaccctattatcaatttataa

SEQ ID NO: 406863 - DNA, 762 bp, Staphylococcus aureus
atgccagattcaatcacaattatagatgaaaacaaagtgattgatgttgtattaattgcaggtagaattttacttgaatcaggtgctgaaacatatcgagttgaagatacaatgaaccgtatcgcacatagttatggtcttcataatacatatagttttgtcagttcaactgcaattattttttcattaaacgatcgaacaagtacaagattaattcgtgtaaaagagcgtacaacagatttagagaaaatcgctttaacgaatagtctttcacgtaaaatatcaaataaagaactcacaattgatgaagctaaatctgaatttattcatttacagcatgcatcattacaatattcttttttaacgaatttctttgcagctgccattgcatgtggcttcttcctatttatgtttggtggtgtcgcatcagattgttggattgcagtcattgctggcggatccgcatttttaacattcagctttgtgcaacgctatatacaaattaaatttttctcagagtttgttgcagccgctgtggtcatatccattgcagccacatttactaaattaggcattgcaaccaatcaagatatcattactatagccagtgtcatgccacttgtccctggtatattaattaccaatgccattcgagatttattagcgggtgaattacttgcaggtatgtctcgcggtgttgaagctgcattaacagcattcgcaatcggtgctggtgtcgcaatcgttttattaatcatttaa

SEQ ID NO: 406864 - DNA, 495 bp, Staphylococcus aureus
atgctattttatttatttcattttacaatcagctttatatcaacagtacttttctctatcattttcaatgcacccaaacgcctcttagtagcatgtggatttgtgggtgccattgcatggacgatttaccaattaacggtagatttagagtttggaaaagttggcgcttcatttttgggaagcttaattttaggcttaatgagtcatactatgagtcgcagatataaacgaccggtaattatattcatagtgccaggcattataccattagtacctggtggtgcagcttatcaagcgactcgttttttagtatcaaatgattatacaagtgctgtaaatacatttttagaagttacactgatttcaggtgcgattgctttcggtatattagtttctgaaattctatattacctatacacacgtatcaaacaactgtatggtaaaatcaaaggtaagacatataaaaaatcttacaacatgaataatagagtttaa

SEQ ID NO: 406865 - DNA, 1227 bp, Staphylococcus aureus
atgaagaaccaattgatagatagattaacaagatatacgacaattgatacgcaatctgatccaaaatctacaacaacaccttcaactgaaaagcaatgggatttgttacatttattagaaaaagaattacaacaattaggattgccaactgatttagatgaaaatggctacttatttgctacattagaaagtaacatcgatgtcgacgtcccaacagttggatttttggcgcatgttgatacatcacctgatttcaatgcttcaaatgttaaaccgcaaattattgaaaactatgatggtaagccatacaaactaggcaatactaaacgtgtcttagatcctaaagtatttccagaacttaacagtttagttggtcatacattaatggtaactgatggtacatcgttactaggtgcagacgataaagcgggtattgtggaaattatggaagctatttgttatttacaagaacatccagaaattaaacatggtaccattcgcattggatttacaccagacgaagaaatcggtcgtggtccacataaatttgatgttgaccgcttcaatgctgattttgcttatactatggatggtagtcaatatggagaattacaatatgaaagctttaacgctgctgaagcggttattacatgccacggtgtaaatgttcatcctggttcagctaaaaatgcaatggtaaacgcaatacgtttaggtgaacaattcgatagtttgctacctgatagtgaagttccggagcgaacagaaggatacgaaggcttttatcacttaatgaactttgaaggaactgttgaaaaagcaactttgcaatacattattcgtgatcatgataaaaaacaattcgaattgcgtaagaaacgtattttagaaatacgtgacgatatcaatgcccattttgaaaattatccagttaaagttgatatatcggatcaatatttcaatatggcagaaaaaatattaccattgcctcatattattgatatacctaaacgtgtctttgccaaattagatattccagcaaacactgaacctattcgcggtggtacagatggttcacaattgtcatttatggggttaccaactccaaacatctttacaggttgcggtaacttccacggcccatatgaatatgcatccattgatgttatggaaaaagcagtacaagtaatcattggaattgtagaagatatcgctgaaaatcactaa

SEQ ID NO: 406866 - DNA, 1125 bp, Staphylococcus aureus
atgaaagtattagtagccatggatgagtttcatggaattatttcaagttatcaagctaatagatatgttgaagaggcagttgcaagccaaattgaaactgcagatgtagttcaagtaccattgtttaatggaagacatgaattattagattctgtatttttatggcaatctgggcaaaagtatcgtataccagtacatgatgcagatatgaatgaagttgaaggtgtttacggacaaactgatacagggatgaccgttatcgaggggaatttatttttaaaaggtaaaaaaccaattgttgaacgaacaagttatggtttaggagaaatgattaaacatgcattagataacgacgcaaaacatgttgtaatttcactaggtgggattgatagttttgatgctggtgcaggtatgttacaagcattaggtgctcaattctatgatgacgaagggcgtgtcgtagatatgagacaaggtgctggtgtaattaaatatattcgtcgtatggatatgtcgaacttacaccctaaaatggaaacagcaagaattcaagtaatgtcggatttttcaagtcgattatatggtaagcaaagtgaaatcatgcaaacttatgatgcgcatcagttgaatcataatcaagcagcagaaatcgataatttaatttggtattttagtgagttatttaaaagtgaattgaaaattgcaattggtccagttgaacgtggtggtgctggtggtggaattgcagcagtcttgaatggactgtatcaagctgaaatattaaccagtcatgcattagtagaccaactaacacatttagaaaatttagttgaacaagcggatttaattatttttggagaaggattaaatgaaaatgatcagttgctagaaacgacaacattgcgtattgcagaactttgtcataaacatcaaaaggttgccattgcaatttgtgcaactgctgaaaagtttgatttatttgaatcacaaggggttacagcaatgtttaatacatttatcgatatgccagaaacttatactgactttaaaatggggttacaaattaggcattatacggttcagtctttaaaactgttgaaaacacattttaatgttgaggtttag

SEQ ID NO: 406867 - DNA, 321 bp, Staphylococcus aureus
gtggctataaagctaagttcaattgaccaatttgaacaggttattgaggaaaataaatatgtttttgtattaaaacatagtgaaacttgtccaatatcggcaaatgcgtacgatcaatttaataaatttttatatgaacgcgatatggacggttattatttgattgtccaacaagaacgcgatttgtcagattatattgctaaaaaaacgaacgttaaacatgaatcacctcaagcattttattttgtaaatggtgaaatggtttggaatcgagaccacggtgatatcaatgtgtcgtcattagcacaagcagaagaataa

SEQ ID NO: 406868 - DNA, 879 bp, Staphylococcus aureus
atgaaaaaaattgttattatcgctgttttagcgattttatttgtagtaataagtgcttgtggtaataaagaaaaagaggcacaacatcaatttactaagcaatttaaagatgttgagcaaaaacaaaaagaattacaacatgtcatggataatatacatttgaaagaaattgatcatctaagtaaaactgatacaactgataaaaatagtaaagaatttaaggcactacaagaagatgttaaaaaccatctcatacctaaatttgaagcatattataagtcagcaaaaaatttgcctgatgatacaatgaaagttaagaaattaaaaaaagaatatatgacgcttgcaaatgagaagaaggatgcgatatatcaattaaaaaaattcataggtttatgtaatcaatctatcaagtataacgaagacattttagattatacgaaacaatttgaaaaaaatagatacaaagttgaatcagaaattaaattagctgataataaaagtgaagcaactaatcttacgacaaaattagaacataataataaagcgttaagagatactgcgaagaagaacctagatgatagtaaagaaaatgaagtaaaaggcgcgattaaaaatcacattatgccaatgattgaaaagcaaattaccgatattaaccaaactaatattagtgataagcatgttaataatgcaaggaaaaacgcaatagaaatgtattacagtctgcagaactattataatacacgtattgaaacaataaaggttagtgagaagttatcaaaagtcgatgtagataagttgccgaaaaagggtatagatataactcacggcgataaagcctttgaaaaaaagcttgaaaaattagaagaaaaataa

SEQ ID NO: 406869 - DNA, 519 bp, Staphylococcus aureus
atgtattcaaatgttcaaccattcattaatagtgatttaactaattgttttcaatcacaatacactgaaattgaatcattattattcaacctcttagacagcccagtaaaatatacaaaacatattggcggtacgcatcattttaaatattcaacagagccaattttagatattttagtaggtgtagaaaatttgcatgatattacatccttagatgaaaaacgcttaaattatgtagggttttatcgtttgcatcataaatatactaagaaagttatgatggcgaagtttaacaattttcatgaactaaaacaacaggtgcgtctacatatcattcaaatgaatacccaaacatttgaatcttatcttgcacttgattacctcttatcaactaatgatgatattgctttgcaattcaatacaaaaaaacaccaaatattgcaacatagcttaacaattagacaatatgagatgcaaaagcaacaatactttgaaaaactatgtaaaaaatacttataa

SEQ ID NO: 406870 - DNA, 924 bp, Staphylococcus aureus
gtgataaataaagacatctatcaagctttacaacaacttatcccaaatgaaaaaattaaagttgatgaacctttaaaacgatacacttatactaaaacaggtggtaatgccgacttttacattacccctactaaaaatgaagaagtacaagcagttgttaaatatgcctatcaaaatgagattcctgttacatatttaggaaatggctcaaatattattatccgtgaaggtggtattcgcggtattgtaattagtttattatcactagatcatatcgaagtatctgatgatgcgataatagccggtagcggcgctgcaattattgatgtctcacgtgttgctcgtgattacgcacttactggccttgaatttgcatgtggtattccaggttcaattggtggtgcagtgtatatgaatgctggcgcttatggtggcgaagttaaagattgtatagactatgcgctttgcgtaaacgaacaaggctcgttaattaaacttacaacaaaagaattagagttagattatcgtaatagcattattcaaaaagaacacttagttgtattagaagctgcatttactttagctcctggtaaaatgactgaaatacaagctaaaatggatgatttaacagaacgtagagaatctaaacaacctttagagtatccttcatgtggtagtgtattccaaagaccgcctggtcattttgcaggtaaattgatacaagattctaatttgcaaggtcaccgtattggcggcgttgaagtttcaaccaaacacgctggttttatggtaaatgtagacaatggaactgctacagattatgaaaaccttattcattatgtacaaaagaccgtcaaagaaaaatttggcattgaattaaatcgtgaagttcgcattattggtgaacatccaaaggaatcgtaa

SEQ ID NO: 406871 - DNA, 315 bp, Staphylococcus aureus
atgcctaaagtttatggttcattaatcgatactgaaacacgctgtcgccattattttaccgaagaagatattattgctattaaatttaaatgttgtaataaatactatccatgctataagtgccataatgagtttgaaaagcacgccattaagcgttggtctgagccttcatttaacgaaaaagcaatcttatgcggtgtatgcaaacacgaattaacaatcaatgaatatatgatggtagagcgttgtccaaattgccaatctcggtttaacaatcgctgtaaatatcactatcatatttattttgaaatttaa

SEQ ID NO: 406872 - DNA, 1029 bp, Staphylococcus aureus
atgaagaaaacagtcttatatttagtattagcagtaatgtttttattagcggcatgcggtaacaattctgataaagaacaatcaaaatcagaaactaaaggttctaaagatacagtaaaaattgaaaataactataaaatgcgtggcgagaaaaaagatggtagtgacgctaaaaaagttaaagaaactgttgaagtaccaaaaaatcctaaaaatgcagttgtgttagactatggcgcattagatgtaatgaaagaaatgggcttatcagataaagtaaaagcattacctaaaggggaaggcggtaagtcattaccgaatttcttagaatcatttaaagatgataaatatacaaacgttggtaatttaaaagaagtgaattttgataaaattgctgcgacgaaacccgaagtaatctttatctctggacgtacagctaatcaaaagaatttagatgaattcaaaaaagctgcacctaaagcgaaaattgtttatgttggtgcagatgaaaagaacttaattggttcaatgaaacaaaacactgaaaatatcggaaaaatttacgataaagaagataaagctaaagaattaaataaagatttagataacaaaattgcttcaatgaaagataaaacgaaaaacttcaataaaactgttatgtatttactagttaacgaaggtgaattatcaacatttggacctaaaggtcgttttggtggattagtttacgatacattaggattcaatgcagttgataaaaaagtaagtaatagcaatcatggacaaaatgtttctaacgaatatgttaataaagaaaatccagatgttattttagcgatggatagaggtcaagcgataagtggtaaatcaactgcgaaacaagcattaaataatcctgtattaaaaaatgttaaagcaattaaagaagacaaagtatataatttagatcctaaattatggtactttgcagctggatcaactacaactacaattaaacaaattgaggaacttgataaagttgtaaaataa

SEQ ID NO: 406873 - DNA, 762 bp, Staphylococcus aureus
atgattcaagttgaaaatttaactaaaactataaataatcaaatgatattggaagatattagcatagatatcgaaaaaggtaaattgacttctttaattggacctaatggtgcgggtaagagtactttactttcagcgatatgtaggttaattcgttttgagaacggtgaagtgaaaatagatggacagctcatgtctgattataaaaataatgacttgtcgaaaaaaatatctatattaaaacaaacaaaccatactgaaatgaatattacggtagagcagttggtaaactttggacgattcccttattctaaaggtcgtttgacgaaagaggatcatgatattgtcaatgatgcgctagatttgttgcaactacaagatatcagaaatcgtaatattaagtcattatctggtggacaacgtcagcgtgcatacattgcaatgacaatagcacaagatactgaatatattttgctagatgaaccattaaataatttagatatgaagcatgctgttcaaattatgcaaacgttaaaaatgttagcgcataaaatgaataaagcgattgtcattgtgttacatgatattaactttgcgtcctgttattcagatcagattgtagcattgaaaaacggacaactagttaagtcagatttgaaagataatgtcattcaaagtagtgttttaagtgatttatatgacatgaatattcaaattgaacatataagaaatcaaaggatttgtttatattttaaggattga

SEQ ID NO: 406874 - DNA, 957 bp, Staphylococcus aureus
atgcgcaacaataataaaaaaataatgcttttaattgcagtaacgttattaattagtatgctgtacttatttgtaggtattgattttgaaatatttgaatatcaattttcaagtcgtttaagaaagttcatattaattattttagtaggtgctgccattgcaacttcagtggtgatttttcaagcgattacaaataaccgtctattgacaccatcaataatggggttagatgcagtttatttatttatcaaagtattgccagtctttttatttggaattcaatcggtatgggttactaatgtatatttgaactttatattaacacttataacgatggtgttattcgcactaatcctattccaaggtatctttaaaatcggacatttttcaatttattttatcttacttattggtgtccttttaggaacattttttagaagcataacaggttttattcaactgattatggatcctgagtcatttttagcaatacaaagtagtatgtttgctaattttaatgcttctaattcgaatttagttactttctcagcagtgctattagtaatcttattagtcattacaattttactattgccttatttagatgtattgcttttaggtcgtgctgaagcaattaatcttgggatatcgtatgaaaaattaacgcgaattctacttgtaatagtctcagttttagtttctgtgtcaactgcattagtaggaccaattacatttttaggtttattaactgtaaatctagcgcatgaactaatgaagacgtatgaacataagtatattttaattgcgacaatttgcttgagttggattagtttatttagtgcgcaatgggtagttgaaaatgtgtttgaagctacgacagaaatgagtatacttattgatttgattggtggaagttatttcatttatctattagttagaaggagaaatgcgcaatga

SEQ ID NO: 406875 - DNA, 1014 bp, Staphylococcus aureus
atgataatgattatcattaatttaaagggagaaaaatttgtaatgaagtatttattaaagggaaatattttgcttctattactaatattgttgacaattatttcgttgttcataggtgtgagtgaactatcaattaaagatttactacatttaactgagtcacagcggaatattttattctcaagccgaataccaaggacgatgagtattttaattgctggaagttcgttggctttagcaggcttgataatgcaacaaatgatgcaaaataagtttgttagtccgactacagctggaacgatggaatgggctaaactaggtattttaattgctttattgttctttccaaccggtcatattttattaaaactagtatttgctgttatttgcagtatttgcggtacgtttttatttgttaaaatcattgattttataaaagtgaaagatgtcatttttgtaccgcttttaggaattatgatgggtgggattgttgcaagtttcacaaccttcatctcattgcgcacgaatgctgttcaaagcattggtaactggcttaacgggaactttgccattatcacaagtggacgctatgaaattttatatttaagtattcctcttttagcattgacatatctttttgctaatcatttcacgattgtaggaatgggtaaagactttactaataatttaggtttgagttacgaaaaattaattaacatcgcattgtttattactgcaactattacagcattggtagtggtgactgttggaacattaccgttcttaggactagtaataccaaatattatttcaatttatcgaggtgatcatttgaaaaatgctatccctcatacgatgatgttaggtgccatctttgtattattttctgatatagttggcagaattgttgtttatccatatgaaataaatattggtttaacaataggtgtatttggaacaatcattttccttatcttgcttatgaaaggtaggaaaaattatgcgcaacaataa

SEQ ID NO: 406876 - DNA, 972 bp, Staphylococcus aureus
atgatagctgttaattggaacacacaagaagatatgacgaatatgttttggagacaaaatatatctcaaatgtgggttgaaacagaatttaaagtatcaaaagacattgcaagttggaagactttatctgaagctgaacaagacacatttaaaaaagcattagctggtttaacaggcttagatacacatcaagcagatgatggcatgcctttagttatgctacatacgactgacttaaggaaaaaagcagtttattcatttatggcgatgatggagcaaatacacgcgaaaagctattcacatattttcacaacactattaccatctagtgaaacaaactacctattagatgaatgggttttagaggaaccccatttaaaatataaatctgataaaattgttgctaattatcacaaactttggggtaaagaagcttcgatatacgaccaatatatggccagagttacgagtgtatttttagaaacattcttattcttctcaggtttctattatccactatatcttgctggtcaagggaaaatgacgacatcaggtgaaatcattcgtaaaattcttttagatgaatctattcatggtgtatttaccggtttagatgcacagcatttacgaaatgaactatctgaaagtgagaaacaaaaagcagatcaagaaatgtataaattgctaaatgacttgtatttaaatgaagagtcatacacaaaaatgttatacgatgatcttggaatcactgaagatgtgctaaactatgttaaatataatggaaacaaagcactttcaaacttaggctttgaaccttattttgaggaacgtgaatttaacccaatcattgagaatgccttagatacaacaactaaaaaccatgacttcttctcagtaaaaggtgatggttatgtattagcattaaacgtagaagcattacaagatgatgactttgtatttgacaacaaataa

SEQ ID NO: 406877 - DNA, 2106 bp, Staphylococcus aureus
atgaaaaccatggaagagaaaaagtacaatcatattgaattaaataatgaggtcactaaacgaagagaagatggattctttagtttagaaaaagaccaagaagctttagtagcttatttagaagaagtaaaagacaaaacaatcttcttcgacactgaaatcgagcgtttacgttatttagtagacaacgatttttatttcaatgtgtttgatatttatagtgaagcggatctaattgaaatcactgattatgcaaaatcaatcccgtttaattttgcaagttatatgtcagctagtaaatttttcaaagattacgctttgaaaacaaatgataaaagtcaatacttagaagactataatcaacacgttgccattgttgctttatacctagcaaatggtaataaagcacaagctaaacaatttatttctgctatggttgaacaaagatatcaaccagcgacaccaacatttttaaacgcaggccgtgcgcgtcgtggtgagctagtgtcatgtttcttattagaagtggatgacagcttaaattcaattaactttattgattcaactgcaaaacaattaagtaaaattgggggcggcgttgcaattaacttatctaaattgcgtgcacgtggtgaagcaattaaaggaattaaaggcgtagcgaaaggcgttttacctattgctaagtcacttgaaggtggctttagctatgcagatcaacttggtcaacgccctggtgctggtgctgtgtacttaaatatcttccattatgatgtagaagaatttttagatactaaaaaagtaaatgcggatgaagatttacgtttatctacaatatcaactggtttaattgttccatctaaattcttcgatttagctaaagaaggtaaggacttttatatgtttgcacctcatacagttaaagaagaatatggtgtgacattagacgatatcgatttagaaaaatattatgatgacatggttgcaaacccaaatgttgagaaaaagaaaaagaatgcgcgtgaaatgttgaatttaattgcgcaaacacaattacaatcaggttatccatatttaatgtttaaagataatgctaacagagtgcatccgaattcaaacattggacaaattaaaatgagtaacttatgtacggaaattttccaactacaagaaacttcaattattaatgactatggtattgaagacgaaattaaacgtgatatttcttgtaacttgggctcattaaatattgttaatgtaatggaaagcggaaaattcagagattcagttcactctggtatggacgcattaactgttgtgagtgatgtagcaaatattcaaaatgcaccaggagttagaaaagctaacagtgaattacattcagttggtcttggtgtgatgaatttacacggttacctagcaaaaaataaaattggttatgagtcagaagaagcaaaagattttgcaaatatcttctttatgatgatgaatttctactcaatcgaacgttcaatggaaatcgctaaagagcgtggtatcaaatatcaagactttgaaaagtctgattatgctaatggcaaatatttcgagttctatacaactcaagaatttgaacctcaattcgaaaaagtacgtgaattattcgatggtatggctattcctacttctgaggattggaagaaactacaacaagatgttgaacaatatggtttatatcatgcatatagattagcaattgctccaacacaaagtatttcttatgttcaaaatgcaacaagttctgtaatgccaatcgttgaccaaattgaacgtcgtacttatggtaatgcggaaacattttaccctatgccattcttatcaccacaaacaatgtggtactacaaatcagcattcaatactgatcagatgaaattaatcgatttaattgcgacaattcaaacgcatattgaccaaggtatctcaacgatcctttatgttaattctgaaatttctacacgtgagttagcaagattatatgtatatgcgcactataaaggattaaaatcactttactatactagaaataaattattaagtgtagaagaatgtacaagttgttctatctaa

SEQ ID NO: 406878 - DNA, 399 bp, Staphylococcus aureus
atgaaaataatatatttttcatttactggaaatgtccgtcgttttattaagagaacagaacttgaaaatacgcttgagattacagcagaaaattgtatggaaccagttcatgaaccgtttattatcgttactggcactattggatttggagaagtaccagaacccgttcaatcttttttagaagttaatcatcaatacatcagaggtgtggcagctagcggtaatcgaaattggggactaaatttcgcaaaagcgggtcgcacgatatcagaagagtataatgtccctttattaatgaagtttgagttacatggaaaaaacaaagacgttattgaatttaagaacaaggtgggtaattttaatgaaaaccatggaagagaaaaagtacaatcatattga

SEQ ID NO: 406879 - DNA, 867 bp, Staphylococcus aureus
ttgaatcctaaagtaaaaggtatcattgccattttaatttcggctattggtttcagttttatgtcagtgtttttcagacttgcaggtgaccttcctgtttttcaaaaatcattagcacgaaacttagtagcaatgtttattccattattttttatatataaataccatcagccaatgtttggcagactttcaagtcaacccttattaataacacgatcaacacttggacttattggtgtattgttaaatatttatgccattgatcatatggtacttagtgatgccgattcattaatgaaactcaatcctttctggacgattttattaagcattgttttcttacatgaaaaggtaaggaagtatcaaattacagcaatgataattgctattttaggtatgcttttaatagtgaaacctgaattttcatcatctatgattccatcattagctggcttattctcaggtatttttgcagcatcagcatatacatgtgttcgagcacttagtacaagagaagcaccatatactatagtattttacttctccttattttctgtcatcgttttaatacctttcactgcatatacttatgaaccaatgagtcagatgcaaatactttatctattaggggctggcttagctgccgctgtgggtcaaattggtgttactttagcatatagttttgcagcagcaaaagatatttctatttttacgtatgcatctataattttcacagcaatacttggatttattctattcggagaatctccagatttctatgcaacattaggttacgtcgttattatcggtgcaagttattacatgtttgaaaaagcacgccgagacgccaaaataataaaaaaataa

SEQ ID NO: 406880 - DNA, 1506 bp, Staphylococcus aureus
atgacacaacaaaactcccatggaaatcaaattcaagacatacctcaaacaggatttttcgggcatcctcgaggactaggcgtactcttctttgtagagttctgggaaaggtttagttattatggcatgcgtgccctactcattttctacatgtactttgccgtaacagataatggccttggaattgataaaacaacagctatgtcaattatgtcagtttatggttcattaatctatatgacatcaataccaggcggatggattgctgacagaattacaggcactagaggcgctactttattaggtgcagtctttattattatcggacatatttgtttaagcttaccatttgcattaatcggcttattcacatcaatgttcttcatcattattggttcaggtttaatgaagccaaacatttcaaatatcgttggccgtttatatcctgaaaatgatagacgtatggatgcaggttttgttattttctatatgtcagttaatatgggtgcattattatcacctattattttgcaacactttgttaatgttaaaaacttccacggcggattcttgattgcagcagttggtatggcattaggtttagtatggtatgtacttttcaaccgcaaaaacttaggtagcgttggtatgaaacctactaacccattgacaccagctgaaaagaaaaagtatggtcttattatcggaagtgttgttttagcaattgtattaattatcgttattggtgcattaactaactcattatcatttaacttagttagtaatactgttttagtattaggtattgcattaccaatcatttacttcactttaattattagaagtaaagatgtcactgatactgaacgttctcgtgttaaagcatttattccattatttattcttggaatggtgttctgggctattcaagaacaagggtctaatgtattaaacatatatggaattgaacattcagatatgaaattaaacttatttggttggaaaacaaactttggtgaagcgatcttccaatcaattaacccattatttattttattactagctccaattatttcacttttatggcaaaagcttggaactaaacaacctagcctgccagtaaaatttgcaattggtacgttcttagcaggtgcgtcatacatactaattggtattgtaggttatgcatcaggttcatcaaacttttcagttaactgggttattttatcgtacattatttgtgttatcggtgagctatgcttatcaccaacgggtaatagtgctgctgttaagttagcacctaaagcatttaatgcccaaatgatgagtatttggtacttaactaacgcttctgcacaagcaatcaatggtactttagttaagttaatagaaccactaggtcaaacaaattactttattttcctaggtgttgttgcaattattgttacaacaattgtattagcattctcacctttaatcatcaaagcgatgaaaggtatacgttaa

SEQ ID NO: 406881 - DNA, 918 bp, Staphylococcus aureus
atggaaaataaatatacacatggtgtcctcttttaccatgaacacagtggattaaaaaatattaatcaaggtattggggaagttacaacagcattaagttcaatttgtaagcatctttctattcaattgagtgaaaacgaaggtgacattattaaatattgccaagaaatcaaaactaaaaactatgcaaaagatgtagatatattatttattcttggcggtgatggcacggttaacgaacttataaacggtgttatgacacatgaccttcaactccctattggcattttaccaggcggtacttttaatgattttacaaaaacgctaaatatagcacctaatcataaacaagctagtgaacaaatgatttctgcacaagttggtacatacgatgtaattaaaataaataatcaatatgcactcaactttgttggcttaggtctcattgttcaaaacgctgaaaacgtacaagatggttcaaaagatatatttggtaaattgagttatattggatcaactgtcaaaacactgctaaatccaacacaatttaattatcaattatcaatagatgataagacatattctggcgaaacgaccatgatactaacagcaaatggtccattcattggtggtagtcgtataccattgactgatttgtctcctcaagatggtgaactgaacactttcatttttaatgaacaaagtttcagtattttaaatgatatttttaaaaagcgtgatagcatgaattggaatgaaattactcaaggtattgagcatatacctggtaaaaagatttcacttacaacagatccagcaatgaaagttgatattgatggcgaaatttcattagaaacacctattgatattgaggttataccaaatgccattcagttacttactgtcaatgatttgtaa

SEQ ID NO: 406882 - DNA, 984 bp, Staphylococcus aureus
atgaaaaaatggcaatttgttggtactacagctttaggtgcaacactattattaggtgcttgtggtggcggtaatggtggcagtggtaatagtgatttaaaaggggaagctaaaggtgatggctcatcaacagtagcaccaattgtggagaaattaaatgaaaaatgggctcaagatcactcggatgctaaaatctcagcaggacaagctggtacaggtgctggtttccaaaaattcattgcaggagatatcgacttcgctgatgcttctagaccaattaaagatgaagagaagcaaaaattacaagataagaatatcaaatacaaagaattcaaaattgcgcaagatggtgtaacggttgctgtaaataaagaaaatgattttgtagatgaattagacaaacagcaattaaaagcaatttattctggaaaagctaaaacatggaaagatgttaatagtaaatggccagataaaaaaataaatgctgtatcaccaaactcaagtcatggtacttatgacttctttgaaaatgaagtaatgaataaagaagatattaaagcagaaaaaaatgctgatacaaatgctatcgtttcttctgtaacgaaaaacaaagagggaatcggatactttggatataacttctacgtacaaaataaagataaattaaaagaagttaaaatcaaagatgaaaatggtaaagcaacagagcctacgaaaaaaacaattcaagataactcttatgcattaagtagaccattattcatttatgtaaatgaaaaagcattgaaagataataaagtaatgtcagaatttatcaaattcgtcttagaagataaaggtaaagcagctgaagaagctggatatgtagcagcaccagagaaaacatacaaatcacaattagatgatttaaaagcatttattgataaaaatcaaaaatcagacgacaagaaatctgatgataaaaagtctgaagacaaaaaataa

SEQ ID NO: 406883 - DNA, 927 bp, Staphylococcus aureus
atgacttcatctactaatgttaaagctttaatcgaaaaaaataataataaaaaaggaaagcataatgacaaaattataccagttattttagccgcaatttcagcgatttccattttaacaacactaggtatattaatcacattgcttttagaaaccatcacttttttcaccagaattccaataactgaatttctattttctactacttggaatcctaccggttcagaccctaagtttggtatctgggcattgataatagggactttaaaaatcacagttattgcgactatatttgcagttccagtcgggcttggtgcagcaatttatttaagtgaatatgcaagtgaccgtgcacgacgcataattaaaccgatattagaaattttagcaggaataccaacaattgtgtttggtttctttgcattaacctttgttacaccagtattaagatctttcataccaggtcttggagagtttaatgctataagtcccggcttagttgtcggtattatgattgtccctctcatcacaagtttgagtgaggatgcaatggcatctgtaccaaataaaattcgagaaggtgcctatggacttggagcaactaaattagaagtagcaactaaagtcgtacttcccgcagcaacatcaggtattgtagcttcaatcgttctcgcgatttcaagagcaattggagaaacgatgattgtatcattagcggcaggtagttcgccaacagcttcattaagtttaacaagttcgattcaaacaatgactggatatattgttgagatagcgacaggtgatgcaacatttggatcaaatatttattacagtatttatgctgtagggttcacactatttatctttaccttaatcatgaatttactttctcagtggatttctaagcgttttagggaggagtattaa

SEQ ID NO: 406884 - DNA, 918 bp, Staphylococcus aureus
atggaaacgacagataataatagacaatcactcgtcgatcaacaacttgtccaaaaacatttatcatccagaacggttaaaaataaagtgttcaaactcatatttttagcatgtacattattaggacttgtcgtacttattgcgttgttaactcaaacattgattaaaggggtaagtcatttaaatttacagtttttcactaatttttcttcttcaacaccatctatggctggcgttaaaggcgcgttaatcggttcactttggttaatgttaagtatcattccattatcaatcatcctaggaataggtacagctatatacttagaagaatatgcgaaaaacaacaaatttactcagtttgttaaaatcagtatttccaatttagctggtgtaccatcagttgtatttgggttattaggttatactttgttcgttggtggtgcagggattgaagccttgaaaatgggtaacagtatattggcagcagcgctaacaatgaccttactgatattaccaattattattgtttcaagtcaggaagcaattagagctgtacctaactcagtacgcgaagcttcttacggcttaggtgctaataaatggcaaacgataagacgtgttgtcttaccagcagcgttacctggtattttaactggattcattttgtctctttcaagagcactgggagaaacagcgccacttgtgctaatcggtataccgactatattattggcaacacctagaagtatattggatcaattttcagcattacctatccaaatatttacttgggcgaaaatgcctcaagaagaattccagaatgttgcatcggcaggcattatcgttttactagttatcttaatcttaatgaatggcgttgcgattattttacgtaacaaatttagtaaaaaattctaa

SEQ ID NO: 406885 - DNA, 852 bp, Staphylococcus aureus
atggcgcaaacacttgcacaaactaaacaaatatctcaaagtcatacgtttgatgtctcacaaagtcatcataaaacaccagatgatacaaactcacattctgttatatattcaacacaaaatttagacttatggtatggcgaaaatcatgcattacaaaatattaatttagatatttatgaaaaccaaattactgccattataggtccatctggttgtggcaaatcaacatatattaaaactttgaatcgaatggttgagttagtaccttctgtgaaaacagctggtaaaatattatatcgagatcaagacatttttgatcaaaaatattctaaagaacaattacgtacaaatgtgggcatggtctttcaacaacctaatccatttccaaaatcaatatacgataatattacttacggtccaaagattcacggtattaaaaataaaaaagttcttgatgaaatcgttgagaaatcattacgtggcgctgcaatttgggatgaattaaaggataggttgcacacaaatgcatatagtttatccggtgggcaacaacaacgtgtttgtatcgcgcgttgtttagcaattgaacctgaagtcattttaatggatgaaccgacatcagcattagatccaatctcaacattaagagtagaagagttggttcaagaactaaaagaaaagtatacaattattatggttacacataatatgcaacaagcagctcgtgtatcagataaaactgcatttttcttaaatggttatgtcaatgaatatgatgatactgataaaattttctctaacccatcaaacaagaaaacagaagattatatttcaggaaggtttggttga

SEQ ID NO: 406886 - DNA, 642 bp, Staphylococcus aureus
atggcaataattagacaacgatatcaggagcaacttgatgatttaataaaagaattacgtcggttaggtgcaaatgtctatgtgagtattgaaaatggtataaaatcattaagtattgacgatagaggctttgcacgacaaacagttaaaaacgataaacatatcaatcaattaaattatgatattaatgagcgagttatcatgttaattacaaagcaacagcccattgcgagtgatttgcgtatgatgatttcttcattaaaaatcgcctccgatttagaaagaataggagataatgcctcgagtattgccaatattcgattgcgtacaaagattacagatgattatgtgttaacccgtttaaagacaatgggtaaattagctatgttaatgttaaaggacttagatcaagcatttaaaaagaaagataccgtattaataagagaaataattgagcgtgatgaagatatcgatgacttatatagtcatattattaacgcaacgtatcttattgataacgatccatttgtcgctgcacaagctcatttagcagcaagacatttagaacgtattggtgatcatattattaacatcgctgaaagtgtttatttttatttaacaggtacacattacgaacaataa

SEQ ID NO: 406887 - DNA, 1815 bp, Staphylococcus aureus
atgtctcaaggtttacctttaagagaagatgttcctgtttcagaaacatgggatttagtagacttatttaaagatgatcaacaatattatgaaagtattgacgctctagtacaacaagcaaatcaatttcatcatacatatgcaacaacattaaattcaatcgaacaaattaatactgctttagctgaattagaaaatattttaattgccttagatcgcttaagtaattatgcagaactacgtttaagtgtagatactagtaatatcgaggcacaagtattgagcgctaaattatctactacatacggtaaaattgttagccaattatcatttgtagagtcagaaatacttgaattaccagaagaaatacttcaacaattagaagaatcatgtccatatcaacactatattaaacagttaataaaacaaaagccattccaattatctgcgtcggtagaacaagtattagcaactttatcacctacgctaaacagtccttacgatttatacggcacgacaaaaatgctagatattacattcgattcatttgaacatgatggtacaacgtaccctgtcgactatgctacgtttgaaaatgattatgaagataataaagatcctgagtttagacgtaaaagtttcaaatcgtttagcgatgggattcgaaaatatcagcatactaccgcggctacatataatatgcaagtacaacaagaaaaaattgaagctgatttacgtggatttgaatcagtcatcgattatttattacatagtcaagaagtaacgcgtgatatgtttgaccgtcaaatcgatatgattatgcgtgacttggcaccagttatgcagaaatatgctaaacttttacaacgtattcacggattagataacatgcgttttgaagacttgaagatttctgtagaccctgattatgaaccagagatttcaattgaagactcaaaaaattatattttcggtgcgttaagtgttttaggtgatgactatacaaacatgttacgtgaagcatacgatcagcgatggattgattttgcacaaaataaaggtaaagatacaggcgcattttgtgcaagtccatactttacacattcatatgtgtttatttcttggactggtaaaatggctgaagcatttgtcttagcacatgaattaggtcatgcaggtcattttacattagctcaaaaacatcaaccatatcttgaatcagaagcatcaatgtactttgttgaagccccttctacaatgaatgaaatgttgatggccaattatttatttaacacaagtgataatccaagatttaagcgttgggttattggctcaattttatctagaacatattatcataatatggttacccatttattagaagctgcttatcaacgtgaagtgtatcacaaagtagatcaaggtgaatctttaaatgcgccgacattaaatgaaataatgctaaatgtttataaacaattttttggagatgcagtagacatgactgagggtgctgaattaacatggatgcgtcaacctcattactatatgggattatattcgtatacgtattctgctggcttaacaatcggaactgtcgtttctcaaaagattaaaaatgaaggccaaccagctgttgatgcttggttagaaacattgaaaaaaggtggtagtgtatcacctgtcgaacttgcaaacattgcaggtgtagacattactacagaacagccacttaaatctacaattcaatatatttctgatttagtcgatgaagttgaaaaattaacagatgaaattgagcaagcaaataactaa

SEQ ID NO: 406888 - DNA, 345 bp, Staphylococcus aureus
atgacattattcgatatgcctaattatttatggatcacaacattaataatgattttattaacaatattctgttgcttagttttaaataaatggtttgtatctgcagtaattacatttgttatattaggtgtgcttgcattttttattccaaattttcaagatataaaatatcaaccattattaggatacgctgcatttttagcgattatgagtttattaattagttttctattatggtattttactagaaattggcgtaaagaaagaaaagcgcgtaaattagaaaagcaaattgaaaaatacggctatgagggcgctgaacttcgccgtaaagataaaaaataa

SEQ ID NO: 406889 - DNA, 987 bp, Staphylococcus aureus
atgttcataataaagtctatgttgtatagactgatgcaaatgatagttgttttatttgttatttctacacttacattcattttaatgaaattatcaccaggcaatcctgttgataaaatattacatcttgatgtagcacaagtgtcgacggaacaaataaatgcaaccaaagataaattgggattaaatgattctttattggtacagtggtggcattggatgaatcatttattacattttaatttaggaaaaagttttgaatcaaaagaaccggtaacacagatattattcaactatgcacccataacattactcatatcattttcaacattagtagtgtcgttatgcatatctataccgctcggcattatagcagccaaacgatttcataagtggacggataaagtgattagagtgatctcaacactatcgattagtttaccagcgttctttatcggtattattttattatttattgtcacaaatttaatgaatatagatagcgttatactaagtcagtttatattacctgtaatcacgctatctttaggtatgtgtgcatacatcattcgtttagtgcgttctaatttattgatgttattgcaaagtaatatcgtacaagcatcaagattacgcggtatgaatgaacgttatattttaattcatgatttactaaaaccaacaattttgccgattatcccattactagggatttcacttggcagtctaataggtggtactgtagtgattgaaaatttatttgatatacctggtattggttatctattaatggatagtattaaatctcgagattatcctgttattcaaggatgcgtgttatttattggcttcttcgttgttattatcaatacgattgctgatttattaacgttattacttgatccgaagcagcgtttacaattaggaaatccaaaaatcaaaaccaatacaccattgatatcagaaagtagtgaccgtcatgcataa

SEQ ID NO: 406890 - DNA, 831 bp, Staphylococcus aureus
atgcataaaatattttcaaagaataacctgatattttttgtattcgttgcatttatttttgtggtaattgtactgcaattctttgtcagtagtgaaaatgcaaccaaagtcaatttatcacaaacttttgaacctattagttggttgcatttattaggaactgatgattatgggagagatttatttacccgaattattatcggtgcacgttcaacattgtttgttactgttttaacattaatagctatcgttgtcataggtgttacactaggtctatttgccggatacaaaaaagggtggattgaacgattagtgttaaggtttattgatgttggtctaagtattccagaatttatcatcatgattgctttagcaagtttttttcaaccatctttatggaatttagttatctcaattacattaataaaatggatgaattacacaaggttgactagaagtatagttaatagcgaaatgaataagccttatataaaaatggcacaattatttcatgtaccaacaagaacaatattaatacgtcatttaacacctaaaattataccggctattatcgttttgatggtcgttgatttcggtaaaatcattctatatataagttcactatcatttattgggttaggtgcacaaccgccaacaccagagtggggcgctatgttgcaacaaggtcgtgattttatttcgtctcatccaattatgttgattgcacctgcttcagtcattgctataactattttaatttttaatttaaccggtgatgcactaagagatagattgctgaaacaacggggtgaatatgatgagtctcattga

SEQ ID NO: 406891 - DNA, 777 bp, Staphylococcus aureus
atgatgagtctcattgatatacaaaatttaacaataaagaatactagtgagaaatctcttattaaagggattgatttgaaaatttttagtcaacagattaatgccttgattggagagagcggcgctggaaaaagtttgattgctaaagctttacttgaatatttaccatttgatttaagctgcacgtatgattcgtaccaatttgatggggaaaatgttagtagattgagtcaatattatggtcatacaattggctatatttctcaaaattatgcagaaagttttaacgaccatactaaattaggtaaacagttaactgcgatttatcgtaagcattataaaggtagtaaagaagaggctttgtccaaagttgataaggctttgtcgtgggttaatttacaaagcaaagatatattaaataaatatagtttccaactttctgggggccaacttgaacgcgtatacatagcaagcgttctcatgttggagcctaaattaatcattgcagacgaaccagttgcatcattggatgctttgaacggtaatcaagtgatggatttattacagcatattgtattagaacatggtcaaacattatttattatcacacataacttaagtcatgtattgaaatattgtcagtacatttatgttttaaaagaaggtcaaatcattgaacgaggtaatattaatcatttcaagtatgagcatttgcatccgtatactgaacgtctaattaaatatagaacacaattaaagagggattactatgattga

SEQ ID NO: 406892 - DNA, 702 bp, Staphylococcus aureus
atgattgagttaaaacatgtgacttttggttataataaaaagcagatggtgctacaagatatcaatattactatacctgatggagaaaatgttggtattttaggcgaaagtggctgtggtaaaagtacgctcgcttcattggttcttggcttgtttaaacctgttaaaggagagatttacttaagtgacaatgctgtgttaccgattttccaacaccctttaactagctttaaccctgattggacgattgagacctcattaaaagaagcgttatattattacagaggtctaactgataatactgctcaggatcaattattattacaacatttatctacttttgagttaaacgcgcaattattgactaaattaccaagcgaagtgagtggcggacaattacaaagatttaatgtcatgcgttcgttattagcacagcctcgtgttttaatatgtgatgagataacttcaaatttagatgttatagctgaacaaaatgtaatcaatatattaaaagcgcaaacgattacgaacttaaatcattttatcgttatttctcatgatttatccgtgttacaacgcttagttaatagaattatcgttcttaaggatggcatgatagtcgatgattttgcaatagaggaattatttaatgttgatagacacccttatacaaaagaattagtgcaagcattttcatattag

SEQ ID NO: 406893 - DNA, 474 bp, Staphylococcus aureus
atgggattacttgatattgcaagtattcgttctatagaaagaggctttaattattatcaaagtgaatgcgtcattaacttaaaatcattttcagaaacgcagcatgaggctgaagtaaagggcagtggcaacaaagtatatcgttgttatattgatatggaacatcctagaaaatccatatgtaattgtcctcatgctgatggaagacgagtgatatgtaaacatatgattgcattactctttacagctagtccagaagcagcaaataaacatataatgatgttaaacgaagttgaagaagactatcaattacgcagaaatatgtggattgatagtcttaaagaaatgattaatgatatgagtgaagaagaactccgcgatgcatatttaaacatgttaattgaacatggagaaatggcagaattatttggattagatgaagaggaagaaatgttcgaggacgaattttattaa

SEQ ID NO: 406894 - DNA, 768 bp, Staphylococcus aureus
atgagatttgtctttgatattgatggtacgctttgttttgacggccgattaattgaccagactattattgatacattgttacaattacaacatgatggtcatgaacttatatttgcatcagcacgtccgattcgtgatttgttgccagttttaccatcagtatttcatcagcacacattaattggcgcaaatggtgctatgatttcacagcaatcaaagatttctgttatcaaaccaattcatactgatacatatcatcatatcttcaaaataattcaaaagtatgagttagattatattattgatgatgattggaattatgctgcacaacttgacgctgagaacgcgatttttgagcgtttagatccacataagctggccagttgtattgatgttgcaaatatcgacacaccaatcaagattattttattaaatatagacccggcacaaattacaactatattagacgagctagataaataccatcaagaattggaaatgattcaccattcaaatgagtataacattgatataacagcgcaaaatattaacaaatatactgcattacaatatatatttgatgcagatgttaaatatatagcatttggtaatgaccacaatgatattgtcatgttacaacatgctagtagtggctatattataggaccatcagaagcatacacacacgcaatattgaaacttgataaaatcaaacacatcaataataatgcacaagctatttgcaaagtcttaaaatcatataaataa

SEQ ID NO: 406895 - DNA, 1260 bp, Staphylococcus aureus
atgaaatttacagagttaactgttaccgaatttgacaactttgtacaaaatccatcattggaaagtcattatttccaagtaaaagaaaatatagttacccgtgagaatgatggctttgaagtagttttattaggtattaaagacgacaataacaaagtaattgcagcaagccttttctctaaaattcctactatgggaagttatgtttactattcgaatcgtggtccagtaatggatttttcagatttaggattagttgattattatttaaaagagttagataaatatttacagcaacatcaatgtttatatgttaaattagatccgtattggttatatcatctatatgataaagatatcgtgccatttgaaggtcgcgagaaaaatgatgccctagtaaacttgtttaaatcacatggttacgagcatcatggctttacaactgagtatgatacatcgagccaagtacgatggatgggcgtattaaaccttgaaggtaaaacacccgaaacattgaaaaagacatttgatagtcaacgtaaacgtaatattaataaagcgataaactatggtgttaaagtcagattccttgaacgtgatgagttcaatcttttcttagatttatatcgtgaaactgaagagcgtgctggatttgtatcaaaaacagatgattatttttataactttattgacacatatggagataaagtattagtaccattagcatatattgaccttgatgaatatgtgttaaagttgcaacaggaattgaatgacaaagaaaatcgtcgtgatcaaatgatggcgaaagaaaacaaatcagataagcaaatgaagaaaattgcagaattagataagcaaattgatcatgatcagcatgaattattgaatgcaagtgaattgagcaaaacggacggcccaattctaaaccttgcttctggcgtttattttgcaaatgcatatgaagtgaattatttctctggtggttcatcagaaaaatataatcaatttatgggaccatacatgatgcattggtttatgattaactattgcttcgataatggctatgatcgttataatttctatggtttatcaggtgattttacggaaaacagtgaagattatggcgtataccgctttaaacgtggatttaatgtacaaatcgaagaattaataggggatttctataaaccaattcataaagtgaaatattggttgttcacaacattggataaattacgtaaaaaattaaagaaatag

SEQ ID NO: 406896 - DNA, 1263 bp, Staphylococcus aureus
atgaagtttacaaatttaacagctaaagagtttggtgcctttacagatagcatgccatacagtcatttcacgcaaactgttggccactatgagttaaagcttgctgaaggttatgaaacacatttagtgggaataaaaaacaataataacgaggtcattgcagcttgcttacttactgctgtacctgttatgaaagtgttcaagtatttttattcaaatcgcggtccagtgattgattatgaaaatcaagaactcgtacactttttctttaatgaattatcaaaatatgttaaaaaacatcgttgtctatacctacatatcgatccatatttaccatatcaatacttgaatcatgatggcgagattacaggtaatgctggtaatgattggttctttgataaaatgagtaacttaggatttgaacatactggattccataaaggatttgatcctgtgctacaaattcgttatcactcagtgttagatttaaaagataaaacagcagatgacatcattaaaaatatggatggacttagaaaaagaaacacgaaaaaagttaaaaagaatggtgttaaagtaagatttttatctgaagaagaactaccaatttttagatcatttatggaagatacgtcagaatcaaaagcttttgctgatcgtgatgacaaattttactacaatcgcttaaaatattacaaagaccgtgtgttagtacctttagcgtatatcaactttgatgaatatattaaagaactaaacgaagagcgtgatattttaaataaagatttaaataaagcgttaaaggatattgaaaaacgtcctgaaaataaaaaagcacataacaagcgagataacttacaacaacaacttgatgcaaatgagcaaaagattgaagaaggtaaacgtctacaagaagaacatggtaatgaattacctatctctgctggtttcttctttatcaatccatttgaagttgtttattatgctggtggtacatcaaatgcattccgtcattttgccggaagttatgcagtgcaatgggaaatgattaattatgcattaaatcatggcattgaccgttataatttctatggtgttagtggtaaatttacagaagatgctgaagatgctggtgtagttaaattcaaaaaaggttacaatgctgaaattattgaatatgttggtgactttattaaaccaattaataaacctgtttacgcagcatataccgcacttaaaaaagttaaagacagaattttttag

SEQ ID NO: 406897 - DNA, 729 bp, Staphylococcus aureus
atgactaaattatttataccttatattatgggcaataaagatttgattgaaaatgcaacattgttgagtgaaaatggtgcagatataattgaaattggagtacctttctctgatccggttgctgatggtccagttatcatggaagcaggtcaacaagcgattaaacaaggcatcacgatagattatattttcaatcaattagaaaaacatggtgatcaaattaagtgtaactatgtattaatgacgtattataatattatttgtcattatggagaacaagcgttttttgaaaaatgtcgagatactggtgtctacggcttaattattcctgatttaccatatgaattatcgcagcgtttaaaacaacaatttagtcactatggcgtcaaaatcatatcgttagttgcgatgactactgatgacaaacgtataaaagatatcgtatcccatgcggaaggctttatttatactgtgacgatgaatgcgacaacagggcaaaacggtgcgtttcatccagaattaaaacgaaaaattgagtcaattaaagcgatagccaatgtgccagttgtcgcaggatttggtataagaacaccacaacatgttgcagatataaaagaggttgcagatggcattgtcattggtagcgaaatcgttaagcgatttaaatctaacacgcgtgaggaaatcattaaatatttacaatctatccaacaaacattgaataattaa

SEQ ID NO: 406898 - DNA, 1215 bp, Staphylococcus aureus
atgaataaacaaatacaaacagaagcagatgaattaggtttctttggtgaatatggagggcaatatgttccagaaacattaatgccagcaattattgagttgaaaaaagcttataaagaggcaaaagcagacccagagtttcaaagagaactggaatactatttatcagagtatgtaggacgcgcgacaccacttacatatgctgcatcatatactgaaagcctaggtggcgctaaaatatatttgaaacgagaggatctaaatcatacaggcgcccataaaattaataatgcgttaggtcaagcgttgcttgctaaaagaatgggcaagaagaagcttgttgctgaaactggtgcgggtcaacatggtgtagctagtgctacggttgctgcattatttgatatggaacttgttgtctttatgggaagtgaagatattaaaagacaacaacttaatgtatttagaatggaattacttggtgcaaaggttgtggcagttgaagatggtcaagggactttatcggatgcagttaataaagcattgcaatattgggtaagtcatgtagatgatacacattatttattaggttctgcattaggtccagacccgttcccaacgattgttagagattttcagagtgtgattggtaaagaaataaaatcacagatattgaagaaagaaggtcgacttccggatgcaattgtagcatgtatcggtggtggctcaaatgcaatcggtacattttatccatttattaaagatgatgttgcattatacggtgttgaagccgcaggtcaaggcgatgatactgataaacatgcacttgcaattggcaaaggatcacctggcgtattacatggtactaaaatgtatttaattcaagatgaagatgggcaagtgcaactagcacattctatttcagcaggacttgattatcctggtattggaccagaacattcttattaccacgacattggtagagtaacttttgaaaatgctagtgatacacaagcaatgaatgctttaatcaactttacaaaacatgaaggtattatacctgcaattgaaagtgcacatgcactgagttatgttgaaagactagcgcctacgatgtcgaaagaagatattattgtagtaactatttctggacgtggcgataaagatatggaaacaattagacaatatatggtagagcgaggtcttgcaaatgactaa

SEQ ID NO: 406899 - DNA, 636 bp, Staphylococcus aureus
atgatgaaattgaaattttgtggctttacatcaataaaggatgttacagcggccagtcaattacctattgatgcgataggtttcatccattatgaaaaaagtaaaaggcatcaaacaattacccaaataaaaaagttagcgtctgctgttccaaatcatatcgataaagtatgtgtcatggtaaatcctgatttaacaacaattgaacacgtattaagcaatacgtcaattaacacaatacagttacacggcacagaatctattgattttatacaggaaattaaaaagaaatattcaagcattaaaatcactaaagctttagctgcagatgaaaacataatccaaaacataaataaatataaagggttcgtagatttatttattatcgacacaccctcagtgtcgtatggtggtaccggtcaaacatatgactggactattttgaagcacataaaagacataccttatttgatagcaggaggcattaactctgaaaatattcaaacagttaatcaacttaaattatcacatcaaggttatgatcttgcatcaggtatagaagtaaatgggcgaaaagatatagaaaaaatgacagcaattgtaaatattgtgaaaggagatagagacaatgaataa

SEQ ID NO: 406900 - DNA, 783 bp, Staphylococcus aureus
atgacgattttatcagaaattgttaaatataaacagtcacttttacaaaatggctattatcaagacaaacttaataccttgaaaagtgtgaagattcagaataaaaaatcttttataaacgcaattgagaaagaaccaaagctagcaattattgcagaaattaaatcgaagagtcctacagttaatgacttacctgaacgagatttatcgcaacaaatctcagattatgaccaatatggtgcaaatgccgtgtccattttaactgatgaaaagtactttggtggtagttttgaaagattacaagcattgacgacaaaaacaacattacccgtattatgcaaagactttattatagacccgcttcaaattgatgttgctaaacaagctggtgcatctatgattttattgatcgttaacatcttatctgataaacaattgaaagatttatataactacgctatatcgcaaaatctagaagtgttagttgaagtacatgatcgccatgaattagaacgtgcctataaggttaatgctaaattgattggtgtaaataacagggacttaaaacgatttgttacaaatgtggaacatacaaatactattttagaaaataaaaaaacaaatcattattatatttctgaaagtggtattcacgatgcatctgatgtaagaaaaatcttgcatagtggtatcgatggcttactaataggtgaggcgcttatgcgttgtgacaatctatctgaatttttaccacaactgaaaatgcaaaaggtgaagtcatga

SEQ ID NO: 406901 - DNA, 999 bp, Staphylococcus aureus
atgacattactaacaagaataaaaactgaaactatattacttgaaagcgacattaaagagctaatcgatatacttatttctcctagtattggaactgatattaaatatgaattacttagttcctattcggagcgagaaatccaacaacaagaattaacatatattgtacgtagcttaattaatacaatgtatccacatcaaccatgttatgaaggggctatgtgtgtgtgcggcacaggtggtgacaagtcaaatagtttcaacatttcaacgactgttgcttttgttgtagcaagtgctggcgtaaaagttataaaacatggtaataaaagtattacctcaaattcaggtagtacggatttgttaaatcaaatgaacatacaaacaacaactgttgatgatacacctaaccaattaaatgaaaaagaccttgtattcattggtgcaactgaatcatatccaatcatgaagtatatgcaaccagttagaaaaatgattggaaagcctacaatattaaaccttgtgggtccattaattaatccatatcacttaacgtatcaaatggtaggcgtctttgatcctacaaagttaaagttagttgctaaaacgattaaagatttaggtagaaaacgtgcaatcgttttacatggtgcaaatggtatggatgaagcaacactatctggtgataatttgatatatgaattgactgaagatggagaaatcaaaaattacacattaaatgcgactgattatggtttgaaacatgcgccgaatagtgattttaaaggcggttcacctgaagaaaatttagcaatctcccttaatatcttgaatggtaaagatcagtcaagtcgacgtgatgttgtcttactaaatgcgggtttaagcctttatgttgcagagaaagtggataccatcgcagaaggcatagaacttgcaactacattgattgataatggtgaagcattggaaaaataccatcaaatgagaggtgaataa

SEQ ID NO: 406902 - DNA, 567 bp, Staphylococcus aureus
atgatcttagttgtagataattatgattcctttacatataacctagtggatattgttgctcaacatactgacgtcattgttcaataccctgatgatgataatgtgctgaatcaatcggtggacgctgttattatatctcctggtccagggcatccattagacgatcaacagttaatgaaaatcatatcaacctatcaacacaaacccattttaggtatttgtttaggggctcaggcactgacttgttactacggtggagaagtcattaaaggcgacaaggttatgcacggcaaagttgatacactaaaggttatatcgcatcatcaacatctgttatatcaagatataccagaacagttttcaattatgagatatcattcattaataagtaaccctgacaattttccagaagaattgaaaattactggacgtaccaaagattgtatacagtcattcgagcataaagaaagaccgcattatggtattcagtaccatcctgaatcatttgctacagactatggtgtcaaaataattacaaatttcattaatctagtgaaggaaggatga

SEQ ID NO: 406903 - DNA, 1407 bp, Staphylococcus aureus
atggatatattttataaaaaaataaaagcaaatgtaacgcccgaagttttagcacaacttcattccaagaagatcattttggaaagtacaaatcaacaacaaactaaaggtcgctattcagttgttatttttgatatttatggcactttaactttagataatgatgtattatcagtaagtactttaaaagaatcgtatcaaatcactgaaagaccgtaccattatttaacgactaaaataaatgaagactaccataatattcaagatgagcaacttaagtcattaccatttatatctggatatgttgggacgtgtagctttgatttagtaagacatgaatttcctaaattgcaatcaatacaattagaagatcacaagcagcacgatgtaaggttatatatggttgaacaagtttatgtatttgaccattacaaagatgagttatatatcatcgcgacgaatcaattttcaaattcaacaaaatcagatcttgagaatcgagttattaagtctatcgaagacttaactaaaatccaaccattcatgcctacacaagattttgattttaaaactaaagaaattcaatcaaacatttctgaagaaagatttatcgaaatgattcagtatttcaaagagaaaataacagaaggggatatgttccaagttgtgccatcaagaatttacaaatatgcgcatcatgctagtcagcatttaaatcaactttcgtttcaactgtatcaaaatttaaaacgacaaaacccaagtccatatatgtattatcttaatatcgatcaaccatatattgtcggtagttctcccgaaagtttcgtaagtgtcaaagatcaaattgtaacaactaatcctattgcaggtacgattcaacgtggtgagacgacacaaatagataatgagaatatgaaacaactacttaatgatccaaaagaatgcagcgaacatcgtatgctagttgatttaggacgtaatgatattcatagagtaagtaaaatcggtacctcaaaaattactaaattaatggttattgaaaaatatgaacatgttatgcatatcgtaagtgaagtcacaggtaaaataaatcaaaatttatcgccaatgacagttattgcgaatttattaccaacaggtaccgtttcaggtgcaccaaaattacgtgcaattgaaagaatatatgaacaatatccacataaacggggcgtttatagtggtggtgttggatacataaattgtaatcataacttagattttgcattagcaattcgaacgatgatgatagatgagcagtatatcaacgtagaagctggttgtggcgttgtatatgattctattcctgaaaaagaactgaatgaaacgaaattgaaagctaaaagcttattggaggtgagcccatga

SEQ ID NO: 406904 - DNA, 1032 bp, Staphylococcus aureus
atggaaccaatattagaaatgattaaaacattaacaggtattaatagtccttcaggagacacagaagaagcaattcaatttgtcgaaaaatatgcaaaagacttgggttatcaaacaacactaacaaataaaggtgcgttattaataacagtgccaggcaaaaatgatgaagtacaacgctgtattactgctcatgttgatactttaggtgcaatggttaaagaaattaaagaagatggtcgcttagcaatagaattaattggaggattcacgtataacgcgattgagggtgaatattgccaaattaaaactgatgctggtcaaatatatacaggaacaatttgtctgcatgaaacaagtgttcatgtatatagaaataatcatgaaatacctagagatcaaaagcatatggaaataagaattgatgaagtaactacatcagaagaagatacaaagagtttaggtatttcagtaggtaattttgttagctttgatccacgtacagttatcacgtcatcaggttttattaaatctcgtcatttagatgataaagctagcgtagcgatgatactacaattactaaagaaattaaaagaagagcaaataatattaccacatacaacgcaattttatatttctaataacgaagaaataggttacggtgcaaatgcatcaattgattcgaaaatcaaagaatatattgcattagatatgggcgcgttgggagacggtcaagcatcggatgaatatacagtttctatttgtgccaaagatgcttcaggtccatatcataagcaattgaaatcgcacctagttaatctttgcaaaataaataacattccatataaagtagacatatatccatattatggttcagatgcttcagcagctttacatgctggtgcggatatcagacatggtttatttggcgctggcattgaatcatctcatgcaatggaacgaacacatattgattctattaaagcgacagagaaattactatatgcatattgcttatcaccaattgagtaa

SEQ ID NO: 406905 - DNA, 1092 bp, Staphylococcus aureus
atgacaacagttttatttgttgggcttggattaattggtggaagtcttgctagcaatataaaataccataaccctaatactaatattattgcatacgatgcagatacttctcagttagataaagctaaatcaatcggcattattaatgaaaaatgtttaaattatagtgaagctattaaaaaagccgatgtaattatttatgcaacacctgttgctatcacaaataaatatcttagcgagcttatagatatgccaactaaacctggtgttattgtttctgatactggtagtactaaagcaatgatacagcaacacgaatgcaatttattaaagcataatattcatttagtcagtggtcatccaatggctggtagtcataaatctggtgtactaaatgctaaaaagcacttatttgaaaacgcttattatattttagtctacaatgagccaagaaatgagcaagcagcaaacacgttaaaagaactgttatcacctactcttgctaaatttattgtaactactgctgaagaacacgactacgtaacaagcgtcgtaagtcatttacctcatatcgttgcatctagtttagttcatgttagtcaaaagaacggtcaagaacatcatttagttaataaacttgcagctggtggttttcgtgatatcactcgtatagctagtagtaatgcacaaatgtggaaagatatcaccttgagtaataaaacgtatattttagaaatgattcgacagctaaaaagtcagtttcaagatttagaaagactaattgaaagcaatgattctgaaaaattgttatcattttttgcccaagctaaatcgtatcgcgacgcactacccgctaaacaactaggtggactaaatactgcgtatgatctatatgtagacattccggatgaatcaggtatgataagtaaagtgacttatatcctgagtttacataacatatctataagcaacttaagaatcttagaagtacgcgaagatatatacggtgctttaaaaattagtttcaaaaaccctactgaccgagaacgcggtatgcaagcattgagtgattttgattgttatatccaataa

SEQ ID NO: 406906 - DNA, 1263 bp, Staphylococcus aureus
gtgtataattatcatttattagaagatagggatgttctatgtattgaccaaaaaagtttttttgcgagtgtttcttgtattgaaaaggggctagatccattagaaacaaagctagctgttgttgcagatactaagcgtcagggttctgtaatattggctgcgacacctaaattaaaagaattaggcatcaagacagggtcgcgattgtttgaaataccacatagaaatgatatttacattatcaatccaagtatgcgtaaatatcttaatgtttcagttgctatttctaagattgcattgcgttatattccacctgaagatttacaccaatatagtattgacgaattttttatggatgttactgatagctatcatagatttagttctacagtacatgcattttgcgaaagacttaaacgtgaaatttatgaagaaacaggcatttattgtactgtgggcattggttctaatatgttattaagtaaaattgctatggatgttgaagcgaagcatagtcaaaatggtatagctgaatggcgatatcaagatgtaccaacgaaattatggccaattcagcccttgcgagatttttggggtattaatcgtcgaacagaagccaaattgaataaaagaggaatttttactataggagatttagcgaaatatccatataaatttttaaaaaaagagttcggtattttaggtgttgatatgcatctacatgcgaatgggatagatcagagtaaagtacgtgaaaagcacaagatcagcaatccatcgatatgcaaaagtcaaatattaatgagagattatcattttgatgaagcaaaagtagtaatgcaagagttaattgaagatgttgctagcagagttcgagcaagaaaaaaagtggcaagaacgatacattttgcctttggctatagtgatgaaggcggtgtacataagcaatatactttgaaagatccaacaaacttagaaaaagatatttataaagtagtaatgcatttcgcagataaattatgtaataaacaagcactatatcgtacgctaagtatatctttgagtcaatttattaatgaggatgagcgacagttaagtctgtttgaagatgaataccaacgcaaacgtgacgaatgtctagctaaaacgatagaccaattacatttgaaatacggcaaaggtattgtgtccaaagcagtatcgtttacagaagcaggtacaaaacacggcagattaggtttaatggctggacataaaatgtaa

SEQ ID NO: 406907 - DNA, 189 bp, Staphylococcus aureus
atgatgccaatcgtcaatgtaaaattattagaaggtcgttcggatgaacaattaaaaaatttagttagcgaagtaactgacgccgtagaaaaaacaacgggggcaaatagacaagcaattcacgttgttatagaagaaatgaaaccaaaccattatggtgtggctggcgtaagaaagtcagatcaataa

SEQ ID NO: 406908 - DNA, 984 bp, Staphylococcus aureus
atggataaagaaactaatgacaacgaatatagacgtcaaagtgaacatcgcacttcggcgcctaagcgaaaaaagaagaagaaaattaggaaattacctatcattcttctgattgttgtaattttacttatcgaattagttgtatatattgtacatagttacaatagcggtgtagaatatgccaagaaacatgcgaaagatgttaaagtacatcaatttaatggaccagtaaaaaatgatggtaaaatttctattcttgtactcggtgcagataaagcacaaggtggacaatcaagaacagattctatcatggttgttcaatatgactttatcaataaaaagatgaaaatgatgtctgtcatgcgtgatatttatgcagatattccaggatatggaaaacacaaaattaattcagcatacgctttaggtggtccagagctacttagaaaaacacttgataaaaatttaggaattaatcctgaatattatgcagtagttgattttactggatttgagaaaatgattgatgaattaatgcctgaaggtgtaccaattaatgtcgaaaaagatatgtcgaaaaatattggtgtatctttgaaaaagggtaaccataggttgaatggtaaagaattacttggttatgcaagattccgtcacgaccctgaaggtgacttcggacgcgtgcgacgtcagcaacaagtgatgcaaacattgaaaaaagaaatggttaattttagaacagttgttaaattaccaaaagttgcaggtattttaagaggctatgtgaatacaaacattcctgattcagggattttccaaacaggtttgagttttggtatccgaggtgaaaaagatgttaagtcattgactgtgccaatcaagaactcatacgaagatgtcaatacaaatactgatggtagtgcattacagattaataaaaacacaaataaacaagctattaaagactttttagatgaagattaa

SEQ ID NO: 406909 - DNA, 510 bp, Staphylococcus aureus
atgaatattaatacagcttattttgccggaggttgcttttggtgtatgacgaaaccatttgacacctttgacggcatagaaaaagtaacttctggatatatgggcggacatattgaaaatcctacttacgaacaagtaaaatcaggtacgagtggtcatttagaaactgttgaaattcaatatgatgttgcattattctcatacaataagttattagaaatatttttctcagtcattgacccattagatacaggtggtcaatatcaagaccgtggtcctcaatatcaaacagctattttctacactaatgatcatcaaaaagaactcgctgagacttatatcgagcagcttaaaaatacgattaatgctgataaggcaattgcaacaaaaatattaccagcgtcacaattttacaaagccgaagactatcaccaagatttttataagaaaaatccagagcgctatgcagaagaacaaaaaatacgccaagaatacaaaaataagcaataa

SEQ ID NO: 406910 - DNA, 2523 bp, Staphylococcus aureus
atgaatcaggaagttaaaaacaaaatattttcaatcttaaaaattacgtttgctacagctttatttatttttgtagcaatcacattgtatcgggagttatctggtattaactttaaagatacgttggttgaatttagtaagattaaccgtatgtccttagtgttactatttattggtggtggggcatcgcttgttattctatcaatgtatgatgtgattttatctagagctttaaaaatggatatatccttaggcaaagttttaagagtaagttatatcatcaatgcattgaatgcgattgtaggtttcggtggctttattggtgcaggcgttagagcaatggtttataaaaactatacgcatgataaaaagaaattagttcactttatatccttaatacttatttcaatgttgacaggtttaagcttattatcattgctaattgtattccatgttttcgatgcatctttaatcttagataagattacatgggtaagatgggtattatatgtagtgtcatttttcttaccattattcattatttattcaatggttagaccacccgataaaaacaatcgttttgtaggattgtactgcactttagtgtcgtgtgttgaatggttagcagctgcagttgtattatatttctgtggtgtaattgttgacgctcatgtatcattcatgtcctttattgcaatatttatcattgctgcattatcaggtttagtcagctttattcctggtggtttcggcgctttcgatttagttgtattactaggatttaaaactttaggtgtccctgaggaaaaagtattattaatgctacttctatatcgttttgcgtactattttgtaccggtaattattgcattaattttatcatcatttgaatttggtacatcagctaagaagtacattgagggatctaaatactttattcctgctaaagatgttacgtcatttttaatgtcttatcaaaaggatattattgctaaaattccatcattatcattagcaattttagtattctttacaagtatgatcttttttgtaaataacttaacgattgtttacgatgctttatatgatggaaatcacttaacgtattatattctattggcaattcatactagtgcttgtttattacttttactgaatgtagttggtatttataagcaaagtagacgtgccattatctttgctatgatttcaattttattaatcacagtggcgacattcttcacttacgcttcatatattttaataacatggttagctattatttttgttctgcttattgtagctttccgtagagcacgtaggttgaaacgcccagtaagaatgagaaatatagttgcaatgcttttattcagtttatttattttatatgttaaccatatatttattgctggaacgttatatgcattagatatttatacgattgaaatgcatacatctgtattgcgctattacttctggcttacgattttaatcatcgctatcatcataggtatgattgcatggttgtttgattatcaatttagcaaagtacgtatttcttctaaaattgaagattgcgaggagattattaatcagtacggcggtaattatttgagtcacttgatatatagtggtgacaagcagtttttcactaatgaaaataaaacagcatttttaatgtatcgttataaagcaagttcattagtggttcttggagatccgttaggtgatgaaaatgcctttgatgaattgttagaagcattctataattacgctgagtatttaggctatgatgttatattctatcaagttacagatcaacacatgcctttatatcataatttcggtaaccaatttttcaaattaggtgaagaagcaattattgatttaacgcaattttcaacttcaggtaaaaaacgccgtggatttagagcgactttaaataaattcgatgaacttaatatttcgttcgaaattattgaaccaccgttttcaactgaatttataaatgaacttcaacatgtaagtgatttatggctagataatcgtcaggaaatgcatttctctgttggtgaatttaatgaagaatacttatctaaagcgccaattggtgtaatgcgaaatgaagaaaatgaagtaattgcattttgtagtttaatgccaacatactttaatgatgccatttcagtcgatttaattagatggttgccagagttagatttaccattaatggatggtctatacttgcatatgttactttggagtaaagaacaaggttatacaaaatttaatatgggtatggcaacgttatcgaacgttggtcaattgcattattcatatttaagagaacgacttgcaggccgtgtctttgaacatttcaacggtctatatcgtttccaaggattacgtcgttataaatctaaatataatccgaattgggaaccacgctttttagtttatcgtaaagataattcgctttgggaatcactttctaaagtaatgcgtgtaatacgtcacaaataa

SEQ ID NO: 406911 - DNA, 1149 bp, Staphylococcus aureus
atgaagtttgttggtgggaatgatttagtcttctcattaatagcgctagtattgttgggtattgttatttttattttcgaaaaagtatcatatgtttttgatccttttatcatcgtttttaagacgatagcagcacctatcatcgtctctttaattctattctatctatttaacccaatcgtaaatatgatggaacgttatagaataccaagagttgcaggtatttctattatttatctagctgtagtaggtgttattacgttaattgttaatttattgatacctattattggttcgcaagtagatagtttagttaaaaattcaccgcaatatctagaaaaattaattaattctattgataaaatagcaaataatacgtttttctcttcgtattatagtcaaattaatgattggttaaattctttacctaagaaaataccatctatgttaagtgaatttacagatggctttgggtctaaaattgcaacgtttgcagaaacgattgctaatattggcgttgtgattgtcacaacaccatttgtactattctttatgcttaaagatggacatcacttcaaagaattttcaacgaatattatgccaccgaaattccgaaaagattttcatgatctacttgaaaaaatgagtgttcaagttggttcatacattcaaggacaaattatcgtttcattctgtatcggtatactgttgtttatcggttattcggttatcgggttgaaatatagcttagtattagctagtattgcggcagttacaagtgttgtaccatatttagggcctactatagcgatttctccagctattgtaatagctgctataacatcgccgtggatgctcttaaaattagcagtagtatggactttagtacaatttgttgaagggcacttcatttcaccaaatatcatgggtaaaacacttaagattcatccacttacaatcattttcattttactgtgtgcaggcaaattgcttggtattgtaggcgttattttaggtattccgggatatgctattttaaaagtattagttactcatttattccaattatttaaacgtcgatacaatcgtttctatggtaatgatgtaggtgaatatgatattaaagaaagtaataaaatagttgaataa

SEQ ID NO: 406912 - DNA, 852 bp, Staphylococcus aureus
atgggagaatatattgttactaaaacattgaacaacaatgtcgtagtatgtactaataatgatcaagaagttattttaatcggtaaaggtattggttttaacaaaaaagagggaatggcgttaaacgaccaaactattacaatagagaaaatttataaattagaaagtgagcaacaaaaagcgcattataaaagtttagttgaaatcgctgatgataatgtattacaagtaattattgattcgttgaattttatttctaatactgcgatgaatgttgattcaaaacaacttgtagtttcattaacggatcatattatatttgcttataaacgcttaaaacaaaatcaagttattagcaatccatttgttatggaaactatgcagttatatagtgatgcatatcatattgctaaacaggtgattgatcagttaaatgcagcattagatgtacattttcctgaagatgagataggatttattgcattacatattgcatctaatacagaagatttatctatgcatgagatgaccttgatcaataatgttattaaaaaaggtatagatatcattgaatcagaccttgtgacaactgttgataaggaatcattacaataccaacgttttataaggcacgtacaatttttaattcgccgattaagaagaaaagaatatatacatgcacaagatgattttgtgtctatgattaaaaatcactatccgatttgctataacacagcatataaaattttaactatgatacaaaaacaatttgatgttaatatcagtgagtctgaaattatatatttaacattacacattcatcattttgaagaaaggattaatcaatcctaa

SEQ ID NO: 406913 - DNA, 1461 bp, Staphylococcus aureus
ttgaaagatttcgatagtttaatacctggatggtttaaagaatttgtccatgttggtaccgatttaatatggtctcaatatttaattggtctattattgacagctggattcttctttacgattagttctaaattcgttcaattacgaatgttacctgaaatgtttagagctttagtagaacgtccagaaactttagaagatggtaagaagggtatttcgccattccaagcatttgcgattagtgctggttcgagagttggtactggtaatattgctggtgttgcgactgcgattgttttaggcggtccaggtgcagtattttggatgtgggttattgcatttataggtgcagcgagtgcatttatagaagcgactttggctcaggtttataaagtacatgataaagatggtggattccgtggtggtccagcttactatattactaaaggtttaaatcaaaaatggctaggtatcgtatttgcgattttaattacaattacatttgcatttgtatttaacacagtgcaatctaatacaattgcggagtcgttaaatacgcaatataatattagtccagtaatcacaggtattattttagcaatcgtaacagctattattatatttggtggtgtacgtagtattgctacgttatcttcgttaattgtaccgattatggctatcatttacattggtatggttttagtaatattgctatttaatttagatcaaattgttcctatgataggtacgattattaaaagtgcatttggtatcgaacaagtaactggtggcgctgtaggtgctgcggttcttcaaggtatcaaacgtggtttattctctaacgaagctggtatgggttctgcgccgaatgcagcggcaactgctgccgtaccacaccctgttaagcaaggtttaatccaatcattaggtgtgttctttgatacaatgttggtttgtacagcaactgcaatcatgattttactatattcaggactgaaatttggtgataacgcacctcaaggtgttgcagttactcaatcagcacttaatgagcatttaggttctgctggaggtattttcttaacaatagcagttacactgtttgcattttcatctgttgtaggtaattactattacggtcaatctaatattgaatttttatcaacaaaccgtgtaatattatttatctttagatgtcttgttgtagtacttgtctttgtcggtgcagttgtaaaaacagaaacagtatggaatacggcagacttatttatgggcttaatggcaattgtaaacattatttccattataggactgtccaatgtagcttttgcattgatgaaagattatcaaaagcagaaaaaagaaggcaagaaccctgtctttaaacctgaaaacttagaaattaacttatttggaattagtgcttggggcgctaacaaatataagaactctgataaataa

SEQ ID NO: 406914 - DNA, 2403 bp, Staphylococcus aureus
gtgagtgaaataattcaagatttatcacttgaagatgttttaggtgatcgctttggaagatatagtaaatatattattcaagagcgtgcattgccagatgttcgtgatggtttaaaaccagtacaacgtcgtattttatatgcaatgtattcaagtggtaatacacacgataaaaatttccgtaaaagtgcgaaaacagtcggtgatgttattggtcaatatcatccacatggagacttctcagtgtacaaagcaatggtccgtttaagtcaagactggaagttacgacatgtcttaatagaaatgcatggtaataatggtagtatcgataatgatccgccagcggcaatgcgttacactgaagctaagttaagcttactagctgaagagttattacgtgatattaataaagagacagtttctttcattccaaactatgatgatacgacactcgaaccaatggtattgccatcaagatttcctaacttactagtgaatggttctacaggtatatctgcaggttacgcgacagatataccaccacataatttagctgaagtgattcaagcaacacttaaatatattgataatccggatattacagtcaatcaattaatgaaatatattaaaggtcctgattttccaactggtggtattattcaaggtattgatggtattaaaaaagcttatgaatcaggtaaaggtagaattatagttcgttctaaagttgaagaagaaactttacgcaatggacgtaaacagttaattattactgaaattccatatgaagtgaacaaaagtagcttagtaaaacgtatcgatgaattacgtgctgacaaaaaagtcgatggtatcgttgaagtacgtgatgaaactgatagaactggtttacgaatagcaattgaattgaaaaaagatgtgaacagtgaatcaatcaaaaattatctttataaaaactctgatttacagatttcatataatttcaacatggtcgctattagtgatggtcgtccaaaattgatgggtattcgtcaaattatagatagttatttgaatcaccaaattgaggttgttgcaaatagaacgaagtttgaattagataatgcagaaaaacgtatgcatatcgttgaaggtttgattaaagcgttgtcaattttagataaagtaatcgaattgattcgtagctctaaaaacaagcgtgacgctaaagaaaaccttatcgaagtatacgagttcacagaagaacaggctgaagcaattgtaatgttacagttatatcgtttaacaaatactgacatagttgcgcttgaaggtgaacataaagaacttgaagcattaatcaaacaattacgtcatattcttgataaccatgatgcattattgaatgtcataaaagaagaattgaatgaaattaaaaagaaattcaaatctgaacgactgtctttaattgaagcagaaattgaagaaattaaaattgacaaagaagttatggtgcctagtgaagaagttattttaagtatgacacgtcatggatatattaaacgtacttctattcgtagctttaatgctagcggtgttgaagatattggtttaaaagatggtgacagtttacttaaacatcaagaagtaaatacgcaagataccgtactagtatttacaaataaaggtcgttatctatttataccggttcataaattagcagatattcgttggaaagaattgggacaacatgtatcacaaatagttcctatcgaagaagatgaagtggttattaatgtctttaatgaaaaggactttaatacagatgcattttatgtttttgcgactcaaaatggcatgattaagaaaagtacagtgcctctatttaaaacaacgcgttttaataaacctttaattgctactaaagttaaagaaaatgatgatttgattagtgttatgcgctttgaaaaagatcaattaattaccgtcattactaataaaggtatgtcattaacgtataatacaagtgaactatcagataccggattaagggcagctggtgttaaatcaataaatcttaaagctgaagatttcgttgttatgacagaaggtgtttctgaaaatgatactatattgatggccacacaacgcggctcgttaaaacgtattagttttaaaatcttacaagttgctaaaagagcacaacgtggaataactttattaaaagaattaaagaaaaatccacatcgtattgtagctgcacatgtagtgacaggtgaacatagtcaatatacattatattcaaaatcaaatgaagaacatggtttaattaatgatattcataaatctgaacaatatacaaatggctcattcattgtagatacagatgattttggtgaagtaatagacatgtatattagctaa

SEQ ID NO: 406915 - DNA, 1992 bp, Staphylococcus aureus
atgaataaacaaaataattattcagatgattcaatacaggttttagaggggttagaagcagttcgtaaaagacctggtatgtatattggatcaactgataaacggggattacatcatctagtatatgaaattgtcgataactccgtcgatgaagtattgaatggttacggtaacgaaatagatgtaacaattaataaagatggtagtatttctatagaagataatggacgtggtatgccaacaggtatacataaatcaggtaaaccgacagtcgaagttatctttactgttttacatgcaggaggtaaatttggacaaggcggctataaaacttcaggtggtcttcacggtgttggtgcttcagttgtaaatgcattgagtgaatggcttgaagttgaaatccatcgagatggtaatatatatcatcaaagttttaaaaacggtggttcgccatcttctggtttagtgaaaaaaggtaaaactaagaaaacaggtaccaaagtaacatttaaacctgatgacacaatttttaaagcatctacatcatttaattttgatgttttaagtgaacgactacaagagtctgcgttcttattgaaaaatttaaaaataacgcttaatgatttacgcagtggtaaagagcgtcaagagcattaccattatgaagaaggaatcaaagagtttgttagttatgtcaatgaaggaaaagaagttttgcatgacgtggctacattttcaggtgaagcaaatggtatagaggtagacgtagctttccaatataatgatcaatattcagaaagtattttaagttttgtaaataatgtacgtactaaagatggtggtacacatgaagttggttttaaaacagcaatgacacgtgtatttaatgattatgcacgtcgtattaatgaacttaaaacaaaagataaaaacttagatggtaatgatattcgtgaaggtttaacagctgttgtgtctgttcgtattccagaagaattattgcaatttgaaggacaaacgaaatctaaattgggtacttctgaagctagaagtgctgttgattcagttgttgcagacaaattgccattctatttagaagaaaaaggacaattgtctaaatcacttgtgaaaaaagcgattaaagcacaacaagcaagggaagctgcacgtaaagctcgtgaagatgctcgttcaggtaagaaaaacaagcgtaaagacactttgctatctggtaaattaacacctgcacaaagtaaaaacactgaaaaaaatgaattgtatttagtcgaaggtgattctgcgggaggttcagcaaaacttggacgagaccgcaaattccaagcgatattaccattacgtggtaaggtaattaatacagagaaagcacgtctagaagatatttttaaaaatgaagaaattaatacaattatccacacaatcggggcaggcgttggtactgactttaaaattgaagatagtaattataatcgtgtaattattatgactgatgctgatactgatggtgcgcatattcaagtgctattgttaacattcttcttcaaatatatgaaaccgcttgttcaagcaggtcgtgtatttattgctttacctccactttataaattggaaaaaggtaaaggcaaaacaaagcgagttgaatacgcttggacagacgaagagcttaataaattgcaaaaagaacttggtaaaggcttcacgttacaacgttacaaaggtttgggtgaaatgaaccctgaacaattatgggaaacgacgatgaacccagaaacacgaactttaattcgtgtacaagttgaagatgaagtgcgttcatctaaacgtgtaacaacattaatgggtgacaaagtacaacctagacgtgaatggattgaaaagcatgttgagtttggtatgcaagaggaccaaagtattttagataattctgaagtacaagtgcttgaaaatgatcaatttgatgaggaggaaatctag

SEQ ID NO: 406916 - DNA, 609 bp, Staphylococcus aureus
atgatgataatcgtcatgttactactaagttatcttatcggcgctttcccaagtggattcgtaattggaaaattatttttcaaaaaagatattagacaatttggtagtggtaatactggcgctactaatagctttagagtattaggtcgtcctgcaggattcttggtaacatttctagatattttcaaagggttcataactgttttcttccctttatggttacaagttcacgcagatggccctattagtactttttttacaaatggtttaattgttggcttattcgctatacttggacacgtttatcctgtttatttaaaattccaaggtggcaaagctgttgcaactagtgcaggtgtcgtcttgggagtcaatccgatacttttactaatacttgcaattatcttctttattgtattgaagatttttaaatatgtttctttagcaagtatcgttgcagcaatttgctgtgtgattggctcgcttatcattcaagactatattttattagtcgttagtttcttagtttcaatcatattgataattagacatcgctctaatatcgcaaggatttttagaggcgaagaacctaaaataaaatggatgtaa

SEQ ID NO: 406917 - DNA, 297 bp, Staphylococcus aureus
atgcaaatagaacttactgatgcagcagtaacttggtttaaaaatgaacttgagttgcctgaaaataataaagtgctcgtgttttttgtaagatatggtggcgaattccaactcaagcaaggatttagtcctgcttttacagttgaaccaaaggaagatgttgatattggctatgaacaacaatatgacgatttaaatgttgtcgtagcggaaaaagatttgtggtactttgaagatgaccacattattgtaaatgtagttgatcacgaagatgaaatttcttattccacaaaataa

SEQ ID NO: 406918 - DNA, 468 bp, Staphylococcus aureus
atgatatatagtattacagaaatagaagcgcgttatgctgaaactgataagatgggtgtaatttatcacgggaattatgcaacttggtttgaagttgcgcggttggattatatatcgaagttaggttttagttatgctgatatggaaaaacaaggaatcatttcacctgtgactgacctcaatgtcaattataaaaagtctattttttatccagaaaaagttaaagttaaaacttgggttgaaaaatattcgagattacgttcagtgtataaatatgagatttttaatgaaaaaggtgaacttgcaactacaggttccacagaattgatttgcattaaagaagatacttttaagcctatacggttggatcgttatttcccagattggcatgaagcttatagtaaagtgcaaacgctcaataatgaagggaaaacagtagagataatggatggtattgattctttataa

SEQ ID NO: 406919 - DNA, 2706 bp, Staphylococcus aureus
atggctgcaaattttaaagagcaatcaaaaaaacattttgacttgaatggccaaagttatacttactatgatttaaaagctgtagaagagcaaggtattactaaagtttccaatttaccttattcaattcgtgttttgttagaatctttacttcgtcaagaagatgattttgtaattacagacgatcatattaaagctttaagtcagtttggaaaagatggaaatgaaggcgaggtgccatttaaaccttctcgtgttattttacaagatttcacaggtgtaccagccgtagttgatttagcttctttacgtaaagcaatggatgacgttgggggagatattactaaaattaatccagaagtaccggtggatttagttattgaccactcagttcaagtggatagctatgcaaatccagaagctcttgaacgtaatatgaaattagaatttgaacgtaactatgaacgttatcagtttttaaattgggcaacgaaagcatttgataattacaatgcagttcctcctgcaactggaatagttcaccaagttaacttagaatatttagcaagtgttgtacatgttcgtgatgtagatggtgaaaaaactgcatttccagatacattagttggtactgattcacatacaacaatgataaatggtattggcgtactaggatggggtgttggtggtattgaagctgaagctggaatgcttggacaaccttcttatttcccaattccagaggttattggtgtacgactagtaaattcattaccacaaggcgcaacagcaactgatttagcgttaagagtaactcaagagctacgtaaaaaaggtgttgttggtaaatttgtggagttctttggtccaggtgtacaacatttaccactagcagaccgtgctacaattgcaaacatggcaccagagtatggagcaacttgcggattcttcccagttgatgatgaatctcttaaatatatgaagttaactggtagatcagacgaacatatcgcgctagtaaaagaatatttgaaacaaaaccatatgttctttgatgttgagaaagaagatcctaattatacagatgttatcgaattggatttatcaacagttgaagcatcgctttcaggaccaaaacgtcctcaagatttaattttcttaagtgatatgaaatcatcatttgaaaattctgtaacagctccagcaggcaaccaaggacacggtttagataaaagtgaatttgataagaaagctgaaattaactttaaagatggatcaaaagctacaatgaaaacaggtgatattgcaatagcagcaattacatcatgtacaaatacatctaacccttatgtaatgttaggtgcaggtttagttgctaaaaaagcagttgaaaaaggcttgaaagttcctgaatacgttaaaacttctctagcaccaggatcaaaagttgttaccggatatttaagagatgctggcttacaaccttatttagatgatttaggcttcaacttggttggttatggatgtacaacttgtatcggtaattcaggtcctttattaccagaaattgaaaaagcgattgctgatgaggacctattagtgacatctgtattatctggtaaccgtaactttgaaggtcgtatccatcctcttgttaaagccaattacctagcttcaccacagttagttgttgcttatgcattagctggaacggttgatattgatttacaaaatgaacctattggtaaaggtaatgacggtgaagatgtatatttgaaagatatttggccatcaattaaagaagtttcagataccgttgatagtgttgtaacacctgaattatttattgaagaatataataacgtatacaataacaacgaattatggaatgagattgatgtaactgatcaacctctatatgactttgatcctaattcaacatacattcaaaatccatcattcttccaaggattatctaaagaaccgggtacgattgttccattaaatggtttacgtgttatgggtaaattcggtgattctgtgacaactgaccacatctctccagcaggtgcaattggtaaagatacgccagctggtaaatatttacaagatcatcaagtgcctattcgtgaatttaattcatatggttcaagacgtggtaatcacgaagtaatggttcgaggtacgtttgctaatatacgtattaaaaaccaattagcgccaggtactgaaggtggttttacaacttattggccaacaaatgaagtaatgcctatctttgatgctgcaatgaaatataaagaagatggtacaggtttagttgtattagctggtaacgattatggtatgggttcatctcgtgactgggcagcaaaaggtacaaacttattaggtgttaaaacagttattgcacaaagttatgaacgtatccatcgttcaaatttagttatgatgggtgtattaccattagagtttaaaaaaggtgaatcagctgattctcttggtctagatggtacagaagaaatttctgttaatattgatgaaaatgttcaaccacatgactacgtcaaagttactgctaagaagcaagatggtgatttggtagaatttgacgctatggttcgttttgactcacttgttgaaatggattactatcgtcacggtggaattttacaaatggttttaagaaataaattagcgcaataa

SEQ ID NO: 406920 - DNA, 912 bp, Staphylococcus aureus
atggataataatgaaaaagaaaaaagtaaaagtgaactattagttgtaacaggtttatctggcgcaggtaaatctttggttattcaatgtttagaagacatgggatatttttgtgtagataatctaccaccagtgttattgcctaaatttgtagagttgatggaacaaggaaatccatccttaagaaaagtggcaattgcaattgatttaagaggtaaggaactatttaattcattagttgcagtagtggataaagtcaaaagtgaaagtgacgtcatcattgatgttatgtttttagaagcaagtactgaaaaattaatttcaagatataaggaaacgcgtcgtgcacatcctttgatggaacaaggtaaaagatcgttaatcaatgcaattaatgatgagcgagagcatttgtctcaaattagaagtatagctaattttgttatagatactacaaagttatcacctaaagaattaaaagaacgcattcgtcgatactatgaagatgaagagtttgaaacttttacaattaatgtcacaagtttcggttttaaacatgggattcagatggatgcagatttagtatttgatgtacgatttttaccaaatccatattatgtagtagatttaagacctttaacaggattagataaagacgtttataattatgttatgaaatggaaagagacggagattttctttgaaaaattaactgatttgttagattttatgatacccgggtataaaaaagaagggaaatctcaattagtaattgccatcggttgtacgggtggacaacatcgatctgtagcattagcagaacgactaggtaattatctaaatgaagtatttgaatataatgtttatgtgcatcatagggacgcacatattgaaagtggcgagaaaaaatga

SEQ ID NO: 406921 - DNA, 996 bp, Staphylococcus aureus
atgagacaaataaaagttgtacttatcggtggtggcactggcttatcagttatggctaggggattaagagaattcccaattgatattacggcgattgtaacagttgctgataatggtgggagtacagggaaaatcagagatgaaatggatataccagcaccaggagacatcagaaatgtgattgcagctttaagtgattctgagtcagttttaagccaactttttcagtatcgctttgaagaaaatcaaattagcggtcactcattaggtaatttattaatcgcaggtatgactaatattacgaatgatttcggacatgccattaaagcattaagtaaaattttaaatattaaaggtagagtcattccatctacaaatacaagtgtgcaattaaatgctgttatggaagatggagaaattgtttttggagaaacaaatattcctaaaaaacataaaaaaattgatcgtgtgtttttagaacctaacgatgtgcaaccaatggaagaagcaatcgatgctttaagggaagcagatttaatcgttcttggaccagggtcattatatacgagcgttatttctaacttatgtgtgaatggtatttcagatgcgttaattcattctgatgcgcctaagctatatgtttctaatgtgatgacgcaacctggggaaacagatggttatagcgtgaaagatcatatcgatgcgattcatagacaagctggacaaccgtttattgattatgtcatttgtagtacacaaactttcaatgctcaagttttgaaaaaatatgaagaaaaacattctaaaccagttgaagttaataaggctgaacttgaaaaagaaagcataaatgtaaaaacatcttcaaatttagttgaaatttctgaaaatcatttagtaagacataatactaaagtgttatcgacaatgatttatgacatagctttagaattaattagtactattcctttcgtaccaagtgataaacgtaaataa

SEQ ID NO: 406922 - DNA, 945 bp, Staphylococcus aureus
atgagctttgcatcagaaatgaaaaatgaattaactagaatagacgtcgatgaaatgaatgcaaaagcagagctcagtgcactgattcgaatgaatggtgcacttagtctttcaaatcaacaatttgttataaatgttcaaacggaaaatgcaacaacggcaagacgtatttattcgttgattaaacgtgtctttaatgtggaagttgaaatattagtccgtaaaaaaatgaaacttaaaaaaaataatatttatatttgtcgtacaaagatgaaagcgaaagaaattcttgatgaattaggaattttaaaagacggcatttttacgcatgaaattgatcattcaatgattcaagatgacgaaatgagacgcagttacttgagaggagcttttctggcaggtggctcagtgaataaccctgaaacatcttcgtaccatttggaaattttttctcaaaatgagagtcatgcagaaggcttaacgaaactaatgaatagttatgagttgaatgccaaacatttagagcgaaaaaaaggaagtattacgtatttaaaagaagcggaaaagatttcggattttcttagtttgataggtggctatcaagcgttattaaaatttgaagacgtacgtattgtaagagatatgcgtaattctgttaaccgactcgttaattgtgaaacggccaatctaaataaaacagttagtgctgcgatgaaacaagttgagagcattaaattgattgataaagaaattggtattgaaaatttaccagacaggttgagagagattgctagaattcgagtagaacatcaagaaatttcgttgaaagagcttggagaaatggtatcaactggtccaatttcaaaatcaggtgtaaatcaccgattaagaaaactgaatgatttagccgataagattagaaatggtgaacaaatagaattataa

SEQ ID NO: 406923 - DNA, 588 bp, Staphylococcus aureus
atgaatttaattcctacagttattgaaacaacaaaccgcggtgaacgtgcatatgatatatactcacgtttattaaaagaccgtattattatgttaggttcacaaattgatgacaacgtagcaaattcaatcgtatcacagttattattcttacaagcgcaagactcagagaaagatatttatttatacattaattcaccaggtggaagtgtaacagctggttttgcgatttatgatacaattcaacacattaaacctgatgttcaaacaatttgtatcggtatggctgcatcaatgggatcattcttattagcagctggtgcaaaaggtaaacgtttcgcgttaccaaatgcagaagtaatgattcaccaaccattaggtggtgctcaaggacaagcaactgaaatcgaaattgctgcaaatcacattttaaaaacacgtgaaaaattaaaccgcattttatcagagcgtactggtcaaagtattgaaaaaatacaaaaagacacagatcgtgataacttcttaactgcagaagaagctaaagaatatggcttaattgatgaagtgatggtacctgaaacaaaataa

SEQ ID NO: 406924 - DNA, 870 bp, Staphylococcus aureus
atggttggatctcaattagttaatgaaattaaaaaatcagattcacatatcacgatattaacgcgacacgaccaaatttcaaatgataagaaaatttcatatgtcaactgggctaaatctgggtgggaacacaaagttcctcaaaatatcgatgtggtcatcaacttagcaggtgctacattgaataaacgatggacaccggaatataaacaaacgctaatgctaagtagaattcaatctacgcaagctttatatgaattgtttaaatcacgtaataaagcacctaaagctttatttaatgctagtgccactggttactatcctcctgatttatttatgagttacacagaagtttataaaactttaccttttgatttcttatcagatattgtgtatcaatgggaacgtttcgcacaacaatttgaacaattaggtacacgagttgtcatcggtcgtttcggtataattttatcgaatgaaggcggtgcgttacaaacaatgaaactaccatacgaatattacattggtggtaaattaggttctggtcaacaatggtattcatggattcatatcaatgatttaattcaagctattttatttttaataaataacgagtcagctagtggtccgtttaatttaactgcacctatacctgaacgtcaaaatttatttggctacactttagcaagagctatgcataagcctcatgaaacttgggcaccaagtcttgcaatgcgtctcatacttggtcaaatgtcaacagtagtattggatactcaaaaagtattacctaataaaattcaagcattgggattccaatttaaatatagtaatttaaaaatggcacttgaagatttaattaaagaataa

SEQ ID NO: 406925 - DNA, 630 bp, Staphylococcus aureus
atgtcgaatcaaaattacgactacaataaaaatgaagatggaagtaagaagaaaatgagtacaacagcgaaagtagttagcattgcgacggtattgctattactcggaggattagtatttgcaatttttgcatatgtagatcattcgaataaagctaaagaacgtatgttgaacgaacaaaagcaggaacaaaaagaaaagcgtcaaaaagaaaatgcagaaaaagagagaaagaaaaagcaacaagaggaaaaagagcagaatgagctagattcacaagcaaaccaatatcagcaattgccacagcagaatcaatatcaatatgtgccacctcagcaacaagcacctacaaagcaacgtcctgctaaagaagagaatgatgataaagcatcaaaggatgagtcgaaagataaggatgacaaagcatctcaagataaatcagatgataatcagaagaaaactgatgataataaacaaccagctcagcctaaaccacagccgcaacaaccaacaccaaagccaaataataatcaacaaaacaatcaatcaaatcagcaagcaaaaccacaagcaccacaacaaaatagccaatcaacaacaaataaacaaaataatgctaatgataagtag

SEQ ID NO: 406926 - DNA, 1014 bp, Staphylococcus aureus
gtgaaagacttattgcaagcacagcaaaagcttataccggatctcatagataaaatgtataaacgtttttctattcttactactatctcaaaaaatcagcctgtcggacgtcgaagtttaagcgaacatatggatatgactgaacgtgtactgcgttctgaaacagatatgcttaagaaacaagatttgataaaagttaagcctaccggaatggaaattacagctgaaggtgagcaactgatttcgcaattgaaaggttactttgatatctatgcagatgataatcgtctgtcagaaggtattaagaataaatttcaaattaaggaagttcatgttgttcctggtgatgctgataatagtcaatctgttaaaacagaattaggtagacaagcaggtcaattacttgaaggcatattacaagaagacgcgatagttgctgtaactggcggatccacgatggcatgtgttagtgaagcaattcatttattaccatataatgtattcttcgtaccagccagaggtggactaggcgaaaatgttgtctttcaggcaaacacaattgcagccagtatggcacaacaagctggcggttattatacgacgatgtatgtacctgataatgtcagtgaaacaacatataatacattgttgttagagccatcagtcataaacactttagacaaaattaaacaagcaaacgttatattacacggcattggtgatgcgctgaagatggcgcatcgacgtcaatcacctgaaaaggtcattgaacaacttcaacatcatcaagctgtcggagaggcatttggttattattttgatacacaaggtcaaattgtccataaggttaaaacaattggacttcaattagaagaccttgaatcaaaagactttatttttgcagttgcaggaggcaaatcgaaaggtgaagcaattaaagcatacttgacgattgcacccaagaatacagtgttaatcactgatgaagccgcagcaaagataatacttgaataa

SEQ ID NO: 406927 - DNA, 1011 bp, Staphylococcus aureus
atggcagtaaaagtagcaattaatggttttggtagaattggtcgtttagcattcagaagaattcaagaagtagaaggtcttgaagttgtagcagtaaacgacttaacagatgacgacatgttagcgcatttattaaaatatgacactatgcaaggtcgtttcacaggtgaagtagaggtagttgatggtggtttccgcgtaaatggtaaagaagttaaatcattcagtgaaccagatgcaagcaaattaccttggaaagacttaaatatcgatgtagtattagaatgtactggtttctacactgataaagataaagcacaagctcatattgaagcaggcgctaaaaaagtattaatctcagcaccagctactggtgacttaaaaacaatcgtattcaacactaaccaccaagagttagacggttctgaaacagttgtttcaggtgcttcatgtactacaaactcattagcaccagttgctaaagttttaaacgatgactttggtttagttgaaggtttaatgactacaattcacgcttacacaggtgatcaaaatacacaagacgcacctcacagaaaaggtgacaaacgtcgtgctcgtgcagcggcagaaaacatcatccctaactcaacaggtgctgctaaagctatcggtaaagttattcctgaaatcgatggtaaattagatggtggtgcacaacgtgttcctgtagctacaggttcattaactgaattaacagtagtattagaaaaacaagacgtaacagttgaacaagttaacgaagctatgaaaaatgcttcaaacgaatcattcggttacactgaagacgaaatcgtttcttcagacgttgtaggtatgacttacggttcattattcgacgctacacaaactcgtgtaatgtcagttggcgaccgtcaattagttaaagttgcagcttggtatgataacgaaatgtcatatactgcacaattagttcgtacattagcatacttagctgaactttctaaataa

SEQ ID NO: 406928 - DNA, 1191 bp, Staphylococcus aureus
atggctaaaaaaattgtttctgatttagatcttaaaggtaaaacagtcctagtacgtgctgattttaacgtacctttaaaagacggtgaaattactaatgacaaccgtatcgttcaagctttacctacaattcaatacatcatcgaacaaggtggtaaaatcgtactattttcacatttaggtaaagtgaaagaagaaagtgataaagcaaaattaactttacgtccagttgctgaagacttatctaagaaattagataaagaagttgttttcgtaccagaaacacgcggcgaaaaacttgaagctgctattaaagaccttaaagaaggcgacgtattattagttgaaaatacacgttatgaagatttagacggtaaaaaagaatctaaaaatgatccagaattaggtaaatactgggcatctttaggtgatgtgtttgtaaatgatgcttttggtactgcgcatcgtgagcatgcatctaatgttggtatttctacacatttagaaactgcagctggattcttaatggataaagaaattaagtttattggcggcgtagttaacgatccacataaaccagttgttgctattttaggtggagcaaaagtatctgacaaaattaatgtcatcaaaaacttagttaacatagctgataaaattatcatcggcggaggtatggcttatactttcttaaaagcgcaaggtaaagaaattggtatttcattattagaagaagataaaatcgacttcgcaaaagatttattagaaaaacatggtgataaaattgtattaccagtagacactaaagttgctaaagaattttctaatgatgccaaaatcactgtagtaccatctgattcaattccagcagaccaagaaggtatggatattggaccaaacactgtaaaattatttgcagatgaattagaaggtgcgcacactgttgtatggaatggacctatgggtgtattcgagttcagtaactttgcacaaggtacaattggtgtatgtaaagcaattgcaaaccttaaagatgcaattacgattatcggtggcggtgattcagctgcagcagcaatctctttaggttttgaaaatgacttcactcatatttcaactggtggcggcgcgtcattagagtacctagaaggtaaagaattgcctggtatcaaagcaatcaataataaataa

SEQ ID NO: 406929 - DNA, 762 bp, Staphylococcus aureus
atgagaacaccaattatagctggtaactggaaaatgaacaaaacagtacaagaagcaaaagacttcgtcaatgcattaccaacattaccagattcaaaagaagtagaatcagtaatttgtgcaccagcaattcaattagatgcattaactactgcagttaaagaaggaaaagcacaaggtttagaaatcggtgctcaaaatacgtatttcgaagataatggtgcgttcacaggtgaaacgtctccagttgcattagcagatttaggcgttaaatacgttgttatcggtcattctgaacgtcgtgaattattccacgaaacagatgaagaaattaacaaaaaagcgcacgctattttcaaacatggaatgactccaattatatgtgttggtgaaacagacgaagagcgtgaaagtggtaaagctaacgatgttgtaggtgagcaagttaagaaagctgttgcaggtttatctgaagatcaacttaaatcagttgtaattgcttatgaaccaatctgggcaatcggaactggtaaatcatcaacatctgaagatgcaaatgaaatgtgtgcatttgtacgtcaaactattgctgacttatcaagcaaagaagtatcagaagcaactcgtattcaatatggtggtagtgttaaacctaacaacattaaagaatacatggcacaaactgatattgatggggcattagtaggtggcgcatcacttaaagttgaagatttcgtacaattgttagaaggtgcaaaataa

SEQ ID NO: 406930 - DNA, 1518 bp, Staphylococcus aureus
atggctaagaaaccaactgcgttaattattttagatggttttgcgaaccgcgaaagcgaacatggtaatgcggtaaaattagcaaacaagcctaattttgatcgttattacaacaaatatccaacgactcaaatcgaagcgagtggcttagatgttggactacctgaaggacaaatgggtaactcagaagttggtcatatgaatatcggtgcaggacgtatcgtttatcaaagtttaactcgaatcaataaatcaattgaagacggtgatttctttgaaaatgatgttttaaataatgcaattgcacacgtgaattcacatgattcagcgttacacatctttggtttattgtctgacggtggtgtacacagtcattacaaacatttatttgctttgttagaacttgctaaaaaacaaggtgttgaaaaagtttacgtacacgcatttttagatggccgtgacgtagatcaaaaatccgctttgaaatacatcgaagagactgaagctaaattcaatgaattaggcattggtcaatttgcatctgtgtctggtcgttattatgcaatggatcgtgacaaacgttgggaacgtgaagaaaaagcttacaatgctattcgtaattttgatgccccaacttatgcaactgccaaagaaggtgtagaagcaagctataatgagggcttaactgacgaattcgtagtaccattcatcgttgagaatcaaaatgacggtgttaatgatggagatgcagtgatcttctataatttccgacctgatagagcagcgcaattatcggaaatttttgcgaacagagcattcgaaggctttaaagttgaacaagttaaagacttattctatgcaacattcactaagtataatgacaatatcgatgcggctatcgtcttcgaaaaagttgatttaaataatacaattggtgaaattgcacaaaataacaatttaactcaattacgtattgcagaaactgaaaaataccctcacgttacttactttatgagtggtggacgtaacgaggaatttaaaggtgaacgccgtcgtttaattgattcacctaaagttgcaacgtatgacttgaaaccagaaatgagtgcttatgaagttaaagatgcattattagaagagttaaataaaggtgacttggacttaattattttaaactttgctaaccctgatatggttggacatagtggtatgcttgagccgacaatcaaagcaatcgaagcggttgatgaatgtttaggagaagtggttgataagattttagacatggacggttatgcaattattactgctgaccatggtaactctgatcaagtattgacggatgatgatcaaccaatgactacgcatacaacgaacccagtaccagtgattgtaacaaaagaaggcgttacacttagagaaactggtcgcttaggtgacttagcacctacattattagatttattaaatgtagaacaacctgaagatatgacaggtgaatctttaattaaacactaa

SEQ ID NO: 406931 - DNA, 1305 bp, Staphylococcus aureus
atgccaattattacagatgtttacgctcgcgaagtcttagactctcgtggtaacccaactgttgaagtagaagtattaactgaaagtggcgcatttggtcgtgcattagtaccatcaggtgcttcaactggtgaacacgaagctgttgaattacgtgatggagacaaatcacgttatttaggtaaaggtgttactaaagcagttgaaaacgttaatgaaatcatcgcaccagaaattattgaaggtgaattttcagtattagatcaagtatctattgataaaatgatgatcgcattagacggtactccaaacaaaggtaaattaggtgcaaatgctattttaggtgtatctatcgcagtagcacgtgcagcagctgacttattaggtcaaccactttacaaatatttaggtggatttaatggtaagcagttaccagtaccaatgatgaacatcgttaatggtggttctcactcagatgctccaattgcattccaagaattcatgattttacctgtaggtgctacaacgttcaaagaatcattacgttggggtactgaaattttccacaacttaaaatcaattttaagcaaacgtggtttagaaactgcagtaggtgacgaaggtggtttcgctcctaaatttgaaggtactgaagatgctgttgaaacaattatccaagcaatcgaagcagctggttacaaaccaggtgaagaagtattcttaggatttgactgtgcatcatcagaattctatgaaaatggtgtatatgactacagtaagttcgaaggcgaacacggtgcaaaacgtacagctgcagaacaagttgactacttagaacaattagtagacaaatatcctatcattacaattgaagacggtatggacgaaaacgactgggatggttggaaacaacttacagaacgtatcggtgaccgtgtacaattagtaggtgacgatttattcgtaacaaacactgaaattttagcaaaaggtattgaaaacggaattggtaactcaatcttaattaaagttaaccaaatcggtacattaactgaaacatttgatgcaatcgaaatggctcaaaaagctggttacacagcagtagtttctcaccgttcaggtgaaacagaagatacaacaattgctgatattgctgttgctacaaacgctggtcaaattaaaactggttcattatcacgtactgaccgtattgctaaatacaatcaattattacgtatcgaagatgaattatttgaaactgctaaatatgacggtatcaaatcattctataacttagataaataa

SEQ ID NO: 406932 - DNA, 459 bp, Staphylococcus aureus
atggctgatagaacgaataaagaaattaaaacaggacgctttattgcaactgcatcaatcgtattctcaatattattgattattcattactttgtttcgttggataatgcgactgccaaagcattacttaatttaacgaatcaaaacacttcagataaagcgattgattacattttaaacagctttagattcactggtattatgtatattttggcttatctagcaggcttcatcactttttggaatcgacatacttatgtgtggtggtttatgtttgcagtttatgtatcaaatagtttgtttacgttgattaatttatcaatcacaattcaagcaataaaagctgcacacggtgcgtacttaacattgccaattttaattgttattataggttcggttgcattagcgatttatatgcttgttgtttctatcaaacgtaaaagtacatttaatcgctag

SEQ ID NO: 406933 - DNA, 234 bp, Staphylococcus aureus
atgcatacatttttaatcgtattattaatcattgattgtattgcattaataactgttgtactactccaagaaggtaaaagcagtggactttcaggtgccatcagtggtggtgctgagcagttattcggtaaacaaaaacaacgtggcgtcgatttattcttaaatagattaacaattattttatcaatattattttttgtacttatgatttgcataagttatcttggtatgtaa

SEQ ID NO: 406934 - DNA, 741 bp, Staphylococcus aureus
atgcagataaaattaccaaaacctttcttttttgaggaaggtaaacgtgccgtgttattactacatggttttacaggcaattcgtctgatgttcgtcaattaggtcgatttttacaaaagaaaggttatacatcatatgcaccgcaatatgaaggccacgcggcaccaccagatgaaatactgaaatctagtcctttcgtttggtttaaagatgcgttagatggttatgattatcttgttgaacaaggttatgatgaaattgttgttgctggtctatcattaggtggggattttgctttaaaattaagcttaaatagagatgtaaagggtattgtaacgatgtgtgctcctatgggtggcaaaactgaaggtgccatttatgaaggctttttagaatatgcacgcaattttaaaaagtatgaaggtaaagatcaagagactattgataatgaaatggatcattttaaaccaactgaaactttaaaagaactaagtgaagcattagatacgattaaagagcaagttgatgaagtgttggatcctattttagtgattcaagcagaaaacgacaatatgattgatccacaatccgcaaattatatatatgaccatgtagattctgatgacaaaaatatcaagtggtacagtgaatctggacatgttattacgattgataaagagaaagaacaagtatttgaagatatttatcaatttttagagtcattagactggtcagaataa

SEQ ID NO: 406935 - DNA, 2373 bp, Staphylococcus aureus
atgaatttaaagcaatctatagaagagattattaatcaacctgaatatgaacctatgtcagtgtcagattttcaagatgcattaggtttaagcagtgccgactcgtttagagatttaattaaggtgcttgtggagttagaacaatcaggattaatcgaacgtacaaaaacagacagataccaaaaaaagcatagttatagaggtcaatcaaaattgataaaaggaacgttaagtcaaaataaaaaaggctttgcattcttaagacctgaagatgaggatatggaagatatatttattcccccgacgaaaattaatcgtgccttggatggagatactgttattgtagaaatccatcaatcaaaaggtgaacataaaggtaaaatcgaaggggaagttaagtcgattgagaagcattctgtaactcaagttgttggtacgtatagtgaagctagacattttggctttgttattccggatgataaacgtattatgcaagatattttcattcctaaaggtcaaagtttaggcgcagtcgatggtcataaggtacttgtacaaattactaagtatgctgatggttcagataatccagaaggacatatttctgctattttaggacataaaaatgatcctggcgtagatattttatctattatctatcaacatggcatagaaattgaatttcctgatgaagtgttacaagaagctgaagcagtacctgatcatattgaaaatactgaaattaaaggccgtcatgatttacgtgatgaattgacaatcacaattgatggtgctgatgctaaagacttagatgacgcaattagtgttaaaaagttagcgaacggtaatacgcaattaactgtaagtattgctgatgtcagctattatgtaacagaaggttctgcattggataaagaggcatatgatagagcgacaagtgtatatcttgttgaccgtgtaattccaatgattccacatcgattaagtaatggtatttgttcattgaatcctaatgttgatcgtttaactctaagctgtcgcatggaaatcgatgctagtggtcgcgttgttaaacatgaaatttttgatagtgttatacattctgattatcgaatgacgtatgatgcggtaaatcagattattactgaaaaggatcctaacattcgcgaacaatataatgaaattacgcctatgctagatttagcacaagatttatctaatcgtttgattcaaatgagaaaacgacgtggtgaaatcgattttgatattagtgaagcaaaagtattagttaacgaagacggtataccaacagatgttcaattaagacaacgtggcgagggtgaacgtctaattgaatcatttatgttaattgcaaatgaaacagttgctgaacattttagtaagttagatgtaccttttatttaccgagtgcatgagcaacctaaatcagatcgcttaagacaattctttgattttattacaaactttggcatcatgattaagggtactggcgaagatattcatccaacaacacttcaaaaggttcaagaagaagtagaaggtcgacctgaacaaatggtcatttcaacaatgatgttgcgttcaatgcaacaagcgcattatgatgatgtgaacttgggacattttggcttatcagctgaatattatacgcattttacatcaccaattagacgttatcctgatttaacagttcatcgtttaatccgtaagtatttaattgagaaatcaatggataacaaagaagtgaagcgttgggaagacaaattgcctgagttagctgaacatacttctaaacgtgaacgtcgtgctattgaggcagaacgtgatactgatgaattgaaaaaagcagaatatatgattcaacatattggtgatgaatttgaaggtattgtcagctcagtagctaacttcggtatgttcattgaattgccaaatacgatagaaggtatggttcatattgcgaatatgactgatgattattaccgttttgaagagcgtcaaatggcattaattggtgagcgtcaagctaaagtatttagaattggtgacacagttaaggttaaagtgacgcatgttgatgtagatgaacgattaattgattttcaaattgtaggtatgcctttaccgaaaaatgatcgatcacagcgcccagcgcgaggtaagacaattcaagccaaaacgcgtggtaaatcattagataaatcaaaatctgatgataagggtcgtaagaaaaaaggtaagcaacgtaaaggtaaaaaccaacgtaataatgataaatcaggtaatagtaagcataagccattttataaagataaaagtgtgaaaaagaaagcacgtcgtaagaaaaaataa

SEQ ID NO: 406936 - DNA, 465 bp, Staphylococcus aureus
atggctaagaagaaatcaccaggtacattagcggaaaatcgtaaggcaagacatgattataatattgaagatacgattgaagcgggaattgtattgcaaggcacagaaataaaatcaattcgccgaggtagtgctaaccttaaagatagttatgcgcaagttaaaaacggtgaaatgtatttgaataatatgcatatagcaccatacgaagaagggaatcgttttaatcacgatcctcttcgttctcgaaaattattattgcacaagcgtgaaatcattaaattgggtgatcaaacacgtgagattggttattcgattgtgccgttaaagctttatttgaagcatggacattgtaaagtattacttggtgttgcacgaggtaagaaaaaatatgataaacgtcaagctttgaaagaaaaagcagtcaaacgagatgttgcgcgcgatatgaaagcccgttattaa

SEQ ID NO: 406937 - DNA, 324 bp, Staphylococcus aureus
atgaataatgaagaattagaaatgagattgttattaatgaaacaatcaatagaacaattacaagaagaactagcgcctaacttaaaaactagagatttagtgttattaagatatatgtattcatataaagaaattaatatgctagattcttacttgttccaattggctacaaataaagagcaaataacaaaaaaacaatttaaaacaaaattggaaaacattagagaagtaccagaaatacctattagacaagttaatgatatattagaaggttataaaaatagtgagttatatgttgagttgataaatagcatcctaaaataa

SEQ ID NO: 406938 - DNA, 729 bp, Staphylococcus aureus
atgaaaaaagtaatggggatattattagcaagtacacttatcttaggtgcttgtggacatcatcaagatagtgcaaaaaaagagagcactagtcacaaaaagaaagaaaatgacaatgaagaattaaatgaagaacttaaagaatttaaaagcaaaaaaaatatggatataaaaattaaaggcgatactattgttagtgacaaatttgaagctaaaataaaagaaccgtttatcatcaatgaaaaagatgagaaaaagaaatatatcgcttttaaaatggaaattactgctaaaaaagacgataaagatttaaatccatcttctatttctcatgactatattaatatcactcaagatgataaaaatacagtaaataaattaagagatggttatcttttaagtgataaaaaatataaagattggacagaacataaccaagatcaaattaaaaaaggcaaaactgcacaagccatgtttatctatgagttaagaggtgatggaaatattaatttaaatgtccataaatactcagaagataaaacagttgattctaaatcattcaaatttagtaaacttaaaaccgaagatttttctcatagagcggaaacaagagaagaagtagaaaagaaagaaaaagaatttgaagaagagtacaaaaaagaacaagaacgagagaaagaaaaagaaaagcaaaaagatgacgaccacagtggtttagatgaagtataa

SEQ ID NO: 406939 - DNA, 522 bp, Staphylococcus aureus
atgattaacattatttcagctataggatctattggaacatttattatggctttattttattttgtatcagtttcagttcaactttatcaaatgaaaattagctttctgccagctttaggttttaaccaaattttattagaaagggaggaggatcaacttaatataatgaattcggcaacagaagagcatcatcataaagattatattaaactatataatttaggtggcggtgctgctaaaaaaattgcaatagaggttttattggggaaggataaagtcattcagaaaaaatacgtgcatattttacctagtaaagaagggtacatgttaccaattaataaaaatgtgtacgaagaattagaaagaacgattgagaacaatggtcatgaagctgatttgaatgtacgtatgacttattatcataatgtaagtcgcaaacaacaggaagttatattaaaaggtcaaatcgaccgttttaatacttataataataaagaaatttatgatttgcagtttatctaa

SEQ ID NO: 406940 - DNA, 531 bp, Staphylococcus aureus
atgcaaattagacaaatacatcaacatgactttgctcaagtggaccagttaattagaacggcatttgaaaatagtgaacatggttatggtaatgaatcagagctagtagaccaaattcgtctaagtgatacgtatgacaataccttagaattagtagctgttcttcaaaatgaagttgtagggcacggtttactaagtgaagtttatcttgataacgaggcacaacgggaaattggattagtgttagcacctgtatctgttgatattcatcatcaaaataaaggtattgggaagcgattgattcaagcattagaacgagaagcaatattaaaaggatataattttatcagtgtattaggatggccgacgtattatgccaatctaggatatcaacgcgcaagtatgtacgacatttatccaccatatgatggtatatcagacgaagcgtttttaattaaagaattaaaagtgaacagtttagcgggaaaaacaggtaccataaattacacatctgcttttgaaaaaatatga

SEQ ID NO: 406941 - DNA, 2658 bp, Staphylococcus aureus
atgaatatgaagaaaaaagaaaaacacgcaattcggaaaaaatcgattggcgtggcttcagtgcttgtaggtacgttaatcggttttggactactcagcagtaaagaagcagatgcaagtgaaaatagtgttacgcaatctgatagcgcaagtaacgaaagcaaaagtaatgattcaagtagcgttagtgctgcacctaaaacagacgacacaaacgtgagtgatactaaaacatcgtcaaacactaataatggcgaaacgagtgtggcgcaaaatccagcacaacaggaaacgacacaatcatcatcaacaaatgcaactacggaagaaacgccggtaactggtgaagctactactacgacaacgaatcaagctaatacaccggcaacaactcaatcaagcaatacaaatgcggaggaattagtgaatcaaacaagtaatgaaacgacttctaatgatactaatacagtatcatctgtaaattcacctcaaaattctacaaatgcggaaaatgtttcaacaacgcaagatacttcaactgaagcaacaccttcaaacaatgaatcagctccacagagtacagatgcaagtaataaagatgtagttaatcaagcggttaatacaagtgcgcctagaatgagagcatttagtttagcggcagtagctgcagatgcaccggcagctggcacagatattacgaatcagttgacgaatgtgacagttggtattgactctggtacgactgtgtatccgcaccaagcaggttatgtcaaactgaattatggtttttcagtgcctaattctgctgttaaaggtgacacattcaaaataactgtacctaaagaattaaacttaaatggtgtaacttcaactgctaaagtgccaccaattatggctggagatcaagtattggcaaatggtgtaatcgatagtgatggtaatgttatttatacatttacagactatgtaaatactaaagatgatgtaaaagcaactttgaccatgcccgcttatattgaccctgaaaatgttaaaaagacaggtaatgtgacattggctactggcataggtagtacaacagcaaacaaaacagtattagtagattatgaaaaatatggtaagttttataacttatctattaaaggtacaattgaccaaatcgataaaacaaataatacgtatcgtcagacaatttatgtcaatccaagtggagataacgttattgcgccggttttaacaggtaatttaaaaccaaatacggatagtaatgcattaatagatcagcaaaatacaagtattaaagtatataaagtagataatgcagctgatttatctgaaagttactttgtgaatccagaaaactttgaggatgtcactaatagtgtgaatattacattcccaaatccaaatcaatataaagtagagtttaatacgcctgatgatcaaattacaacaccgtatatagtagttgttaatggtcatattgatccgaatagcaaaggtgatttagctttacgttcaactttatatgggtataactcgaatataatttggcgctctatgtcatgggacaacgaagtagcatttaataacggatcaggttctggtgacggtatcgataaaccagttgttcctgaacaacctgatgagcctggtgaaattgaaccaattccagaggattcagattctgacccaggttcagattctggcagcgattctaattcagatagcggttcagattcgggtagtgattctacatcagatagtggttcagattcagcgagtgattcagattcagcaagtgattcagactcagcgagtgattcagattcagcaagcgattccgactcagcgagcgattccgactcagacaatgactcggattcagatagcgattctgactcagacagtgactcagattccgacagtgactcagattcagatagcgattctgactcagacagtgactcagattcagatagcgattcagattcagatagcgattcagattcagacagcgattcagattcagatagcgattcagattccgacagtgactcagattccgacagtgactcggattcagatagcgattcagattccgacagtgactcagattccgacagtgactcagactcagacagtgattcggattcagcgagtgattcggattcagatagtgattccgactccgacagtgactcggattcagatagcgactcagactcggatagcgactcggattcagatagcgattcggactcagatagcgattcagaatcagacagcgattcagaatcagacagcgattcagattcagacagcgactcagacagtgactcagattcagatagtgactcggattcagcgagtgattcagactcaggtagtgactccgattcatcaagtgattccgactcagaaagtgattcaaatagcgattccgagtcaggttctaacaataatgtagttccgcctaattcacctaaaaatggtactaatgcttctaataaaaatgaggctaaagatagtaaagaaccattaccagatacaggttctgaagatgaagcaaatacgtcactaatttggggattattagcatcaataggttcattactacttttcagaagaaaaaaagaaaataaagataagaaataa

SEQ ID NO: 406942 - DNA, 1527 bp, Staphylococcus aureus
ttgaaaaataaattgctagttttatcattgggagcattatgtgtatcacaaatttgggaaagtaatcgtgcgagtgcagtggtttctggggagaagaatccatatgtatctgagtcgttgaaactgactaataataaaaataaatctagaacagtagaagagtataagaaaagcttggatgatttaatatggtcctttccaaacttagataatgaaagatttgataatcctgaatataaagaagctatgaaaaaatatcaacagagatttatggctgaagatgaggctttgaagaaattttttagtgaagagaaaaaaataaaaaatggaaatactgataatttagattatctaggattatctcatgaaagatatgaaagtgtatttaatactttgaaaaaacaaagtgaggagttcttaaaagaaattgaagatataaaaaaagataaccctgaattgaaagactttaatgaagaggagcaattaaagtgcgacttagaattaaacaaattagaaaatcagatattaatgttaggtaaaacattttatcaaaactatagagatgatgttgaaagtttatatagtaagttagatttaattatgggatataaagatgaagaaagagcaaataaaaaagcagttaacaaaaggatgttagaaaataaaaaagaagacttagaaaccataattgatgaattttttagtgatatagataaaacaagacctaataatattcctgttttagaagatgaaaaacaagaagagaaaaatcataaaaatatggctcaattaaaatctgacactgaagcagcaaaaagtgatgaatcaaaaagaagcaagagaagtaaaagaagtttaaatactcaaaatcacaaacctgcatctcaagaagtttctgaacaacaaaaagctgaatatgataaaagagcagaagaaagaaaagcgagatttttggataatcaaaaaattaagaaaacacctgtagtgtcattagaatatgattttgagcataaacaacgtattgacaacgaaaacgacaagaaacttgtggtttctgcaccaacaaagaaaccaacatcaccgactacatatactgaaacaacgacacaggtaccaatgcctacagttgagcgtcaaactcagcaacaaattatttataatgcaccaaaacaattggctggattaaatggtgaaagtcatgatttcacaacaacgcatcaatcaccaacaacttcaaatcacacgcataataatgttgttgaatttgaagaaacgtctgctttacctggtagaaaatcaggatcactggttggtataagtcaaattgattcttctcatctaactgaacgtgagaagcgtgtaattaagcgtgaacacgttagagaagctcaaaagttagttgataattataaagatacacatagttataaagaccgaataaatgcacaacaaaaagtaaatactttaagtgaaggtcatcaaaaacgttttaataaacaaatcaataaagtatataatggcaaataa

SEQ ID NO: 406943 - DNA, 1023 bp, Staphylococcus aureus
atgaaaaagaaattattagttttaactatgagcacgctatttgctacacaaattatgaattcaaatcacgctaaagcatcagtgacagagagtgttgacaaaaaatttgtagttccagaatcaggaattaataaaattattccagcttacgatgaatttaagaattcgccaaaagtaaatgttagtaatttaactgacaataaaaactttgtagcttctgaagataaattgaataagattgcagattcatcggcagctagtaaaattgtagataaaaactttgtcgtaccagaatcaaagttaggaaacattgtgccagagtacaaagaaatcaataatcgcgtgaatgtagcaacaaacaatccagcttcacaacaagttgataagcattttgttgctaaaggcccagaagtaaatagatttattacgcaaaacaaagtaaaccaccacttcattactacgcaaacccactacaagaaagttattacttcatacaaatcaacacatgtacataaacatgtaaatcatgcaaaggattctattaataaacactttattgttaaaccatcagaatcgcctagatatacacatccatctcaatctttaattatcaagcatcattttgcagttcctggatatcacgcgcataaatttgttacaccagggcatgctagcattaaaattaatcacttttgtgttgtgccacaaataaatagtttcaaggtaattccaccatatggtcacaattcacatcgtatgcatgtaccaagtttccaaaataacacaacagcaacacatcaaaatgctaaagtaaataaagcatatgactataaatacttctattcttataaagtagttaaaggtgtgaagaaatatttctcattttcacaatcaaatggttataaaattgggaaaccatcattaaatatcaaaaatgtaaattatcaatatgctgttccaagttatagccctacacactacgttcctgaatttaagggtagcttaccagcaccacgagtataa

SEQ ID NO: 406944 - DNA, 471 bp, Staphylococcus aureus
atgaaaaggaaagtattagtactaacaatgggtgtaatttgtgcaactcaattatggcattctaatcacgcaaacgcattagtaacagagagtggcgcaaatgatactaagcaatttactgaaattgtatcggaagagaaagttataacagttgaacatgctcaaattaatatttttcaatctaatagcaattcaaacttgatggagttcaacatattaacaatgggcggtaaatcaggagctatggttggttatagtgaaattgactcatcacatttcacagaccgtgacaaacgcgttattagacgtgatcatgttaaagaagcacaaagcttagtagagaactataaagatacacaaagtgctgatgctaggatgaaagccaaacaaaaagttaacacattaagcaaaccgcatcaaaactatttcaataaacaaattgataaggtttataatggattacaacgctaa

SEQ ID NO: 406945 - DNA, 687 bp, Staphylococcus aureus
atgacagaatacttattaagtgctggcatatgtatggcaatcgtttcaatattacttatagggatggctatcagtaatgtttcgaaagggcaatacgcaaagaggtttttctatttcgctactagttgtttagtgttaactttagttgtagtttcaagtctaagtagctcagcaaatgcatcacaaacagataatggcgtaaatagaagtggttctgaagatccaacagtatatagtgcaacttcaactaaaaaattacataaagaacctgcgacattaattaaagcgattgatggtgatacggttaaattaatgtacaaaggtcaaccaatgacattcagactattattggttgatacacctgaaacaaagcatcctaaaaaaggtgtagagaaatatggtcctgaagcaagtgcatttacgaaaaaaatggtagaaaatgcaaagaaaattgaagtcgagtttgacaaaggtcaaagaactgataaatatggacgtggcttagcgtatatttatgctgatggaaaaatggtaaacgaagctttagttcgtcaaggcttggctaaagttgcttatgtttataaacctaacaatacacatgaacaacttttaagaaaaagtgaagcacaagcaaaaaaagagaaattaaatatttggagcgaagacaacgctgattcaggtcaataa

SEQ ID NO: 406946 - DNA, 201 bp, Staphylococcus aureus
atgaataacggtacagttaaatggtttaatgcagaaaaaggttttggtttcatcgaaagagaagatggtagcgacgtattcgtacacttctcagcaatcgctgaagatggatacaaatcattagaagaaggccaaaaagttgaattcgacatcgttgaaggcgaccgtggcgagcaagctgcaaacgtagttaaaatgtaa

SEQ ID NO: 406947 - DNA, 219 bp, Staphylococcus aureus
atgagtgaatggcatattaataatcaatctacaaaaccttttttaatacaacaagcggaaaagcaattgtctattgttaaaccgttgcctaatggtagcttccaaatactcacagaaataaatttggagaatggcaatattagtaacatcgatcattctttacttgtttcagtagaccccaaagcattagaaataagtatatttgacgctgtaaattaa

SEQ ID NO: 406948 - DNA, 285 bp, Staphylococcus aureus
ttgaatgaactaactaaagaacaaaagtatacaatagctaaattttacaaattatatattgaacgttcgaataaaggagaaacagaaacagtcgctaacttttttggcgatgctaaagatgcacgtgaaaactatttttgcgatcgtgattatcaagacttcttaactaactgccaaattttaattcaaaacaaatacttaactggtgaagttttggacgataacatttacaatatttctattttaaacaagacatttattgaattcgaacaaaattttggttga

SEQ ID NO: 406949 - DNA, 570 bp, Staphylococcus aureus
gtgaactatattaaacgaacgataattttacttatattattcgttgtcgtatccccaataaactcaccaaaaacaattgcagataataagtattcagaaattcaagatgacaaattccaattacaacctggtgatattattgttacaaaaggccctgtcatgtggggattttttggtcattgtagtatcgcgattgatgataaaacgattttacaaattgaggggcctggcgacaaaccaactacacaatccttcgaatcttttaaatataattatgcaagtggcaaaaatgattggatgaaagtttatcgttgcagctatcctggtgcaggtaaaaaagcggctgaatgggttaagaaaaactatgagaatacaaatcatcgttatctagttacattaaatttgaacagcaaaaaatttacgtattgtactaaaattatctaccaagcttataaatttggtgtaagtgaaaaatcagttaaaagttatggactacatattatttcaccctatgcaattaaagataattttatagatccatacaaactaaggcttgttaaagcttattaa

SEQ ID NO: 406950 - DNA, 189 bp, Staphylococcus aureus
atgtctttacattttgcaattctgttttggctagcattaattttcttagttgccgctacgtttatactcgtattaatgaaaaaaactagcaaagaatctaaaaaagagtcctatttaagtttcactgtcattctctatatttttggattcgctatattaatatacacatttatatttggtgtgctataa

SEQ ID NO: 406951 - DNA, 261 bp, Staphylococcus aureus
atgaataacattttgttaaatgctatcaatatagttattactaccacttttgttatctttaatattttaatcacatataataaagatttagatgatttatgttggctcctgcctggtattatcatttgtggtgtgatactcatcgtatcctttaccattgcaatgataactaaaaactggttaagtgaaatattattttttataaatatcgtactcgttctctattacatttatcctattttttatagttttataggttaa

SEQ ID NO: 406952 - DNA, 204 bp, Staphylococcus aureus
atgacgttttacaatttcatcatgggttttcaaaatgataacacaccatttggtatattggccgaacacgttagtgaagataaagcattccctcgattagaagaaagacaccaagtaattagagcatatgtgatgtctaattacacagatcatcaattaattgaaactacaaatagagctattagcttatatatggcaaattaa

SEQ ID NO: 406953 - DNA, 237 bp, Staphylococcus aureus
atggataatcataatcaatgtaattatgtgaatccacaaaatgtttcacttgactgggaatgttttataattagtaaaagtgaaatgttgttagatggtgtaccaaatgaacttatcaacacttggttagataaagacattattacaccattttcgataagaaatgatgaaataaactttaaaacaaaagatatttgggatgcactaatacatcataattggtactactcaaattaa

SEQ ID NO: 406954 - DNA, 582 bp, Staphylococcus aureus
ttggctaaaacgttatatataatgcgccacggacaaactttgtttaattttaagggactaattcagggatttggagattcgccgctaacagaacttggaattgctcaagctcaaaaggcacgtagttattatgaaactaaggggataaacttcgatttatatgcatcatcaacgcaagaacgcgcaagtgacacacttgaaaatgttgcacctaaccaatcgtatcaacgttttaagggactgaaggaatggcattttggaatatttgaaggtgagtcagtctatctatttgataatctatacaagcctgaggacttattcggagatcgaattgttcctttcaaaggagaggcaaggcaacaagttgaagaacgcattgtgaaaactttacatgacattatgtctcaaacaaagaataatgcattagtcgtgagtcatggaacaataatgggagtatttttaagatattgccttaaactagatgaagcattaaagcataatatcggtaattgtaatatcctgaaatttgaatatgacaatggaacatttaaatttgttgagttaattgatccaaatttataa

SEQ ID NO: 406955 - DNA, 618 bp, Staphylococcus aureus
atggtaaccgcaattattcatggatttatcttagcgattggtctaattttacctttaggtgcacaaaatgtatttatttttaaccaaggagctaatcaaccaaaatatagatatgtattgcctgcaataattacagccgggttgtcagacagcttacttattattattgcagtggtaggagtatctatcattattatgtctttacctgtacttcaagcaattatttatatagttggtttaattttcttgatgtatatggcttggaccatttggcatgataaaccctcaacagatggagaaactcaaattatgtctccaatgaaacaagtaagttttgctttatcagtttcattactcaatccacatgctattttagatacaattggagtaattggtagtagtgctgcattatatagtggcagcaataaaattgcgtttacaatcgcttgtattagcgtttcatggttatggttctttttactcgcaattttaggaaaaatggttggatcaattgataaaaccggaaaattattaacaataatcaataaaatatcaagcataataattattattgttgctctgatgatattacaaaaacttattcaattattattctaa

SEQ ID NO: 406956 - DNA, 495 bp, Staphylococcus aureus
atgattgaaattaaaacattaacgaataatgattttaatgagtataagagacttgtttcgacagtcaatgaagaattcactcaagattcacattatagtcaaacaatgactgacaccttaatacatgacattttaaatcaaggttcaccgaaatgtattgtatttggctgttatgaaaacgaaacacttatcgcaacagctgccttagaacaaattcgatacgttggaaaagaacataaatcattaattaaatacaactttgttactaataacgataaatcgattaatagcgagctcattaatttcattattaattatgcacggcagaacaattacgaatctttacttacatcaattgtgtcaaacaacataggtgctaaagttttctatagtgcactaggattcgacattcttggttttgagaaaaatgcaattaaaatcggaaatacctatttcgatgaacattggcttttttatgatttgattaataagtaa

SEQ ID NO: 406957 - DNA, 423 bp, Staphylococcus aureus
atggcaatacattatgaaactaaagcgacgaatgttggcggacgtaaaggacatgtttatactgatgatcgagcattagatattgatatcgttccgcctgctcaagcagatggtaaagctactaaccccgaacaattatttgcagcaggttatgcatcttgcttcaacggtgctttcgacctaattttaaagcaaaacaaagtgcgtgatgctcatccagaagtaacactaacagtgagactagaagatgattcagactcagaaagtcctaaattaagtgtttcaattgatgcgacaattaaaaatgttatatctcaagaagaagctgaaaaatatttacaaatggctcatgaattttgtccatattcaaaagcgactcaaggaaatattaatgtcgatttaaatgtaaatgttgtagattag

SEQ ID NO: 406958 - DNA, 717 bp, Staphylococcus aureus
atgacacatgtggaagtagtagcgactatcgcgccacaattatctatcgaagaaactttaattcaaaaaattaatcatcgtattgatgcaatagacgtattagaattacgaattgatcaaattgaaaatgtcacagttgatcaagtggcagaaatgattacaaagctgaaggttatgcaagattcattcaaattattagttacgtatcgtacaaagttacaaggtggctatgggcaatttacaaatgactcgtatcttaatttaatatcagacttagcaaatatcaatggcatagatatgattgatatagaatggcaagcagatattgacattgaaaaacatcaacgaatcattacacatttgcaacagtataataaagaggtggttatatcacatcataatttcgaaagtacgcctccattagatgaattgcaatttatattttttaaaatgcaaaaattcaacccagaatacgttaaattagcagtaatgccacataataaaaatgatgtgttaaatttattgcaggcaatgtctacattttcagatactatggactgcaaagttgttggtatttcaatgtctaaacttggactaataagtagaacggctcaaggcgtttttggtggtgcgttgacttatggttgtatcggagtaccacaagctccaggacagattgatgttactgatttaaaagcacaagtgactttatactaa

SEQ ID NO: 406959 - DNA, 540 bp, Staphylococcus aureus
atggaattacaacaagcaatagctaatagaagaagtgtgaaaaaatttaaaagagatatgcacatagatgacgcattgctatatcaagcaattgagaaagctgctgatgctccaaatcacggaatgagggaaccatggagagttgtgcatgttccgaaagacagattaggagatatgagtaaggatatttctaaatttgcatttcctaatgaattagataagcaacaatgtcattatgatgcagttacgaaactaggtggcatgttattgcttattttaaaaacagatccaagacaacgtcaaaatgatgaaaactactttgcatttggtgcatatgcacaaaatcttatgttgttactttatgaagcgggaataggtacatgttggaaatcgccattatatatctatgatcctaaagtaagaaaaacacttggtataaagaaagatgaagttcttgctggattcttatatttaacggatttagaaggagatatgcctaaagcaccacgtaaaaatagaaacttaattacattatattaa

SEQ ID NO: 406960 - DNA, 321 bp, Staphylococcus aureus
atgcaatcaatcaaaagtaatgaatcatttaaatctgtaattaatagcgatacacctgtaattgttaaatttgaggcaggatggtgcccagactgtcgtgctatggatttatggattgacccaatcgtagaacaatataatgattaccaatggtatactgttaatcgtgatgaattagaagatgtagttgttgaaaatgaagttatgggtatccctagcttgctagtatttaaaaacggcgataaaattgcacaccttcattcagcaaatgctaagtcacctgaacaagttgaatcatttttagcagaaacttttaaataa

SEQ ID NO: 406961 - DNA, 357 bp, Staphylococcus aureus
atgattaaattttaccaatataagaattgtacaacttgtaaaaaggcagcaaagtttttagatgaatatggcgtaagttatgaaccaattgatatcgttcaacatacacctacaataaatgaatttaaaacaataattgcaaatacaggcgtagaaattaataaattgtttaatacacacggcgcgaaatatcgtgagcttgatttgaaaaataaattacaaactttatcagatgatgaaaagttagagttgttatcatctgatggtatgttagtaaagcgtcctctagcagtaatgggcgataagataacattaggatttaaagaagatcaatataaagagacttggttagcgtaa

SEQ ID NO: 406962 - DNA, 381 bp, Staphylococcus aureus
ttggcagtaccaaatgaattgaaatattcaaaagagcatgaatgggttaaagttgaaggtaatgtagcaataattggaatcacagaatacgcacaaagcgagttaggtgatattgttttcgttgaattaccagaaacagatgatgaaattaatgaaggggatacgtttggtagcgtagaatcagttaaaactgtatcagaattatatgcaccaatctctggtaaagtagttgaagtcaacgaagaactagaagatagtcccgaatttgtaaatgaatctccatacgaaaaagcatggatggtaaaagtagaaattagtgatgaaagtcagattgaagctttattaacagctgaaaaatattcagaaatgattggtgaataa

SEQ ID NO: 406963 - DNA, 879 bp, Staphylococcus aureus
atgctaaacattcaagacgttagtcatctttctaaaaaggagcaaaaagcatataaccgtttcgtagaatctgtagaaaacggtaatttaccagtactaccatgtattgaaatggatctaaaagagatgcaagaagaaacattaaaccagagtaagattggtggaatgccatttttaaaatcttttaaagatataccattagatgaaaataatgtaccaatggtattgctagcacagattaatttggatgatcttccagaacaacaagaattatttcctgtaaaagaaggaatattgcagttttggattagttcggaagatcaaatgtatggaatgtctgaaaatttaaagggaaacaatataaactcaaggcttgtttatataaaagagccaattacagatttatcactcgaaaatattcaagcgcatttgaagtcattagatgctgataatgaggatatcccgttcagtggagcattttctatagaatttagattgtcgaaacaaactattacatgtactgattataagtacgatgaggacgtgcttgcattgtggaataaagtcaatccatccttcgcgctaaaatcaatgtttggtggttatgatgaattgatggaacctgtgtgtaacacatttactgctaaggaaccatttaatcaacttggtggttatccatattttgaccaaatagatccaagaacgaacgatcaagaactgaaaatgtatgatagagtcttactgcaaattgattctacaagagatggtaattcttcgattatatggggtgatttaggtattgccaatatcttagtgaaatctactgaccttgaggctatgaagtttgatgattacatgtattcatgggattgcagctaa

SEQ ID NO: 406964 - DNA, 1647 bp, Staphylococcus aureus
atgaattcttcttcaccagagaatccaaatggaaagaagtattcaccagtcttcatctatagtgcaattgttgttgctatagtcgtattacttggtgcatttttacctgaacaattcaactatgttaccaataatattaaaatgtggattacagaaaagttaggttggtattatcttattcttactacgattatcgtgttcttctgtatattccttatttttagtcctattggaaaacttaaactaggtaaaccaaatgacaaacctgagtttaatacaatttcatggtttgctatgttgtttagtgctggtatggggataggtttggtgttttatggtgcagctgaaccgatggcgcactttgctacgccacctacagcagatcccaaaactactgaagcttatactgaagctctacgttcaacatttttccattggggattccatgcttgggctgtttatggtgttgttgcgttagcgttggcatattcgcaattccgtaaaggtgaaccaggtttattatctagaactttacgtcctcttttaggtgataaagtagaaggtcctattgggatttttattgacgttttatctgtatttgcgacaatcgttggggtagccgtttcgttaggtatgggtgctctacaaattaatggtggtttacattacttgttcaatgttccaaacaatacgtttgtacaagcgattatcatcattgttgttactatcttatttatagcaagtgcatggtctggattaagtaaaggtattcaatacttaagtaacttgaacattggtttaggtactattttaatggtagctgctttaattgttggaccaactgttcttattttaaatatgttaactagctctacgggtagtttactaaacacattcttgtttaatagttttgatacagcagctttaaatcctcaaaaacgtgaatggatgtcttcatggacactttattactggggttggtggttaagttggagtccattcgttggagtgtttattgcacgagtttcaaaaggacgttcaattagagagttcatttctggtgtcttgctagttccagcaattgttagttttgtttggtttagtgtctttggtgtattaggcatcgagacaggtaagaaacacaaagaaatttttgatatgactcctgaaacacagctatttggagtgtttaatcatgtgccatttggcattgttttatcgttgattgcattattattaattgcatcattctttattacatctgctgactcagcaacatttgtattaggaatgcaaacaacatttggttcattaaatccatctagtatggtaaaagttgtttggggaatttcacaggccttaatagcatttgtacttttattagctggtggcggtaacggcgctgaagctttaaatgcgattcaaagtgctgcaattataagtgcattcccattctcctttgtcgtcatactcatgatggtaagtttctacaaggatgcgaaccaggaacgtaaattcctaggtttaacattgactccgaataaacatcgcttacaagaatatatcaagagtcaacaagaagattatgaatctgacattcttgaaaagcgtcagtcacgtagaaatatagagaaaaaagataactaa

SEQ ID NO: 406965 - DNA, 363 bp, Staphylococcus aureus
atgttaaaagaattcaaagagttcgccttaaaaggtaacgtcttagatttagcaattgctgttgtgatgggtgcagctttcaacaagattatatcttcattagtagaaaatatcattatgccattaattggtaaaattttcggatcagttgattttgctaaagaatggtcattctggggtattaaatacggtttatttatccaatctgttatcgactttattatcatcgcgtttgctttattcatctttgttaagattgcaaatacattaatgaagaaagaagaagccgaagaagaagcagttgtggaagaaaatgttgtgttattaactgaaatcagagatttattacgtgagaaaaaataa

SEQ ID NO: 406966 - DNA, 3030 bp, Staphylococcus aureus
atgaaaccattacatttaaagttgaataatttcggcccctttttaaaagaagaaattgatttttctaaaattgataataatgaattgtttttaataagtggtaagactggatcgggtaaaacaatgatttttgatgcaatgacttatgccttgtttggtaaagcatcaactgaacaaagagaagaaaatgatttgagaagtcatttcgctgatggtaaacagccgatgtcagtaacatttgaatttcaattaaatcatcgaatttataaagtgcatagacaaggcccttatatcaaagaaggtaatacaacaaaaacgaacgctaaatttgatgtatttgagatggtggatggcaagtatgaaattagagaaagtaaagtaatttcaggtacccaattcattattgaattattaggagtaaatgcagatcaattccgacaattgtttattttgcctcaaggtgaattcaaacgctttttaatatcaaacagtcgtgaaaagcaagggatattaagaacactgtttgacagtgaaaaatttgaagctatacgagaaatattaaaagaagaagtaaaaaaagaaaaagctcaaatcgagaatagatatcaacaaattgaccttttatggcaagaaattgaatcatttgatgatgacaatataaaaggcttattagaggttgccactcaacagatagacaaattgattgaaaatataccacttttacaagctaggtcgaaagaaatactagcatctgtaaatgaaagtaaagaaactgctattaaagaatttgaaataatagaaaagaaaacattagaaaataatatattaaaagataatattaaacaactcaacaaaaataaaattgatttcgttcaattgaaagaacaacaacctgaaatagagggaattgaagctaagttaaagttgttacaagatattacaaacctattgaattatattgaaaatagagaaaaaattgaaactaaaattgctaatagcaaaaaagatatttctaaaaccaataataaaatattgaatcttgattgtgataagcgaaacatagacaaagagaaaaaaatgttagaagaaaatggagatttaattgaaagtaaaatctcttttattgataaaactagagtattatttaacgatattaataagtatcaacaaagttatctcaatattgaacgcttgagaactgagggtgaacaattaggtgatgaattaaatgatctaattaaaggtttagaaacggtcgaagattcaataggtaataaccaaagtgattacgagaaaattatcgaactaaataatacgataacgaacataaataatgaaattaatataattaaagaaaatgaaaaagctaaagctgaattagataaactattaggtagtaagcaagagttagagaatcaaattaatgaagaaacatctatattgaagaatctcgaaataaaattagatcgctacgataaaacaaaattggacttaaatgataaagaaagctttataagtgaaattaaatctgctgtaaatattggagatcaatgtccgatatgtggtaatgaaattcaggatttagggcatcatattgattttgacagtattgctaaacgtcaaaatgaaattaaagaaattgaagcaaatatccacgctataaaatcgaatattgctgtgcataattctgaaattaaatttgttaatgaaaaaatatcgaatattaatattaaaacgcaaagtgatttttcacttgaagtattgaataagcgtctgctagaaaatgaaaatgcattgaataatcaaagagatcttaataaatttatagaacaaatgaaagaagaaaaagataatctaacgttgcaaattcataataaacaattgcgtctaaataaaaatgaatctgagttgaaattatgtcgagatctcatcactgaatttgaaacactctcgaaatataataatatcactaattttgaggtggattataagaagtatgttcaagatgtgaatcagcatcaagaactctcaaaggagattgaagataagttaatgcaattgtctcaaagaaagttaattgagcaaaataatctaaatcattatgaaaatcaactagaaacttacaataatgacttagaattgaatgaacagtctattgaaatggaaatgtcgaggctgaatttaactgatgacaatgatatagatgaaataatagcctggaggggcgagcaagaggaattagagcagaaaagggatacttataaaaaacgttatcatgaatttgaaatggaaatagctaggttagaatcattaactaaggataaagagttattggactctgataaattaaaagatgaatatgagctaaaaaaaggaaagatgaatacactgatagatgaatactctgctgttcattatcaatgtcaaaataatattaataaaacacaatctatagtttcgcatattaattacttaaatcaagaattaaaggatcaacaagaaatatttcaattggctgaaattgtcagtggtaagaataacaaaaatcttacattggaaaactttgtcttaatttactatttagatcaaattattgctcaagcaaatctgagattagcaacaatgtcagataatcgataccaactaattaggcgagaagcggtttctcatggtcttagtggcctagaaattgatgtatttgatttgcattcaaataagtctagacatattagctcgttatcaggtggagaaactttccaatcgtcgcttgcattagctttagggttaagcgaaattgtacagcagcaatcaggaggtatttcactagaatcaatatttattgatgaaggattcggtacattagatcaagaaacgcttgaaacagcgttagacactttattaaatcttaaatcaactggtagaatggttgggattatttcacatgtgagcgaattgaaaaatagaatacctttagttttagaagtgaaatcagatcaatatcagagttcaacaagattcaaaagaaattaa

SEQ ID NO: 406967 - DNA, 1122 bp, Staphylococcus aureus
atgaaaattatacatacagcagactggcacttagggaaaatattaaatggcaaacagcttttagaagatcaagcgtatattttagatatgttcgtagaaaaaatgaaagaagaagaacctgatatcattgtgatagctggagatttatatgacacaacatatccaagtaaagatgcaatcatgttattagaacaagcgattggaaagttaaatttagaactgcgtataccaataattattattagtggaaatcacgatggtaaagagaggttaaactatggggcgagttggtttgaacataatcagttatttataagaacagattttacatcgattaattcaccaatagagataaatggggttaatttttatacactcccttatgctactgtgagcgaaatgaaacactactttgaagatgacaccattgaaacacatcaacagggaattacgcgctgtattgaaacaatagcaccggaaattgatgaagatgccgtcaatattttaattagtcatctgactgttcaaggtggaaagacatctgattctgaaagaccattaactattggaacggttgaatcagttcagaaaggtgtttttgatatatttgattatgtcatgctaggtcacttgcatcatccatttagtatagaagacgacaaaattaaatatagtggctccttattgcagtattcattttcggaagcgggtcaagctaaagggtatagacgtgtaacaattaatgatggcattattaacgatgtatttattcctcttaagccacttagacaattggaaattatctcaggcgaatataatgatgttattaatgaaaaagttcatgtgaaaaataaagataattatttacattttaaacttaaaaatatgtctcatattactgatccaatgatgagtttaaaacaaatttatcctaatactttagcgctgacgaatgaaacttttaattacaatgaagaaaataatgctatagaaataagtgaaaaagatgacatgtcaattatcgaaatgttttataaacatataactgataaagaattatcggatatccaatctaaaaagataaaaaatattttagaaaacgaattgagaaaggaggattaa

SEQ ID NO: 406968 - DNA, 468 bp, Staphylococcus aureus
gtgctctatttaatattttcaatcattgtagctttatttatgggaactatagttatagttattcgtatgaaagctcaaaattatccggtaaatgagaaaaaaatagttttgccaccgttttttatggcgaccggtgcattgatgtacgtcgttccatattttaggctaacaggatcggaaatgctagaagcctttataattggtttgcttttttctacagttctaatttggacttctcgatttgaagtcaaaggtacagaaatttatatgaaacgatctaaagcatttccagttattttgatttcattacttatcattcgtactgtgatgaaaatattcattagtaatgaaatagatcctggagaattaggcggcatgttctttttattagcattctgtatgattgttccttggagagcagcaatgctatataaatacaaaaaactaaagaaaacattaatcaattaa

SEQ ID NO: 406969 - DNA, 288 bp, Staphylococcus aureus
atgaatttagtaaaattcagtaggataaagaaagcgggtgaaacaatggcaacttggttagcaattatttttatagtagctgcattaattttaggtttaattggaggtttccttttagctagaaaatatatgatggactacttgaagaaaaacccaccaatcaacgaagaaatgcttcgtatgatgatgatgcaaatgggtcaaaaaccttctcagaagaaaattaatcaaatgatgacgatgatgaataaaaatatggatcaaaatatgaagagtgcgaaaaagtaa

SEQ ID NO: 406970 - DNA, 1989 bp, Staphylococcus aureus
atgtttaatgaaaaagatcaattagctgttgatacgctacgtgcactaagtatcgacacaatcgaaaaagcgaattctggtcatccaggattacctatgggagctgccccaatggcttacactttgtggacacgtcatctgaattttaatccacaatctaaagattacttcaatagagaccgtttcgtattatctgcagggcatggttcagcattattgtatagcttgttacatgtttctggtagtttagaattagaagaattaaagcaatttagacaatggggttctaaaacaccaggtcatcctgaatacagacatacagatggtgtagaagttactaccggaccacttggacaaggttttgctatgtcagtaggattagctttagcagaagatcacctagcagggaaatttaataaagaaggatataatgttgtagatcattacacatatgtattagcttctgacggtgatttaatggaaggtatatcgcatgaagcagcttcatttgctggacataataaattaagtaaattagttgttttatacgattcaaatgatatttcattagatggcgaattaaacaaagctttttctgaaaacacaaaagctcgttttgaagcatatggttggaattacttactagttaaagatggtaatgatttagaagaaattgataaagcgattactacagctaaatctcaagaaggaccaacgattattgaagttaaaacaacaatcggatttggttcaccgaataaagcaggaactaatggtgttcatggggcacctttaggtgaagttgaaagaaaattaacattcgaaaattacggtttagatcctgaaaaacgttttaatgtttcagaagaggtatacgaaattttccaaaatactatgttaaaacgtgctaatgaagatgaatctcaatggaattcattattagaaaaatatgcagaaacatatcctgaattagcagaagaatttaaattagcgattagtggtaaattgcctaaaaattataaggatgaattaccacgttttgaactgggtcataatggtgcatctcgtgctgattctggtactgttattcaagcaatcagtaaaactgtcccttcattctttggtggatcagcagaccttgctggttcaaacaaatccaatgtaaatgatgcaactgattatagttctgaaacacctgaaggtaaaaatgtgtggtttggtgtacgtgaatttgctatgggtgctgctgtaaatggtatggctgcacatggaggtttacatccatatggtgcaacattcttcgtatttagtgattatttaaaaccagcgttacgtttatcatcaattatgggattaaatgcaacgttcatcttcacacatgattcaattgcagtaggtgaagatggtcctactcatgaaccaattgagcaattagctggattaagagccattccaaatatgaatgttatccgtcctgctgatggtaatgaaacaagagtagcatgggaagttgccttagaatctgaatctacacctacttcattagtattgacacgtcaaaacttaccggtattagatgtaccagaagatgtagttgaagaaggcgttcgaaaaggtgcctatacagtttatggctctgaagagacaccagaattcctattattagcttcaggttcagaagttagtcttgcagttgaagctgctaaagatcttgaaaaacaaggtaaatcagtacgtgttgtttcaatgcctaactggaatgcatttgaacaacaatctgaagaatataaagaatcagtcattccatcaagcgtaacaaaacgtgttgcgattgaaatggcttcaccgcttggatggcataaatatgtaggtactgcaggtaaagttattgctattgacggctttggcgcaagtgcacctggcgatttagtagttgaaaaatatggatttacaaaagaaaatatcttaaaccaagttatgagcttataa

SEQ ID NO: 406971 - DNA, 240 bp, Staphylococcus aureus
ttgagtaattctgatttgaatatcgaaagaattaacgagttagctaaaaagaaaaaagaagtaggattaactcaagaagaagcaaaggagcaaacagccttaagaaaagcttatcttgagagttttagaaaagggtttaaacaacaaattgaaaatactaaagtaattgatccagaaggtaatgatgtaacacctgaaaaaattaaagagatacaacaaaaaagagataataaaaattaa

SEQ ID NO: 406972 - DNA, 237 bp, Staphylococcus aureus
atgatgttttacaataaatataaaaacgtatcaacatatatcatcatatttttagtttcaagtgcagcctttgcaatattcttgttaagtgcgaacattagtgctcactcggaacaagtgtacgaaatgactgaccatcaaattaagaacaatacgataaataaagcatacgaacataaagaccctacaaacaatagcgaacaaagagatgggaaagtgttcgctttaataaattga

SEQ ID NO: 406973 - DNA, 624 bp, Staphylococcus aureus
atgagagaattaacaaaacgacaaagcgaaatatataactatattaaacaagttgttcaaacgaaaggttatccgcctagtgttcgcgaaattggtgaagcagttggcttagcatccagttcaactgttcatggtcacctttcacgtcttgaagaaaaaggctatataagaagagatccaacgaaaccacgtgctatagaaattgtaagtgatcaaacaaatgataatattaatatggaagaaacgattcatgtgccagttattggtaaagtcacagcaggtgttcctattaccgcagtagaaaatattgaagaatattttccattacctgaacacttaacatcgacacacaatagcgacatattcatattaaacgtcgtaggcgacagtatgattgaggctggtatattagacggagacaaagtaattgttcgcagtcaaaccatagcagaaaatggagacattattgttgctatgactgaggaagatgaagcaactgtcaaacgcttctataaagaaaaaaatcgttatcgattacaacctgaaaatagtacaatggagccaatttacctagacaatgttgctgtaattgggaaagtaattggtttgtaccgcgaaatgtaa

SEQ ID NO: 406974 - DNA, 864 bp, Staphylococcus aureus
ttggatacaccgaagaaacaacaatttgcctttaataatatacaaatgaacatgtcgaaatcagatgttgagaaaacattaaataaaccaaaaagagtgacatttaatgaatatggtacgaagtggtatacgtattatgatgacgattacaataattttataatgataagttacatgaaagataaagttaatgcgttatatacaaatcaaaatataatcacttcaaaatcaaaaattaaatacaatacacctaaatcggttgtaaggcaaagattaggcgaaccagaaacagagattgttaaaggtagagtgcgttacgaacaaaataataaagaatatgatgttttccataaaaatcacatttatacgacggtattttatgataagcatcgacgtaataatgtaacagctgttttacaagtaagtgatgctatggaaaatagattaaaagaacaatatggagcaccatcgaaatcgcttgcagatagttttgaactacaaaattttgatttagttaatgctgaaagaaaacaacatcaattatctacattgaagtattctaaacagaattctgaaactgcacgtaagcatagtaaagatatggccaacaatcattattttgatcatacaaatttaaaaggtcaatcaccatttgatcgattgaaaaaagatggtattacatttaactcagccggagagaatttagcatatggtcaagttagtagtatctatgcacatcaaggattaatgaattctattggtcacagaaaaaatattttaaatgatacgtttaaaatattaggtgttggtgttgattttaatgatgaaaaacaacctttttggacagaaaattatactggttaa

SEQ ID NO: 406975 - DNA, 978 bp, Staphylococcus aureus
gtgaaaatatttgattacgaagatattcaattaatacctaataaatgcatagttgaaagtaggtctgaatgtgatacaactatccaatttggtccgaaaaaattcaagctacctgtagttcctgcaaatatgcaaacagttatgaatgagaaattagcgaaatggtttgctgaaaatgattacttttatatcatgcatcgttttgatgaagaagcaagaataccttttataaaacatatgcaaaattcaggcttatttgcatctatttcagttggtgtaaagaaagcggaatttgattttattgaaaagttagctcaagaaaaattaatccccgaatatattacaatagatattgcgcatggtcactcagattcagtgataaacatgattaaacatataaaaacccatatacctgatagttttgttattgctggtaatgttggtacgccagaaggtgttagagaattagaaaatgctggtgctgatgctaccaaagtcggtataggtcctggtagagtttgtattacaaagattaaaacaggttttggtactggtggttggcagttagcggcattaaacatatgtagtaaagcagctcgtaaacctttgattgccgatggtggtataagaacgcatggcgacattgctaaatcaattagatttggtgcatcaatggtcatgattggttcattatttgcggcacacgaagaatcacctggtgaaactgtagaacttgatggtaaacagtataaagaatattttggtagtgcatctgaatttcaaaaaggcgaacataaaaatgtagaaggtaaaaaaatgtttgtagaacataagggttcattaatggataccttaaaagaaatgcaacaagatttacaaagctcaatttcatatgccggtggaaaagacttgaaatcattacgtactgtagattatgttattgttagaaactctattttcaacggtgatagagattaa

SEQ ID NO: 406976 - DNA, 270 bp, Staphylococcus aureus
atggctaagaaatctaaaatagcaaaagagagaaaaagagaagagttagtaaataaatattacgaattacgtaaagagttaaaagcaaaaggtgattacgaagcgttaagaaaattaccaagagattcatcacctacacgtttaactagaagatgtaaagtaactggaagacctagaggtgtattacgtaaatttgaaatgtctcgtattgcgtttagagaacatgcgcacaaaggacaaattccaggtgttaaaaaatcaagttggtaa

SEQ ID NO: 406977 - DNA, 150 bp, Staphylococcus aureus
gtgcgcgtaaacgtaacattagcatgcacagaatgtggcgatcgtaactatatcactactaaaaataaacgtaataatcctgagcgtattgaaatgaaaaaatattgcccaagattaaacaaatatacgttacatcgtgaaactaagtaa

SEQ ID NO: 406978 - DNA, 1518 bp, Staphylococcus aureus
atgtcacaacaagacaaaaagttaactggtgtttttgggcatccagtatcagaccgagaaaatagtatgacagcagggcctaggggacctcttttaatgcaagatatttactttttagagcaaatgtctcaatttgatagagaagtaataccagaacgtcgaatgcatgccaaaggttctggtgcatttgggacatttactgtaactaaagatataacaaaatatacgaatgctaaaatattctctgaaataggtaagcaaaccgaaatgtttgcccgtttctctactgtagcaggagaacgtggtgctgctgatgcggagcgtgacattcgaggatttgcgttaaagttctacactgaagaagggaactgggatttagtagggaataacacaccagtattcttctttagagatccaaagttatttgttagtttaaatcgtgcggtgaaacgagatcctagaacaaatatgagagatgcacaaaataactgggatttctggacgggtcttccagaagcattgcaccaagtaacgatcttaatgtcagatagagggattcctaaagatttacgtcatatgcatgggttcggttctcacacatactctatgtataatgattctggtgaacgtgtttgggttaaattccattttagaacgcaacaaggtattgaaaacttaactgatgaagaagctgctgaaattatagctacagatcgtgattcatctcaacgcgatttattcgaagccattgaaaaaggtgattatccaaaatggacaatgtatattcaagtaatgactgaggaacaagctaaaaaccataaagataatccatttgatttaacaaaagtatggtatcacgatgagtatcctctaattgaagttggagagtttgaattaaatagaaatccagataattactttatggatgttgaacaagctgcgtttgcaccaactaatattattccaggattagatttttctccagacaaaatgctgcaagggcgtttattctcatatggcgatgcgcaaagatatcgattaggagttaatcattggcagattcctgtaaaccaacctaaaggtgttggtattgaaaatatttgtccttttagtagagatggtcaaatgcgcgtagttgacaataaccaaggtggaggaacacattattatccaaataaccatggtaaatttgattctcaacctgaatataaaaagccaccattcccaactgatggatacggctatgaatataatcaacgtcaagatgatgataattattttgaacaaccaggtaaattgtttagattacaatcagaggacgctaaagaaagaatttttacaaatacagcaaatgcaatggaaggcgtaacggatgatgttaaacgacgtcatattcgtcattgttacaaagctgacccagaatatggtaaaggtgttgcaaaagcattaggtattgatataaattctattgatcttgaaactgaaaatgatgaaacatacgaaaactttgaaaaataa

SEQ ID NO: 406979 - DNA, 1455 bp, Staphylococcus aureus
atggaagataataaaatgaaccgtagtcttaactcaagacacatttccatgattgctataggtggtgcaattgggactggtctatttgtagctactggtaatatcatttctcaagctggtcctggaggcgctatactcgcttatcttgttattggtgtcatgctatatttcttaatgtcatcaattggagagttggcaacattttatccagtatcaggttcattcagctcttattcaacacgctttattgactcatctcttggctttaccatgggatggttgtattgggcattgtggtcattagttacaagtgttgatgtcatagtagcgtcaaatgtgctttatttctgggacacatttaaatttttccaccccattacttggagcttaatctttattacaattttactattattaaacattttttctgtaaaatcatttggagaaactgagttttggttatcattgattaaagtgttaacaattatcgtattcgttatttttggctttttaatgattttcggtatcttaggtggtcatacatatggatttgaaaactatacaaaaggccaagcaccgtttgttggtggtatctctggtttcttaggcgtattattagtcgccggattttcggttggtggtacagaagtagtagcagtaactgctggtgaatcagatgaccctaaaaagtctatgcctaaggcaattaaacaagtattttggcgtattcttttattctatgtcttatcaattgcagtaattggtgcaattattccgtacacagatccatcattattaagagcaagtagttcaataagtcaaagcccatttacaattgtattcgatagagtaggcatagcctttgcagcatcagtaatcaacgcggttattttaacttcattattatccgctgcaaattcaggtgtttatacaacaggcagaatgttgtattccttaagttcagacaaaaaagcaccccaatttttaagtaaattaaacaagacaactaagttacctttaagagcattattaactacttatgcagtcgttgttattgttattatttatgcaaactttaattcaaatgccgtttttaatttacttgaaattattggttcaatgattatagttgtttggggatcaagcatttggtcacaaatacgattgcgacaagctattaaaaaacaaggtcaagaccctaataaggtcctaccatataaagcacctttttatccattaggaccaatcattgtcatcactacactattattcttgctatttggtggctcagttgaatatattttaaaagatcaatggttaaatgcttttaaaaactttttacctttaatcattctagcgttgatttactttattcataaaatcattcacaaaacaaaatttgtaaagctagaaacaattaatttaaaaccacacgattatgacaatcaaaaataa

SEQ ID NO: 406980 - DNA, 315 bp, Staphylococcus aureus
atgattggacaaacaaatttatttgatgatgtactaaagcaagatgaaagatttgttattgtagttcaagcattagaagaaaagaacggacaattattaaagagaactttaagggaatatcccggtttaaaccataaacaaatgaatgatttatttatgcacttaaaggaattattttccgaagaatcatttgctgaaaaccaatcagcgttcagtattacagtttatacaaatttagattatactgctgaccaaatatatgctcatgtaaaacgtttcagaggtaagcatgactggacacaaacagctaaataa

SEQ ID NO: 406981 - DNA, 804 bp, Staphylococcus aureus
atgacaaattataaagttgtcgttttagatatggatgacacattgctaaattcagataatgtgatatcagaagaaactgcaaattatttaacagcaattcaagatgaaggttattatgttgttctagcatctggtagacctactgaaggtatgattccaactgctagagatttaaaattacctgaacatcatagctatattattagttataacggtagtaaaacgattaacatgactaatgaagaagtagaagtaagtaaatcgattggtaagcaagatttcgatgaaattgtagattattgtcgagatagaggctttttcgttcttacatatcatgatggtcaaattatttacgacagcgaacatgagtatatgaatattgaagcagaattaacaggtttaccgatgaaacgtgttgatgatatcaaagcgtatattcaaggcgatgtacccaaggtcatgggtgtagattatgtagcgaatattacagaagctagaattgatttgaatggtgtgttcaatgataatgtagatgctacgacaagtaagccattcttcttagaatttatggccaaagacgtttcaaaaggtaatgcaattaaagcgttatgtcacaaattgggatattcggtggatcaagtcattgcttttggtgatagtatgaatgataaatcaatgtttgaagtcgcaggtctagctattgctatggggaatgcatcagatgaacttaagcaatatgcaaatgaagttacgttggatcataatgaaaatggtattccacatgcgctcaaaaaattgttataa

SEQ ID NO: 406982 - DNA, 915 bp, Staphylococcus aureus
atgtcgaatgttttggagttaacaattcctgcatcaacagccaaccttggagttggctttgattctataggtatggctttagataaatttttgcatctgtctgtaaaggaaacatcagggacaaaatgggaatatattttccatgatgatgcatctaagcaattgcctactgacgaaacaaactttatttatcatgtagcacaacaagttgcttctaaatatagtgttgacttgcctaatttatgtatcgaaatgagaagtgatattccattggcaagagggttaggttcgtcagcttctgctttagtaggagctatatatatcgcaaattattttggtgatatccaactgtctaaatatgaggtattacaattagcgactgaaatcgaaggacatcctgataatgttgcgccgaccatttatggtggtttaatcgctggatattataatgatgtctcgaaagaaacgtcagttgcacatatcgacataccagacgtggatgtgattgtaacgataccaacttatgaactaaaaacagaagcatcaagacgtgctttaccacaaaaattaacacatagtgaagcggttaaaagtagtgcaattagtaatacaatgatttgtgcattagcacagcacaattatgaattagcaggtaaactcatgcaacaagatggctttcatgaaccgtatcgtcagcatttaattgctgaatttgatgaagtgaaaacaattgctagtcaacataatgcctatgcaactgtaattagtggtgctggaccaactattttaatatttagtcgtaaagaaaatagtggggaattggttcgctctttaaatagtcaggtagtatcatgccattctgaattggtcgatattaatatcagtggtgttaaagaacgaattgtataccaatag

SEQ ID NO: 406983 - DNA, 1062 bp, Staphylococcus aureus
atgagaagatggcaaggattagtagaagagtttaaagcacatttaccagtaaatgaaaatacaccaaaattaacattgaacgagggaaatacaccactcattcattgtgaaaatatgtctaaaatactaggcatagatttatatgtgaagtatgaaggtgccaatccgacaggttcatttaaagatcgcggtatggtaatggctgtgacaaaagcaaaagagcaaggtaagaaaattgtaatatgcgcttcgactggaaatacatcagcgtctgcagcagcatatgcagcgagagcaggtttaaaagctatcgtcgtaataccagaaggtaaaattgcattaggtaaattgtcgcaagcagtaatgtatggtgcagaaatcgtttctattgaaggaaactttgatgaagctttagaaattgtaaaagaaattgcaaaaagtggcgaaatcgagcttgtaaactctgtcaatccatttagaatcgaaggacaaaagacaggctcatttgaaattgtacaacaattagacggtgaagcacctgatattttagcgattcctgtaggtaatgcaggtaatattactgcatattggaaaggctttaaagaatatcatgaagctaaaggatcacaattgccgaaaatgtttggcttccaagctgaaggcgcatcaccaattgttcaaaataaagtcattaaaaatcctgaaacgattgcaactgctattcgaattggtaatcctgctagttgggataaggcgactaatgctcttaaagaatcaaatggattaatagatagtgttactgatgatgaaattctagaagcatatcagttaatgacaactaaagaaggtgtctttagtgaaccagcgagtaatgcttctattgcaggtttaattaaattgcatagacaaggtaaattacctcaaggtaaaaaagtagttgctattttaactggtaatggattaaaagatcctgatactgctatttcactactagataatccgataaagccattgccaaatgataaagatagcattatcgattatattaaaggagctttataa

SEQ ID NO: 406984 - DNA, 1281 bp, Staphylococcus aureus
atgaaaaaattaaatatagcattattaggattaggtactgtcggatctggtgttgttaaaatcatcgaagagaaccgacagcaaattcaagatacattaaataaagatattgtcataaagcatattcttgttcgagataaatctaaaaagagaccgctaaatattagccaatatcatttaactgaagatgttaatgaaattttaaatgatgattcattagatattatcgttgaagtcatgggaggaattgaaccaactgtagattggttaagaacagcacttaaaaataaaaaacatgttattaccgcaaataaagatttattagcagtacatcttaaacttttagaagatttagcagaagaaaatggtgtagctttaaagtttgaagcgagtgtagcaggtggtattccgatcgtaaatgccataaataatggtttgaatgcgaataatatttcaaaatttatgggaattttaaatggtacctctaattttattttatctaaaatgactaaagagcaaacgacatttgaggaagcacttgatgaagcgaaaagacttggttttgctgaagcggatccaactgatgatgtagaaggggtagatgcagcgcgtaaagttgtcattacatcatatttatcatttaaccaagtcattaaattaaacgacgttaaacgaagaggaattagtggcgtaactttaactgatattaatgtagccgatcaactggggtataaaattaaattgattggtaagggaatatatgaaaatggcaaagttaatgcatcggtagaaccaacgttaattgataaaaagcatcaattagcagctgtagaggatgaatataacgcgatttatgttattggtgatgccgttggtgacacgatgttttatggaaaaggagcaggcagtttagcaacaggtagtgccgttgtcagtgatttattgaatgtagcattattctttgaatcagatttacacacattgccaccacattttgaattaaagacagataaaacacgggaaatgatggattcagatgcagaaattaatattaaagaaaaatccaatttctttgtagtagtgaatcatgtcaaaggttcaattgaaaattttgaaaatgagttaaaggcaatattaccatttcaccgatcattaagagttgcaaattacgataatcaatcatatgccgctgttatagttggattggaatcatcaccggaagaattaatcactaagcatggatacgaagttgacaaagtatacccagtagaaggagtttaa

SEQ ID NO: 406985 - DNA, 1383 bp, Staphylococcus aureus
atgaaagtttccaaattcggtggtagctccgtctccaatgctactcaaattaaaaaggttttaaatattgttaattctgatccagagcgaaagattgttatcgtttctgctccaggtaaaagacatgataatgatattaaaacaactgatttgttaatcagattatatgaaaaggtcattaatcatcttgattatcatgataaaaaaagagaaattattcagcgttatgatgatattgtaaaagaattgcaaatggatgaaagtattttacggacgatagatgtgactttggaacattatattaatcaattaaaaaatgaaccaaagagactattagatgcattactttcttgtggtgaagattttaatgcgcaattgatagctttatataataatagtcaaggtataccaacaaaatatatatcaccgaaggaagcgggtatttttgttactgacgtcccacaagaagcacaaatattagatagtgcttactctgaaattaaaaaattaagagattatgatgaaaaactaattatcccaggattttttggcgtatctcatgaaggatatatagttacatttccacgtggcggatcagatataactggcgccatcatatcaagtggtgttagagccacaatttatgaaaatttcaccgatgtgtctggtatttataaagctaatccaaatatcatcaaagatcctgaattaatcgaagaaatcacttatcgagaaatgcgtgaattatcttatgctggttttagtgttttccatgatgaagccttacaaccactttataaagatcgcatccctgtggtgattaaaaatacgaaccgccctcaagataagggtacatttatagtgcatgatagagaaataaatgcgaaaaatgtgattagcggtataagttgtgataaagattttaccgttattaatatcaaaaagtatttaatgaatagacaagtcggctttactagaaagatattaggtgtcttagaggataataatatttcatttgatcatatgccttcaggtattgatactatcagtatcgttatgcgttcaaaacaaattcaaaataaagaaacaaaagtattaaatgaaattcgtcaaaaatgtgatgttgatgagctaagtattgagcatgatttagcaatattaatgattgtcggcgaaggtatgaataaagtcatcggtactgcaaataaaattacacatgccttagctgaatcaaaaattaacttaaaaatgattaaccaaggtgcttcggaaatctcgatgatgtttggaattcatgtagatgatgctgaaaaagctgtattatctacatatgagttttgctatcacggggttgcatcaaaaaacttgtgtgataaaaactaa

SEQ ID NO: 406986 - DNA, 585 bp, Staphylococcus aureus
gtgaatgaaatgaatgctaaagaacaattagtggacaatttaatgaaaacatcatcgcaattatttaaatttcacggtgaagttgccatgcagcttttcttaaatgatgaattaaaattaccttctattgttgaaatatgcgtggaacgtaagcgtttaagtgatattgtgaaagttattccgcaatcatatgcgttactatacatagataagcaagatcaagcaatagctaaagaagatttatcactttcaaaaattgcaaaagtttatgtgcaatatgatgatacaacaataatgagtattttcgtttatgatgtagtaaacgatgaatggatttttagattggatccgaatatacgtatacctaagagtaacatatacttccatagtttaaattgggatgtggattatattaaaccggagatcgttctaatgtatgatctaatgcaacaccatcagtatcatcattattccaattataaacgagtcatagatgcattaagctactatcaattttttattttaaaatttgtagtaggtgagcaacgtattaaggatgcaatccagagaacaataaataattaa

SEQ ID NO: 406987 - DNA, 855 bp, Staphylococcus aureus
atgtctttttatgttgtacttatcattatcattgtagcattaattggtatattagttttaaatcaaaggtatagtaatagtaaaatagataccgaagtttatgcaagaaagcaacttattaaaaagaacaaagcattaagtgcagaaaatgctgaattaagaagtcaaatgctgagttctaataatgatgttggccaccatgcatacaaaaatgctaaaagagaattacgcaagattttagatagctatctcgaaaatggtaaattaaaatattacgatattatcgttacaagcaatttagctactaaacatccgtttttcgagtatgcacgttcatttgattttatcattgtttcagatatcggtttaataaacgttgatgtaaaaagctggggtgaaaaaacattttatcactttgatgtacctgatgagcatgatacagaaataagcaatagtaatattgaaaaagttgtcggtcattacattagccagcaatatcatgatcagtttaattcatcaagaaagtctatctatacttttacagaaacagttcaaccaaatcgtgttatttatgatttttatgattatgatccgtatcaattagcagcaaataatgcgaaagcattaaaggatcatattgaacaaaactttaactttaaagtccaaagtaccggtgttatttactttagtgatggtacagttaatatcattcaaggttctgaagaaagagataaatatgttgatacagtttcaacaaaatcttcgttacgacgtattattagcgaagccatagagctatctaaacaccctttaaataaagaacaggttgatcaaatcacagctatattcaagtaa

SEQ ID NO: 406988 - DNA, 534 bp, Staphylococcus aureus
atgaagtcaaataaatcgcttgctatgattgtggtagccatcattattgtaggtgtattagcatttcaatttatgaatcatacgggtcctttcaaaaaggggacgaatcatgaaactgtacaagatttaaatggtaaagataaagtacatgttcaaagagttgtggatggtgatacatttattgcaaatcaaaatggtaaagaaattaaagttaggcttataggggttgatacgccagaaacggtgaaaccgaatacgcctgtacaaccatttggcaaagaagcatcaaattatagtaagaagacattaacaaatcaagatgtttatttagaatatgataaagaaaaacaagatcgctatggtagaacattggcgtatgtatggataagtaaagatcgtatgtacaataaggaattagtggaaaagggacttgctagagagaagtatttttcaccaaatggcaaatatagaaatgtatttatagaagcacaaaataaagctaaacaacagaaattaaatatttggagtaaataa

SEQ ID NO: 406989 - DNA, 189 bp, Staphylococcus aureus
atgaacatttcaaatgaaaatacagtcacattaattgcagtaattatcgcaattatcattggtattttcctacaaatatttttcaaattaccattaatagtgacggcagtactatctattttattgggtatctttgtaggctttatcgtttacttgattgtttcgttttataataagcgaaaaaattag

SEQ ID NO: 406990 - DNA, 603 bp, Staphylococcus aureus
atgacatctttaattattgcagaagatcaaaatatgttacgacaggcaatggttcaattaattaaactacatggtgattttgaaattttagcagatactgataatggtctcgatgcaatgaaacttattgaagaatataatcctaacgttgttattttagatatagaaatgccaggcatgactggacttgaagttttagcggaaattagaaaaaagcatttgaatattaaagtgattattgtaacaacttttaaaagaccgggatactttgaaaaagcagttgtgaatgatgtggatgcatatgttttaaaagaacgttctatagaagaattggtggaaaccattaataaagtaaataacggagagaaagaatatagcgccacattgatgacttcattttttgtagataaaaacccattaacgcccaaagaacaaattgtattaagggaaattggcaatggtttaagtagtaaagaaataagtgaaaaattatttttgacagatggaacagttagaaattatacatctgttataattgataaattatttgcagataatcgttttgatgcttggaaaaaggcaaatgaaaaaggctggatctaa

SEQ ID NO: 406991 - DNA, 1092 bp, Staphylococcus aureus
atgaaatttttaaaagatacttcaattgctgaaatatcgtctatactttatctgatttttcctattgccggtatattttttaatgaagtatatggtcccaaatggttgtatattatatcagtcattgtcttttcgttgtcgtatcttatattagttatagtaaataatagacttaatacattaatgttttacattttgttgattattcattattttattatttgttattttgttttcagtgtacatccaatgctaagtttgtttttcttttatagtgcttttgccgttccatttacttttaaaaataatgttaaaaaaacggcaactaatcttttcatactaacaatgattatatgtacaataataacgtacttattgtataacaactattttgttgcaatgatggtttattatgtcgttatatcgttaataatgctagataattttaaaaaaatgaaaaaccgtgaatatcaaaaagaaatagcagaaaaaaatagacatattaatacattaattgctgaacaagagcgacatagaattggtcaagacttacatgatacgttagggcatgtgtttgcaagtttatcattaaaatcagaattagcttataaactaatagatgctgatgtagaaaaagtaaaagctgaattattagcaattaataaattatctcgtgaatcattgaacaaagttcgagaaattattgatgatgtaaaattaccatcatttattgaagagattgatagtatacgtaaagttttaaaagatgctgatattgattttacatttgaaaataaagaattagcgcaagtattaagtcctactaaacaatctatgttagttatgattacgcgtgaagcgataaataatgttattaaacatgcaaatgcttcaaaagttcatggtaaattaaaaactgtaaacaatcataaattactgcttatgattgaagatgatggcaaaggtatcgatagtgattgtgaggtgaaaagtatttcacagcgtgtacaacatttaaatggaactttagcagtcgactcaacaaatggaactaaaataatcattgaaatctcaacaggaggaatagcatga

SEQ ID NO: 406992 - DNA, 732 bp, Staphylococcus aureus
atgatactaagttacttgaaaatcgaatttaaagttataatgcgtaaaaaaacaacattaatattatctattttatttcctgttatattctatatattatttacttcgatattggaattgccggaagatgttaaacctaaattttataaagagtatatgtatagtatgacggtttatagtttgttaagttttagtttactaacttttccattagatattattaatgaaaaacaaaatgaatggcgccaaagattaatggtaacaccatttacttttactagttattatatttcaaaagtagtgaaaactatgctgcaatttgcaatagcgatattagttatttttatggttggacatttttataaaggtgttgcaatgagtgcagttcaatggttagagtcaggaatatttttatggttaggtgcgtctctattaataacttttggcatattattttctttgttaaatgatattcaaaaaacaagtgctttagctaatatcgtaacaattggtttagcagtattaggtggattgtggtttccgataaacacatttccaaattggcttcaacatgttgctcatgttttaccgagctatcatttgcgtaaactaggtgtagatattgcttcaaatcatcatatcaatttaatatcatttgctataatactcttgtatgctttagggagtataatagcagtatattgtattagtcattttaaaagggcggaataa

SEQ ID NO: 406993 - DNA, 900 bp, Staphylococcus aureus
ttgattcaaatatctaatatcaacaagtcatttaataaaagatgtgttctaaaaaatatttcgttcgatattgaacaaggtaaatgtatcgctttaattggaaaaaatggtgctggaaagtcaacgttaattgatatattaattggtaatgttaatgctaattctggtgagatatttgataaagacaagttattacaaagtgaaaatcgcagtataatgttccaaaaaacgatgtttccagatcaattaaaagttattgagattatcaacttatatcaatcattttacgaaaatccattaccattggaagaaataatagaactgacgaaatttgattctagtcaactgaaccaatttgtaaataaactttctggtggtcaacaacgattactcgattttgtattatctttaatcggacaaccacaattgatcttattagatgaaccaacatcgactatggatatagaaattagagaatatttttggtcaattattgaaaatttaaaagaagataatcgaacgatactctatacatcgcactatattgaagaagtcgaacgtatgtcagacaaaattattctcattgaaaatggagaaataatacttaatgattcaacgtcacatattagaaccaatcagcaatctcagattacgttatccgatgaatatataagaaagttaaaactagataaagatgatttagttattcaaaaaaatcataatggcactatcaaaattattacttcaaatgtaaatgatacgattttatatcttcaacaacttcatattaatttggatgatattgaaatacaaaaagtctcaattgttgattcatacttcaacaataaaaagcaaaggggatctaattatgatactaagttacttgaaaatcgaatttaa

SEQ ID NO: 406994 - DNA, 1482 bp, Staphylococcus aureus
atgcgatttacattttcaaacgatttaggaacgttatttactattattttagccattggattcatcattaatttagtattggcttttattattatctttttagaaagaaataggcgtacagcgagttcaacttgggcatggctatttgtactttttgtcttaccattgattggttttattctttacttgttttttggtagaaccgtttcggcacgcaaattgaataaaaacaatggtaacgtgttaacggatttcgatggacttttaaaacaacaaatagaaagctttgataaaggtaattatggtactgataacaaacaagttcaaaaacatcatgatttagtacgtatgcttttgatggatcaagatggttttttaactgaaaataataaagttgatcatttcattgatggaaatgatttatatgatcaagttttaaaagatattaaaaatgcaaaagaatatatccatttagagtactatactttcgctttagatggtttaggtaaaagaattttacatgctttagaagaaaaattgaaacaaggtctagaagtaaaaatattatatgatgatgttggatctaaaaatgttaagatggcaaattttgatcattttaaatcgttaggtggagaagttgaagcattttttgcttcaaaattaccgttattgaatttcagaatgaataatagaaatcatagaaaaatcatcgtaatcgatggtcaactaggttatgtcggaggatttaacattggtgatgaatatctaggattaggaaaattaggatattggagagatacgcatttacgtatacaaggggatgcggttgatgcactgcagttgcgatttattttagactggaattcgcaagcgcaccgtccacaatttgaatatgatgttaagtatttccctaaaaagaacggaccattgggcaattcaccaattcaaatagctgcaagtggcccggctagtgactggcatcaaattgaatacggttatacaaaaatgattatgagtgcaaagaaatctgtatatttacaatcaccatatttcattccggataattcatatataaatgccattaaaattgctgctaaatcaggtgtagatgtacatttaatgattccatgtaagccagatcatccattagtatattgggcgacattttcaaatgcctctgacttattatcaagtggtgttaaaatttatacgtatgaaaatggatttatacattctaaaatgtgcttaattgatgatgaaatcgtatcagtgggcacagcaaatatggactttagaagttttgaattaaattttgaagtaaatgcctttgtatatgatgaaaatcttgctaaagatttaagggtggcttatgaacatgatattacaaaatcaaaacaactaaccaaagaatcatatgccaatagaccgctgtctgttaaattcaaagaatcgttagcaaaattagtttcgccaattttataa

SEQ ID NO: 406995 - DNA, 198 bp, Staphylococcus aureus
atggaacaaattaaacttaaaacttttacagctgagactttagagttattagaaaaaaacattaatgcttttttaagttctgaagaagctacaaatttaaaattagtaaatattactattaaagaaatagaagaaagaacattcccaaataatgaagaagaattcaatgcaattttaactttatctgtgaataaataa

SEQ ID NO: 406996 - DNA, 1026 bp, Staphylococcus aureus
gtgatttcattcgaaaatgattatttagaaggtgctcatgaaaaagtattaaaacgattagtagatacaaatcttgtacaagcttcgggatatggctttgatcaattcacagctcaggcaattgaaaagattaaagatacaattgactgtccaaatgctacaattcgttttttagtaggtggaacacaaaccaatcaggttgttattaattcaatgttagaaagttacgaaggggtcatttcagcagacactggtcatgttgctgtgcatgagggcggtgcaattgaatatagtggacataaagtaattactataccctctaaggaaggaaaagttagtgcttcagatgttgaaacttacatggagacatttaaaagtgattttaaaaaggaccatatggtattcccaggaatggtatatatttctcatcctacagaatatggcacattatactctaaatcagaattggaagagttatgcaaagtatgtaagcaatatcagcttccattatttatggatggtgcacgattagggtatggattgatgagtgaccaatcagatatgactattaaagacatcgctaaatattgtgatgtattttatataggtggtacgaagataggtgcattatgcggggaagccattgtttttacgaaaaataatgaaccgaaacaatttaccactcgaatcaagcatcacggtgcccttttagcaaaaggacggttaacaggcatacaatttttagaattatttacggacaatttatattttaatataagcagacatgctatcgaaatggcaaataagatgaaagacgggtttaaaaataaaggctatcgtctttactttgattctccaaccaatcaacaattttttattttaagtaacgagaaaatagcagagttagaacaaaaagttaaatttgctgtttgggaaaaatacgatgatcaacatcgtgttgttagattcgcaaccagttgggcgacaaccgaagaaaatttaaataaactattagaattaatctaa

SEQ ID NO: 406997 - DNA, 192 bp, Staphylococcus aureus
atgaatttacagtcatacataggcaaattagtcaaattaacgcttactaataataaaatattaattggaaaagtgatagactttgatgataaagttgataattttgatggttataattcgatagaaattgatacaggtagaattacatatgatatatcagaaaataaaattaaaactattgttttacaataa

SEQ ID NO: 406998 - DNA, 351 bp, Staphylococcus aureus
atgcttgaaatgataagtaatggtaaaatgacgatgaaattgaataatgttaagcaaaagcgtcatattttatgcacaaatgaatataataataagaaaaataattcatctttattaccaagttatactataatagattctaatgaaagtgaaaagatgactaaaaaagaatttattgatattccagttttgtttgatgatgaagggaattttagaataaaacaagttatagattataaaaagataataggtaaatcttatgtgaatggtaaatatattgaaacgaaattaggtaaggttcattattctaaaactggttttcatgtagttccgtatattaaaaaggagtga

SEQ ID NO: 406999 - DNA, 195 bp, Staphylococcus aureus
ttgagaattgaagatgcatatcgtaaagatgttattatcacgcttttgaataatgaagaatacgaagggtttgtaactgactatgaaaatgaattcgagagcgaaacaggaaatcttgttgtagatatacagactgattttgctgtttattcgtttgatgaaactgagataaaaagtattagattattaaaataa

SEQ ID NO: 407000 - DNA, 291 bp, Staphylococcus aureus
atgttaggtcatcacctatataatgaaaataaaaaaagagccattttaaataataagaaattgcctagctatacaatactttctatagatttattgaatgaattgttaagagaaaaaatgtcaacaggcaatctaatattaagtgatgagcgatttgatttgaaagagattattaattttaatcaaattattggaaaaatacatatcgaaaatgtgtatattgaaaccagaaagggaaaagtgcattattcgaagacaggtgctcatatagtaccttatattgataagtag

SEQ ID NO: 407001 - DNA, 294 bp, Staphylococcus aureus
atgcttttttcattattcgttgaaaaagaagagtcacaaaagttaacatatttaaaagaacttggtgaagatggcgaatataaatatgttgccaaaatagatagtaaaacatctaaattatgtcattcactcaacggaaaaatatttaaagttaaagatatgataccaggtgtgaatgcgccacctatgcatccttggtgtagaagtaccacagtgccacatgttggcaattggcgggacaagttctttaaagagcgtgaaggtaaatatcaagtagaagtaaaagaagcataa

SEQ ID NO: 407002 - DNA, 252 bp, Staphylococcus aureus
atgcttacattaataaaattgaaagaagatgaacaggttataatatatgaatatatacctgaagatgatataagtaacggtaaaggttcagtaacttttaataaaaaagatgcagaggttatagatttctcattatctgaaatagaaaatgaagaatattttatgttatatcgtaataagtctttttctgtagtaagagactttatcgagaagcaagaatttcccgaaaattataaaatagcatggtattaa

SEQ ID NO: 407003 - DNA, 186 bp, Staphylococcus aureus
atgtcagaatacaagaaaaaaataattgaattaattgaaagtaatttaacaggatatgaaatttctaaaaaaactggagtttctcaatacgtactttcacaattaagacagggcaaacgcgaagtagataatctaaccctgaatacaacagaaaaattatatgaatatgccaataaagttttgtaa

SEQ ID NO: 407004 - DNA, 975 bp, Staphylococcus aureus
ttggaaaaagatgatacactagcagaaattaagcctatgctcaattttgatgagcaaatagcgaaattaaaacagatgaatatattttttaatattattgacaccgaaaaagcaaatgaaattcttagaaaaaataattacttcttcaaactagcttatttccgaaaaaatttcgaaaaaaagaatggcggctatttcatagaatttgcttatttatcagatttagcaactatagatatgaaattaagatacacaatgttgcatttaactttagatattgaacatagtttaaagtatctagtcttaaaactaataacagaaaataaccaagaagatggttataaaataatagatgagttcttatgtattgataaatcatatagcaattcaaattttgacacaaattcaagaacaccagaagaagttatggaaaccaaaatcaaaaataaaaacgaaatattcaagcatatgaataaacgaggacaactacccgagaagttgaataaatactatcaaaatccacccgcatgggtttgcattgaattcatgcaactaggtcaattcgtttcgtttctcaacttctattacaagaagtacaatgacgaagaattgagagttgctaatattttaatgcctttagttaaaaatataagaaacaaatcagctcataaccaacccatcatagcaaatctaaattatgacagtagattacctcaatatttatttgaaaaagggaataatataggcatatctagaaacatgttcggaataaaaaatttcatagatactttcgctacgctagaattacataatcaagtttgtagtaatgcaattatccaagcaagatatcacgatttggaccaacttcaaaagcgatataaaagaaacgaaagctattataataatgcattagctatcaaaagattttttatagctttagataaaattattgacttcaacagaccaaaagtataa

SEQ ID NO: 407005 - DNA, 291 bp, Staphylococcus aureus
ttgatagagagtacatattcacaaatacgtctggtagccctatcgactcgaacaaaattagccacattattaaaggggggcgctgatattagttctattaagaaacctataacgacgcatacattacatcattcgcatatatctacacttgctcaattaggaattaacttaaaagcaatgcaagagcatgtaggtcattcagattataaaaaaaatctagagatatacacacatgttactaatcagatggcgaaagatatgatgaataaatttgaacgattggggagttaa

SEQ ID NO: 407006 - DNA, 612 bp, Staphylococcus aureus
atgttcaaaaaatatgactcaaaaaattcaatcgtattaaaatctattctatcgctaggtaccatctatgggggaacatttggaatatatccaaaagcagacgcgtcaacacaaaattcctcaagtgtacaagataaacaattacaaaaagttgaagaagtaccaaataattcagaaaaagctttggttaaaaaactttacgatagatacagcaaggatacaataaatggaaaatctaataaatctaggaattgggtttattcagagagacctttaaatgaaaaccaagttcgtatacatttagaaggaacatacacagttgctggcagagtgtatacacctaagaggaatattactcttaataaagaagttgtcactttaaaagaattggatcatatcataagatttgctcatatttcctatggcttgtatatgggagaacatttgcctaaaggtaacatcgtcataaatacaaaagatggtggtaaatatacattagagtcgcataaagagctacaaaaagatagggaaaatgtaaaaattaatacagccgatataaaaaatgtaactttcaaacttgtgaaaagtgttaatgacattgaacaagtttga

SEQ ID NO: 407007 - DNA, 369 bp, Staphylococcus aureus
ttgaaaacgattttaaaaacaataacatatcttgtacttactatcattggcgcttatgctgctttattcattttaaaaacaatagactcccatggtataacagatcaatttaacccattagtaaagaaggatgattcttatgttaaaacgacagaggtgtctactagaatggatgatcaactccgaagttatagtcaaagtgtttttaataaagaagggaaagagacgcaattaatgtatactgctacatttgatgttaaaccgcatagatacttgaaaattacacataaaggtcatcatgtagaaacttttgaagaagttgaaaaggaagaagtaccaaagaaagcattagacaaactgagtcgataa

SEQ ID NO: 407008 - DNA, 573 bp, Staphylococcus aureus
atgaaattaaaatcattagcagtgttatcaatgtcagcggtggtgcttactgcatgtggcaatgatactccaaaagatgaaacaaaatcaacagagtcaaatactaatcaagacactaatacaacaaaagatgttattgctttaaaagatgttaaaacaagcccagaagatgctgtgaaaaaagctgaagaaacttacaaaggccaaaagttgaaaggaatttcatttgaaaattctaatggtgaatgggcttataaagtgacgcaacaaaaatctggtgaagagtcagaagtacttgttgctgataaaaataaaaaagtgattaacaaaaagactgaaaaagaagatacaatgaatgaaaatgataactttaaatatagcgatgctatagattacaaaaaagccattaaagaaggacaaaaagaatttgatggtgatattaaagaatggtcacttgaaaaagatgatggcaaacttgtttacaatatcgatttgaaaaaaggtaataaaaaacaagaagttactgttgatgctaagaacggtaaagtattaaagagtgagcaagatcactaa

SEQ ID NO: 407009 - DNA, 264 bp, Staphylococcus aureus
atgaatatgcatattttatataacttacgaactaaacataatttagaaattgacgaattagcacagcaattaaatgagaaatatggtactaaatatgaagcacatcaaatttgggaatgggagaatcatcaccatgaacctaaatttaaagatgccatgcatttagctgacttctttgatgcaccatatgaaatgtttttagaaagtaaggttaaagaatatcagaaacatttagaagaagtcgatattcgcatggataaatag

SEQ ID NO: 407010 - DNA, 252 bp, Staphylococcus aureus
atgtttggatttattggaatgttaattgtcggtggcttaattggatgggctgctggtgctattatgggtaaagatatcccaggtggtattttaggcaatattatcgcaggtattattggatcatgggtaggtggcaaactattcggacaatggggtcctgaattaggaagtatttacatcttgccagcattaattggttcaattatcttaattgcaatcgtaacgttaattttaagagctatgcgtaaataa

SEQ ID NO: 407011 - DNA, 582 bp, Staphylococcus aureus
atgacgatttatttagttagacatggcgaatcaaaatcgaattatgataataaacattttcgatcttatttttgtggacaattagatgtgccgttaacggatactggcacaaaaagtgcagacgatttatgtgattattttaaagagaaacagattaaacatgtatatgtttcagacttattaagaacacagcaaacgtttgaacatatttttccatatgacattgcatcaacgactacccctctattaagagaacgttcacttggcgtatttgagggtgaatataaagatgaaatcagtgcgaatccgaaatatgaaaaatatttcaatgatccaaactttaaagactttcgtcatagtttttcacaaaaagcgcctgaaggagaaagttatgaagatgtatatcaacgcgtagaacattttatgaatcatgttgtcaatgaagatacacaaaaagatgatattgtcattgttgcacatcaagttgtcattcgttgtttgatggtttattttaacaaagtttcaagggcagaagctgtggatttaaaggtagaaaattgcaaaccatatatcattgaatag

SEQ ID NO: 407012 - DNA, 387 bp, Staphylococcus aureus
atgatgaaagttcgaattacttttattattttagcaattttatcgacgattgtttgcttgttcttagcagcaatgcatccaacaggaccaaacacagtaacttttgaacagccatatttattcaccctcaacatcattataatggtattagtcgcattaccttcacttgttttagctatatatgattatatgagttttagaatttcttctgctattttacaatttctaggggctatctcttggttctttttatcattgatattatcgctcacacaatttacaccttttacattagcgtcatttataacttcaattattttgttcacaagcacaattatcacattagccattggtggtaagtctgttgaaaagaatgattccccttaa

SEQ ID NO: 407013 - DNA, 627 bp, Staphylococcus aureus
atgaaaaagagattactactaagtacatttttagcatcgacattaattcttacaggttgcgcgtccgatcaatctgataacgaagatcatcatacaagtactggcatccatgcacctaaaagcgctaaaaaattagaaacaaaagatatctttaactcagataagaaaaatagtgatattagtgatgcagagatgaagcaagctatagaaaagtatttgtctgtaaatagcgatatacttgataacaaatatattatgcaacataaactagataaacaaattgacagtcaaacaaaagtgactgaaaaacaagcagaaacacttagccacttatctaacttagctgttaaaaacgatttgcatttcaagaaatttgtcactgaaaacaatattcctaaagaatataagaaacccgttgaattaatgatgaattacttcaaagctttaaatagtacaatcgccaatgttgatgaagatattgaaaagcttagctatcaaccgcaaaataaaatcaatgttgtcgacgtgccaacaaaatatgccggtgatgttaataaaaagcaacaagataaaattaaagatttcttaaaatctaaaggtatcaagagtgatgttatcgataaataa

SEQ ID NO: 407014 - DNA, 258 bp, Staphylococcus aureus
atgcttaaagtatgtacctctcgcaaacaaatcaatatgaaaaatgatattgagaaagaaaagtatgtgaacgaaattattatgcttttacgtacgatacctacgtctaaattagtacaaccaattatgcagttatttatagataaagctatccttaacaacgtccaaaatgatgcattattgatagaaaaagcaactcatgcacgtaatcatttacgtctatggtcattgcaaggtcatcgtgacattccaaactaa

SEQ ID NO: 407015 - DNA, 1524 bp, Staphylococcus aureus
atgcttaatgctgatttaaaacaacaacttaaacaactattagaactaatggagggcaacgttgaattcgttgccagccttggttcagatgataaatccaaagaacttaaagatttgttgacagaaattactgatatgtcacctagactatctctttctgaaaaatctttaaaacgtacaccaagtttctcagtcaatcgtcctggcgaagaaacaggtgtaacatttgcaggtattccattaggtcacgagtttaactcacttgttttagcaattttacaggttagtggtcgtgcacctaaagaaaaacagtcaatcattgaccaaattaaaaaattagaaggttcattccattttgaaacattcattagtttaacgtgtcaaaaatgtcctgatgtcgttcaagcacttaacttaatgagtgtgatcaaccctaacatcacgcattctatgattgatggtgcagtgttccgtgaagaatctgaaaacatcatggcagtccctgctgtctttttaaatggcgaagaatttggcaatggtcgtatgacaatccaagatattctttcgaaactaggcagtacggcagatgcatctgagtttgaaaataaagaaccttatgatgtcttaatcgttggtggtggtcctgctagtggtagtgcagcgatttacacagcacgtaaaggtttacgtactggtatagttgctgatcgtatcggtggccaagttaatgatactgctggtattgagaacttcattactgttaaagaaacaactggttctgaattttcttctaacttagcagcgcacattgatcaatatgacattgatgcaatgacaggtatacgtgctacagatatcgaaaagactgacgaagcaattaaagttacgttagaaaacggtgctgtcttagaaagtaaaacagtcattattgctactggtgcaggttggcgtaagctaaacattccaggtgaagagcaattgattaataaaggtgttgcattctgccctcactgtgacggacctctatttgaaaataaagacgtagcagttatcggtggcggtaactctggggttgaagcagcaattgaccttgctggtatcgttaatcatgttacattattcgaattcgctagcgaattaaaagcagacaacgtgttacaagatcgtttacgttctttatcaaatgttgatatcaaaacaaatgccaaaactactgaagttgtcggagaagaccatgttacaggtatacgttacgaagacatgaacaccggcgaagaacatctacttaacttagatggtatctttgttcaaattggtttacttccaaacacatcatggttaaacgatgctgttgaattaaacgaacgtggtgaaattgtgattgatcgtaacaataatacgaatgttcctggaatatttgctgctggcgatgtcacagatcagaagaacaaacaaattatcatttcaatgggcgctggtgcaaatgcagcattaaatgcctttgactatattatcagaaactaa

SEQ ID NO: 407016 - DNA, 570 bp, Staphylococcus aureus
atgtcattaattaacaaagaaatcttaccatttacagcgcaagctttcgatccaaaaaaagatcaatttaaagaagttacacaagaagatttaaaaggttcttggagcgtagtatgcttctatcctgctgacttctcattcgtttgtccaactgaattagaagacttacaaaaccaatatgaagaattacaaaaattaggcgtaaatgtattctcagtatcaactgatactcacttcgtacacaaagcatggcatgaccattcagatgcaattagcaaaatcacttacactatgattggtgacccatcacaaacaatcactcgtaattttgatgtattagatgaagctactggtttagctcaacgtggtacattcattatcgacccagacggtgttgtacaagcatctgaaattaacgctgacggaattggccgtgacgctagtacattagctcacaaaatcaaagcagctcaatatgttcgtaaaaaccctggcgaagtatgcccagctaaatgggaagaaggcgctaaaacattgcaacctggtttagatttagtaggtaaaatctaa

SEQ ID NO: 407017 - DNA, 807 bp, Staphylococcus aureus
ttgcaatatgaagattttaaattaattgtaaagtatcgaggagtgggtaacgtgtcagaacatgtatataatcttgtgaaaaagcatcattctgttagaaaatttaagaataaacctttaagtgaagacgttgttaagaaattggtagaagctggacaaagcgcttcgacgtcaagtttcctgcaagcatactcaattattggtatcgacgatgagaagattaaagaaaatttacgagaagtttctggacaaccttatgttgtagaaaatggctatttattcgtctttgttattgattattatcgtcatcatttagttgatcaacatgctgaaactgatatggaaaatgcatatggttcaacggaaggtttgctagtaggtgcaatcgatgcagcattagttgccgaaaatattgcggtaactgctgaagatatggggtatggcattgtctttttaggatcattaagaaatgatgttgaacgcgttcgagaaattttagacttacctgactatgtcttcccggtatttggtatggcagtaggggaacccgcagatgacgaaaatggtgcagccaagccacgcttaccatttgaccatgtcttccatcataataagtatcatgctgataaggaaacacagtatgcacaaatggcagattacgaccagacaatcagcgagtactatgatcaacgtacaaacgggaatcgcaaagaaacatggtcgcagcaaattgagatgttcctaggaaacaaagcaagattagatatgttagaacaattgcaaaaatcaggcttaatacagcgatag

SEQ ID NO: 407018 - DNA, 1389 bp, Staphylococcus aureus
atgaatgcttttcttacactgattaatattattgtattggtgattttcatcgtaatattgcacatgatggctcgcaaacatatatcttttgcgaaacgtgtgtttacagctttagggattggtatagtattcggtgtgttattgcatcttatttatggcacacattcgaatgttattacatcaacaagtgactggttcaacattgtcggacaaggttacgttgcattgttgcaaatgattgttatgcctttaattttcatttctattgtagctgcattcactaaaattcaaatcggagaaaagtttgctaaaattggtagtctcatttttatctttttaattggcactgtcaccattgctgcgattgttggtgttgtgtatgccttggtgtttggtttagatgcatcaacaattaaccttggtaacgctgaacaagcacgtggaagcgaaattgctaaacaagcgaaagatttaacagcacatacgttaccacaacaaattttggaattattgcctaaaaatccattcttagatttcactggacaacgtgcaacttccacgattgctgtcgtgatatttgcttcgtttataggatttgcttatttacgcgtagcacgcaaacaacctgatcatggtgaattgcttaagcgtgcgattgacgctatctattcactagtaatggcgattgtgacgttcgtcttacgtttaacgccatacggtgtattagcaattatggccaacacattatcgacaagtgactttggcgccatttggactttaggaaaattcttaatcgcatcgtacgctgcattaattacgatgtatatcattcacttaattattttaagcctgttaggtattagcccaattcgctatgttaaaaagactttggaagtattaatctttgcattcacatcacgctcaagcgcgggtgccttaccattgaatgtacaaacacaaacaagacgtctaggcgtgccagaaggtattgccaatttcgctgcgacatttggattgtcgattggacaaaatggttgtgcaggcatttaccctgccatgcttgcaattatggtcgcacccgtcgctaatgtagaaattgatttacaatttattgtaacgttaatcgctgtcgtgattattagttcattcggcgttgctggcgtcggtggcggggctacatttgcatccatattggtgttgtcaacgttaaacttgccagtcgctttagccggcgtgctcatctccgttgaaccattgattgacatgggtagaacagcattaaacgtgaacgattcaatgctagctggtacaggtaccgccaagttaactaaacattgggataaagatactttcgattcaaatgataatgctgcattaacttcacactaa

SEQ ID NO: 407019 - DNA, 957 bp, Staphylococcus aureus
atgttaactaaagaatttgcacaacgcgtagaactaagtgagaagcaagtacgtaaaattgttcaacatttagaagaacgtggttaccaactaagcaagactgaatatcgtggtcgtgaagcaactgatttcaaagaagaagatatcgagcttttcaaagacattgccgacaaagtaaaacaaacaaatagttatgatctagcgtttgatgaattagaaaaagaaaaagacttcctgcaagtcattgtcaaaaacgatgacaaaaacttacctactaatcaaaatgtcgctcaactagtagaagatttacgcctagaaatccagaaaatgcgcgaagaacgtcacctacttggtcaaatgatgaatcaagtacatcagcaacaacaagaattaaaagaacttcaaaatcaacttacatctaaaatcgattcaaatagcgaatccttaaaagccatccaaacatcacaagaggctatccaagaagcgcaagcctctcaagcaaaagcattagctgaatcaacaaataaagttgaaaagaatgctgttactgaagataaagctgacagtaaagattcgaaggttgctggagtgaatacatcaacagacgctaagacggatactaaagcagaaaatgcaggcgatggcactgctactaaagtagataaagaggatcaaatttctgcaactgaagcaattgaaaaagccagcgttgagcagtctaaaaatgacaatgcagctgagacttcaaataaagaagctacagtagatgcagaagcgcaacatgatgctgaacaacaagtagcagaagcccatgcagaagcttctaaacaagctacttcgaacgattcattggaagcgaaagcagaaaatgacagcacagcttcacagtcagaaatgtcagaaccaaaacctcaagaagagaaaaaaggtttcttcgcacgtttattcaacctgtaa

SEQ ID NO: 407020 - DNA, 663 bp, Staphylococcus aureus
atggaatttaaaaccattcaatctgtcaaagatccacattacaacgaagcacttaaactttacgatactaagttaaatttatctttaactgaagataaacgtatcatcaaacgctcattagaaaacaacaaaaccgaaaacgattatgtctttatcgtaggcttagaaaacgatgttgttgtcagtctagcaactgcacattatgaagccacaaccaattcagcatttttaatttatttattcgcaaaagacctacccaaccatgatgagttaatgacgcaaacattacatcaaattgaacatgaactaaacttattatcaaaccttgttcattctagaagtattaactttttaatgatggaagtccctaaagaacctgcagatttaacacaagataacggcctcattattgaacaccgtagacagtttttatacgaacatcaatttgaaagacaaactgaaattgattacattcatccaactaatgatggtcacactaaaaaagtggacttatttttaaagaaaaatattaaactgacaaaggatatctacggtacaagtgttaaatcaaattatattttgaagtatgtatttgccaatggtatcgcacgtgaaattatttatgctttattagaagaaatggatttacgtaaaccattttaa

SEQ ID NO: 407021 - DNA, 408 bp, Staphylococcus aureus
atggcagatattactgtagtaaatgacactggcgaattatacaacgtaatcaatcaaaagaaatctgaaggttatttagaatcagagctaacaattattagtaaaagtaaattacacctaaatgacttacacgactctgaaatctcccttatctcaacaagtggaacatttagtgatagaatgactaaactgttaacaggagaagatggtgaacatgcagttttatcacgctacaacttagcgcctgatgaattagaaaaatataaacaacttattttagacgataaaatgttagttgtagcggttcgtgacaaatcatcacatcaagaagtgcatgaaaataattcagcttatgaagagattgatattacacattttgctgaagcatctaaaggtcccaaagcttag

SEQ ID NO: 407022 - DNA, 579 bp, Staphylococcus aureus
gtggagttactaggacaaaaagtaaaggaagacggcgttgtcattgatgagaagattttaaaagtcgatggatttttaaatcatcaaattgatgcaaagttaatgaatgaagttggtcgcactttttacgagcaatttaaagataaagggattactaaaatcttaaccattgaagcttccggtatcgcacctgcaatcatggctgcactgcattttgatgtgccatgtttatttgcgaaaaaagcaaaacctagcactttgacggatggttattatgaaacatctattcattcatttactaaaaataaaacaagtacggtcattgtttcaaaagagtttttatcagaagaagatactgtacttatcatcgatgactttttagcaaatggtgatgcttcattaggattatacgatatcgcacagcaagcgaatgctaagacagctggtattggtattgttgttgaaaagagtttccaaaatgggcatcaacgtttagaagaagcaggtttaacagtttcttctctctgcaaggttgcttcactagaaggaaacaaagtgacattggtgggagaagaataa

SEQ ID NO: 407023 - DNA, 1269 bp, Staphylococcus aureus
atgaaaaatttaatcctaagtgttcaacatcttttagctatgtacgcaggtgctatcttagttccaatcattgttggtacaagtttgaagtttacacctgaacaaatcgcttacttagttacagtagatatatttatgtgtggggttgccacatttttacaagccaataaagtaacaggaacaggattaccaatcgttcttggatgtacattcacggctgttgcgcccatgattttaattggtcaaacgaaaggaatagatgtactttatggttcgctatttttatcagggatattagttattatcatcgcgcctttcttttcacatcttgtaaaattcttcccaccagtagtaacgggtagtgttgttactatcattggtatcaatttaatgccagtagcaatgaattacttagctggaggtcaaggtgcaaaggactatggagatgttaagaacattttgttaggtttaatgacattaatcattattcttcttttacaaagattcacaactggatttattaagagtattgccatattaattggactcgttttaggaacgataggtgctggcttacttgggatggtcgatattaatcaagtcaatcatgccggttggttaggcatcccagtgccgtttagattctctggatttagctttgatgtgacatcgacgttagtgttctttattgtagctatcgttagtttaattgagtcgacaggtgtctatcatgcgttaagtgaaattaccggtaagaagttagaaagaaaagattttcgtaaaggttatactgcggaaggtctagcgatagtgttaggttctatattcaattcatttccgtatacagcctattcgcaaaatgtaggacttgtttctttatccggcgctaagaaaaacaatgttatatacggcatggtcgtgttattacttatatgtggttgtatacctaagcttggcgcattagcaaatatcataccgctacctgtgttaggcggtgcgatgatagctatgtttggcatggtaatggcatatggtgttagtatattaggacatatcgattttaaaaatcaaaacaatttattaattatcgctgtatcagtaggattaggtactggtataagcgctgtaccacaagcatttaaaggtttaggtgaacaatttgcatggttgactcaaaacggaattgttttaggcgcaatctctgcaattattcttaatttcttttttaatggaataaagtataaacaaacggaagaaaatgtgaaataa

SEQ ID NO: 407024 - DNA, 1467 bp, Staphylococcus aureus
atgtgggaaagtaaatttgcaaaagaatcattaacgtttgatgatgtgttattaattccagcacaatctgatattttaccgaaagacgttgatttaagcgtacaattatcagacaaagttaaattaaatattccagttatttctgctggtatggatactgtaactgaatctaaaatggcgattgctatggctcgtcaaggtggtttaggtgttattcataaaaatatgggcgttgaagaacaagcggacgaagttcaaaaagtaaaacgctcagaaaatggtgtcatttcaaacccatttttcttaacgccagaagaaagcgtttatgaagcagaagcattaatgggtaaataccgtatttcaggtgtaccaattgttgataataaagaagatcgcaacttagtaggtattttaacaaaccgtgacttacgttttattgaagacttctcgattaaaattgtagatgtaatgacgcaagaaaatttaattacagctccagtgaatacaacacttgaagaagcagaaaaaattctccaaaaacataagattgaaaagttaccattagttaaagacggacgtctagaaggtcttattactattaaagatattgaaaaagttatcgaattccctaatgcagcaaaagatgaacatggtcgtctacttgtagccgcagcaattggtatttcaaaagatactgatattcgtgctcaaaaattagtcgaagcaggtgtggatgtcttagttatcgatacagcacatggtcactctaaaggtgttatcgatcaagtgaaacatattaagaagacttacccagaaatcacattagtagcaggtaacgtagcaactgcagaagcaacaaaagatttatttgaagcgggtgcagatattgttaaagttggtattggcccaggttcaatttgtacgacgcgtgttgtagcaggtgttggtgtaccacaaattacagcaatttatgattgtgcaactgaagcacgcaaacatggtaaagctatcattgctgatggtggtattaaattctcaggagatatcattaaagcattagctgctggtggacatgcggttatgttaggtagcttattagcaggtactgaagaaagcccaggcgcaacagaaattttccaaggtagacaatataaagtataccgtggtatgggctctttaggtgcgatggaaaaaggttcaaacgaccgttacttccaagaggacaaagcgcctaagaaatttgttcctgaaggtatcgaaggacgtacggcttataaaggtgcgttacaagatacaatttaccaattaatgggcggtgtgcgtgctggtatgggttatactggttcacacgatttaagagaattacgcgaagaagcacaatttacacgtatgggtcctgctggtttagcagaaagccatccacataatattcaaattacgaaagaatcaccgaactactcattctaa

SEQ ID NO: 407025 - DNA, 1542 bp, Staphylococcus aureus
atggaaatggcaaaagaacaagagttaatccttgtcttagactttggtagccaatacaaccaattaattacacgccgaattcgtgaaatgggcgtttatagtgaattacacgatcatgaaatttcaattgaagaaattaagaaaatgaatccaaaaggtattatcttatcaggtggtccaaattcagtttatgaagaaggttcatttacaattgatccggaaatatataatttaggaattccagtacttggtatttgttacggcatgcaattaactactaaattattaggtggtaaagttgaacgtgccaatgaacgtgaatacggtaaagcaatcattaatgcgaagtcagatgagttattcgctggcttaccagcagaacaaactgtttggatgagtcattctgataaagttattgaaattccagaaggctttgaagttatcgctgatagcccaagcacagactatgcagcaatcgaagataagaaacgtcgcatttatggtgttcaattccatccagaagtacgtcatacagaatatggtaatgatttattaaataattttgtccgtcgtgtttgtgattgtagaggtcaatggacaatggaaaactttatcgaaatcgaaattgaaaagattcgtcaacgcgtaggagaccgtcgtgtattatgtgcgatgagtggcggcgtagattcatctgttgtagctgtactattgcataaagcaataggtgatcaactaacatgtatctttgtagaccatggcttacttcgtaaaggtgaaggcgacatggttatggagcaattcggtgaaggtttcaacatgaatattattcgtgttaatgcgaaagatcgctttatgaataaattaaaaggtgtttcagatcctgaacaaaaacgtaaaatcattggtaatgaatttgtatacgtatttgatgatgaagcatcaaaactgaaaggtgtagacttccttgcgcaaggaacactatatacagacgtcatcgaatcaggtactaaaacagcacaaacaatcaaatcacaccacaatgttggtggattaccagaagacatggaattcgaattaatcgaaccaatcaatacattgtttaaagatgaagtacgtaaattaggtattgagttaggtattccagaacatttagtatggagacaaccattcccaggacctggtcttggtattcgtgtacttggagaaattactgaagataaactagaaatcgttagagaatcagacgcgattttacgccaagtgattagagaagaaggtcttgaaagagaaatttggcaatacttcacagtgttaccaaacattcaatcagtaggtgttatgggagactaccgtacgtatgatcacacagtaggtattcgtgcagtaacatctatcgacggtatgacaagtgacttcgcacgcatcgattgggaagtcttacaaaagatttctagtcgtatcgtaaacgaagtagatcacgtcaaccgcgtagtctatgacattacatcaaaaccaccaagcacaattgagtgggaataa

SEQ ID NO: 407026 - DNA, 537 bp, Staphylococcus aureus
atgcacaacaataatgaattcaacaaaaaactgaaagattttataggtagcgataaacggatggctttagtaaagggttatgttaacgagtataaattaacaactgttttaagagctttaaataattccgattacacaaaagggacgatacacactcgttcaataggcaacctaaaacaaatagtagataatcgaattattcctaaaaatataactcaaaacacaatcttcaaattgagtaatttaaccttagaggttaacctctatgaaagaaacacaatttatcacggagactttgctatttactatcctgtagaatctgctctaataatagaaacagatactcctaggctaattaatcatataaataacaacccagtccaaaaaatatttataataacaacaaatgactggagctttaatacacttgaattagaaaaaatagtagacgaaactataatttatgatttaaaacaagaagatcctaaacaatatgaaattttatataaaaataaacacggaaaattgccttattga

SEQ ID NO: 407027 - DNA, 705 bp, Staphylococcus aureus
atgtctaaaaatatcaatcaagcaaatagtaaattaaatacgtcaaacaaaaaactaaaacaagcttattcaaaatccgacagtaaaaacatgaaagttatatacatgcctcattggctagagttttattcaattgctatacatagcgatgttacaagcaataaaaaaagatattataaatcatatagtagaggaacagtggtatatgtaaaactagggagtaatattggaagtgagttttctggtaatcatttttgtgtaatattagataacaaagacaataaaggaaaagaaacagttacaatagttccactttcttccaaaggtaataaaaattatttgaagttaaacgaatcggtgctaaatctaacagcaacagatttaaaaaaacagattatcgatatcagtagtaaagtacaagcattagcccaaaaatatagagaaattgacattaaacttagcacagaagataaaaagcttttgtctaacttaaatcaaaaagctaatgaactgtatagagtgataggtgtttattccaagcacaaagggaaagatacatacgttaatatatcagcaattacaacaataagcaaaagacgtataagcaaaataaatgattctgatcctactggaacgataataatttcagaagatgacatgaatgaaatcgaaaagcaattaaagataaagttcttttctaattga

SEQ ID NO: 407028 - DNA, 273 bp, Staphylococcus aureus
atgacaaaagaaagaagaacatttagttcagagtttaagttacaaatggttagattatataaaaatggtaagcttaagaatgaaattatacgaaagtatgatttaaaaccctcaattatctcaaattcgataaaacaacaccaaaatactggacccttcaatcatcaagataatttaaaaagtgatgaaaaagagttaataaaattacgcaaagaagttcaacatttaaaaatggaacatgatgttttaaagcaaattttaaagttgatttag

SEQ ID NO: 407029 - DNA, 153 bp, Staphylococcus aureus
atggtaccagaagaaaaaggttctattactttgtcaaaagaagcagctatcatatttgcaatcgcaaaattcaaaccatttaagaacagaattaaaaataacccacaaaaaacaaatccatttcttaaattacatgaaaacaaaaaatcttaa

SEQ ID NO: 407030 - DNA, 360 bp, Staphylococcus aureus
gtgaatatcatctcaacaattttaatcatatttgtggcattagagtttttctatattatgtaccttgaaacgattgctacaacttccaaaaagactagcgagacatttaatataagcgtcgataaattgaaagacaaaaatattaacctacttttgaagaaccaaggcgtatataacggtttaatcggagttttgctaatatacggtttgtttatcagcagtaatccaaaagaaatatgcgcagctattttagtgtatatcattggcgttgctatttatggtggcctttcaagcaatattagtatctttttcaaacaaggcacattgccagtattggcactcatatcaatgctttggtaa

SEQ ID NO: 407031 - DNA, 846 bp, Staphylococcus aureus
atgaatattatgttaacaggtgctacaggtcatttaggcacacatattacaaatcaagccattgcaaatcacatagatcattttcacattggtgttagaaatgttgagaaagttccagaagattggcgcggaaaagttcctgttcgacaattagattattttaatcaagaaagcatggtagaagcatttaaaggaatggataccgttgtgtttattccaagtattatccatccatcattcaaacgtattcctgaagtggaaaatttagtatatgcggcaaagcagagcggcgttgctcatatcattttcataggttattacgcagatcagcataataatccattccatatgagtccttattttggttatgcagcacgtctattggcaacaagtggcattgactatacgtatgtaagaatggcaatgtacatggatccacttaaaccatatttaccagaattgatgaatatgcataaactgatttatccagctggcgatggtcgtattaattatattactagaaatgatattgctagaggtgtcattgctattattaaaaatccagatacttggggcaaacgctacttattatcaggctacagttatgatatgaaagaacttgctgcaattttatctgaggcatcaggcacagaaattaaatatgagcccgtttcattagagacatttgcagaaatgtatgatgaacctaaaggctttggtgcattattggcatcaatgtacgacgcaggagcaagaggactattagaccaagaatccaatgatttccaacaattagtcaatgatcaaccacagacactgcaatcatttttacaagaaaatatttaa

SEQ ID NO: 407032 - DNA, 681 bp, Staphylococcus aureus
atgaaatttaaagcgatagcaaaagcaagtttagcattgggaatgttagcaacaggtgtaattacatcgaatgtacaatcagtacaagcgaaagcagaagttaaacaacaaagtgaatcagagttaaaacactattataataaaccaattttagagcgtaaaaatgtgactggatttaaatatactgatgagggtaaacactatttagaagtcacagtagggcaacagcattctcgaatcactttacttggatctgataaagataaatttaaagacggagaaaactcaaatatagatgtgtttatccttagagaaggtgacagtagacaagcaacaaattactcaattggtggcgttacaaaatcaaatagtgtgcagtatattgattatatcaatacgccaattttagaaatcaagaaagataatgaagatgtacttaaagatttttactacatttcaaaagaagacatctcattaaaagaacttgattatagattaagagaacgtgcgattaaacaacacggcttgtattcaaatggtcttaaacaaggtcaaattacaattacaatgaatgatggcacaacacatacaatcgatttaagtcaaaaacttgaaaaagaacgtatgggtgagtcaatcgacggcactaagattaataaaattctagtagaaatgaaataa

SEQ ID NO: 407033 - DNA, 696 bp, Staphylococcus aureus
atgaaaatgaaaaatattgcaaaaataagtttgttattaggaatattagcaacaggtgtaaacactacaacggaaaaaccagttcatgccgaaaagaaacctattgtaataagtgaaaatagcaaaaaattaaaagcttattataatcaacctagtattgaatataaaaatgtgacaggttatatcagtttcattcaaccaagtattaaatttatgaatatcatagatggtaattctgttaataatattgctttaattggcaaagataagcaacattatcatacgggtgtacatcgtaatcttaatatattttacgttaatgaggataagagatttgaaggtgcaaagtactctattgggggtatcacgagtgcaaacgataaagctgtcgacctaatagcagaagcaagagttattaaagaagatcatactggtgaatatgattatgactttttcccatttaaaatagataaagaagcgatgtcattgaaagagattgattttaaattaagaaaataccttattgataattatggtctttacggtgaaatgagtacaggaaaaattacagtcaaaaagaaatactatggaaagtatacatttgaattggataaaaagttacaagaagaccgtatgtccgatgttatcaatgtcacagatattgatagaattgaaatcaaagttataaaagcataa

SEQ ID NO: 407034 - DNA, 1059 bp, Staphylococcus aureus
atgaaaatgagaacaattgctaaaaccagtttagcactagggcttttaacaacaggcgcaattacagtaacgacgcaatcggtcaaagcagaaaaaatacaatcaactaaagttgacaaagtaccaacgcttaaagcagagcgattagcaatgataaacataacagcaggtgcaaattcagcgacaacacaagcagctaacacaagacaagaacgcacgcctaaactcgaaaaggcaccaaatactaatgaggaaaaaacctcagcttccaaaatagaaaaaatatcacaacctaaacaagaagagcagaaaacgcttaatatatcagcaacgccagcgcctaaacaagaacaatcacaaacgacaaccgaatccacaacgccgaaaactaaagtgacaacacctccatcaacaaacacgccacaaccaatgcaatctactaaatcagacacaccacaatctccaaccataaaacaagcacaaacagatatgactcctaaatatgaagatttaagagcgtattatacaaaaccgagttttgaatttgaaaagcagtttggatttatgctcaaaccatggacgacggttaggtttatgaatgttattccaaataggttcatctataaaatagctttagttggaaaagatgagaaaaaatataaagatggaccttacgataatatcgatgtatttatcgttttagaagacaataaatatcaattgaaaaaatattctgtcggtggcatcacgaagactaatagtaaaaaagttaatcacaaagtagaattaagcattactaaaaaagataatcaaggtatgatttcacgcgatgtttcagaatacatgattactaaggaagagatttccttgaaagagcttgattttaaattgagaaaacaacttattgaaaaacataatctttacggtaacatgggttcaggaacaatcgttattaaaatgaaaaacggtgggaaatatacgtttgaattacacaaaaaactgcaagagcatcgtatggcaggcactaatattgataacattgaagtgaatataaaataa

SEQ ID NO: 407035 - DNA, 978 bp, Staphylococcus aureus
atgaaaataacaacgattgctaaaacaagtttagcactaggccttttaacaacaggtgtaatcacaacgacaacgcaagcagcaaacgcgacaacaccatcttccactaaagtggaagcaccacaatcaacaccgccctcaactaaaatagaagcaccgcaatcaaaaccaaacgcgacaacaccgccctcaactaaagtagaagcaccgcaatcaaaaccaaacgcgacaacaccgccctcaactaaagtagaagcaccgcaacaaacagcaaatgcgacaacaccgccttcaactaaagtgacaacacctccatcaacaaacacgccacaaccaatgcaatctactaaatcagacacaccacaatcgccaaccacaaaacaagtaccaacagaaataaatcctaaatttaaagatttaagagcgtattatacgaaaccaagtttagaatttaaaaatgagattggtattattttaaaaaaatggacgacaataagatttatgaatgttgtcccagattatttcatatataaaattgctttagttggtaaagatgataaaaaatatggtgaaggagtacataggaatgtcgatgtatttgtcgttttagaagaaaataattacaatctggaaaaatattctgtcggtggtatcacaaagagtaatagtaaaaaagttgatcacaaagcaggagtaagaattactaaggaagataataaaggtacaatctctcatgatgtttcagaattcaagattactaaagaacagatttccttgaaagaacttgattttaaattgagaaaacaacttattgaaaaaaataatctgtacggtaacgttggttcaggtaaaattgttattaaaatgaaaaacggtggaaagtacacgtttgaattgcacaaaaaattacaagaaaatcgcatggcagatgtcatagatggcactaatattgataacattgaagtgaatataaaataa

SEQ ID NO: 407036 - DNA, 705 bp, Staphylococcus aureus
atgaaaatgacagcaattgcgaaagcaagtttagcattaggtattttagcaacaggaacaataacgtcattgcatcaaactgtaaatgcgagtgaacataaagcaaaatatgaaaatgtgacaaaagatatctttgacttaagagattactatagtggcgcaagtaaggaacttaaaaatgttactggttatcgttatagcaaaggtggcaagcattaccttatctttgataaaaatagaaaattcacaagagtacagatatttggtaaagatattgaaagatttaaagcacgtaaaaatccgggattagacatatttgttgttaaagaagcggaaaaccgtaatggcacagtgttttcatatggtggtgtcactaagaaaaatcaagacgcttattatgattatataaacgcaccaagatttcaaatcaagagagatgaaggtgacggtattgctacgtacggtagagtacactacatttataaagaagagatttcacttaaagaactcgactttaaattgagacagtatttaattcaaaattttgatctgtataaaaagtttcctaaagatagtaagataaaagtgataatgaaagatggcggctattatacgtttgaacttaataaaaaattacaaacaaatcgcatgagtgacgtcattgacggtagaaatattgaaaaaatagaagccaacattagataa

SEQ ID NO: 407037 - DNA, 696 bp, Staphylococcus aureus
atgaaattaaaaacgttagctaaagcaacattagtattgggattgttagctactggtgtaataacaacagaaagtcaaacagtaaaagcggcagaatcaactcaaggtcaacacaattataaatcgttaaaatactactatagcaagccaagtatagagttaaaaaatcttgatggtttgtatagacagaaagtgacagataaaggagtatatgtttggaaggatcgaaaagattattttgttggcttgcttggtaaagatattgaaaaataccctcaaggtgagcatgataagcaagatgcatttttagtcatcgaggaggaaactgttaatggaagacaatattcaattggtggtttaagtaagacaaatagtaaagaatttagtaaagaagtcgatgttaaagtaacaagaaaaattgatgaatcatcggaaaagtctaaagatagtaaatttaaaattactaaagaagaaatctcgttaaaagagttggactttaaattaagaaaaaaattgatggaagaagaaaaattatatggtgctgttaataatagaaaaggtaaaattgtagttaaaatggaagatgataagttttatactttcgaacttacaaaaaaactacaaccgcatcgcatgggtgacacgatagatggtaccaaaatcaaagaaattaatgttgagctagaatataaataa

SEQ ID NO: 407038 - DNA, 696 bp, Staphylococcus aureus
gtgaaattaaaaacgttagctaaagcaacattggcattaggcttattaactactggtgtgattacatcagaaggccaagcagttcaagcaaaagaaaagcaagagagagtacaacatttatatgatattaaagacttacatcgatactactcatcagaaagttttgaattcagtaatattagtggtaaagttgaaaattataacggttctaacgttgtacgctttaaccaagaaaatcaaaatcaccaattattcttattaggtaaagataaagagaaatataaagaaggcattgaaggcaaagatgtctttgtggtaaaagaattaattgatccaaacggtagattatctactgttggtggtgtgactaagaaaaataacaaatcttctgaaactaatacacatttatttgttaataaagtgtatggcggaaatttagatgcatcaattgactcattttcaattaataaagaagaagtttcactgaaagaacttgatttcaaaattagacaacatttagttaaaaattatggtttatataaaggtacgactaaatacggtaagatcactatcaatttgaaagatggagaaaagcaagaaattgatttaggtgataaattgcaattcgagcgcatgggtgatgtgttgaatagtaaggatattaataagattgaagtgactttgaaacaaatttaa

SEQ ID NO: 407039 - DNA, 699 bp, Staphylococcus aureus
atgaaatttacagtgatagctaaagcgatatttatattaggaatattaacaacaagtgtaatgataacagaaaatcaatcggttaatgcaaaaggaaagtatgaaaaaatgaaccgtttatatgatacaaacaagttacatcaatactattcaggacctagttatgagttaacaaatgttagtggccaaagtcaaggttattatgactctaacgttttgctttttaaccaacaaaatcaaaagttccaagtgtttttattgggaaaagatgaaaataaatacaaagaaaaaacacatggtttagatgtctttgcggtaccagaattagtagatttagatggaagaatatttagtgttagtggtgtaacaaagaaaaacgtaaaatcaatatttgagtctctaagaacgccgaacttactagttaaaaaaatagacgataaagacggtttttctattgatgaatttttctttattcaaaaggaagaagtgtcattgaaggaacttgattttaaaataagaaaactgttgattaaaaaatacaaactgtatgaagggtcagctgataaaggtagaattgttattaatatgaaagatgaaaataagtatgaaattgatttaagtgataaattagatttcgagcgtatggcagatgtcattaatagtgaacaaattaaaaacatcgaagtgaatttgaaataa

SEQ ID NO: 407040 - DNA, 699 bp, Staphylococcus aureus
atgaaattaacaacgatagctaaagcaacattagcattaggaatattaactacaggtgtgtttacagcagaaagtcaaactggtcacgcgaaagtagaacttgatgagacacaacgcaaatattatatcaatatgctacatcaatactattctgaagaaagttttgaaccaacaaacattagtgttaaaagcgaagattactatggctctaacgttttaaactttaaacaacgaaataaagcttttaaagtatttttacttggtgacgataaaaataaatataaagaaaaaacacatggccttgatgtctttgcagtacctgaattaatagatataaaaggtggcatatatagcgttggcggtataacaaagaaaaatgtgagatcagtgtttggatttgtaagtaatccaagtctacaagttaaaaaagttgatgctaaaaatggcttttcgataaacgagttgttttttattcaaaaggaagaagtatcattgaaggaactggactttaaaataagaaaactcttaatcgaaaaatatagattgtataaaggaacgtctgataaaggtagaattgttatcaatatgaaagacgaaaagaagcatgaaattgatttaagtgaaaaattaagttttgaacgtatgtttgatgtaatggatagtaagcaaattaaaaatattgaagtgaatttgaattag

SEQ ID NO: 407041 - DNA, 684 bp, Staphylococcus aureus
atgaaatttacagcattagcaaaagcgacattagctttaggaattttaacaacaggaactttaacaacagaagttcattcaggtcatgcaaaacaaaatcaaaagtcagtaaataaacatgacaaggaagcattataccgatactacactggaaagactatggaaatgaaaaatattagtgctttgaaacatggtaaaaacaacttacgttttaagtttagaggtattaagattcaagttttactgcctggaaatgataaaagtaaatttcaacagcgtagttatgaggggttagatgttttctttgttcaagaaaaaagagataagcacgatatattttatactgttggtggtgtaatacagaataataaaacatctggagttgtcagtgcaccaatattaaatatttcaaaagaaaagggtgaagatgcttttgtgaaaggttacccttattacattaaaaaagaaaaaataacactaaaagaactggattataagttgagaaagcatctaattgaaaaatacggactttataaaacaatctcaaaagatggtagggtcaaaattagcttgaaagatggcagtttttataaccttgatttaagatctaaattaaaatttaaatatatgggggaagtcatagaaagcaaacaaattaaagatattgaagttaacttaaagtaa

SEQ ID NO: 407042 - DNA, 1488 bp, Staphylococcus aureus
atgtcagaagaaatgaatgaccaaatgttggttcgacgtcaaaaattacaagaattatatgatcttggtatagacccgtttggttctaaatttgaccgttcaggtttatctagtgatttgaaagaagagtgggaccagtattctaaagaagaattggtagaaaaagaagcggatagtcatgtcgctatagctggacgattaatgactaagcgtggtaaaggtaaagcaggatttgcacacgttcaggacttagctggacaaattcaaatttacgttcgtaaagatcaagttggcgatgacgaatttgatttatggaaaaatgctgatttaggcgatatcgttggtgttgaaggtgtaatgttcaaaacaaatactggcgaattatcggttaaagcgaagaaattcacgctactaactaaatcattgcgaccattaccggataaattccacggtttacaggatattgaacagagatatcgtcaaagatatttagatttaattacgaacgaagatagcactcgtacatttattaatcgtagtaaaatcattcaagaaatgcgtaattatttaaataataaaggtttcttggaagtagaaacacctatgatgcaccaaattgctggtggagcagctgctagaccatttgtaacacatcataatgcattagatgcaacgttatacatgcgtattgctattgagttgcatttaaaacgtttaattgtcggtggacttgaaaaagtatatgaaattggtagagtattccgtaatgaaggtgtatcaactagacataaccctgaattcacaatgattgaattatatgaagcatatgcagattatcatgacattatggatttaacagaatctatggtgagacatattgccaatgaagtgttaggttctgcaaaagtacaatacaatggggaaacgattgatttagaatctgcttggactcgtttgcatattgttgatgctgtaaaagaagctactggtgtagatttttatgaagttaaaagtgatgaagaagctaaagctttagctaaagaacatggtattgaaattaaagatacaatgaaatatggtcatattttaaatgaattctttgagcaaaaagttgaagaaacacttattcagccaacgtttatctatggtcatccgactgaaatttcacctttagcgaagaaaaatcctgaagatcctagatttactgatcgtttcgaattgttcattgtaggtagagagcatgcaaatgcatttactgaattaaatgatcctattgatcaaaaaggtcgttttgaagcgcaacttgttgaaaaagcgcaaggtaatgatgaagcgcatgaaatggatgaagattacattgaagcgttagaatatggtatgcctccgacaggtggtcttggtatcggtattgacagattggttatgttattaactgactctccatcaatcagagacgtattattattcccttatatgagacaaaaataa

SEQ ID NO: 407043 - DNA, 477 bp, Staphylococcus aureus
atgattcaagcatacttaggattaggtagtaatattggtgatagagaaagccagttaaacgatgctataaagattttgaatgaatatgatggtattaacgtatctaatatttctccgatttatgaaacagcaccagttgggtatactgagcaacctaactttttaaatttgtgtgttgaaattcaaacaacactcacagtattacaactgttggaatgttgtttgaagacagaagaatgtttacaccgtattagaaaggaacgatggggtcctagaactttagatgtggatattttgttgtatggagaagaaatgatagatttaccaaaactgtcggtgccacatccgagaatgaatgaacgtgcatttgttttaatcccattaaatgatatagcagcaaatgtcgtagaaccacgttcgaaattgaaagtgaaagatttagtttttgtcgatgacagtgtaaagagatataaataa

SEQ ID NO: 407044 - DNA, 366 bp, Staphylococcus aureus
atgcaagacacaatctttcttaaaggtatgcgcttttatggatatcatggtgctttatcagctgaaaatgaaatagggcaaattttcaaagtggatgtaactttgaaagtagacttagctgaagctgggcgtactgataatgttattgatacagttcattatggtgaagtgttcgaagaggttaaatcaattatggaaggtaaggccgttaatttacttgagcatctagctgaacgtattgcaaatcgtataaattcacaatataatcgtgtaatggaaacgaaagtgagaatcactaaagaaaacccaccgattccgggtcattatgatggagtaggtatcgaaatagtgagggagaataaatga

SEQ ID NO: 407045 - DNA, 804 bp, Staphylococcus aureus
atgactaaaacaaaaattatgggcatattaaacgtcacacctgattcattctcagatggtggaaaatttaataatgttgaatcagctataaatagagtgaaagccatgatagatgaaggtgctgacattatagatgttggaggtgtttcaacgagacccggtcatgaaatggtttcattagaagaagagatgaacagagtattacctgttgttgaagctattgtcggttttgatgtaaaaatttcagtcgatacatttcgaagtgaggttgctgaagcatgtttaaaattaggcgttgatatgattaatgatcaatgggcgggtctgtatgatcatcgtatgttccaaattgtagctaaatatgacgcggaaattattttaatgcataatggaaatggtaatcgtgatgaaccggttgtcgaagaaatgttaacatctttgttagcacaagcacatcaagctaaaatagctggtataccttcaaataaaatttggctagatccaggtataggtttcgctaaaactagaaatgaagaagccgaagttatggcaagactggatgaacttgttgcaacagaatatccagttttattagcgacaagccggaaacgtttcactaaagagatgatgggttatgatacaacaccggttgaaagagatgaagtaactgcagctacgactgcatatggtattatgaaaggcgttagagcagtacgcgttcataatgtcgagttgaatgctaaattagctaaaggtatagattttttaaaggagaatgaaaatgcaagacacaatctttcttaa

SEQ ID NO: 407046 - DNA, 933 bp, Staphylococcus aureus
atggcacaaaaaccagtagataatattactcaaattattggcggtacaccggtagtcaaattgagaaatgtagtagatgacaatgcagcagatgtttatgtaaaattggaatatcaaaatccaggtggttctgtaaaggatagaattgctttagcaatgattgaaaaagcagagcgagaaggcaaaattaaacctggcgatacaattgtagaaccaacaagtggtaatacaggtatcggtttagcatttgtatgtgctgctaaaggatataaagcagtatttactatgcccgaaacaatgagccaagagcgtcgtaatttattaaaagcatacggtgcggaattagttttaacgcctggatcagaagcgatgaaaggtgcaattaaaaaagctaaagaattgaaagaagaacatggttacttcgagccacaacaatttgaaaaccctgcgaaccctgaagttcatgagttaactacaggtcctgagttattacaacaatttgaagggaaaactatcgatgcgttcctagctggtgttggtactggtggtacgttatctggtgtaggtaaagttctgaaaaaagaatatcctaacatcgaaattgttgctatagagcctgaggcttctccagtattgagcggtggtgagccaggtccacataaattacaaggtttaggtgctggatttattccaggcactttgaatacagaaatctatgacagtattattaaagtaggaaatgatacagcgatggaaatgtctcgtcgagttgctaaagaggaaggtattttagcaggtatttcatcaggtgctgcgatttatgctgccattcaaaaagcaaaagaattaggaaaaggtaaaacagtagtaacagtattgccgagtaatggtgaacgctacttatcaacacctttatattcattcgatgactaa

SEQ ID NO: 407047 - DNA, 882 bp, Staphylococcus aureus
atgacacacgattatattgttaaagcattagcatttgatggagagattagggcttatgctgctttgacaactgaaactgttcaagaagcacaaacgagacattatacatggccgacagcatctgctgcaatgggaagaacaatgacagcaacagctatgatgggcgcaatgttgaaaggtgatcaaaaattaactgtcactgtagatggccaaggacctattggacgaattattgccgatgcaaatgctaaaggcgaggtgcgtgcttatgtagaccatccacaaactcattttccattaaatgagcaaggtaaacttgatgtaagacgagcggtagggacaaatggatctattatggttgttaaagacgttggaatgaaagactatttctctggagcaagtccaattgtttcaggagaacttggtgaagattttacttattattatgctacaagtgaacaaacaccttcatcggtaggtcttggtgtattggtaaatcctgataatacgattaaagcagcaggaggatttatcattcaagttatgccaggtgccaaagatgaaacaatttcaaaattagaaaaagcaattagtgaaatgacaccagtttctaaattaattgaacaaggattaacgccagaaggattactaaacgaaatcttaggtgaagaccatgtgcaaattttagagaaaatgcctgttcaatttgaatgtaattgtagtcatgagaaatttttaaatgctattaaaggattgggcgaggctgagattcaaaatatgattaaagaagatcatggtgctgaagcagtatgtcatttctgtggaaataaatataaatatactgaagaagaattaaacgtgttgctagaaagtttagcgtaa

SEQ ID NO: 407048 - DNA, 2094 bp, Staphylococcus aureus
atgcagaaagcttttcgcaatgtgctagttatcgtaataataggcgttattatttttggtctattttcatatttaaacggtaatggaaatatgccgaaacagcttacatataatcaatttactgagaagttggaaaaaggtgaccttaaaactttagaaatccaaccacaacaaaatgtctatatggtaagtggtaaaacgaaaaatgatgaagactattcatcaactattttatataacaacgaaaaagaattacaaaaaattactgatgctgctaaaaagcaaaacggtgtaaaattaacgattaaagaagaagaaaaacaaagtgtctttgtgagtatactttcaacattaattccagttgtagtcatagcgttattatttattttcttcctaagccaagcacaaggtggcggtagtggcggtcgtatgatgaactttggtaaatctaaagcaaaaatgtacgataataataaacgtcgtgttcgtttctctgatgtagcaggggcagatgaagaaaaacaagaattaattgaaattgttgatttcttgaaagataataaaaaattcaaagaaatgggatctaggattcctaaaggtgtcttacttgttggacctccaggtactggtaaaacattacttgctagagcggttgcaggtgaagctggcgcaccattcttctctattagtggttcagactttgtagagatgtttgttggtgttggtgcgagccgtgttcgtgacttattcgataatgctaagaaaaacgcgccttgtatcatctttatcgatgagattgatgctgttggtcgtcaacgtggtgcaggtgttggtggcggtcatgatgaacgtgaacaaaccctaaaccaattattagttgaaatggatggtttcggtgaaaatgaaggtatcattatgatagctgctacaaaccgtcctgatatccttgacccagccttattacgtccaggtcgttttgatagacaaattcaagttggtcgtccagatgtgaaaggccgtgaagcaattcttcatgttcatgctaaaaacaaaccacttgatgaaacggttgatttaaaagcaatttcacaacgtacacctggtttctcaggtgctgatttagagaacttattaaatgaagcatctttaattgctgtacgtgaaggtaaaaagaaaattgacatgagagatatcgaagaggcaacggatagagttatagccggacctgctaagaaatctcgagttatttctaagaaagaacgtaatattgttgctcatcacgaagctggtcatacaattatcggtatggtacttgatgaggcagaagtagtgcataaagttactattgttccacgtggacaagcaggtggttatgcaatgatgctacctaaacaagatcgtttcttaatgactgaacaagagttattagataaaatctgtggtttacttggtggacgtgtatcagaagatattaactttaacgaagtatcaacaggtgcttcaaatgacttcgaacgtgcaacacaaatcgcacgctcaatggttacgcaatatggtatgagtaaaaaattaggaccattacagttcggtcatagcaatggtcaagtattcttaggtaaagatatgcaaggtgagcctaattattcaagccaaatcgcatatgaaattgataaagaagttcaacgaatcgttaaagaacaatacgaacgttgtaaacaaattttattagagcacaaagaacaattaattttaattgctgaaacattattaacagaagaaacattagttgctgaacaaattcaatcattattctacgaaggtaaattacctgaaattgattatgatgcagctaaagttgttaaagatgaagattctgaatttaatgatggtaaattcggtaaatcttatgaagagattcgtaaagagcaattagaagatggacaacgtgacgaaagtgaagatcgtaaagaagaaaaagatattgctgaggataaaaaagaagctgataaatctgatgaaaaagatgaaccagcacatcaacaagccccaaatatcgaaaaaccttacgatccaaatcacccagacaataaataa

SEQ ID NO: 407049 - DNA, 540 bp, Staphylococcus aureus
atgcataatgatttgaaagaagtattgttaactgaagaagatattcaaaatatctgtaaggaattgggagcacaattaacaaaggattatcaaggtaaaccattagtatgcgtgggtatcttaaaaggctcagcaatgtttatgtcagatttaattaaacgaattgatacccatttatcaattgatttcatggatgtttctagttatcacggaggcactgagtcaactggtgaagttcaaatcattaaagatttaggttcttctattgaaaataaagacgtattaattattgaagatatcttagagactggtactacacttaagtcaattactgaattattacaatctagaaaagttaattcattagaaatagttactttattagataaaccaaaccgtcgtaaagcggacattgaagctaagtatgtaggtaaaaaaataccagatgaatttgttgttggttacggtttagattatcgtgaattataccgaaacttaccatatatcggtacgttaaaacctgaagtgtattcaaattaa

SEQ ID NO: 407050 - DNA, 1296 bp, Staphylococcus aureus
atgcagttaaatagtaatggttggcatgttgatgaccatattgttgtcgctgtttctacaggtattgatagtatgtgtttattgtatcaactactaaatgattataaagatagttatagaaaactaacatgcttacatgtcaatcatggcgttaggtcagcttcaattgaggaagccagatttttagaagcatactgcgaacgtcatcacatcgatttacatatcaaaaagttagatttgtcgcatagtctcgaccgaaataacagcattcagaatgaagctcgaattaaacgttacgaatggtttgatgaaatgatgaatgtattagaagcggatgtattgctaacggcgcatcatttggacgatcaattagaaactattatgtatcgtatttttaatgggaaatcaacacgtaataaactaggatttgatgagttatcgaagcgaaaaggttatcagatttatcgaccacttttagctgtctctaaaaaagaaataaaacaattccaagagagatatcatattccatattttgaagatgaatctaataaagataacaaatatgttagaaatgatattcgtaatagaattattccagctattgatgaaaataatcaacttaaagtatcgcatttattaaaattaaaacaatggcatgatgaacaatatgatattttgcaatattcagctaaacaatttattcaagaatttgtgaagtttgatgaacagtcaaaatatttagaggtttctagacaagcttttaataacttaccaaactcattaaagatggttgtgttggactgcctattatcaaagtattatgagttgtttaatattagtgctaaaacatacgaagagtggtttaaacaatttagtagtaagaaagcacaattcagtattaatctcacggataaatggataattcaaatcgcatatggtaaattaataataatggctaaaaataatggcgatacatattttagagttcaaacaattaaaaagccaggtaattatatttttaacaaatatcgattagagatacattctaatttaccaaaatgtttatttccgcttacagtgagaacacgacaaagtggcgatacatttaaactgaatgggcgcgatggttataagaaagtgaatcgcctgtttatagattgtaaagtgccacagtgggttcgggatcaaatgccaatcgtattggataaacaacagcgcattattgcggtaggagatttatatcaacaacaaacaataaaaaaatggattataattagtaaaaatggagatgaatag

SEQ ID NO: 407051 - DNA, 402 bp, Staphylococcus aureus
atgtcaatcgaagttggaaataagcttaaaggtaaagtcactggtattaaaaagtttggtgcattcgtagaattacctgaaggaaaaagtggtttagttcacattagtgaagtcgcagataattatgttgaaaacgtagaagagcacctttctgttggtgatgaagtagacgtaaaagtattatctattgctgatgatggaaaaattagtctttcaattaagaaagctaaagaccgtccacgtagacaacatacgagtaaaccaagtcatcaaaaaccagtgcaaaaagccgaagattttgaaaagaaattaagcaatttcttaaaagatagtgaagataaattaacttcaatcaaacgtcaaacagaatctagacgcggtggcaaaggttcaagacgttaa

SEQ ID NO: 407052 - DNA, 393 bp, Staphylococcus aureus
atgaaaaataaagtagaacatatagaaaatcagtacacgtcgcaagagaacaagaaaaaacaacgtcaaaaaatgaaaatgcgtgttgttcgtaggcgtattacagtatttgcgggcgtattacttgcgataattgttgttttatcaatcttgcttgttgtccaaaaacatcgcaatgatattgatgcacaggagcgaaaagcgaaagaagcacagtttcaaaagcaacaaaatgaagaaattgcgttaaaagaaaagttgaataatctgaatgacaaagattacattgaaaaaattgcgcgtgatgattattacttaagcaacaaaggtgaagtgatttttaggttgccagaagacaaagattcgtctagctcaaaatcttcgaaaaaataa

SEQ ID NO: 407053 - DNA, 264 bp, Staphylococcus aureus
atgagattagataaatatttaaaagtatcacggttaataaagcgacgtacgctagcaaaagaagtaagtgatcaaggtagaattacaataaatggtaatgttgctaaagctggatcggatgttaaagttgaagatgtgctgacgattcgctttggtcaaaaattagtaacagttaaagtaactgcattaaatgaacatgcatctaaagataacgcgaagggtatgtatgaaatcattgaagagcgtcgacttgaagaagcgtaa

SEQ ID NO: 407054 - DNA, 1194 bp, Staphylococcus aureus
atggcacataccattacgattgttggcttaggaaactatggcattgatgatttgccgctagggatatataaatttttaaagacacaagataaagtttatgcaagaacgttagatcatccagttatagaatcattgcaagatgaattaacatttcagagttttgaccatgtttatgaagcacataaccaatttgaagatgtctatattgatattgtggcgcaattggttgaagctgctaatgaaaaagatattgtctatgcggttccgggtcatcctagagttgctgagacaactacagtgaaattactggctttagcaaaggacaatactgatatagatgtgaaagttttaggtgggaaaagctttattgatgatgtgtttgaagcagttaatgtagatccaaatgatggcttcacactgttagatgcgacatcattacaagaagtaacacttaatgttagaacgcatacattgattacgcaagtttatagtgcaatggttgctgctaatttgaaaatcactttaatggaacgatatcctgatgattaccctgttcaaattgtcactggtgcacgaagcgatggtgcggataacgttgtgacatgcccattatatgaattggatcatgatgaaaatgcattcaataatttgacgagtgtattcgtaccaaaaatcataacatcgacatatttgtatcatgactttgattttgcaacggaagtgattgatactttagttgatgaagataaaggttgtccatgggataaagtgcaaacgcatgaaacgctaaagcgttatttacttgaagaaacatttgaattgttcgaagctattgacaatgaagatgattggcatatgattgaagaactaggagatattttattacaagtgttattgcatactagtattggtaaaaaagaagggtatatcgacattaaagaagtgattacaagtcttaatgctaaaatgattcgtagacacccacacatatttggtgatgccaatgctgaaactatcgatgacttaaaagaaatttggtctaaggcgaaagatgctgaaggtaaacagccaagagttaaatttgaaaaagtatttgcagagcattttttaaatttatatgagaagacgaaggataagtcatttgatgaggccgcgttaaagcagtggctagaaaaaggggagagtaatacatga

SEQ ID NO: 407055 - DNA, 1527 bp, Staphylococcus aureus
atgaagcataaagaagcatttaatggcgttgtcgtgttaactgctgcattaattgtcattaaaattctgagtgctgtatatcgaattccatatcaaaatatattaggcgatacaggtttgtatgcatatcaacaagtgtatccaattgtagcattaggaatgatattatcgatgaatgccattcctagtgcaattacacaaaatatagggaagtatcatagtgacgaagcatatgcaaaagcagtcgcttatatacaattagttggtatattattatttattgctatttttgtgtttgcgaacaatattgcacatatgatgggtgatggccatttaacaccaatgattcaagctgcaagtttaagctttatatttataggtatgcttggcgtgttaagaggttattatcaatctgcaaataatatgacagttccggctatttcccaggttatagaacaagttatacgagtaggtattatcattgttactattgttatttttgtagacagaggttggacgatatatgaagcgggaacaattgctattttagcatcaacgataggttttttaggttcttcaatttatttagtagcgcaccgaccttttaagtttaaaatggtaaataacactgcaaagatcgtttggaaacagttcgcactttcggttttgattttcgctatcagtcaattaatcgtaattttatggcaagtgattgatagtgttactattattaagtcacttcaagcgatacgcgtgccattcgatgttgccataactgaaaaaggagtctatgaccgtggtgcatcatttattcagatgggattgattgtaactacaacatttagttttgcgctcattcctctgttaagtgacgcaatcaaaatgaataatcaggtacttatgaatcgttatgcaaatgcgtcattaaagattacgattttaataagtacagcagcgggaataggattaattaatttattgcctttaatgaacggtgtgttttttaagacgaatgatttaaccttaacgttaagtgtttatatgattacggtcatttgtgtatcgttaattatgatggatatggcattattacaagcgcaacatgctgtgagacctatttttgttggtatgacggcaggattggttattaaatttatacttaatatcattttgattcgtttaagtggcattattggtgcgagcattagtactgttgtatcattaattatattcggtacgattatccatattgctgtcacgagaaaataccacttatatgcgatgagacgattttttatcaatgttgttttaggtatggtatttatgtcgattgttgttcaatgcgtgttaaacatagtgacaacacacggtagaatcactggactcattgaattattatgtgcagcagtattaggtatcattgcattgtttttctatatttttagatttaatgttttgacatataaagagttaacttatttaccatttggttcaaagttgtatcaaattaagaaaggaagacgttga

SEQ ID NO: 407056 - DNA, 3507 bp, Staphylococcus aureus
atgacaatattgacaacgcttataaaagaagataatcattttcaagaccttaatcaggtatttggacaagcaaacacactagtaactggtctttccccgtcagctaaagtgacgatgattgctgaaaaatatgcacaaagtaatcaacagttattattaattaccaataatttataccaagcagataaattagaaacagatttacttcaatttatagatgctgaagaattgtataagtatcctgtgcaagatattatgaccgaagagttttcaacacaaagccctcaactgatgagtgaacgtattagaactttaactgcgttagctcaaggtaagaaagggttatttatcgttcctttaaatggtttgaaaaagtggttaactcctgttgaaatgtggcaaaatcaccaaatgacattgcgtgttggtgaggatatcgatgtggaccaatttcttaacaaattagttaatatggggtacaaacgggaatccgtggtatcgcatattggtgaattctcattgcgaggaggtattatcgatatctttccgctaattggggaaccaatcagaattgagctatttgataccgaaattgattctattcgggattttgatgttgaaacgcagcgttccaaagataatgttgaagaagtcgatatcacaactgcaagtgattatatcattactgaagaagtgatcagccatcttaaagaagagttaaaaactgcatatgaaaatacaagacccaaaatagataaatcagtgcgcaatgatttgaaagaaacgtatgaaagctttaaattattcgaaagtacatactttgatcatcaaatactacgtcgcttagtagcgtttatgtatgaaacaccttcgacaattattgagtatttccaaaaagatgcaatcattgcagttgatgaatttaatcgtattaaagaaactgaagaaagtttaacagtagagtctgattcgtttattagcaatattattgaaagtggtaatggatttataggacaaagttttataaaatatgatgattttgaaacattgattgaaggctatcctgtcacttatttttcattattcgctacaacaatgccgataaaactaaatcatattattaaattttcatgtaaacctgtccaacaattttatgggcaatatgacattatgcgttctgaatttcaacgatatgttaatcaaaactatcatatcgtggttttggtcgaaaccgaaactaaagttgaacgtatgcaagcgatgttaagtgaaatgcatattccatcaataacaaaattgcatcgctcaatgtcatcggggcaagcagtgattattgaaggcagtttatctgaaggatttgaactacctgatatgggattagttgtcattactgagcgtgagctttttaaatcaaaacagaaaaagcaacgaaaacgtacgaaagctatctcaaatgctgaaaaaattaagtcttaccaagatttaaatgtgggagattatattgttcatgtgcatcatggtgttggtagatatttaggtgttgagacgctcgaagtggggcaaacgcatcgtgattatattaaattgcaatataaaggtacggatcaactatttgttccagtagatcaaatggatcaagttcaaaaatatgtagcttcggaagataagacgccaaaattaaataaactcggtggcagtgaatggaaaaaaacaaaagctaaagttcaacaaagtgttgaagatattgctgaagagttgattgatttatataaagaaagagaaatggcagaaggttatcaatatggggaagacacagctgagcaaacaacatttgaattagattttccatatgaacttacgcctgaccaagctaaatctatcgatgaaattaaagatgacatgcaaaaatcgcgtccaatggatcgcttgctatgtggtgatgttggttatggtaaaactgaagttgcagtgagagcagcattcaaagctgtaatggaaggaaagcaggttgcatttttagttcctacaactattttagctcagcaacattatgagacgttaattgagcgtatgcaagattttcctgttgaaattcaattaatgagtcgttttagaacgcctaaagagataaaacaaactaaggaaggacttaaaactggatttgttgacatagttgttggtacacacaaattacttagtaaagatatacagtataaagatttagggctgttgattgtagatgaagaacaacgatttggtgtacgccataaagagcgtattaaaacattaaaacataatgtagatgtactaacattgactgcaaccccaatacctagaacattgcatatgagtatgctaggtgtgcgggatttgtcagtgattgaaacgccgccagaaaatcgtttcccagttcaaacatatgtattagaacagaacatgagttttatcaaagaagctttagaaagagaactatcccgtgatggccaagtgttttatctttataataaagtgcaatccatttatgaaaaacgagaacaactccagatgttaatgccagatgctaacattgcagttgctcatggacaaatgacagagcgcgatttagaagaaacgatgttaagttttatcaataatgaatatgatattttagtaacgacgacgattattgaaacaggtgtcgatgtcccaaatgcaaatactttgatcattgaagatgcagatcgctttggattgagtcagttgtatcaattaagaggtcgtgttggtcgttcaagtcgtattggttatgcatacttcttacatccagcaaataaggtactaactgagactgcagaagatcgattacaagcgattaaagaatttacggagttaggctcaggatttaagattgcgatgcgtgatttgaacattcgtggtgctggtaatttgttaggtaaacaacagcacggctttattgatacagttggatttgatttgtacagtcaaatgttagaagaagctgtaaatgaaaaacgtggtattaaggaaccagaatctgaggtgccagaagtcgaagttgatttaaacttggatgcatatttgccaacagaatatattgcaaatgaacaagctaaaattgaaatttataaaaagctacgaaaaactgaaacatttgatcaaattatcgacattaaagatgaattaattgatcgtttcaatgattatcctgttgaagtagcacgtttgcttgatatagtggaaataaaagtacacgcattacattcaggtatcacgttgattaaagataaagggaaaataattgatattcatttatctgtaaaagccactgaaaatattgatggcgaagtgctgttcaaagcaacacaacctttaggtagaacaatgaaggttggtgttcaaaataatgcaatgacaattactttaacgaaacaaaatcaatggcttgatagtttgaagtttttagttaagtgcattgaagaaagtatgagaatcagtgatgaagcataa

SEQ ID NO: 407057 - DNA, 573 bp, Staphylococcus aureus
atgaaatgtattgtaggtctaggtaatataggtaaacgttttgaacttacaagacataatatcggctttgaagtcgttgattatattttagagaaaaataatttttcattagataaacaaaattttaaaggtgcatatacaattgaacgaatgaacggcgataaagtgttatttatcgaaccaatgacaatgatgaatttgtcaggtgaagcagttgcaccgattatggattattacaatgttaatccagaagatttaattgtcttatatgatgatttagatttagaacaaggacaagttcgcttaagacaaaaaggaagtgcgggcggtcacaatggtatgaaatcaattattaaaatgcttggtacagaccaatttaaacgtattcgtattggtgtgggaagaccaacgaatggtatgacggtacctgattatgttttacaacgcttttcaaatgatgaaatggtaacgatggaaaaagttatcgaacacgcagcacgcgcaattgaaaagtttgttgaaacatcacgatttgaccatgttatgaatgaatttaatggtgaagtgaaataa

SEQ ID NO: 407058 - DNA, 654 bp, Staphylococcus aureus
atggcttcattaaagtcaatcatccgtcaaggtaaacaaacacgttcagatcttaaacaattaagaaaatctggtaaagtaccagcagtagtatacggttacggtactaaaaacgtgtcagttaaagttgatgaagtagaattcatcaaagttatccgtgaagtaggtcgtaacggtgttatcgaattaggcgttggttctaaaactatcaaagttatggttgcagactaccaattcgatccacttaaaaaccaaattactcacattgacttcttagcaatcaatatgagtgaagaacgtactgttgaagtaccagttcaattagttggtgaagcagtaggcgctaaagaaggcggcgtagttgaacaaccattattcaacttagaagtaactgctactccagacaatattccagaagcaatcgaagtagacattactgaattaaacattaacgacagcttaactgttgctgatgttaaagtaactggcgacttcaaaatcgaaaacgattcagctgaatcagtagtaacagtagttgctccaactgaagaaccaactgaagaagaaatcgaagctatggaaggcgaacaacaaactgaagaaccagaagttgttggcgaaagcaaagaagacgaagaaaaaactgaagagtaa

SEQ ID NO: 407059 - DNA, 966 bp, Staphylococcus aureus
atgttaaataatgaatataagaattcgtcattaaagattttttcattgaaaggaaacgaagcattagcgcaagaagttgctgaccaagtaggaattgaactaggtaaatgttcagttaaacgttttagtgatggagaaattcaaattaatatcgaagagagtattcgtggttgtgacgtatttattattcaaccaacatcatatcctgtgaatctacatttaatggaattattaattatgattgatgcttgtaaacgtgcttctgcagcaacaatcaatattgtagtgccatattatggatatgcaagacaagatagaaaagcccgtagccgtgagccaatcactgctaaattagttgcaaacttaatcgaaacagctggcgcaactcgtatgattgcgttagacttacatgcaccacaaattcaaggattctttgatattccaattgaccacttaatgggtgtgccaattcttgctaaacatttcaaagatgatccgaatattaacccagaagaatgtgtcgttgtttcaccagaccatggcggcgttacacgtgcacgtaaattagctgacattttaaaaactccaattgcaattatagataaacgtcgtcctagaccaaatgttgctgaagtgatgaacattgttggtgagattgaaggacgtacggcaattattattgacgatattattgatacagcaggtacaatcactttagctgcacaagcattaaaagataaaggtgctaaagaagtatatgcttgttgtacacaccctgttttatcaggaccggctaaagaacgtatcgaaaattctgctataaaagaattaatcgtaacaaactcaattcatttagatgaagatcgcaaaccatctaacactaaagaattatctgttgctggtttaatcgcacaagctatcattcgtgtatacgaaagagaatcagttagcgtattatttgactaa

SEQ ID NO: 407060 - DNA, 1353 bp, Staphylococcus aureus
atgcgaagacacgcgataattttggcagcaggtaaaggcacaagaatgaaatctaaaaagtataaagtgctacacgaggttgctgggaaacctatggtcgaacatgtattggaaagtgtgaaaggctctggtgtcgatcaagttgtaaccatcgtaggacatggtgctgaaagtgtaaaaggacatttaggcgagcgttctttatacagttttcaagaggaacaactcggtactgcgcatgcagtgcaaatggcgaaatcacacttagaagacaaggaaggtacgacaatcgttgtatgtggtgacacaccgctcatcacaaaggaaacattagaaacattgattgcgcatcacgaggatgctaatgctcaagcaactgtattatctgcatcgattcaacaaccatatggatacggaagaatcgttcgaaatgcgtcaggtcgtttagaacgcatagttgaagagaaagatgcaacgcaagctgaaaaggatattaatgaaattagttcaggtatttttgcgtttaataataaaacgttgtttgaaaaattaacacaagtgaaaaatgataatgcgcaaggtgaatattacctccctgatgtattgtcgttaattttaaatgatggcggcatcgtagaagtctatcgtaccaatgatgttgaagaaatcatgggtgtaaatgatcgtgtaatgcttagtcaggctgagaaggcgatgcaacgtcgtacgaatcattatcacatgctaaatggtgtgacaatcatcgatcctgacagcacttatattggtccagacgttacaattggtagtgatacagtcattgaaccaggcgtacgaattaatggtcgtacagaaattggcgaagatgttgttattggtcagtactctgaaattaacaatagtacgattgaaaatggtgcatgtattcaacagtctgttgttaatgatgctagcgtaggagcgaatactaaggtcggaccgtttgcgcaattgagaccaggcgcgcaattaggtgcagatgttaaggttggaaattttgtagaaattaaaaaagcagatcttaaagatggtgccaaggtttcacatttaagttatattggcgatgctgtaattggcgaacgtactaatattggttgcggaacgattacagttaactatgatggtgaaaataaatttaaaactatcgtcggcaaagattcatttgtaggttgcaatgttaatttagtagcacctgtaacaattggtgatgatgtattggtggcagctggttccacaatcacagatgacgtaccaaatgacagtttagctgtggcaagagcaagacaaacaacaaaagaaggatataggaaataa

SEQ ID NO: 407061 - DNA, 303 bp, Staphylococcus aureus
atgaaagtgacagatgtaagacttagaaaaatacaaacagatggacgaatgaaagcactcgtttccattacattagatgaagctttcgtaattcatgatttacgtgtaattgaaggaaactctggcttgttcgttgcaatgccaagtaaacgtacaccagatggtgaattccgcgacatcgcgcatcctattaattcagatatgagacaagaaattcaagatgcagtgatgaaagtatatgatgaaacagatgaagtagtaccagataaaaacgctacatcagaagattcagaagaagcttaa

SEQ ID NO: 407062 - DNA, 381 bp, Staphylococcus aureus
atgaaaatcattaacacaacaagattaccggaagcacttggaccatattcgcatgcaacagttgtgaatggtatggtttatacttctggtcagattccattgaatattgatggacatatcgtaagcgctgatgttcaagcacagacaaaacaagttttagaaaatttaaaggttgttttggaagaagcaggatctgatttgaattctgttgcgaaagcgaccattttcattaaagatatgaatgatttccaaaaaataaatgaagtgtatggtcaatattttaatgaacacaagccagcgcgtagttgtgtagaggttgcgcgtttgccaaaagatgtgaaagtagaaattgaattagtaagtaaaattaaggaattataa

SEQ ID NO: 407063 - DNA, 825 bp, Staphylococcus aureus
atgagatataaacgaagcgagagaattgtttttatgacgcaatatttgatgaaccatccgaataaattgattccattaactttttttgtgaaaaaatttaaacaggcgaagtcttcaataagtgaagatgtccaaattataaaaaatacattccaaaaagaaaagttaggtacagtaattactactgctggcgcaagtggtggtgttacgtataaaccaatgatgagtaaagaagaggcgactgaagttgttaatgaggtcattactctattagaagagaaagaacgtttgttacctggcggatatttatttttatcagatttggtaggtaatccatcgctactaaacaaagttggtaagttaattgccagtatttacatggaagaaaaattagatgctgttgttaccattgcgacaaaaggtatttcattggcaaatgcggttgctaatattttaaatttaccagtagtagtgattagaaaagacaacaaggtgactgaaggttctacagtttcaattaattacgtttcaggatcttcaagaaaaatagaaacaatggtactttcgaagagaactttagcagaaaattcaaatgttttagttgtcgatgattttatgagggctggtggctctattaatggtgttatgaatttaatgaatgagtttaaagcccatgtaaaaggggtatcagtacttgtagaatcaaaagaagttaaacaaagattgattgaagattatacttccttagtgaaattatctgatgtagatgaatataatcaagagtttaacgtagaacctggcaacagtttatctaagttttcataa

SEQ ID NO: 407064 - DNA, 849 bp, Staphylococcus aureus
atgatatatgaaacggcaccagccaaaattaattttacgctcgatacactttttaaaagaaatgatggctatcatgagattgaaatgataatgacaacagttgatttaaatgatcgtttaacttttcataaaagaaaagatcgaaagatagttgttgagattgaacataattatgtgccttctaatcataaaaatctcgcatatcgtgcagcgcaactatttattgagcaatatcaactaaagcaaggtgtaacaatttctatcgataaagaaatacctgtttctgctggcttagctggaggttcggctgatgcagcagcaacgttaagaggattgaatcgactttttgatataggggcgagtttggaagaattggctctactaggcagtaaaatcgggacagatattccgttttgtatttataataaaactgcactatgtactggaagaggagagaaaatcgagtttttaaataaaccaccttcagcttgggtgattcttgctaaaccaaacttaggcatatcatcaccagatatatttaagttgattaatttagataagcgttacgacgtacatacgaaaatgtgttatgaggccttagaaaatcgagattatcaacaattatgtcaaagtttgtctaatcgattagagccaatttctgtttcaaaacacccacaaatcgataaattaaaaaataatatgttgaaaagtggtgcagatggtgcgttaatgagtggaagcggacctactgtgtatgggctagcacgaaaagaaagccaagcaaaaaatatttataatgcagttaacggttgttgtaatgaagtgtacttagttagactattaggatag

SEQ ID NO: 407065 - DNA, 264 bp, Staphylococcus aureus
atgccaaaatcaattttggacatcaaaaattctattgattgtcatgtaggaaatcgtattgtactgaaagccaatggaggccgtaagaaaacaataaaacgttctggaattttaaaagaaacatatccgtcagttttcattgttgagttagatcaagacaaacacaactttgagagagtatcttatacatacactgatgtgttaactgaaaatgttcaagtttcatttgaagaggataatcatcacgaatcaattgcacactaa

SEQ ID NO: 407066 - DNA, 894 bp, Staphylococcus aureus
atgttggataataaagatattgcaacaccatcaagaacgcgagcgttgttagataaatatggctttaattttaaaaaaagtttaggacagaactttttgatagatgtgaatatcattaataatatcattgatgcaagtgatattgatgcacaaactggggtgattgaaattggtccaggcatggggtcattgacagaacaattggccagacatgctaaaagagtattggcatttgaaattgatcaacgtttaatacctgtattaaatgatacactatcaccttatgataatgtgacggtgattaatgaagatattttaaaagcgaatattaaagaagctgttgaaaatcatttacaagattgtgaaaaaataatggttgttgcaaacctgccgtactatattacgacgccaattttattaaatttgatgcaacaagatataccaattgatggctacgtggtgatgatgcaaaaagaagtgggcgaacgcttaaatgctgaagtaggttcaaaagcatatggttcgttatcaattgtcgtacaatactatacagagactagtaaagtattaacggtacctaaatctgtatttatgccaccacctaatgttgattcaatagttgtaaaactgatgcagagaactgaaccgttagtaacagtagataacgaggaagcattctttaagttagcaaaagcagcatttgcacaaagaagaaagacaattaacaataactatcaaaattattttaaagatggtaaacaacacaaagaagtgattttacaatggttggaacaagcaggtattgatccaagacgtcgcggtgaaacgctatctattcaagattttgctaaattgtatgaagaaaagaaaaaattccctcaattagaaaattaa

SEQ ID NO: 407067 - DNA, 537 bp, Staphylococcus aureus
atgaaaatcaatgagtttatagttgtagaaggacgagatgatactgagcgtgttaaacgagctgttgaatgtgatacgattgaaacgaatggtagtgccatcaacgaacaaactttagaagtaattagaaatgctcaacaaagtcgaggcgttattgtattaacagatccagatttcccaggagataaaattagaagtacaattactgaacatgtcaaaggtgttaaacatgcgtatattgatagagaaaaagctaaaaataaaaaagggaaaattggtgttgaacatgccgacttaattgatattaaagaagcgttaatgcatgttagttcaccctttgatgaagcttatgaatcaattgataaatctgtgctaatagagttggggttaattgttgggaaagatgcaaggcgccgtagagaaattttaagtagaaaattgcgaatcggccattccaatggtaagcagttattgaaaaagttaaatgcatttggttataccgaagcggatgtaaggcaagctttagaagatgaatga

SEQ ID NO: 407068 - DNA, 774 bp, Staphylococcus aureus
atgttaatcgatacacatgtccatttaaatgatgagcaatacgatgatgatttgagtgaagtgattacacgtgctagagaagcaggtgttgatcgtatgtttgtagttggttttaacaaatcgacaattgaacgcgcgatgaaattaatcgatgagtatgattttttatatggcattatcggttggcatccagttgacgcaattgattttacagaagaacacttggaatggattgaatctttagctcagcatccaaaagtgattggtattggtgaaatgggattagattatcactgggataaatctcctgcagatgttcaaaaggaagtttttagaaagcaaattgctttagctaagcgtttgaagttaccaattatcattcataaccgtgaagcaactcaagactgtatcgatatcttattggaggagcatgctgaagaggtaggcgggattatgcatagctttagtggttctccagaaattgcagatattgtaactaataagctgaatttttatatttcattaggtggacctgtgacatttaaaaatgctaaacagcctaaagaagttgctaagcatgtgtcaatggagcgtttgctagttgaaaccgatgcaccgtatctttcgccacatccgtatagagggaagcgaaatgaaccggcgagagtaactttagtagctgaacaaattgctgaattaaaaggcttatcttatgaagaagtgtgcgaacaaacaactaaaaatgcagagaaattgtttaatttaaattcataa

SEQ ID NO: 407069 - DNA, 1974 bp, Staphylococcus aureus
atggctaaagaaacattttatataacaaccccaatatactatcctagtgggaatttacatataggacatgcatattctacagtggctggagatgttattgcaagatataagagaatgcaaggatatgatgttcgctatttgactggaacggatgaacacggtcaaaaaattcaagaaaaagctcaaaaagctggtaagacagaaattgaatatttggatgagatgattgctggaattaaacaattgtgggctaagcttgaaatttcaaatgatgattttatcagaacaactgaagaacgtcataaacatgtcgttgagcaagtgtttgaacgtttattaaagcaaggtgatatctatttaggtgaatatgaaggttggtattctgttccggatgaaacatactatacagagtcacaattagtagacccacaatacgaaaacggtaaaattattggtggcaaaagtccagattctggacacgaagttgaactagttaaagaagaaagttatttctttaatattagtaaatatacagaccgtttattagagttctatgaccaaaatccagattttatacaaccaccatcaagaaaaaatgaaatgattaacaacttcattaaaccaggacttgctgatttagctgtttctcgtacatcatttaactggggtgtccatgttccgtctaatccaaaacatgttgtttatgtttggattgatgcgttagttaactatatttcagcattaggctatttatcagatgatgagtcactatttaacaaatactggccagcagatattcatttaatggctaaggaaattgtgcgattccactcaattatttggcctattttattgatggcattagacttaccgttacctaaaaaagtctttgcacatggttggattttgatgaaagatggaaaaatgagtaaatctaaaggtaatgtcgtagaccctaatattttaattgatcgctatggtttagatgctacacgttattatctaatgcgtgaattaccatttggttcagatggcgtatttacacctgaagcatttgttgagcgtacaaatttcgatctagcaaatgacttaggtaacttagtaaaccgtacgatttctatggttaataagtactttgatggcgaattaccagcgtatcaaggtccacttcatgaattagatgaagaaatggaagctatggctttagaaacagtgaaaagctacactgaaagcatggaaagtttgcaattttctgtggcattatctacggtatggaagtttattagtagaacgaataagtatattgacgaaacaacgccttgggtattagctaaggacgatagccaaaaagatatgttaggcaatgtaatggctcacttagttgaaaatattcgttatgcagctgtattattacgtccattcttaacacatgcgccgaaagagatttttgaacaattgaacattaacaatcctcaatttatggaatttagtagtttagagcaatatggtgtgcttaatgagtcaattatggttactgggcaacctaaacctattttcccaagattggatagcgaagcggaaattgcatatatcaaagaatcaatgcaaccgcctgctactaaagaggaaaaagaagagattcctagcaaacctcaaattgatattaaagactttgataaagttgaaattaaggcagcaacgattattgatgctgaacatgttaagaagtcagataagcttttaaaaattcaagtagacttagattctgaacaaagacaaattgtatcaggaattgccaaattctatacaccagatgatattattggtaaaaaagtagcagttgttactaacctgaaaccagctaaattaatgggacaaaaatctgaaggtatgatattatctgctgaaaaagatggtgtattaaccttagtaagtttaccaagtgcaattccaaatggtgcagtgattaaataa

SEQ ID NO: 407070 - DNA, 840 bp, Staphylococcus aureus
atggctgtattatatttagtgggcacaccaattggtaatttagcagatattacttatagagcagttgatgtattgaaacgtgttgatatgattgcttgtgaagacactagagtaactagtaaactgtgtaatcattatgatattccaactccattaaagtcatatcacgaacataacaaggataagcagactgcttttatcattgaacagttagaattaggtcttgacgttgcgctcgtatctgatgctggattgcccttaattagtgatcctggatacgaattagtagtggcagccagagaagctaatattaaagtagagactgtgcctggacctaatgctgggctgacggctttgatggctagtggattaccttcatatgtatatacatttttaggatttttgccacgaaaagagaaagaaaaaagtgctgtattagagcaacgtatgcatgaaaatagcacattaattatatacgaatcaccgcatcgtgtgacagatacattaaaaacaattgcaaagatagatgcaacacgacaagtatcactagggcgtgaattaactaagaagttcgaacaaattgtaactgatgatgtaacacaattacaagcattgattcagcaaggcgatgtaccattgaaaggcgaattcgttatcttaattgaaggtgctaaagcgaacaatgagatatcgtggtttgatgatttatctatcaatgagcatgttgatcattatattcaaacttcacagatgaaaccaaaacaagctattaaaaaagttgctgaagaacgacaacttaaaacgaatgaagtatataatatttatcatcaaataagttaa

SEQ ID NO: 407071 - DNA, 249 bp, Staphylococcus aureus
atggatagtcattttgtatatattgtaaaatgtagtgatggaagtttatatacaggatacgctaaagacgttaatgcacgtgttgaaaaacataaccgaggtcaaggagccaaatatacgaaagtaagacgtccggtgcatttagtttatcaagaaatgtatgagacaaagtctgaagcattgaagcgtgaatatgaaattaaaacttataccagacaaaagaaattgcgattaattaaggagcgatag

SEQ ID NO: 407072 - DNA, 726 bp, Staphylococcus aureus
atgttaaaagagaatgaacgatttgatcaactaatcaaagaagattttagtattattcaaaatgatgatgttttttcattttcaacggatgctttgttgttagggcattttacaaaacctagaacaaaagatattgtgttggacttatgttcaggcaatggggtgatacccttgttattgtttgcgaaacatccacgacatatagaaggtgttgagattcaaaaaacacttgtcgatatggcgcgacgcacatttcaattcaatgatgttgatgaatatttaacaatgcatcacatggatttgaaaaacgttactaaagtatttaaaccttcacaatatactttagtaacgtgtaatccgccttattttaaagagaatcagcaacaccaacatcaaaaagaagcacataagatagcgagacatgagattatgtgtacacttgaagattgcatgattgcagcccgtcatttattaaaagaaggtggcaggctaaacatggtacatcgtgcagagagactaatggatgtcttgtttgaaatgagaaaagtgaatattgaacctaagaaagtcgtttttatatatagtaaagtagggaaatcagcacaaacgatagtagtagaaggtcgaaaaggtggaaatcaaggtttagaaatcatgcccccattttatatttataatgaagatggtaattatagcgaagaaatgaaggaagtatattatggatag

SEQ ID NO: 407073 - DNA, 348 bp, Staphylococcus aureus
ttggatcgcaatgaaatatttgaaaaaataatgcgtttagaaatgaatgtcaatcaactttcaaaggaaacttcagaattaaaggcacttgcagttgaattagtagaagaaaatgtagcgcttcaacttgaaaatgataatttgaaaaaggtgttgggcaatgatgaaccaactactattgatactgcgaattcaaaaccagcaaaagctgtgaaaaagccattaccaagtaaagataatttggctatattgtatggagaaggatttcatatttgtaaaggcgaattatttggaaaacatcgacatggtgaagattgtctgttctgtttagaagttttaagtgattaa

SEQ ID NO: 407074 - DNA, 804 bp, Staphylococcus aureus
atgccaaatgtaataggtgttcagtttcaaaaagcgggaaaattagaatattatacacctaatgatatacaagtagatatagaagactgggtagttgtcgaatctaaaagaggcatagagataggtattgttaaaaatccattaatggatattgctgaagaggatgttgtgttacctcttaaaaatattattcgcattgctgatgacaaagatattgataaatttaattgtaatgaacgagatgctgaaaatgcattaatactatgtaaagacattgtaagagaacaaggtttggacatgcgtttagtcaattgcgaatatacattagataaatcgaaagttatttttaattttacggcggatgatcgtattgattttagaaaattagtaaaaatattagcgcaacatttaaaaacacgtatcgagttgagacaaattggtgtaagggatgaagccaaattgcttggcggtatcggaccttgtggtaggtcgttatgttgttctacatttttaggggattttgaaccagtatcgattaagatggctaaggatcaaaatttatcattaaatccaactaaaatttctggtgcatgtggtcgtttgatgtgttgtttaaaatatgaaaatgactattatgaggaagtacgtgcacaattacctgatattggtgaagcaattgaaacgcctgatggtaacgggaaagtagttgctttaaatatattagacatttctatgcaggtgaagcttgagggacatgaacagccacttgaatataaattagaagaaatagaaactatgcattaa

SEQ ID NO: 407075 - DNA, 927 bp, Staphylococcus aureus
atggatgaacagcaacaattgacgaatgcatatcattcaaataaattatcgcatgcctatttatttgaaggtgatgatgcacaaacgatgaaacaagttgcgattaattttgcaaagcttattttatgtcaaacagatagtcaatgtgaaacaaaggttagtacatataatcatccagactttatgtatatatcaacaactgagaatgcaattaagaaagaacaagttgaacaacttgtgcgtcatatgaatcaacttcctatagaaagcacaaataaagtgtacatcattgaagactttgaaaagttaactgttcaaggggaaaacagtatcttgaaatttcttgaagaaccaccggacaatacgattgctattttattgtctacaaaacctgagcaaattttagacacaatccattcaaggtgtcagcatgtatatttcaagcctattgataaagaaaagtttataaatagattagttgaacaaaacatgtctaagccagtagctgaaatgattagtacttatactacgcaaatagataatgcaatggctttaaatgaagaatttgatttattagcattaaggaaatcagttatacgttggtgtgaattgttgcttactaataagccaatggcacttataggtattattgatttattgaaacaggctaaaaataaaaaactgcaatctttaactattgcagctgtgaatggtttcttcgaagatatcatacatacaaaggtaaatgtagaggataaacaaatatatagtgatttaaaaaatgatattgatcaatatgcgcaaaagttgtcgtttaatcaattaattttgatgtttgatcaactgacggaagcacataagaaattgaatcaaaatgtaaatccaacgcttgtatttgaacaaatcgtaattaagggtgtgagttag

SEQ ID NO: 407076 - DNA, 330 bp, Staphylococcus aureus
atgaaaatgattatagcgatcgtacaagatcaagatagtcaggaacttgcagatcaacttgttaaaaataactttagagcaacaaaattggcaacaacaggtgggtttttaagagcgggtaatacaacattcttatgtggtgtcaatgatgaccgtgtagatgaaatattgtctgtgattaatcaaacgtgtggtaatagagaacagttggtttcacctattacacctatgggaggcagtgcggattcgtacattccatatccagttgaagttgaagttggcggtgctactgtatttgttatgccagttgatgcattccatcaattttaa

SEQ ID NO: 407077 - DNA, 618 bp, Staphylococcus aureus
atgtcagcttttataacttttgagggcccagaaggctctggaaaaacaactgtaattaatgaagtttaccatagattagtaaaagattatgatgtcattatgactagagaaccaggtggtgttcctactggtgaagaaatacgtaaaattgtattagaaggcaatgatatggacattagaactgaagcaatgttatttgctgcatctagaagagaacatcttgtattaaaggtcataccagctttaaaagaaggtaaggttgtgttgtgtgatcgctatatcgatagttcattagcttatcaaggttatgctagagggattggcgttgaagaagtaagagcattaaacgaatttgcaataaatggattatatccagacttgacgatttatttaaatgttagtgctgaagtaggtcgcgaacgtattattaaaaattcaagagatcaaaatagattagatcaagaagatttaaagtttcacgaaaaagtaattgaaggttaccaagaaatcattcataatgaatcacaacggttcaaaagcgttaatgcagatcaacctcttgaaaatgttgttgaagacacgtatcaaactatcatcaaatatttagaaaagatatga

SEQ ID NO: 407078 - DNA, 1338 bp, Staphylococcus aureus
atgaagcaacctattttaaataaattagaaagtttaaatcaagaagaagcgatttctttgcatgttccgggtcataaaaatatgactatcggtcatttatctcaattatcaatgacaatggataaaactgaaatacctggattagatgatttacatcatcctgaagaagtcattttggaaagtatgaagcaggtggagaaacattcagattatgatgcttatttcttagtgaatggcaccacttcaggaatattatctgtcatccagtctttttcacagaaaaaaggcgatatcttaatggcaagaaatgtacataaatctgtgttacatgcgctcgatattagccaacaagaagggcattttattgaaacgcatcaaagtccgttaacgaatcattataataaagttaatttaagccgtttgaataatgacggtcacaaacttgctgtgttgacttatcctaactattacggtgaaacatttaatgtagaagaggttatcaaatctttgcaccaattaaatattcctgtactcattgacgaagcacacggcgcgcactttggattgcaaggatttccagattctacattaaattatcaagctgactatgttgttcaatcttttcataaaacgttaccagctttaacgatgggctcggtactttatattcataaaaatgcaccttatagagaaactattatagaatatctaagctacttccaaacatctagtccttcgtatttgattatggctagtttagagtcagctgccgagttctataaaacatatgatagtaccgtgttttttgataagagagcgcaattaatcgaatgtttggagaagaagggttttgaaatgcttcaagttgatgatccgttgaagttgctgataaaatatgaaggttttacaggtcatgatattcaaaattggtttatgaatgcacatatctatttagaattagcggacgactatcaagcattagcgatattgccgttatggcatcatgatgatacgtatttatttgattcgcttttacgtaaaattgaagatatgattttaccgaaaaaatcagtttctaaagttaaacaaacacaacttttaacaactgaaggtaactataaaccaaaacgctttgaatatgttacttggtgtgatttgaaaaaggcaaaaggtaaagttctggcgcgacatattgtcccgtatccgccagggattcctattattttcaaaggagaaacaataactgaaaatatgatagaattggtaaatgaatatctggaaactggaatgatagttgaaggaattaaaaataataaaattttagttgaggatgaataa

SEQ ID NO: 407079 - DNA, 1062 bp, Staphylococcus aureus
atgagtaacgcaaataatgctgataataaacagtttttcagtaagattttaaattctattggtgctggtgttgttattgcacttgttccgaatgctttattaggtgaagtattaaaaatatttaaaagtggtaatgaaattttagaattaacgtatcagttagtgatactaattcaatcatttatggcatttattattggggttttagctgctcatcaatttaaatttaatggtgcaggtgctgctatagtaggtacatcagctatgattggttcaggtgctgttgtatatagcaataatagttttatgttaaaaggtataggtgacattataaatacgagtttggttgttattattgcatgtcttatatatatggtattacaaaacaaacttggatcttttgaattaattatattaccagttttagtacctatcgttagtgggggtatcggtctaatcacattaccttacattcgaaaaattactcaagcaattggaaatgtaattcattcttttacagacttaaatccgttgttaatgtctatacttattagtgtggcattttcattattaatggtaacaccaatatcgttagtagcgattgcaactgcgattagtttaaacggactaggaagtagagcagcaaacctaggtatagtggctgcctgtgttactttcttatttggctcattgcgtgtcaattctattggtgtaaatgcagttttactcataggagctgcaaaaatgatgatcccagtttacttgaaaaatttaattatttcgataccattgactataaatggaataattactggaatcattgcttacgttcttcaggttaaaggaacaccattgtctgctggatttggatatacaggattagttggcccaataaatgcatttaaccgaatgtcaggtgatccaacaatgaatattattttattagcacttggttattttgtcataccatttgtatcggcatttattgttcatgaattgtgtaaaaaattcattcctatatattctaatgatatttataaatttgaagttccaaaacaataa

SEQ ID NO: 407080 - DNA, 1458 bp, Staphylococcus aureus
atgaagtgtttaattaggtttatattagtattagggttgttaattagcagtgctatggtgtatatcaatcccacagcacatgctgaacaagatcaaacatgggagaagattaaagaacgcggtgaacttagagtgggtctttctgcagattatgcaccaatggaatttgagcatacagttaatggtaagactgagtatgcaggtgtagatattgatttagctaaaaaaattgcgaaagataataatttaaaattaaaaatcgtcaatatgtcatttgatagtttgttaggagctcttaaaactggaaaaattgatattattatttccggaatgacttcaacgcctgaacgtaagaagcaagttgatttttcagattcatatatgatgactaaaaatatcatgcttgtaaagaaagataaagttaatgaatataaagatatcaaagactttaataataaaaaagtaggggcacaaaagggaactgaacaagaaaaaatcgctcaaaccgaaattgaaaatgcatctattacttcattaagccgtttaccagacgttatattagcattgaaaagtggaaaggttgaaggtgctgtagttgaaaaacctgtagcagaagcatatttaaaacaaaatcctaaattaggaatttccaatgtgaaatttaatgaagaagaaaaagatacagtgatagcagtgccaaaagattcaccaaaattattgtcacaaattaataaaacgattaaggaggttaaagataaaggattaatcgataaatatatgactaatgctgcaaatgcgatgaatgatgacagtggttttatttctaagtatggtagttttttcttgaaaggaattaagattacaatattaatttcacttatcggtgttgcattaggttctattttaggtgcattcgttgcgttaatgaaattaagtaaaataaaaattatttcatggattgcttctatctatatcgaaatattaagaggaacaccaatgttagttcaagtatttatcgtattctttggtataactgctgcattaggactagacatttcagctcttgtttgtggaacaattgcattagttattaattcctcagcttacattgctgaaattattcgtgcaggtataaatgctgttgataaaggccaaatggaagccgcacgtagtctaggtttgaattatagacaaacgatgaaaagtgtaattatgccacaagcaattaaaaatattttaccagctttaggtaatgaatttgtcactttaattaaagaatcatctattgtgtcaacaattggagttggcgaaattatgtttaatgcacaagtggttcaaggtatttcatttgacccattcacaccattaatagtggcagcagcattatactttgtcttaacatttgtacttacacgcattatgaacatgattgaagggagattgaatgccagtgattaa

SEQ ID NO: 407081 - DNA, 729 bp, Staphylococcus aureus
atgccagtgattaaaataaacaatcttaataaagtttttggagataatgaagttttaaaagatatcaatcttgaaatcaatcaaggggaagtagtagcaataataggtccatctggtagtggtaaaagtacattgttaagatgtatgaatttattagaagtacctactaaaggtcaagtgatttttgaaggcaatgacttaacggaaaaagggacacaagtagataaactacgtcaaaaaatgggtatggtatttcaaaacttcaacctatttccacataaaaaagttgtcgataatattattttagctcctaaattattaaagaaagataataacgatgaattacataaggaagcattgtcgttattagataaagtgggattaaaagaaaaagcagatgtatatccgaatcaattatcaggtggtcaaaaacaaagggtagcaattgcaagagctttagcaatgcatccagatgttattttattcgatgaaccaacttcagcattagatcctgaggtagttggtgatgtattaaaagtaatgaaagacctagccaaagaaggtatgaccatggtggttttgacacatgaaatgggatttgccaaagatgtaagtgacaaagtcatatttatggcagatggcgttgtcgtagagtcaggcacaccagtcgaaatatttgaacaaccgcaacatgaaagaacacaaaatttcttagcaagagtattataa

SEQ ID NO: 407082 - DNA, 1128 bp, Staphylococcus aureus
ttggatacaaagcaattaaagcaagatatcattgactatgcatatacaattggtatcgacagtattggatttactactgccgatccctttgatgaattgaagcaaaagctagaagcatatcatgcaaatggttatgcctcaggatttgaagaatctgatattgctttacgaacggagcctaaattatccttaccaacagcaaggtcaatcatagcaattgcagttggttatcctaacaaactgaaaggtgcacctaagagtgttagaggtgatcgcagaggcttatttgctagagcatcgtggggtcaagattatcatacaattatgcgtaaacgattagacatgttagctgcatttattgaatctaaagttccagatgttgaaatcaaatctatggtagatacgggtgtattatcagatagggcagtagcagaacgtgcaggtttaggatttgttggtcgtaatggctttgtcatcaatcctaaactaggaacatggacatacctcggtgaaatgttagtcagtataccttttgaacctgatgatccattattagatagctgtggtgattgtacaatttgtgttgatcgttgtccaacaagtgcattagttggaaatggccaattaaatagtcagaaatgcattagttttttaacgcaaacaaaaggctatatgcctgaccaatatcgttataaaattgggaatagattatatggttgcgatacgtgtcaacaagtttgtccgaaaaatagaggtattaataccgaacaagatgacatcattttggaaccagaaattttaaagccaagattagtacctttactacgtatgtctaataaagaattcaaacaaacatatggtcaccttgcaggtgcttggcgtggtaaaaagccgatacaacgaaatgctattttagcattggcgcattttaatgaagtggatgcaattccagaattgaaaaaagttgcaacaacagatgaaagaccgttgattcgagcaactgcttattgggccattggtcaaattcttggggaagaagcaagagattttatcaatgctaattatgatcaagaggatgcagaagttcagaatgaaatgataaaaggattagacacaaggagagaatag

SEQ ID NO: 407083 - DNA, 471 bp, Staphylococcus aureus
atgacaaatcatatcgttttatatcaaccagaaatcccagctaatactggtaacattgcacgtacgtgtgcaggtacaaacacacatttacatttaattaaacctcttggatttagaactgatgataaaatgttaaaaagagccggtttagattattgggaatttgtgaatattacgtatcatgatagtattgaagcattttttgaagtcacaaatggcgagtattacttattaacaaaatttggtaaaaagacttatagtgattttgatttttcaaatcatgacaaagatttttacttcatttttggaaaagaaacgacaggattaccagactgggtgaaagagaaatatcaagacacagcgttaagaattcctatgagtgaacatattcgttcattaaatttatcaaatactgctgcgttgttaatttatgaagcgttacgtcaacaagattttccgggattgaattaa

SEQ ID NO: 407084 - DNA, 600 bp, Staphylococcus aureus
atggcaatgaactttaaagtctttgacaatagtcaacttgtagcagaatatgctgctgatattattagaaagcaatttaacaataatcctactacaattgcaggttttcatttagatacagatcaagcgccagttctagatgaattaaagaaaaatgttgaaaaacatgctgttgattttagccaaataaatattttagattatgacgataaaaaatcatatttcgaagcgttaggtgtaccagcaggtcaagtttatccaattgcttatgaaaaagatgcaatcgaattaatcgctgataagattaaaactaaagaaaataaagggaaattaacattacaagttgtttctatcgatgagcaaggtaagttaaatgttagtattcgtcaaggactaatggaagcaagagaaattttcttagtagtgacaggtgctaataaacgagatgtagttgaaaaattatatcaagaaaatggtaaaacaagcttcgaaccagccgatttaaaagcacatagaatggtaaatgttattcttgataaagaagcggctgcaggtttacctgaagatgttaaagcttactttacgtcacgctttgcttaa

SEQ ID NO: 407085 - DNA, 153 bp, Staphylococcus aureus
atgtctaaagacaaagatccaaaattaaattatcatgaagaagaaaacagtatggtaacggattttgaagatttaaaagaattaggtaaagaaatggaacaaatctctgatcaaaatgatcaagaaaagaattctgaagaagacagtcagtaa

SEQ ID NO: 407086 - DNA, 396 bp, Staphylococcus aureus
atgttaggaaaatactggattcaattattgatagcaacagttattataagtttaatatcaattaaagcttttccattggcaattggggcattatatttacctgttattttcaaagtaataaaattacaactcaatttatcaaaaggattaattgatgatgttaatgcgcaaacattcattaaaagtaatcaatcaggtattgtaatcagtgtaatttgttgtttattaataacagcaatattgtattatacacttgatgggttttatgcgagtttaacaggagttttaggtacgcttgttgctctaaatccatatacgacaattgttagtgctgtattatatatacttacagctattgctacggttgaagctactaaaacaaagtatcgtaattaa

SEQ ID NO: 407087 - DNA, 1386 bp, Staphylococcus aureus
atgtcagtaagaattgaacatgatacttttggagaaatagaagtacctgcagataaatattggggtgctcaaacagaaagaagtaaacgtaatttcccagttggtaaagagcgtatgccaatcgaagtagtttatggttttgcacaactaaagcgtgcagcagcaatagctaattttgatttaggaaaattaagcgaggcaaagaaagatgccattgtatacgcatgtgatcaaattttatcaggtgaattagatgaacacttcccactagttgtatggcaaacaggaagcggtacacaaagtaatatgaatgtgaacgaagtagtaagttatgttgctaatatgtatttaaaagatcatcaaagtgatgaaagtatccacccaaatgatgatgtaaataaatctcaaagttcgaatgatacattcccaactgctatgcacgttgcattatatcaagaggttgaaacaaaattagaacctgcattaaaacttttaagaaatactttgaaagaaaaagaagataaatttgattcaattattaaaattggtcgtacacatttacaagatgcaacgccgatcaaactaggacaagagattagtggctggcgttatatgcttgaccgttgtgaaacaatgttatctgaatctaagaagcacattttaaatcttgccatcggtggtacggctgttggtactggtattaatgcgcatcctgaatttggtgataaagtggcacattatatttcagaaaatacgggttatccatttgtatcttctgaaaataaattccacgcacttacagcgcatgatgaagttgttcaattgcatggaacattgaaggcattagcaggagacttaatgaaaattgctaatgatgtgagatggttggcttcagggccacgagctggtttggcagaaatttctatccctgaaaatgaaccaggttcatcaattatgcctggtaaagttaatcctacacaatgtgaaatgttaacaatggttgcagtccaagtaatgggtaatgatacagttgttggcttcgcaagttcacaaggtaactttgaattgaatgtttataaaccagttattatgcataatacactacaatcaatttatcttttagctgatggtatggaaacatttaataacaattgtgcagtgggcattgaaccaatcgaagagaatattgataattatttaaatcaatcattaatgttagttactgcattaaatccacatattggttatgaaaaagcagctcaaattgctaagaaagcccataaagaaggtttaactttaaaagaatctgcaattcaaactggatatgttacagaagaacaatttgaagcatggattaaaccagaagatatggtagatcctcattaa

SEQ ID NO: 407088 - DNA, 822 bp, Staphylococcus aureus
atgaaatttaaaataccagaaaactttaatgacttaagtttacgagatattttccaacaacttaaggtacctaaaaaagatttacatcatttaaatatgtctaaagatattactattaatgataaacctgcgcgattaatggataaagtgcatactggcgacgatgtatttgttccaaccatcgatgaaaaaagtaattatgttccaagttatcgttatgcacaaattaaatacgaagacgatgatatggcaatcgtaatgaaacctaaaggtgttaagactcaccctaatgatttaaaagaaagcaatactttaatgaatcatgtgatttacactattgatagtgactatgtcgaaccaattcatcgactggaccaggaaacagtaggattattaattgttgctaaaaatcctttaatgaaaaaaattcttgatcgcatgttagaagacaatgatattacgcggatatacaaagcaaatgttaaggcacttttacctttaaaaccacaaacgattgatatgccaattggtaaagataaattccattcgaataaacgacgtgtgtctcctactggacagcgtgcaattacacacattttaacttcaaaaatgataaaagaagctgtgtgccaacttgaaatcaagttggatactggacgtactcatcaaattcgtgtgcatttagctgaaattggtcaccctgttattggtgatcctttatatggtgattcaacgttaagacaattagaacttgaaagttacaaaatagagtttgtgcatcccttgactaaggaagtcatttccgtttctttggatgactaa

SEQ ID NO: 407089 - DNA, 1113 bp, Staphylococcus aureus
atggaacaaaggacgcgactagctttattaaaagagattgccgaatttttaaacgaagaaactgaaatgtatagcatgacccaaggtgcgttaaaatatttaattgagggcagtaatttcacgacaggctggatatttttcatcaatagcgtaggtgaacatgaacttgtatcacatgtggctctaccacaatctttgacagcagaccactgtcactatattaaagatgggtcttgttggtgtgtgaaagcatttaatcaacgtaggctaatgaaagcgtcgaatatcgtcaattgttctcgtattaacttagcctctaaagcatttcctagccaaaatgacaatattacacatcatgcaacggtaccacttaaatcgggtcaagaacaattcggcattttaaatgtagcgtctccaaatactgaaatatatagcgatgaagatttagagttgctagagtctgtcgcatttcaattagggtcagccatcaaacgtatttatttaacagaccgtgaaaaagaagcggcaaaaattaatgaacgtaatcgtttagctagagatttacatgattcagtaaatcaaatgttattttctgtaaaactaacagcacatgctgcgtatggcatgtcaaacgaatccatcgctaaacaagcattcaagacgattgaggaaacgagtcaaaatgccgttaatgaaatgcgtgcattgatttggcaacttaagccagttggacttgagcaaggtttaattcatgctttgacagcatatagtaaattaatgcatatacaattaaatgtaaatgtagaaggtttaatcgatttatctaatgaaatcgaagaaaacatatacagagcattacaagagtgtattaataatgttaagaaacatgctgatacgaataaaatggatcttacattaaaacaaatgaacgatatactatatattgacgtgattgattatggtcaaggatttgagatcgataatgttcagatagcttcatcacacggtattaataacataaaacaaagagttaaattattaagaggtaaagtgacctttcattctcagccaacaaagggtacacaaatacaattcacaattcctataaaatag

SEQ ID NO: 407090 - DNA, 624 bp, Staphylococcus aureus
atgaacaaagtaatattagtagatgaccattatattgtgcgacaaggattgcgatttttattatccacgattgaaaacatagaagttttacaagactttgcagatggagaaacatttttagaatatttaaaagagcatgagcaccctgatattgtgctattagatttagtgatgcctggcatgaatggtattgaaattacggaatatattaaggcacattatccggatattaaagttttggtattaacaagttatgttgatgatgaacatgtaatttcagcaatcaataaaggtgctgatggttatgaaatgaaagacgttgagcctcagcaattaattgaaactattagacgagttatgaacggtgaaaaaatgatacatcctaaggcacaagatgtattcgaaacagttagccaaaaaccacactacacgaataagttgtcaaagagagaaattgaagtgttacgtgaaatggttaaaggtaaaacaaataaagagattgcagaaactttatttgtatctgaaaaaacaattaaaacacatgtcagtcatatatttagtaaattacaagttagcgatcgtacacaagcagcaatttatgcaatggaaaataagttgatttag

SEQ ID NO: 407091 - DNA, 465 bp, Staphylococcus aureus
atggatagacagagttttacagatttaattcaaacaaaatttaaaatggttcgtatagaggctggttatacgcaagatactatggcgcaaacaattggactttctaaaaagactttagtacaaatcgaaaaagagagagtattaccaaactggacaacttgtatttcaatttgtgcattattcagagactctgaagtattaaacagtacatttggctgtgatccattagaaatcgttcaaacaatttcaagaaatcactgtgcatatccaaaccatgcaccaacaagtgatatttattggaataacattgagactcgtaatgggtacattttacaaagtaacaaagtaagcaatatttatcgtgtattaaatccagataaccaaccaattttcggtacttctaaaatgagagaagctgaaacatactttaacagaaatgctaaagaagaattagtacatatctag

SEQ ID NO: 407092 - DNA, 1125 bp, Staphylococcus aureus
atgaatgcactatttattatcatatttatgattgtagtaggggcgataattggtggcattactaatgtaattgcaattagaatgctgtttcacccctttaaaccatactatatatttaaatttagagtcccatttacaccaggtttaataccgaaaagacgcgaagaaattgcaactaaaattggccaagtgattgaagagcatttgcttacagaaactttaattaatgaaaaattgaaaagcgagcaatcacagcaagcaatagaatctatgattcaacagcagttacaaaagttgacgaaagatcaattgtcaataaaacaaattacttctcaaatcgatattgatttagaacaagtattacaaactaatggaaatcaatatattgaatcacaattgaataattattatacaaagcatcaaaaccaaacaatagcatctttattgccaaatcaacttgtaacatttttaaatcagcatgtagataacgcaacagacttattatgtgatcgtgcaaggaattatttatcatctgcaaaaggcacacaagatattaatgatatgttggatacttttttcaatgagaaaggtaagttaattggtatgttgcaaatgtttatgacaaaagagagtattgcagatcgcattcaacaagaacttatacgtttaacatctcatcctaaagcaagaacaattgtgacatcgttaattaccaatgaatatcaaacttttaaagataaaccattgaatgaactgttagatgcatcgcagtttaatgaaatcgctgaaaatctatcagtgtatgtaacaacatatgcaagcaaacaagcgaataagccagtggttacgttaatgcctcaattcgttgattatttagaaggtcaactctctagcaaattagcaaatttaatcattgaaaaattatcgattcacttatctacaattatgaaaaaagtggatttacgaggattaattgaagaacaaattaatacgtttgacttagattatattgaaaaattaattatagaaattgctaacaaagaactaaagttgattatgtcattaggtttcattttaggtggtattattggatttttccaaggtttggttgcaatctttgtctaa

SEQ ID NO: 407093 - DNA, 345 bp, Staphylococcus aureus
atggcagtaaatttatatgattatgcaaatcaattagaacaagctttaagagaaagcgaagaatacaaagcaatcaaagaagcattcgctaatgtaaaagctaacgaagaatctaaaaagttattcgacgagttccgtgaaactcaaattaacttccaacaaaaacaaatgcaaggtgaagaaattgctgaagaagatttacaaaaagcgcaagaacaagcgcaagcaattgaaaaagatgaaaacatctctgcattaatgaatgctgaacaaaaaatgagtcaagtattccaagaaatcaaccaaattatcgttaaaccattagacgaaatttacgctgactaa

SEQ ID NO: 407094 - DNA, 1197 bp, Staphylococcus aureus
atggttaaatttattcattgttcggatttacatttagatagtcctttcaaatctaagagtcatataagccctaaaatttttgaggatgttcaaaaaagtgcttatgaaagttttaaaaatattgtagatattgcattacaacaagatgttgattttgtaattatcgcgggtgatttatttgatagtgaaaacagaacattacgtgctgaaattttcttaaaacagcaatttgaacgtttacaaaatgaacaaatctttgtttatgtttgtcatggtaatcacgatcctttatcatcaaagatttcatcaaactggccagataatgtttctgtattttcaaataaagttgagacgtatgaagcaattactaaatctggtgaaacaatttatattcacggatttagttatgaaaatagagcaagttatgagaacaagattgatgaatatccatcaagtcaaggccaaaaaggcatacatattggtgtcttgcatggtacgtatagtaaatcttcagttaacgaaagatataccgagttcattttagaagatttaaacagtaaattgtatcattattgggctttaggtcatatacatgaacgtcaacaattaagtgatatgcctgtaattaactattcaggtaatattcaaggtagacattttaatgagcaaggtgaaaaaggttgcttattaatcgagggtgaccacttaaaattaaagactaaattttatcctacacagtatattagatttgaagaagcaactattgaaacggataagacatctaagcaaggtttatacgaggtcattcaaaactttaaagaacaagtgagagaagaaggaaaagccttttatcgtttaacgcttgttattaatagtgagacattaatttcacctcaagatttattacaagttgaagaaatgattacagattatgaagaaaacgaaaatcaatttgtatatattgatgagttaaaaatacaatatgcacaaaatgatgagtcacctttagttaatgaattttcagcggaattattagtcgatcaaactgtttttgataaagcgatgtcagatttatatttaaatccaagggcatctaagttcctagacgattatggaacattcgaccatacagcattagttaatcgtgctgaagaaatattaaaagctgaaatgagaggtgaacaaaatgataattaa

SEQ ID NO: 407095 - DNA, 2937 bp, Staphylococcus aureus
atgataattaaatcacttgaaatttatggttacggtcaatttgttcaacgtaaaattgaatttaataaaaacttcactgaaatttttggtgaaaatgaagcgggtaaatcgacgattcaagcattcatccattcgatattatttggatttccaactaaaaagtctaaagagccaagactagaaccacgtctaggtaaccaatacggtggtaaattagtacttattcttgatgatggcttagagattgaagttgaacgaattaaaggcagtgctcaaggtgatgtgaaagtatatttacctaatggtgctgtgcgtgatgatgcttggttacaaaagaaacttaattatatttctaaaaagacatatcaaggtatcttttcatttgatgtactagggcttcaagacattcatagaaatctaaatgaaaaacaattgcaagattatttattacaagcaggggctttaggatcaactgaattcacgtcaatgcgcgaagtgattaatcgtaaaaaagatgaattatataaaaaatcaggtaaaaatccgatcattaatcaacaaattgagcaattaaaacaactagaaagtcaaattcgtgaagaagaagcaaagctagaaacatatcatcgcttagtagatgatcgagataaatcatcacgtcgattagagaatttaaagcataatttaaatcaattatcaaaaatgcatgaagaaaaacaaaaagaggttgctttacatgatcattcacaagaatggaagtctctagaacaacagttaaatattgagccaatcacattcccagaaaaaggtgtggatcgttacgaaaaagcacgagcgcataagcaatcgttagaaagagatattggtttaagaaatgagcgtttagctcaacttaaagaagaagcgactcaattagagccagttaaacaatctgatattgacgccttcattagtttgaatcaacaagaaaatgaaattaaaaataaagaatttgaacttactgcaatcgaaaaggatattgcgaataaacaacgtgataaagatgaattgcaatcaaatattggttggtctgaaacgcatcatgacgtagatagttcagaggcaatgaaaagttatgtcagtgagcaaatcaagaataaacaagaacaagctgcatacattaaacaattagaacgtagtttagaagaaaataaaatcgaagataatgcggttcatagcgaactagattctgttgaagaaaaaatagttcctgaagagacttttgaaaagaaaaaagaatactcacaacaagtcattgaattaaacgaaaaagagaacttgtatagcaaattgaaagaacgtttcgaaattgagcaacaagaaaaacaaaaacgtcaaaaattgttacgaacaacgtttattcttttaacattagtaggtattggtttaactgccttctcatttatttcaaacaacatgttgtttggtattattttcgcagtattaactttagtatttgttatcggtatcatcatgtctaaatcaaaagaagtagattatagcgaggccatcacagatgaaatcgaagaaattaaagcacaactagccattttagatgaaaattatgacttagattttgatcttgatgagcaatatcgcattcgtgatcactggcaacaagctttgaaaaataaagatattttagaagagaaacgtcagtatattgaaggtcgtttaaatgatgcgaaagggcgtcatgatgaattacaatcgacagttgagaacgttaaggatgaattatacttatcatctaaaatttcaaatgatttaattgttgatagtatttctacaatggcgaatattaaagcattagatcaacatatcagtgatttaaatcaacaacgccagcaattggttcaagaattagatacattctacaatcatgctgaagctgttacaaaatcacaatttgtttatttcaacaaattatctttattccacgatgtgcaacaatggttgaaatcagctgaagacacgaatgaaaaatggcgtattaatgctgaaaataccaaacttgttacaaatgaattaaatcatttaaatgctcaattagaagaaaataataaagaaattacagcactattcgattttatcaatgttggtactgaagaagatttttaccaacatcatgaagattaccaaacttatactagtaatttgagtcgttttaatgatttaactaaatatcttgagaaccaaaactattcttatgaattaagttctagtttaagtgaaaaaacaactgcacaacttgaagaagaagatcatttattggctactcaagttgacgaatataatgagcaatatcttgaaatgcaagcacaagtcagtgatttaagtgcacaaatcaatcacatggaaactgatacaacgcttgctaatttaagacatgaatatcacagtcttaaaaatcaacttaatgatatcgcaaaagattgggcaagtttaagttatttacaaagtttagttgatgaacacattaaacaaattaaagataaacgtttgcctcaagttattaatgaagcggtagaaatattgaagcatttaacagatggcagatatacgatgattaactataatgaagattcaattacggttaaacatgttaatggtcaattatatgatcctgttgaactaagtcaatctacaaaagaattactttatgtagctttacgtatcagtttaattaaggtactaagaccatattatccgttcccattaattgttgatgatgcatttgttcattttgataaaaaacgtactgaaaaaatgttgaattatttacgatcattatcagaacactatcaagtactatactttacatgtgtaaaagataatattgttccatcaaaagaagtgattacattaaacaaaatagaggaaggcgggaaacgatga

SEQ ID NO: 407096 - DNA, 942 bp, Staphylococcus aureus
atgagaaatatagagaatctaaatcccggagattcagttgatcactttttcttagtgcataaagctacacagggtgtaacagcacaaggtaaagattatatgacattacatttgcaagataaaagtggtgaaattgaagcgaaattttggacggctacaaaaaatgatatggcaacaatcaagcctgaagaaattgtacatgttaaaggtgacatcataaactatcgcggaaataaacagatgaaagtcaaccaaattagactagcgacaactgaagatcaattaaaaacagaacaatttgtagatggtgcacctttatcaccggcagaaatacaagaagagatttctcattatttgctagatattgaaaatgctaatttacaacgtatcacacgtcatttattgaaaaaatatcaagaacgattttacacatatccagctgctagttctcatcatcataactttgcgagtggcttaagctatcatgtattaacgatgttacgtattgcaaaatcaatttgtgacatttatccattgttaaacaaaagtttgttatatagtggtattattttgcatgatattggtaaagttagagaattgagtggtcctgttgcgacgtcgtatacagtcgaaggtaacttattaggacacatctcgattgcgagtgatgaagtagttgaagcagctcgtgaattgaacattgaaggagaagaaatcatgttgttaagacatatgattttatctcatcatggtaagttagagtatggttctccaaaactgccatacttaaaagaagcagaaattttatgctatatcgataatatcgatgctagaatgaatatgtttgaaaaggcatataaaaaaactgacaagggtcagtttacagataaaatatttggtcttgaaaatcgtagattctacaatcctgaatcactcgattaa

SEQ ID NO: 407097 - DNA, 963 bp, Staphylococcus aureus
atgaagatgataaacaaattaatcgttccggtaacagctagtgctttattattaggcgcttgtggcgctagtgccacagactctaaagaaaatacattaatttcttctaaagctggagacgtaacagttgcagatacaatgaaaaaaatcggtaaagatcaaattgcaaatgcatcatttactgaaatgttaaataaaattttagctgataaatataaaaataaagttaatgataagaagattgacgaacaaattgaaaaaatgcaaaagcaatacggcggtaaagataaatttgaaaaggcccttcaacagcaaggtttaacagccgataaatataaagaaaatttacgtactgctgcttatcataaagaattactatcagataaaattaaaatctctgattctgaaattaaagaagacagcaagaaagcttcacacattttaattaaagttaaatctaagaaaagcgacaaagaaggcttagatgataaagaagcgaaacaaaaagctgaagaaattcaaaaagaagtttcaaaagatccaagtaaatttggtgaaatcgctaaaaaagaatcaatggatactggttcagctaaaaaagatggcgaattaggttatgttcttaaaggacaaactgataaagattttgaaaaagcactatttaagcttaaagatggtgaagtatcagaggttgttaaatcaagctttggatatcatattattaaagctgataaaccaacagactttaacagtgaaaaacaaagcctgaaagaaaaattagtcgatcagaaagtacaaaaaaatccaaaattattgactgatgcatacaaagatctattaaaagaatacgatgttgactttaaagatcgtgatattaaatcagttgtcgaagataaaatcttaaaccctgaaaaacttaaacaaggtggcgcacaaggcggacaatccggcatgagccaataa

SEQ ID NO: 407098 - DNA, 558 bp, Staphylococcus aureus
atgtttttatgtaaaagacaaattgatatcaatgcacgatttggtttgcctagaattgcatttatgagtgcagttgcaaccatcattatgtttttagttagttatgaagtaatgtattttttatctaatacgccattatcagatagacattttctcatctttttattacttgtatttatgacgtatccattacataaaagtatacatttattatttttcttaccatatagaaaatcgtttaaagttcataagttaactaaaagaaaatggcttatattctataatacctacgtcaatcaacctgtacacaaattttatttttgcattaacttaatattgccgttaattatcttatctgcaatgttcgtttatctaacaatttcattcccgcaatatggacattattttatgttcttattggcattgaatttcggtatttccattacagatttattatatttaaaaataattatattttctaattatggacaatatatagaagaacatagtacaggtattaatattttgaaaaaaattaaaaatccatatcatttataa

SEQ ID NO: 407099 - DNA, 366 bp, Staphylococcus aureus
atgaaagcatcacgcattctattcggtatcggtgttggcgtagcagctggttttgtagttgcacttcaaggacgtgacgacaaaagtgtcaagaacaacacgatcgatcgtactgcccctactggttcaaaatcagaactacaacgtgaatttgaaacgattaaacaaagttttaatgacattttaaactatggtgttcaaattaaaaacgaaagtgcggaatttggtagttcaattggtggtgaaattaagtcattacttggaaacttcaaatctgacattaatcctaatattgaacgtttacagtcacacatcgaaaatttacaaaatcgtggcgaggatattggaaacgaaatttctaagtag

SEQ ID NO: 407100 - DNA, 423 bp, Staphylococcus aureus
atgtcagaaacaattttcggcaaaattttaactggagaaattcctagctttaaagtatatgaagacgattatgtctatgcctttttagatatatcacaagttactaaaggacatacgttattaattcctaaaaaagcttctgctaatatctttgaaactgatgaagaaacaatgaaacatatcggtgcagcattacctaaagtagcaaatgctattaagcgtgcatttaatcctgatggtttaaacattattcaaaataatggtgagtttgcagatcaatctgtatttcatattcatttccacttaattcctcgatacgaaaatgatattgatggatttggttataagtgggaaacacatgaagacattttagataacgatgcaaaacaacaaattgctgaacaaattcaagcacaattttaa

SEQ ID NO: 407101 - DNA, 741 bp, Staphylococcus aureus
atgacagttaaagtagaacagcttacaggtggatatggaaaacgccctgtaattaaagatataaattttgaattaaacaaaggcgaaattgttggacttattggccttaatggcgctggtaagagtacaacgattaaacatatgctaggattgcttacacctatggaaggatctctatcaatttcagatatcaacattaatgatgacatagaggcttatagaagaaagttatcttatattccggaatcaccggttatttatgaagaactcacattagaggaacacattgagatgacagcaatggcatatgatattgatcgtgatgaaacgatgaatcgagcaatgccattattaaagacattccgtttagaaaatgagttgaaagtttttccgagtcatttttctaaggggatgaaacaaaaagtcatgattatttgtgcgtttatcgttaatcccgaattgtatattatagacgaaccattccttggcctagatccattaggaattcaatccatgttagatttaatggttgaaaagaaaaacgaaggtagaaccgttctaatgagtacacatattttagcaacagctgaacgttactgtgatcgttttatcatactagacgaaggtgaagtcgttgcatttggagatttagaagcattgagacaacaaactggcttacataatcaaacattagacgatatatatattcatgtgacgcaaggtggagatgtacatgcgtaa

SEQ ID NO: 407102 - DNA, 1224 bp, Staphylococcus aureus
atgcgtaaccaagctaccacattatttaataaaagattacatgcccttcgtaaagagaaaaattattataataagtttatatttaatggtcatttcatggtctttttacttattttgctgggtgcatttatttttggatatggtgaatggttaaaacatattccaacgaatatcaatttttcattaatagcagcagtgattgttgcgttgacatctatttttccaatgcgaccactgttaaaagaagcggataaaatctttttattaccatttgaaaaacacatgtctcaatttatgcgtcatgcgattttatatagttactttgcgcgcatattaatccaactcattattgttattgtaatgttcccgttgttttacaatattaatcaacataatgtggcattttatatttgttttggagtcagtgcattaatttttccatatgttggtttacgcttaagatggcaatggtatcaatcgggacttaaaacatggcaagttaatttaatatcattcatcacctttgctctaacatattacttactattagctccaaaatggtacatcgcatttgtgatggttgctttgcctgtgttaatagaatttttagttaaaaaatataaaccaggctttttgtatccttgggagaaaatgattgcaatcgaacatcgacatcatatgaattattataaatttgttaatatgttcaccgatgtaaaacatttgaaagaatctgcagtcagaagaagttatctagatatacttttaccagttccaaagggtagtaaatttaactctaatgcgatgtatttattcttatttattagaagctttataagagggagagacgcatttaatattatctttaggttagtaattattgcagttttattaatggtttggttatcatatccattagtgacagcaattattgggtgtttatttgtatatattatattgttacaaatggcacaattttattcacagcaagcatatggcttatggcctcaagtgtggcctgtacctgaagagaaggtaatcaaagggtatgaacagtttttatatagattaatgtttgttatttgtactgtgtttgcagtgacatttattataaaacatatgacgttattctatgttgtactcattttctatattgtaggtttattaacgattagaagtattattaaaaagttgaaatatcaggaaacattattacgagactaa

SEQ ID NO: 407103 - DNA, 504 bp, Staphylococcus aureus
atgaagaaactatatacatcttatggcacttatggatttttacatcagataaaaatcaataacccgacccatcaactattccaattttcagcatcagatacttcagttatttttgaagaaactgatggtgagactgttttaaaatcaccttcaatatatgaagttattaaagaaattggtgaattcagtgaacatcatttctattgtgcaatcttcattccatcaacagaagatcatgcatatcaacttgaaaagaaactgattagtgtagacgataatttcagaaactttggtggctttaaaagctatcgtttgttaagacctgctaaaggtacaacatacaaaatttatttcggatttgctgatcgacatgcatacgaagactttaagcaatctgatgcctttaatgaccatttttcaaaagacgcattaagtcattactttggttcaagcggacaacattcaagttattttgaaagatatctatacccaataaaagaatag

SEQ ID NO: 407104 - DNA, 1038 bp, Staphylococcus aureus
atggtgcataataaaaacaatacaattttaaaaatgatcaaaggtgaagaaacatcacatacacctgtttggtttatgcgacaagctggccgttcgcaaccagaatatcgaaaattgaaagaaaaatattcactattcgatattacacatcagccggagttgtgcgcttatgtaacacatttaccagttgataattatcatacagatgcagcaattttatacaaagatattatgacaccattaaagccaattggtgtcgatgtagaaattaaatcgggtattggtccagtgattcataatccaatcaaaacaattcaagatgttgagaaactttctcaaatagaccccgaacgagatgtaccatatgtattagatacaattaaacttttaacagaagaaaagttaaatgtgccgctaataggatttactggggcaccatttacattagcgtcatatatgattgaaggcggaccatcgaaaaattacaattttacaaaagcgatgatgtatagagatgaagcaacatggtttgctttaatgaatcatttagttgatgtatctgttaaatatgtaacagctcaagtcgaagcaggtgccgaattgattcaaattttcgattcatgggtaggtgcattaaatgtcgaggattacagacgttacattaaaccacatatgattcgattaatcagtgaggttaaagaaaaacatgatgtgccggtaattttattcggtgtaggtgccagtcatttaatcaatgaatggaatgatttaccgattgatgtattaggcctagattggagaacgtctattaatcaggctcaacaattaggcgttactaaaacattacaagggaatttagatccatcaattttattagcaccatggaatgtcattgaagagagattgaaaccaatattagatcaaggtatggagaacggtaaacacatctttaatttaggacacggtgtattcccagaagtgcaaccagagacgttacgtaaagtaagcgaattcgtacacacatatacacaaagataa

SEQ ID NO: 407105 - DNA, 924 bp, Staphylococcus aureus
atgactaaaaaaatgggattattagttatggcttatggcacaccttataaagaaagtgacatagagccatattatacagatattagacatggtaaacgtccatctgaagaagaacttcaagatttgaaagatagatatgaatttataggtggtttatcaccattagcaggtacaacagatgaccaggctgatgcgctagtttcagcattaaataaagcatatgcagatgttgaatttaaactatacttaggattaaaacacatttcaccatttatcgaagatgcggttgaacaaatgcacaatgatggcattactgaagcaatcacggtagtactagcaccacattattcttcattttcagtaggatcatatgacaaacgtgctgatgaagaagctgcaaaatatggtattcaacttacacatgtgaaacattattatgaacaacctaaatttattgaatattggacgaataaagtcaacgaaacattagctcaaataccggaagaggaacataaagacacggtattagttgtttcggcacatagtttgccaaaaggtttaatcgaaaagaataatgatccatatccacaagaactagaacatactgcgcttttaattaaagaacaatctaatattgaacatatcgcgattggttggcaatctgaaggtaatacaggtacaccttggttagggccagatgtacaagatttaacacgtgatttatatgaaaaacatcagtataaaaactttatatatacgccagtaggttttgtatgtgagcatttagaggtgctttatgacaatgattatgaatgtaaagtagtttgcgatgatattggtgcgaattattatcgtccaaaaatgccgaatacacatccattatttatcggtgcaattgttgatgaaatcaagtctatattttaa

SEQ ID NO: 407106 - DNA, 1401 bp, Staphylococcus aureus
gtgactaaatcagtggctattataggagcggggataacaggtttatcaagtgcatattttttaaaacagcaagatcctaatattgatgtaaccatctttgaagcatcgaatcgtccggggggaaagattcaatcgtatcgtaaagatggttatatgattgaactagggcctgaatcttatttaggtagaaaaacgattatgacagaattagcgaaagatattggattagaacaagatattgttacaaatacgactggacaatcatatatttttgcgaaaaataaattatatccgattccaggtggttcaattatgggtattccaacagatattaaaccatttgttactacaaaattaatatcgccacttggtaaattaagagcagggtttgatttattaaaaaaacctactcaaatgcaggatggtgacatttctgttggtgcatttttcagagcaagattaggtaatgaggtacttgagaatttaatagagcctttaatgggtggtatttatggtaccgatattgataaattaagtttgatgagtacgtttcctaattttaaagaaaaagaagaggcattcggaagtctgataaaaggtatgaaggatgagaaaaataagcgtctgaaacaaagacaattatatcctggcgcaccgaaaggacaattcaaacaatttaagcatggtttaagctcatttattgaagcattagaacaagatgttaaaaataaaggtgtgacaatacgctacaatacgtcagtggatgatataattacatctcaaaaacaatataaaattgtttacaatgatcaactagaagaagtgtatgatggcgtattagtaacgacaccacatcaagtgtttttaaattggttcggacaagatccagcatttgattactttaaaacgatggatagtacgactgttgcaactgttgtattggcatttgatgaaaaagacattgaaaatacccatgatggtactggcttcgtaattgcgagaacgagtgatacagacattaccgcatgtacttggacatcgaaaaaatggccatttactacaccggaaggtaaggttttgattcgtgcgtatgtaggtaaaccaggtgatactgtggttgatgatcatacagataatgaattagtatcgattgtacgtagagatttaagtcaaatgatgacatttaaaggtgatcctgaatttacaattgtcaatcgtttgccgaaaagtatgccacagtaccatgtcggtcatattcaacaaattagacagattcaagcacatattaaacaaacatatccacgacttagagtaactggtgcatcttttgaagcggttggactacctgattgtattacgcaaggtaaagttgctgctgaagaagtaatcgcagagttgtaa

SEQ ID NO: 407107 - DNA, 555 bp, Staphylococcus aureus
atgacagatgtaattattgtacattctatgcatggaaatagtagaaatcattggtatcagtggttggagcataacttaactttagaaggatatgacgtaacattatttaattttgaatcccctgaagcgaagacagtggatcagtggattgaagctatgacgaaacaaattaatgtacgcaaaaaggatacatattttgtaacacatggtttaggttcaatcacagctttaaaatatattgaaatgattgatcagccgattgaaggctttttcagtatagcgggctttaaagaagatgcagaaaatatagatttagatattgatttaagtaatgtaaccattgattacgataatattaaaaagaaagttgacaatttttacggattgagttctaaaaatgacaaatacgtttcatataaagagacccagcgtttaatgaatgcattagaggggaacttgcgaatcgtggaagatggagggcacttcttagaagaggatggcttcgaaacatttacagcgttgcaagatcggatgcaagattacatgacacgatag

SEQ ID NO: 407108 - DNA, 1362 bp, Staphylococcus aureus
atggctgaaaaattacaaagggaactgagcaatcgccacatacaattaattgcaattggcggtgcaattggtacaggcttattcttaggtgctggtcaaacgattgcattaaccggcccttcaattctattaacatacatcattataggatttatgttatttatgtttatgcgaggtttaggagaaatcattatacagaatactgaatttaaatctttcgcagatgtaaccaatacatatattgggccttttgcaggatttgttaccggatggacatactggttctgttggattattacaggtatggctgaagtaacggctgtggcaaaatatgttagcttttggttcccagaaattccaaactggataagtgcactattttgtgtactgttattaatgtcattcaacctacttagcgcaagacttttcggagaattagaattttggttctctatcattaaaatagcgacaattattggtttaatagtagttggtttcgtcatgattctatttgcatttaaaactcaattcgggcatgccagtttcacaaatctatatgaacacggcatattcgctaaaggtgcttctggattctttatgtctttccaaatggcactattctcatttgtaggaattgaaatgattggtgttacagctggggaaacaaaagatccagttaaaacaattccaaaagcaattaacagtgtacccattagaattttaatattttacgttggggcgttagcggttatcatgtctattatcccttggcagcaagttgatcctgataacagtccattcgtaaaattattcgcattgatcggaattccgtttgctgcgggcttgattaattttgtagtattaaccgctgctgcttcatcatgtaacagtggtatattctcaaatagccgtatgcttttcggtttatcaagtcaacaacaagcacctccgaacttttctaagacgaataaatatggcgttccacatgttgcaatctttgcttcatcagcattattacttgtggcagcattactaaactatattttcccagatgcgacaaaagtatttacgtatgtgactaccatctctacagtgttatttttagttgtatggggtctgattatcattgcatatatcaattatagtcgtaaaaacccagatctacataaaaatgctacgtacaaactattaggtggcaaatatatgggctacttaatatttgtattcttcatttttgtgttcgggttattatttattaatgttgatacaagacgtgcaatttattttattccgatttggtttatacttttagcatttatgtacttaagatataaacgtatcgctgctaaatcaaataaataa

SEQ ID NO: 407109 - DNA, 1122 bp, Staphylococcus aureus
atggcagaattacaaagaggtttagaaggggttatcgcagcggagactaaaataagttcaattattgaaagtcaattgacttatgccggctatgatattgatgatctagctgaaaatgcgcaatttgaagaagttattttcctattatggaactatagattgccaaacgaagaagagcttgctcatctaaaagggaaattaaatcaatacatgacattaaatcctcgtgtgtatacacattttgaggagtatgttacagatcacgtgcatccaatgacagcattacgtacgtcattatcatatattgcacatttcgatcctgatgctgaaaatgaatcagatgaaaatcgttatgaaagagcaatgcgtatacaggctaaagtagcatcattagttacagcgtttgctcgagtaagacaagataaagaaccacttaagcctaatcctgacttaagttatgcggcaaacttcctatatatgttacgtggggaattaccaacagatatagaagtagaagccttcaataaagcacttattttacacgctgatcatgagttgaacgcatctgcatttacggcacgttgtgcggtatcatcattgtcagatatgtactcaggtattgtagcagccgtaggttctctgaaagggccattacatggtggtgcaaacgaacaagttatgacgatgttatctgagattgggtcaattgaaaatgttgatgcttacttagatgaaaaatttgctaataaagataaagtaatgggcttcggtcatcgtgtatataaagatggtgatcctagagcgaaatatttaagagaaatgagccgtcaaattacgaaagacgctggtcgtgaagaattatttgaaatgtcagtgaaaatggaaaaacgtatggcagaagaaaaaggattaattcctaatgttgatttttatagtgcgagtgtttatcactgtatggaaatacctcatgacttattcacgccaatctttgctgtaagtcgttctgcaggatggattgctcatattttagaacaatataaagataatagaattatgcgtcctagagcgaaatatattggcgaaacgaatcgtaagtatatcccgcttgaagaaagaaaataa

SEQ ID NO: 407110 - DNA, 1269 bp, Staphylococcus aureus
atgactgcagaaaaaattactcaaggaactgaaggattaaacgtacctaatgaaccaattatcccatttattatcggtgatggaattggaccggatatttggaaggcagcaagccgagttatagatgctgctgttgagaaagcctataatggcgaaaaacgcattgaatggaaagaagtgctagctggccaaaaagcatttgatacaactggtgaatggttacctcaagaaacacttgatacaattaaagaatatttaattgctgttaaaggacctttaacaacaccaattggtggtggtattagatcattaaatgtggctttacgccaagaattagatttatttacttgcttaagaccggtacgttggtttaaaggagtaccatcacctgttaaacgtccacaagatgttgatatggttattttccgtgaaaatactgaagacatttatgctggtattgaatttaaagaaggtacaacagaagttaaaaaggtaattgacttcttacaaaacgaaatgggtgcgacaaacattcgattcccagaaacttcaggtattggtattaaaccagtttctaaagaaggaactgagcgattagttagagcagctatacaatatgctatcgataataaccgtaaatcagttactttagttcataaaggtaatattatgaaatttacagaaggctcatttaagcagtggggttacgatttagcattatctgaatttggtgatcaagtattcacttggcaacaatatgacgaaattgttgaaaatgaaggcagagatgctgctaatgctgctcaagaaaaagctgaaaaagaaggcaagattatcattaaagattctattgctgacattttcttacaacaaattttaactcgtccagctgagcatgatgttgtagcaactatgaacttgaatggtgactatatttcagatgctttagctgcacaagttggtggtattggtattgcgccaggtgcaaacattaattatgaaacaggtcatgctatttttgaagcaacacatggtacagctccaaaatatgcaggtttaaataaagtgaatccatcttcagtaattttaagttctgtattaatgttagaacatttaggatggcaagaagcggcagataagattacagattcaattgaagatacaattgcttcaaaagttgttacttatgactttgcccgtttaatggatggtgctgaagaagtttctacatcagcatttgcagatgaattgattaaaaatttaaaataa

SEQ ID NO: 407111 - DNA, 705 bp, Staphylococcus aureus
atgtcgcaaaaagtgttggtagtagatgacgaacattcaatcgtaacattacttaaatataacttagaaacagctggttatgaagttgttgtcgcatttgatggtgatgaggctttagaaaaggtagaaagtgaacagccagatttaattattttagatgttatgctacctaaaaaagatggcattgacgtatgtaagactgtaagaacaaataaaaatttagtccctatattaatgttaacggcgaaaaatgatgaatttgatcgggtattaggtttagaattaggtgccgatgactatatgactaagcctttttcacctagagaagttgttgcccgtgtgaaagccattttaagacgttctcaatttgtaaaagaagtagaagagattgacgatgatattaccatcggatcgatacgtattagacccgattattttgaagtatataagcataatgagttattggagctaacaccgaaagaatttgaactcttgctttatttgatagaaagacaaggcagagtcattacgagagagcatatgttaaatacggtatggaattatgaatttgcaggagactcaagaattgttgatgtacatatcagtcatttaagagataaattagaagataatcctaagaagccacaacttattaaaactgtgcgtggcttaggctataaattggaaagacctaaagaacaatga

SEQ ID NO: 407112 - DNA, 1665 bp, Staphylococcus aureus
atgatgaagtttcaccaccgcttaatgttattgataagcagtatattaattatcagttttgttacattaggcattattattcacgcttccatcacatatgttttatcagaaaaacacgaacaagctctagcaacagatgcaagatcatatatttatttagtccaagataatgaggttgataaagttaaaaaaattgtaaaacagcaaaatatagatttattgataactaagcatgataaaaaggtgtttagtagtggcaaactgaaagctatcccaaatagtgatagctatattcaaaaaagggacgtttttatttttaataagaaggttaacggttatcatgtatggattaaaggttacaataacgatattacagaaatgcattggacgttgtggaaatatcttattttgacatgtttagttgtactcatttgtctgtattttgcaagccgtagttttaagcgtacattaatccgtcccattcaagaagttacttatgcaacacaattgttggcaaatggttattatcacatacgtgtacctgaaagtaatgttgtagaaactaaagcgctttttgtgtctaccaatgatttagcacgacgccttcaaaagcttaataatgagcaaaaaattcaatccaaccgtttaaaaacaacgattgaaaatattccaagtgctattttaatgatagatcgaaatggaaaaatcgttgttgcaaataaagcgtattatgaacagttcaacatctcgcataatattgaacaagtaggctatcacggctatgttaatactgaaattgagcaattaattttagaaagttttaaagttgaaaaacctatttatgaacaattggaagttgcaataaaccaagtccatgccaagtactttgatatttcatgcgttccgattttaactaggtctcaaaaaagtttgcaagggattttagttgtgatgcatgatataacaaatctgaaacaacttgaaaatctaagacgtgaatttgtagcaaatgtttcacatgaattaaaaacacctattacttcaattaaggggtttgctgaaacgcttattgatggtgcaaaaaatgatgcggaatcattagacatgtttttaaacataattttaaaagaatcaaatcgaatagaatctttagtaacagatctgttagatttatcgcatattgagcaacatacagagttagatacagactatatgaatttatcagatttaacgcggcgtattattgataatatgatgactcaagccaatcaaaaaaatatttccattcatactgatattgaaaaagatgtcattgttaaagcacaagaaagtaaaattgctcaagttatcacgaatttgttaacgaatgcaattaactattcttatgaagatggagatattaacgttcgtgtgtatcgagatgactttcgtgtcattttcgaagtacaagattttggtataggtattaaattagaagaccaacaacgtatttttgaaagattttatagagtagataaagcacgaagtagagattctggtgggacaggtcttggattatcaattacaaagcatatagtagaggcccaccaaggcaatattgaagtgaatagtcaagttggcaaaggctcaacgttcaaagttattctaaaagattataaagaataa

SEQ ID NO: 407113 - DNA, 1488 bp, Staphylococcus aureus
gtgaaaacaattcaattacacaagacaactttgatattaattgcgatattattgttttatacttttatgggtatcttactaccactcatgcacgatgatttacaatggtttagcaattataatactgatattttaaaagtaggatttgcatcacttaatggtcgctatatcggaaatatctttgaaattatagctgtacatgtaagctggttacgttggctttcatatggcctcattagtatgggcatcatttggatgattatgcacattacacgttgtaaagcgtggacaagctattatttgttagcattttctttaatgttaattttaccaagtgctatttatgcagatacatatggctggtttgcaggattttataattatgcgacatcaacactaatttcactctttattatttattattgtattaatgcaattatatataaagaaaagcagccggtaagtgttactgtactattctatgttttatgcttcttcggtcaattatttatggagaatgtgacattattccactgtatcattttaattttagcttttctgtatgaatttactgcaaatcgaacacttaattataaattattgttttcatttatgattgctactataggtacaatcattatgttttccaatccaaattatcgcaaaattttatttgaaggatcagaatatcaacaagtttcaaataatcaaggtatcttttcaaaatttgcagaaatgatatcaacgtcacttccatatggtgtcattttcagtcagattataattttaagtatgattgcagcgcttattatttatctactgcttagaagtgatcggtatgtacatttaacaatattaaagcgtcgtatcattatgataggatttatcactttaccgctttattatttactattttacaatcagtttttattaaataaaaatacagatattggattggttggttttgtgaacgtaattgtatgtggttactttgcgttttcgatatttgtaggtatttatttgtctattaatgatcgtaaaacacaaatcactttatattccttacttattgcaatatgtgtttcggcgtcgacactagtcattgttactccaatagaaccaggtaattttttgattgtttatacgatacatgtaatcattttaattattttattaaaagaatttcggaaatataagtcaatcaatgttaattttattaaaggtgcatcactagttttagctgtgatatatcttagtgcatttatttatgttcattatgaacatgaaaaaagagttcagttattaaaacaacaaattaaagatcatccacgacaagaggtttatacagtggaatcattgccgtttgaacattatatgcatcatccgtcaccaatcaataaaaattaccaagagtggtttaataattatgaagaattaccgaaaatgaccaaagttaaatatattccatttggttcagacgattcataa

SEQ ID NO: 407114 - DNA, 2631 bp, Staphylococcus aureus
gtgaataaattagtattaatcgatggtaatagcttaagttttagagctttttatgcattacctttgttatcaaacaaagcaggcattcataccaatgcagtatatggttttgcaatgttactagagaagattttaaaagaagaaaagccaaatcattttttagtagcgtttgatgcaggtaaaacgactttcagacatgaaaaatatagtgaatataaaggtggacgccagaaaacgccgcctgaactaagtgagcaatttccttatattcgccaattattagatgcttatcatattaaacgttatgaattagataactatgaggcagatgatattatcggaactttaagtaaagaagcagataaagcgggctttcagacaattattattacgggagaccgagatttaacacaacttgcaacggataatgtaaccatttattacactaaaaaaggtgttactgatgttgatcattatacacctgactttattgcggaaaaatacaacgggttaacacctaatcaaattattgatatgaaaggattaatgggagatacttctgataatataccaggtgttgcaggtgttggagagaaaacagcaataaaattgctaaaccaatttgacacagtagaaggtgtctatgaacatttagatgaaatttcaggtaaaaagttaaaagaaaaacttcaaaatagcaaagaagatgcattaatgagtaaagaattagcaacgattaatgtagatagtccgattgaagtaaaacttgaagatacgttaatgactcatcaagatgaacaacaagaaaaaatcgaattgtttaagaagttagaattcaaacaattgttggctgacattgatcaatcagcaagcgttgaagatgcaatagaaaagacatttgaaattgaaacgtcttttgataatattgattttacttcattgaaagaagcggccatccatttcgaattagacggtggtaactatttgcgaaataatattttaaaattctctttatttacaggtgagaaacatattgtaattaatgcggatgacataaataattatgtcgaactagtttcatggttagaaaatccgaattcgaaaaaagtcgtatatgatgctaaaaaaacatatgtagcatcacatagattggggattgatattcaaaatatttctttcgatattatgttggccagttatataattgatccatctcgtacgattagtgatgttcaatcagttgtttcattgtacggtcaaagttttgtgaaagacgatgtgagtatatatggaaaaggtaagaaatttaaggtacctgaagatgatgttttaaatccatatgttgcttctattactgatgcaatttactttgcgaaaccaaatatggataaacaattagaagaatacaatcaggtagaactcttggctgatttagagctaccgctagctaagattttaagtgaaatggaagaagttggtatatttacagatgttcatgatttagaagaaatggaaaaagaaattcaagaaaaattagacgtcttgattcgaaatatccatgatgcagctggtgaagattttaatataaattctcctaagcaattaggtgttgtattgtttgagacattacaattacctgttattaaaaagacgaaaacaggatattctactgctgtagatgtcttagagcaattgcaaggtgaacatcctatcattgattatattttagaatatcgtcaattatctaagttacagtctacttatgttgaaggattgcaaaaggtaattagtgatgatcaacgtatccatacacgttttaatcaaactttagcgcaaactggacgtttatcaagtgtagatcctaatttacaaaatattccggttagacttgaagaagggcgtaaaataagaaaagcctttaaaccaacttcaaaagatagcgttatattatcagcagattattctcaaattgaattgcgtgtattagcacacattacacaagatgagagtatgaaagaagcatttatcaacggcgatgatattcatacagcaactgctatgaaagtatttggtgtagaagctgatcaagtcgatagtttaatgcgtcgtcaagcaaaagcagttaactttggaattgtttatgggataagtgattatggtttaagtcaaagtttaggtattactcgtaaaaaagcaaaagcattcattgatgattatttagctagtttcccaggtgtaaaacaatatatgtctgatattgtaaaagatgccaaagctttaggttacgtggaaacattgctacatcgtcgacgctatattcctgatattacgagtcgtaactttaatttacgcggctttgctgaacgtactgctatgaatacgccaatacagggcagtgctgcagatatcattaaactggcaatggttaaatttgctcaaaaaatgaaagagacaacatatcaagctaaactattattacaagtacacgatgaattaatttttgaagtacctaagtcagaagtagattcatttagtgaatttgtagaagagataatggaaaatgcattgcaattagatgttccattaaaagtagactcaagttatggtgcaacctggtatgatgcaaaataa

SEQ ID NO: 407115 - DNA, 873 bp, Staphylococcus aureus
atgcccgaattaccagaagtagaacatgtaaaaagaggaattgaaccctacgttataaatcaaaaaattgaacacgttatattttcggataaagtaatcgaaggtaaagctcaaggcaaggaaacaattataaaaggaattgaattagatacttttaaaactttatcggaaggctataccattacaaatgtagaacgaagaagtaaatatatcgtttttcagctagataataaacgagaacaacgtacattaattagtcatttaggtatggcgggcggttttttcattgtagatgaacttgaagatattatgatacctaattatcgtaagcattggcatgttatttttgagttgtcaaatgacaaaaagttaatttattcagatatacgtcgttttggagaaattagaaatgttgcgtctgtagcatcttatccttcatttttagaaatagcgcctgaacctttttcaaatgaagcattgacgtattatttaaatcgaattcatcaacagtctaataagaataaaccaatcaaacaagtgattttggatcataaagtaatcgcaggttgtggaaatatttacgcatgtgaagcgttgtttcgtgcaggtgttttaccagataaaaaagtaaaagacttaacacaccaacaacaagaaatggttttttattatgttagagaagtactagaagaaggtattaaatatggcggtacaagtatttcagattatcgtcatgctgatggaaaaactggtgagatgcaattgcatcttaatgtatataagcagccggtatgcaaagtgtgtggaagtcaaattgaaacaaaaatcatcgcgacaagaaatagtcattattgtccagtatgtcaaaaataa

SEQ ID NO: 407116 - DNA, 624 bp, Staphylococcus aureus
atgccgaaagttattggtctaacaggtggaatcgcctcaggaaaatcaacagtatcagaactcttatccgtattcggttttaaagtagtagatgctgataaagcagccagggaagctgttaaaaaggggagtaaaggtttagctcaagtacgagaagtctttggtgatgaagcaattgatgaaaatggtgagatgaatcgtcgttatatgggtgatctagtgtttaatcatccagaaaaacgcttagaattaaatgctatcatacatcctatcgtgcgagatattatggaagaagaaaagcaagaatatttaaaacaaggatataatgtaatcatggatattccattattatttgaaaatgaattggaaaatacagtagacgaagtgtgggttgtatacacttctgaaagtatacaaatggatcgtttaatgcaacgtaataatttgtcattagaagatgcgaaagcacgtgtctatagccaaatttctattgataaaaaaagccgaatggccgatcatgttatcgataatttaggggataaacttgaattaaaacaaaaccttgagagattgttagaagaagaaggttatattgaaaagccgaattacggagaagaagattaa

SEQ ID NO: 407117 - DNA, 1026 bp, Staphylococcus aureus
atgtcaacgaatattgcaattaatggtatgggtagaattggaagaatggtattacgtattgcattacaaaataaaaatttaaatgtagtagcgataaatgctagttatccacccgaaacaattgcacatttaatcaattacgatacgacacatggaaaatataatctaaaagttgaaccgattgaaaatggattgcaagttggagatcataaaattaaattggttgctgatcgcaatcctgaaaacttgccatggaaagaattagatatcgatattgctatagatgcaactggtaaatttaatcatggtgataaagccatcgcacatattaaagcaggtgccaaaaaagttttgttaactggtccttcaaaaggtggacatgttcaaatggtagttaaaggcgtaaatgataaccaattagatatagaagcatttgacatttttagtaatgcttcatgtactactaattgcattggtccagttgcaaaagttttaaataatcagtttggaatagttaatggtttaatgactactgttcacgctattacaaatgaccaaaaaaatattgataatccacataaagatttaagacgtgcacgttcatgtaatgaaagcattattcctacttctactggtgcggcgaaagctttaaaagaagtattaccagaattagaaggtaaattacacggcatggcattacgtgtaccaacaaagaatgtatcgctcgttgatttagttgttgatttagaaaaagaagtaactgcagaagaagtaaaccaagcttttgaaaatgcaggtttagaaggtatcatagaagtcgaacatcaaccactagtgtctgttgattttaatactaatccaaattcagctattattgatgcaaaatcaacaatggtcatgtcagggaataaagtaaaagttattgcttggtatgataatgaatggggttattcaaatagagttgtagatgttgctgagcaaattggagcacttttgacatcaaaagaaactgtaagtgcaagttaa

SEQ ID NO: 407118 - DNA, 471 bp, Staphylococcus aureus
atgaaatgcccgaaatgtaattctacacaatctaaagttgtagattcaaggcatgccgatgaattaaatgccattcgaagacgaagagaatgtgaaaattgtggaacacgtttcactacatttgaacatatcgaagttagtcagcttatagttgtgaaaaaagatggcacaagagagcagttttcaagagaaaagatacttaatggacttgtgcgttcttgtgagaaacgaccagttagatatcaacaacttgaagacataactaacaaggttgaatggcaattacgagatgaaggtcatacggaagtgtcttcacgagatataggtgaacacgttatgaacttgttaatgcatgttgatcaagtttcatatgttagatttgcatcagtctataaagaatttaaagatgttgatcaattgttagcatcgatgcaagggattttaagcgaaaacaaacggagtgatgcttaa

SEQ ID NO: 407119 - DNA, 1401 bp, Staphylococcus aureus
atgggacgacaagccttcgaattcggcttaagaccaaaggatcaattcaaagttatgcaacactttgatttaaatacgaatcatttagaggtattgaatcgactgtatacaccgctaattggaacgcaagcagtgggtttatatcattttatgactcaattcgttaaagaaagtcataatgaaacattgattctttctcattatatttttatgaatgaacttaaaattaatttactagagtttagacaacaaatggacttacttgaagcgattggattgttaaaggcgtttgtcaaacatgatgaacaagaaacacaatttgtttaccaattaattcaaccgccttcagcacatttattttttaatgatccaatgttgtcaatctttttatatagtgaagtcgagcatcgtcgatttcatgagttgaagaaatactttgagtatcaacaaattgatttgagtgaatttaaacaggtaacaagacaatttactgatgtttttaaagtgccgtctacaaaaatagatatcgatacaagtgatattccgattaatgaaccgtaccaaggtatcgatttatcaaatgaatcttttgactttgaaatgttgagacaaatgttaggtaaacattttattagtcaagacattgttaccaaagatgcaaagcgtttaattacacaactcgcgactttatatggtttaacagcagatggcatgaagcatgttattttaaattcaattacaagtggacaacagttatcctttgaagaaatgcgtaaacaagcacgctcgtattacttaatggaacacgaaaatcaaatgcctaaattacaggtgaaatctcctgctacatcatcttcggcgggcaaatcttcagaagtgaatccaaagccacaaagtgatgaatggtttgagttacttgaacaaacgagtccaattgatatgttagcttcttggtctgaatcagaaccaactatatcgcaaaagacaatggttgaagaattaattgaacgtgaaaaaatgtcttttggcgtcattaatattttgttgcaatttgtcatgttaaaagaagatatgaaacttcctaaagcgtatattttggaaatagcatcaaattggaagaaaaaaggtattaagacagctaaagaagcatataattacgctaaaaaagttaatcaacctaaaaatgagggttctagcggaaattaccaaaagcgtggttcatactatgggcagcgtaatcgtatttcaaaagaaaaaacacctaaatggttagaaaatagagataaacctagtgaagaagattcggctaaagataatagcgtagatgatcaacaattagagcaagatcgacaagcatttctagataaattatctaaaaaatgggaggaggacagtcaataa

SEQ ID NO: 407120 - DNA, 921 bp, Staphylococcus aureus
atgaagcaatttaaaagtataattaacacgtcgcaggactttgaaaaaagaatagaaaagataaaaaaagaagtaatcaatgacccagatgttaagcaatttttggaagcgcatcgagctgaattaacgaatgctatgattgatgaagacttaaatgtgttacaagagtataaagatcaacaaaaacattatgacggtcataaatttgctgattgtccaaatttcgtaaaggggcatgtgcctgagttatatgttgataataaccgaattaaaatacgctatttacaatgcccatgtaaaatcaagtacgacgaagaacgctttgaagctgagctaattacatctcatcatatgcaacgagatactttaaatgccaaattgaaagatatttatatgaatcatcgagaccgtcttgatgtagctatggcagcagatgatatttgtacagcaataactaatggggaacaagtgaaaggcctttacctttatggtccatttgggacaggtaaatcttttattctaggtgcaattgcgaatcagctcaaatctaagaaggtacgttcgacaattatttatttaccggaatttattagaacattaaaaggtggctttaaagatggttcttttgaaaagaaattacatcgcgtaagagaagcaaacattttaatgcttgatgatattggggctgaagaagtgactccatgggtgagagatgaggtaattggacctttgctacattatcgaatggttcatgaattaccaacattctttagttctaattttgactatagtgaattggaacatcatttagcgatgactcgtgatggtgaagagaagactaaagcagcacgtattattgaacgtgtcaaatctttgtcaacaccatactttttatcaggagaaaatttcagaaacaattga

SEQ ID NO: 407121 - DNA, 1938 bp, Staphylococcus aureus
atggaacaaattaatattcaatttccagatggtaataaaaaggcgtttgataaaggtactactactgaagatatagcacaatcaattagtcctggattacgtaaaaaagctgttgccggcaaatttaacgggcaacttgtagatttaactaaaccgcttgaaactgatggatcaattgaaattgtgacaccaggtagtgaagaagcgttagaggtattacgtcattctactgcacatttaatggcacacgcgattaaaaggttatatggtaatgttaaatttggtgtaggtcctgtaatagaaggtggattctactatgacttcgacattgaccaaaacatctcatctgatgactttgaacaaattgaaaaaacaatgaaacaaatcgttaacgaaaatatgaaaatcgaacgaaaagtggtttcacgagatgaagcgaaagagttattcagcaatgatgaatacaaattagaattaatcgacgcgattcctgaagatgaaaatgtaacattatatagtcaaggtgattttactgatttatgtcgtggagttcacgttccatcaacagctaaaattaaagagtttaaactattatctacagcaggtgcatactggcgtggagatagtaacaacaaaatgttacaacgtatatacggtactgctttctttgataaaaaagaattgaaagcacatttacaaatgttagaagagcgtaaagaacgtgatcatcgtaaaattggtaaagagttagaactattcacaaatagccaattagttggtgctggtttgccattatggttacctaacggtgcaacaattagacgtgaaattgaacgttacattgttgataaagaagttagcatgggatatgaccacgtttatacaccagtacttgctaatgttgatttatacaaaacatctggtcactgggatcactatcaagaagatatgttcccaccaatgcagttagatgaaactgaatctatggtattacgtccaatgaactgtccacatcatatgatgatttatgcgaataaaccacattcatatcgtgaattacctatccgtatcgctgagctaggaacgatgcatagatatgaagcaagtggtgctgtatcaggattacaacgtgttcgtggtatgactttaaatgattcacatatctttgttcgacctgatcaaattaaagaagaattcaaacgcgttgtaaacatgattattgatgtgtataaagactttggtttcgaggattatagctttagattaagttatagagaccctgaagataaagaaaagtactttgatgatgatgatatgtggaataaagctgaaaatatgcttaaagaggcagcggatgagcttggcttatcgtacgaagaagcgattggtgaagcggcattctatggtccgaaactagatgttcaagttaaaacagcgatgggtaaagaagagacattatcaacagcacaacttgatttcttattaccagaacgttttgatttaacttatattggtcaagatggtgaacatcatcgtccagttgttattcatcgtggtgttgtatcaacaatggaacgatttgtagcatttttaactgaagaaactaaaggtgcattcccaacttggttagcgccaaaacaagttcaaatcattccagttaacgttgatttacattatgattatgcgcgccaattacaagatgaattgaaatctcaaggcgttcgtgtaagtattgatgaccgtaatgaaaaaatgggttataaaatcagagaagctcaaatgcaaaaaataccttatcaaatcgtagttggggataaggaagttgaaaataatcaagtgaatgtgcgtcaatatggatcgcaagaccaagaaacagttgaaaaagatgaatttatctggaatctagttgatgaaattcgtttgaaaaaacatagatag

SEQ ID NO: 407122 - DNA, 1494 bp, Staphylococcus aureus
atgtcaaaagttcaaaatgaaagtaacaatgttgtcaaaaggggacttaaagatcgtcatatttctatgattgcgattgggggttgtattggtacaggtttatttgtaacttctggtggagcaattcatgatgcaggtgctttgggtgcattaataggatacgcaattatcggaataatggtatttttcttaatgacgtcacttggcgaaatggctacgtatttgccagtatcaggttcatttagtacatatgctacaagatttgttgatccatctttagggtttgcgcttggttggaactattggtttaactgggtagtgactgtagcagcagatattacgattgcagcacaagtcattcaatattggacaccattgcaaggcatacccgcttgggcatggagtgcgttgttcttagttataatttttagtctgaattcgttatcagttcgcgtctatggtgaaagtgaatactggttggcattgataaaagtggttacagttattgttttcattgcaattggtttattaacgattgtcggaatcatgggtggtcatgttgtaggattcgaaatatttaataaaggtgaaggtccaattcttggtggcaacttaggaggaagtttgttatcaattctaggtgtattcttaatcgctggtttctcattccaaggtactgagttaattggtattacggctggtgaatcagaaaatcctgaacgtgctgtgccgaaagcaattaaacaagtattctggagaattttattattttacattttagccatttttgttatcggtatgttaattccttatgatagtagtgcattaatggggggtagtgataatgtagcaacgtctccattcacattagtgtttaaaaatgctggatttgcgtttgcagcatcatttatgaatgcagtcattttaacgtctgtgttatcagcaggtaactcaggtatgtatgcttcaactcgaatgctatattcaatgagtaaagataaattagcgtttgaagcatttggtaaaacaaataaaaacggtgtgccatatatgtcgttactcgttacagcaatcattgtagtgataattttcgtattacaaagccttacaaaaggtgcatacgaatatatcgttgcagcaagtggtttaactggttttattgcttgggtaggtatagcagtaagtcattatcgatttagaagagcatttgataaacaaaattatgacaaatctaaattaaaatatactgctaaattattcccattcggaccattatttgctggctttttatgtattgtagtaattattggtcaagatgttgactttattaaaacaggagattttaattttagtcgcttcttaattacgtatatgggaattccagtatttttagcattctttatttatcataagcttcgatataaaacgaaaaaaattccattagaacaagtagatttacgtcaagacgtgtcaatggatgaaataaaaggttaa

SEQ ID NO: 407123 - DNA, 561 bp, Staphylococcus aureus
ttgcttggtgcaaatttcgtaaaaattttggaggtgtcaaccatagcaaaagatcaaactcaaatcaatgacaaaattcgtgcaaaagaattacgtttaatcggtcaagatggtgaacaaattggtgttaaatcaaagcgtgaagctttagaaatggctgaacgtgtagatttagacttagtggtcgttgcaccgaatgcgaaaccaccagttgcaagaattatggattacggtaaattcaaattcgaacaacagaaaaaagaaaaagaaatgaaaaagaaacaaaaaattatcaatgttaaagaaattcgtttaagtccaacaattgaggaacatgatttccaaacgaagttgaaaaacggacgtaaattcttaactaaaggcgataaatgtaaagtatctattcgtttcagagggcgtgccattacgcataaggaaattggtcaacgtgtgctagaaaaatatgcagatgaatgcaaagatatagcaacagttgaacaaaaacctaaaatggacgggcgtcaaatgtttatcatgttagcgccaacagctgaaaaataa

SEQ ID NO: 407124 - DNA, 201 bp, Staphylococcus aureus
atgccaaaaatgaaaactcaccgcggagcagctaaacgtgttaaaagaactgcttcaggtcaattaaaacgttcaagagctttcacatctcacttattcgcaaacaagagcactaaacaaaaacgtcaattacgtaaagctagattagtgtctaagagcgatatgaaacgtgtaaaacaattattagcatacaaaaaataa

SEQ ID NO: 407125 - DNA, 357 bp, Staphylococcus aureus
atgccacgagttaaaggtggaacagtaacaagagcgcgtcgtaaaaaaacgattaaattagctaaaggttacttcggttcaaaacatacattatacaaagtagctaagcaacaagtaatgaaatcaggtcaatatgctttccgtgaccgtcgtcaacgtaaacgtgacttccgtaaattatggattacacgtatcaacgcagcagctcgtcaacatgaaatgagctactcacgtttaatgaacggtttgaaaaaagctggtatcgacattaaccgtaaaatgttatcagaaatcgcaatttctgacgaaaaagcatttgctcaattagtaactaaagctaaagatgctttaaaataa

SEQ ID NO: 407126 - DNA, 609 bp, Staphylococcus aureus
atgtctaaatttgatgaacaaatcattgtagtacctagagaaattatttttaataatgaaaagaatactttcaatgggtttttaaataagaataaaccagaaggtcaaaatatttttgatgcgctaagtcaatatgaagttaagcgacgcggcgatatggaagaggatccatcatataaacaactcatttcttattgtttacttgaaaatgagcatggcgagatattagtgtatgaacgattatctggcggtggagaagctcgattgcatggacaatcttcaataggtgtaggcggtcatatgaatgatgttccaggagcagaatctattaacgaagtattgagagttaatgcacagagagaattagaagaagaagtaggtttaagtgagcaagattcacaaaatatggaatatatcggttttattaatgacgataataatgaagtgggcaaggtacatattggtgttgtatttaaaatcactgtaagtacgaatgatgtagaagctaaagaaacagatactttacgaataaaatgggttgaaaaaggcaacatagagtcatatgatgatttcgaaacgtggagtgcattaatccttcaagatttataa

SEQ ID NO: 407127 - DNA, 930 bp, Staphylococcus aureus
atgtcagatattattcagtttcctaactcttcgaaaaagttatataaagatataaaacgtgctgaacaagaccaaaactatgacctgatgtatgaatatattgtgcaatatgaacgtcaatttgaactcactgaagaaatagcaatgatgaaatgccgtatgttatatgagacggggtcatttcttgaattaagagaagaaacaattgtcttattgaaaactggcatacaacaatatgatgcattgatgatttattacgtgaaaagtttgattggtttgggacaatattttgaagcggtagaagtaattcatcaaattattgatgaagtcaaagatcacaaaacaagaatggcattacatcctcttaaagaatttgctaagtcaaaattaattgaagatgaaaaacgattgactcagtcattagctgattttgatacgttatcaatgagggaacagacgcacttgattttgaagttaatagacaatggtcattttcaatttcaagaaacggtattatatatattaaaatctaatacgtacagttataacctcattagtttaatgattgagtatttaaggttcgcaaattgtacacaagaactgacaattgaaaagtatggtatggatgtaacttttgtaccagctaatttaaaagggctagaacatacaacacttaaagaaaaagttatacctaacgttatggaaacattaaatgatggtgctttacatatcgctgaagaagcacaccatattatgaataatcactctatcatgatttatccaattgatattgaaactttgtttgaaacgaataaatggattaatgcatacgaatgttatttcaaaaatatgttaggacttaaatgtgaattacaaagtatcgatgcatttaattttattcagcaattagatttgaataataatagttaa

SEQ ID NO: 407128 - DNA, 1302 bp, Staphylococcus aureus
atgacagcaacttgggaaaaaaaggaaggtaacgaaggtttattaactgttactgttcctgcagaaaaagtaaacaaagcgttagatcaagcattcaaaaaagtggttaaacaaattaacgtacctggattccgtaaaggtaaagtgccacgtccaatttttgaacaacgctttggtgtagaagcattatatcaagatgctatcgacattttattaccagatgcttatggtgaagcaattgacgaaactgatattaaaccagttgcacaaccagaagtaagtgttactcaaattgaaaaaggtaaagatttcatttttgaagcaacagttacagttgagccagaagttaaattaggagactataaaggtcttgaaattgaaaaacaagaaactgaattatctgatgatgagttacaagaagcgattgaccacagcttaggacatttagctgaaatggtcgttaaagaagatggtgttgttgaaaatggcgacacagttaacatcgactttagtggttcagttgacggagaagaattcgaaggtggacaagctgaaggttacgatttagaaatcggttcaggttcattcatacctggtttcgaagagcaattagaaggtatgaaagttgacgaagaaaaagatgttgtcgtaacattcccagaagaataccatgctgaagaattagccggtaaagaagcaactttcaaaacaaaagttaacgaaattaaatttaaagaagtcccagaattaacagatgaaattgctaatgaattagatgcagaagcaaatacagtagacgagtacaaagaaaacttacgtaaacgtttagctgaacaaaaagctacagatgctgaaaatgttgaaaaagaagaagcgattacaaaagctactgataatacaacaatcgatattcctgaagcaatggttaatactgaattagatcgtatggtgtctgaatttgcacaaagaattcaacaacaaggtttagatttacaaacgtacttccaaatctcaggtcaagatgaaactcaattaagagagcaaatgaaagacgatgcagaacaacgtgttaaaactaacttaactttaactgcgatcgctgaagctgaaaaaatcgaagctactgatgaagatatcgataaagaattagaaaaaatgagtaaacaatttaatatctcagttgaagatatcaaaaatactttaggtaatactgatatcattaaaaatgatgttcgtatccaaaaagttatcgatttattaagagataacgcaaagttcgttgaaggaactaaagaagattaa

SEQ ID NO: 407129 - DNA, 1263 bp, Staphylococcus aureus
atgtttaaattcaatgaagatgaagaaaatttgaaatgctctttctgcggaaaagaccaagatcaagtaaaaaaacttgtagcaggaagtggtgtatatatttgtaatgagtgtattgaattatgctcagaaatcgtcgaagaagaattagctcaaaacacttctgaagcgatgacagaattacctactcctaaagaaattatggatcatttaaacgaatatgttattggtcaagaaaaagctaaaaaatctttagctgtagctgtttataaccactataagcgtattcaacaattaggaccaaaagaagatgatgttgaattacaaaaaagtaacattgcattaattgggccaacaggtagtggtaaaacattattagctcaaaccttagccaagacgttgaatgtaccatttgcaattgcagatgcgacaagtttaactgaagctggttatgtaggcgatgatgttgaaaatatcttgttgagattaattcaagcagctgactttgacattgataaagccgaaaaaggtattatttatgtagatgaaattgataaaattgcacgtaaatctgaaaacacatctataacacgtgacgtttcaggtgaaggtgttcaacaagcattgcttaaaatcttagaaggtacgactgcaagtgttccgccacaaggtggacgcaaacatccaaaccaagaaatgattcaaattgatacaacaaatatcttatttattcttggtggtgcctttgatggtattgaagaagtgattaagcgccgtcttggtgaaaaagttattggtttctcaagcaatgaagctgataaatatgacgaacaagcattattagcacaaattcgcccagaagatttgcaagcctatggtttgattcctgaatttatcggacgtgtgccaattgtagctaatttagaaacattagatgtaactgcgttgaaaaacatcttaacgcaacctaaaaatgcacttgtgaaacaatatactaaaatgctggaattagatgatgtggatttagagttcactgaagaagctttatcagcaattagtgaaaaagcaattgaaagaaaaacaggtgcgcgtggtttacgttcaatcatagaagaatcgttaatcgatattatgtttgatgtgccttctaacgaaaatgtaacgaaggtagttattacagcacaaacaattaatgaagaaactgaaccagaactatacgacgcagaaggcaatttaattaataatagtaaaacatcagcttaa

SEQ ID NO: 407130 - DNA, 720 bp, Staphylococcus aureus
atgaataaaaatataatcatcaaaagtattgcagcattgacgattttaacatcaataactggtgtcggcacaacaatggttgaaggtattcaacaaacagccaaagccgaaaatactgttaaacaaattacaaatacaaatgttgcaccatacagtggtgttacatggatgggcgctggaacaggatttgtagttggaaatcatacaatcattaccaataaacatgttacctatcacatgaaagtcggtgatgaaatcaaagcacatcctaatggtttttataataacggtggtggactttataaagttactaagattgtagattatcctggtaaagaagatattgcggttgtacaagttgaagaaaaatcaacacaaccaaaaggtagaaaattcaaagatttcactagtaaatttaatatagcatcagaagctaaagaaaatgaacctatatcagtcattggttatccaaatcctaatggaaataaactacaaatgtatgaatcaactggtaaagtattatcagtgaatgggaatatagtgtcatcggatgcaattattcagcctggtagctctggttcacctatattaaatagtaaacacgaagctattggtgtaatctatgccggtaataagccatcaggtgaaagcacaagaggatttgctgtttatttctctcttgaaattaagaaattcattgcagataatttagataaataa

SEQ ID NO: 407131 - DNA, 717 bp, Staphylococcus aureus
atgaataaaaatataatcatcaaaagtattgcagcattgacgattttaacatcagtgactggcgtcggcacaacagtggttgagggtattcaacaaacggctaaagctgaacataatgtgaaactaatcaaaaatactaatgtagcaccatacaatggtgtcgtttcgataggatctggaacaggtttcattgtcggtaaaaatacaattgttaccaacaagcatgtcgttgcaggtatggaaattggtgcacatattatagcgcatcccaatggtgaatataataatggcggattttataaagttaaaaaaattgtccgttattcaggtcaagaagatattgccattctacatgtggaagataaagctgttcatccaaaaaacaggaattttaaagattacacaggcattttaaaaatagcatcagaagctaaagaaaatgaacgcatttcaattgttggctatccagaaccatatataaataaatttcaaatgtatgagtcaacaggaaaagtgctgtcagttaaaggcaacatgattattactgatgctttcgtagaaccaggcaactcaggttcagctgtatttaacagtaaatacgaagttgtaggtgttcactttggtggaaacggccctggaaataaaagtacaaaaggatatggtgtttatttctctcctgaaattaagaaattcattgcagataacacagataaataa

SEQ ID NO: 407132 - DNA, 720 bp, Staphylococcus aureus
atgaataaaaatataatcatcaaaagtattgcggcattgacgattttaacatcaataactggtgtcggcacaacagtggttgatggtattcaacaaacagccaaagcagaaaatagtgtgaaattaattaccaacacgaatgttgcaccatacagtggtgttacatggatgggcgctggaacaggatttgtagttgggaatcatacaatcattaccaataaacatgttacttatcacatgaaagtcggtgatgaaatcaaagcacatcctaatggtttttataataacggtggtggactttataaagttactaagattgtagattatcctggtaaagaagatattgcggtcgtacaagttgaagaaaaatcaacgcaaccaaaaggtagaaaattcaaagatttcactagcaaatttaatatagcatcagaagctaaagaaaatgaacctatatcagtcattggttatccaaatcctaatggaaataaactacaaatgtatgaatcaactggtaaagtactatcagtgaatggaaatatagtgacatctgatgcggttgtccaacctggcagctctggttcacctatattaaatagtaagcgagaagcaattggtgttatgtatgctagtgataaaccaacaggtgaaagtacaaggtcatttgctgtttatttctctcctgaaattaagaaatttattgcagataatttagataaataa

SEQ ID NO: 407133 - DNA, 720 bp, Staphylococcus aureus
atgaataaaaatatagtcattaaaagcatggcagcattagccattctaacctcagtaactggaataaatgctgcagtcgttgaagagacacaacaaatagcaaatgcagagaagaatgttacgcaagttaaagatacaaatatttttccatataatggcgtcgtttcatttaaagatgcgacaggttttgtaattggaaaaaatacaattatcaccaataaacatgtatcaaaagattataaagttggcgatagaattactgcccatccaaacggtgacaaaggaaatggtggtatatataaaattaaaagcatttctgattatccgggtgatgaagacatctctgtcatgaatattgaagaacaagcagtcgaacgtggaccaaaaggctttaattttaatgaaaatgtccaagcattcaattttgcgaaagatgctaaagttgatgacaaaattaaagttattggttacccattacctgctcaaaatagttttaaacagtttgaatctacaggaactataaaaagaatcaaagacaatattttaaattttgatgcatacattgaacccgggaattcaggatcaccagttctaaattctaacaatgaggtcataggtgtggtgtatggcggtattggaaaaattggttctgaatataatggtgccgtatactttacgcctcaaatcaaagattttattcaaaagcacattgaacaataa

SEQ ID NO: 407134 - DNA, 723 bp, Staphylococcus aureus
atgaacaaaaacgtagtcatcaagagtttagcagcattaacaattttaacatctgtaacaggtattggaacaacattggttgaggaagtacaacaaactgccaaagcagaaaataatgtcacaaaagttaaagatactaatatttttccatatactggtgtagttgcttttaaaagtgcaactggatttgtagttggaaagaatactattttaacaaataaacatgtgtcgaaaaattacaaagtgggcgatcgtattactgcacatccaaatagtgataaaggtaatggtggtatttattcgattaaaaagattattaattatccaggtaaagaagatgtatcagtcattcaagttgaagagcgtgcaatagaacgtggaccaaaaggctttaattttaatgataatgtaacgccattcaaatatgcggcaggggctaaagctggtgagcgaattaaagtgattggttatccacacccatacaaaaataaatatgttttatatgagtcaactggccctgtgatgtcagtagaaggtagcagtattgtatattcagcgcatactgaaagcggaaactctggatcacctgtattaaacagcaacaacgaattagttggtattcattttgcttctgatgtaaaaaatgatgataacagaaatgcatatggcgtctactttacaccagaaattaaaaaattcattgcagaaaacatagataaataa

SEQ ID NO: 407135 - DNA, 708 bp, Staphylococcus aureus
atgaataaaaatgtaatggttaaaggtttaactgctttaactattttaacatctcttggttttgctgaaaatatttctaatcagcctcattcaattgccaaagcagaaaagaatgtcaaagaaattaccgatgcaactaaggaaccatacaattcagtggtagcatttgtgggtggtactggtgtagttgttggtaaaaatacaatcgtaactaacaaacatatcgctaaaagtaatgatatttttaaaaatagagtatcagcacatcattcgagtaaaggtaaaggcggaggaaactacgacgttaaagacattgtagaatatcccggaaaagaagaccttgcgatagttcatgttcatgaaacaagtacagaaggtttgaattttaataagaacgttagttatacaaaatttgcagacggagcaaaagtgaaagatagaatttctgttattggttatccaaagggtgcacaaacaaaatataaaatgtttgaatcgacaggaacgattaaccatatcagtggaacgtttatggaatttgatgcgtatgcacaaccaggtaattcaggatctcctgtattgaattctaaacatgaactgattggtattttatatgcaggtagtggaaaagatgaatctgaaaagaatttcggtgtttatttcacaccacaattaaaagaatttattcaaaataatattgaaaaataa

SEQ ID NO: 407136 - DNA, 567 bp, Staphylococcus aureus
atgaatacaaaatttttaggtaaaacattagtagcaagtgctttagtattaacaacattaggaacaggcttacattcttcatacttaggattagatacaaataaagttgttaaaacggctaaagcagaagaaaaaatgacagatggtcaattatggaaaaaagttaaagattcattacatgattctgatattattttaagtaacgagtacgaaacaatcaacgttacttatttattaagcaatggatattctagcagcgtttctgctcctggaaatgatgatggaggccatctaacacaatctatagactttaaaggattaaaacaaattgatttaactaaggaaaatgtctacgatgactttaacaaaaagctagatgctaaaaatacatggaattctctaaccgagaagttaaaaggtcttggtttactacaaaatggccaaaaagtatctatttattcttcagatagctcttctccagtctcgggtaaagtgggagaaggagtaactagtggtggcgaaaatactctaactaaacgcttcatcaacaaaatcacaattgattaa

SEQ ID NO: 407137 - DNA, 699 bp, Staphylococcus aureus
atgataattaacgaattaaagtcatgtaagttgaaattttctaagcaagcgctcacatttgtacccattattgtaaccatattgtttatattatttataaattggtatttaaacgtaaatttatggaatggtcgacaaataagtttgtttacagcgagttttaatgcaattacatcgctattaatttctataaacgtctatcaagttatcaattttgaagaaaatattggtcactttaatcatattttaggaaaagctaataggctaaattggttaaatgcatcaatgatttttacttatactattacagccatatgtattctattagcatcaattaatttattgtggcattcacatgatatgaaaataacacttatgtttataggcgtatcattgtttttcaatgtaattatattactgctactttttatttttagtattttcattaaagatgtaatggctattgttgtcggagttttaatgtttatttttaacgtttattttggattagaagtgcttggagatcattcgtggttctatttaccaatcacatatgctacacgttacgtttatatgtttatcgaagggagtataccagttacattaacattggcaatctatattattatcacgttgctattagcagttttactctttaaaggatttaataaatggagcggtagaacaattaaagattaa

SEQ ID NO: 407138 - DNA, 762 bp, Staphylococcus aureus
atgatacatttaaagatagaaggtatcaaatttaaaaattctttcagtatgtatgttttattaataagtccgctggtatttctttgttttgctattttcacagtcttattcgccaaaagtaatacgggaacagcgaatagtgtgtcaccatatataactttactatttaatatttggccaattgctttcatcccgattgtattatgtatggcttgtaattcgttatttaaaattgaaatgagaaataaatcatttaattattacttaagtaataattggtcgattacaaaagaaataagagcaaagattttcattttatcaatagcatttttggtacattgctttttagtatttattattgcttatataggtgacctaattattaatccacatccggttaatgctatgttgttattggtgacaatattgttgatgtatgtagtatctctaccattgataccgctcaactttttattaactcgatactttggtgtgttcgtatcaatattaataaacttagtattatcagtcatttgtgtcttgtttttaacattgaagagtttattttgggtgttgccgtgggggataatgcagagaatcccgcttattacgcttggtatactacctaatggtttagttgtaaaccataattcaaaatactttaatgatctcaatgccttatatatttcgattattgttagcatcattattttcgcgatagtaacatttttaaataataagaaaagttggcgattaaaatga

SEQ ID NO: 407139 - DNA, 693 bp, Staphylococcus aureus
atggcaaaattagttactgaaaacatttcgaagcggtttaaaaatcaagatgtattaaagcatattaatatcactttagaaaataacgaagtttatggattacttggtattaatggagccggtaaaacgacacttatgaaaattatatgtggcatacttcaacaagattcaggggaaattaaattagataatagaccaatgacacgaaatgatttgcacaaagttggttcgcttattgaaacacctgcgacatataatcatttaagtgcacaagataatttgaaaattgtgtgtttaaatgaaagcgttgatttcagcgaaattaatagtgttttaagcttagtcaatttaaatgtcgataaaaagaaaaaggttaaggacttttctttaggtatgaaacaaagacttggaattgcaatggcattaattaaaaagccagaaattttagtattagacgaaccatctaatggtttagacccatatggaatccaagaacttagagaacttctaaaattattaacagaacaaggtactagtattattatttcaagtcacattttatctgaaatccaagttttagcagatcatatcggtattattcatgagggtgagctaaaatatcagcaaagaaataacaaagatgaaaacttagaagagatattcttcaaaataacgaaaggtgattacaaatga

SEQ ID NO: 407140 - DNA, 1374 bp, Staphylococcus aureus
atgaaaatcataaagcgcgctattattagtttaataatattgagtcttttaatatctattacaatgagtaatgcatcagcgtcagaagaactatattacagtgttgaatacaaaaatacagcaacatttaacaagttagttaaaaagaagtccttaaacgttgtctataatataccggaattacatgtggcacagattaaaatgacgaaaatgcatgctaatgctttagcaaactataaaaatgatattaaatatatcaatgccacatgttcaacttgtattactagcgagaaaacaatagacagaacatcaaatgagtcattattttcaagacaatgggatatgaataaaataaccaataatggtgcatcgtatgatgatttgccaaaacatgctaacaccaaaatagcaatcatagatacaggtgtgatgaaaaaccatgacgatttgaaaaataatttctcgactgattctaaaaatttagtacctttaaacggttttagaggtactgaaccggaggaaacaggtgatgttcacgatgtcaatgataggaaaggacatggcacgatggtgtcgggtcaaacgagtgctaatggtaagttaataggtgttgcaccgaataacaaatttacaatgtatcgcgtgtttggtagtaaaaaaacagaactgctttgggtatcaaaagcgattgttcaagctgcaaatgatggaaatcaagtcattaatattagtgttggtagttatattattttggacaaaaatgaccatcaaacatttagaaaagatgaaaaagtagaatacgatgcgttacagaaagcaatcaattacgccaagaagaaaaaatctatcgttgttgctgcagctggtaatgatggtattgatgtcaatgacaaacagaaactaaaattacagcgtgaatatcaaggtaatggcgaagtgaaagatgttcctgcatctatggacaatgtcgttacagtaggatctacagatcaaaagagtaatctatctgagttttccaattttggtatgaattatacagatattgctgcgcccggaggatcatttgcttatttaaatcaattcggtgtggataaatggatgaatgaagggtatatgcataaggagaacattttaactactgccaataacggaagatatatttatcaagctggaacttcattagccacacctaaagtttcgggagcactagctttaatcattgataaatatcatcttgaaaaacatccagataaagcgattgaattgttatatcagcatgggacatctaagaataataaaccatttagtagatatgggcatggtgagcttgatgtgtataaagcattaaatgtagcaaatcaaaaagcaagttaa

SEQ ID NO: 407141 - DNA, 519 bp, Staphylococcus aureus
atgggagaaaatgtattgatttgtttgtgtggctcagttaatagtatcaatattagccactatattattgaattaaaatcaaaatttgatgaagtaaatgtaatcgcgtcaacaaacggtagaaagtttattaatggtgaaatattaaagcaattttgcgataactattatgacgaatttgaagacccttttttaaatcatgtagatatagcaaataaacatgacaagattattattttacctgcgacttctaatacgattaataaaattgcaaatggtatatgtgacaatttattattaactatttgtcatacagcttttgaaaaactttctatatttccaaatatgaatttacgaatgtgggaaaatccagttactcaaaataatattcgattattaaaagattatggtgtatcaatatatccagcaaatatttcagaaagttatgaattagcgtcaaaaacatttaaaaagaatgttgtcgcacctgaaccatataaagttctggaattcatttga

SEQ ID NO: 407142 - DNA, 1245 bp, Staphylococcus aureus
atgattgatatgaatctaatattgaagaagaagtttcaagagatttcagaagtagatgatttcatttcaaaagcatctactgaaaccgattattttgaaccttcaactttatcacatggtataccaggtatcattttgtttttagatgcttatcaaaaagttttcgatattaatactgagcaaattgtgcataagtacatcatgaaattagcaccatatttacagagtggtcaatataacaattctttgtttggtggactttcaggtattgcattttcaatggatttagcatcgcaaaatggcaaaaattatcaaaatattttaaataatattgatggtcacattgtaaatgaaatagaaaataaatttgatcaaatattacaagaaccattaaatccattaaattatgatactgtcagtggattagctgggatagggagatatttgctaaatagagtagatgagaatgaatttaatgttaaagcattaaaaagcatattagtatactttaaagatattcaatattctaaaaatagctgggtagtcccacaagaaagtcaatttttagagtctgataaaaattattttactgaaggtaatatcaatcttggccttgcacatggagtgctaggaccgatgtctttatttgcattatgcgtgattaaaggaattacgattgaaaatcatcagcacatattaaaagacatgtacaaatttatcatggacgaaaaattttgtaaccacgaaagatggttgcagcgttacgatttaatttctgaacgtaatcatttcaattttattcggaatggttggtgttatggcaatacgggtgtaatgacgacgttgtttttaatcggccaagcattacaagatgatgaaataattaaaatgtctaaaaaagtgatgctacaagtagtaaatgataaagatgaaaatttaataagtccaactatttgtcatggattgtcatcacaaatattaatgttaacaattatgaatttgaattttgaattaaatgaagtgtctgattatatcactgtattaataaataaactgatttctcattataaggaagattatctggtgaattttatagacattaatgaaaataagcaagatgtatttaaaagtaggaaagttggccttttagaaggtgaattaggggtctatctaacattgatgacactgaaaaatacaaaaattctcaatgaaaaaaattggaccaatgcgtttttaattagctga

SEQ ID NO: 407143 - DNA, 2994 bp, Staphylococcus aureus
atgaacactatttacgaaccgtcaagtatttgtatgattagaacacctttattatcagttgaatttttcaatttatttttaaatactgaacaaattaaatatagcgacttacaattaaatgctcagatgaaagaatcaatcctaacaacaacatttaacttatattgtactttacaagaaataaattttgatggcgataacaagaaggttagagatgctaaagaaagtttattaaaatatttaattagaatgtcaacacgtccaactccatttggattattaagtggtattaatttggggcattttgtaaatgaaccaacacgtcttaaagttggaaatagtattcaaaaatatgtgaaagtcgatggcgaatggttgtataaactggttagttatattgagagtattgatgaatattatcaaaatttgaaagttatttggaatagtaaagcacatattatcaatgatcgaatatatttaaatgaacaaagtgctatttatttaaacaacaataaagatacatctttttccattaaaaatagcgaattactcgtattcatcaaaaccactgtgacgaataataatattactttttcaaatttagctgaaaagataaatcaagaatttgaaattaatgatattactaaagtgaaagtatatatccataatcttgtctcaaaggaaattatatattcaacaatcagaccaccgttatcatatagcgataatttaaattatattttaaataaactttctttacataatgatgattttgtgaaaaaaattagagaaatccagaaattgatattagcttatgaaaaaactgaaattggatttggcgaggaattatataaagacattattcatcatatgaaggcactattcaaatgtaaaaactatcttcaaattgataccaaaattgacatgattaacaattatttacatcaagatatagcaacaaatatatctgaagcagcgtacttattgtggcttttatcaagaaataatattggattcacagatttgaaagttcttcacaaccgttttattgaaaagtatggatttgaacaactcgtgaatattaaagatttgatttcagatataacaggtttcgggacaacaatttttcaagaagaagaaaccgatggaaataatattgtaatgcttaagcaaaaatttttacatgccttgagaaataacgatgagatagtcataaatgaaaaagatgtagagtcattgattaacgataatgaaatcaatcattatcatgcgccaatgagtgcagatgtttatgctgaactttatttaggacgtttttacaatcagtacaatgagctcattgttattagtcctttaacggcgtcttttaatgctggcgctacatttgggcgatttcatcatttaattgatactgaaactttagcaaaattagaacatgaaaaaggacattattatcagaagatgatatgtgatgacaatgtagaaatgatttctataaataacataccgaaatatccgagaaatcataatgtattaactaatcatgactcatacgaatattcattgaatttaggaagtagtaatagttattcaaagtatgagcttaccttagatgatatttatgttggtgctacctttaacaaattatatttatattctagccaactaaataaaagggtactatttgaatcaaacaatatgtataactttttaaaagaatgtaatttatatcgattgttacgagaaatttcaatggaatctgtgaaatgcattgaacctatgaatgatgtgagtattgattcatttagttattcaccacgaatcagatataaaaatgtcattcttaaaccagcatattggaaaattaacgagatggtattacctttacctaaaaatgaagaatgggatcaacaatttttgaaatatcaagaacaattcaatatacctaatatcgtgaatttagtttatggagataataagcttctactaaatttatcattagctaatcatagatatttattgatgaaagaatataagaagcataaacgtgtacgtttagtagaatcatttttacctcaatcaaagaatgatcatgtgtatgaaattgttacaccaatttataaaaaatcatcttatcgaggacccgaaatcgaaattccaaaatataaaaatacagatattgaatatgacaaagactggtttgcattacatattcatatcgataagccatcgcaagatacatttatcatcgacaatttgtatccatttgtaaaacatcttaaagataagggagatatagatcaatattttttaatgcgttatatcaaacaaggtgacattttaaagttgaggttattcaggaatgacgaaaattacgcagaaatatacagcatcttgaagaattggttaccacatgttcgacaaacgacagaagtttcagattatgaatttgtatcatacgagccagaattttttagatatggtggaaagaacacgattaatgaaatagaagccttctttgaatatgacacgaatttagctgtcaatattattgaaaatgattttaagtttgatcgaccatatattgttgctatttcaataatgtatttatttgagatgttttcaatttctaatgaagagcgtatggaaattgttaataactatgtacctacatcatttaaaagtaaagatattagaccttttaaaaatgaacttgtaactatatgtaatcctgctaataattttgaatatatggctaaacactatagtggtatttatcgaattttaaaagatggcaaccaaattttgagcaaattaaatgaagggcttaaaaaaactttaactactaaaaggtcaaggattattggcagcttaattcatatgcgctgcaatcgaatatttggcattgataaggatcaagaaacatttgttttatctattgtaaaagaaattgttaaaactcaaaagcattggtgtggtgacaaaaatgattga

SEQ ID NO: 407144 - DNA, 144 bp, Staphylococcus aureus
atggaaaaagttcttgatttagacgtgcaagttaaagcaaacaataactcaaatgattcagcaggtgacgaacgtattacaagtcatagtttatgtactcctggttgtgctaagactggtagttttaatagcttctgctgttaa

SEQ ID NO: 407145 - DNA, 984 bp, Staphylococcus aureus
atgaaaatgaaaaaattagtcaaatcatcagttgcttcatcaattgcactgcttttgctatcgaatacagttgatgcagctcaacatatcacacctgtaagcgagaaaaaagtagatgacaaaatcactttatacaaaacaacagcaacatctgataatgataaattgaatatttctcaaattttaacgtttaatttcattaaggataaaagttatgacaaagatacgttagtacttaaggcagccggaaacattaattcaggttataaaaagcctaatccaaaagattacaattactcacagttttattggggcggtaagtataatgtttcggttagttcagaatcaaatgatgctgtaaatgttgttgactatgcacctaaaaatcaaaatgaagaattccaagttcaacaaacattaggttattcttatggcggagatattaatatatctaatggcttatcaggtggattaaatggatcaaaatcattttcagaaacgataaattataaacaagaaagttacagaactacgattgatagaaaaacaaatcataaatcaattggctggggtgttgaggcgcacaaaattatgaataatggttggggaccatatggtagagatagttatgacccaacatatggtaatgaactgtttttaggcggtagacaaagtagttcaaatgctggtcaaaatttcttgccaacacatcaaatgcctttattggcgcgtggtaactttaacccagaatttataagcgtactttctcataaacaaaatgatacaaaaaaatctaaaatcaaagtaacttaccaaagagaaatggatagatatactaatcaatggaatcgactacactgggttggtaataactacaaaaatcaaaatacagtaacgtttacatctacttatgaagttgactggcaaaaccatactgttaaattaatcggtacggattctaaagaaactaatcctggagtataa

SEQ ID NO: 407146 - DNA, 936 bp, Staphylococcus aureus
atgtttaagaaaaaaatgttagctgcaactttgtcagtaggactgattgcacctttagcatctccgattcaagaatctagagcaaatactaatattgaaaatattggtgatggtgctgaagtaatcaaacgtacggaggatgtaagtagtaagaaatggggcgttactcaaaatgtccaattcgactttgtaaaagataaaaaatataacaaagacgctttaattgttaaaatgcaaggttttattaattccagaacttcattttcagatgtgaagggtagtggatatgaattaactaaacgaatgatttggccattccaatataatataggactgacgactaaagatccaaatgttagcttaatcaattaccttcctaaaaacaaaatagaaactactgatgttggtcaaacattaggatataacattggaggtaatttccagtcagcaccatctataggtggcaatggctcatttaattattctaaaacaattagttatacccaaaagagttatgtcagtgaagtagacaagcaaaactcaaaatctgttaaatggggtgttaaagcaaacgaatttgttacgcctgatggaaaaaaatctgcgcatgatagatatttattcgtacaaagtccaaatggtccaacaggttcagcaagagaatattttgctcctgataatcaattgccacctttagttcaaagtggctttaatccatcgtttatcactacactatcacatgaaaaaggttcaagtgatacgagtgaatttgaaatttcatatggtagaaacttagatattacatatgcgactttattccctagaactggtatttacgcagaaagaaagcataatgcatttgtaaatagaaactttgtagttagatatgaagttaattggaaaacacacgaaattaaagtgaaaggacataattaa

SEQ ID NO: 407147 - DNA, 456 bp, Staphylococcus aureus
atggctaaacttgatttaaatagtcttgacgacgagcacgtaaaattattaataaatgaattaaaatatccagaaactcatatcgatgtaaatgaattaaaaacaatagttgctagtcgaataaatgaaaggcaagaaataataagttttaagttaggaataaagtacttattaacaataaaaagagggaacatagaaaaagataggttttcaatttcaatcattttcaaagatacctatcacaccctagttagaatagatattaacggtggtactcacgataatccagatggaacaatcgctccgaaaagtcatattcacatatataatgataagtatgataaaaaggataggtttgcttatgaaattaacttgaaagatttccccgacatctataacttgtataatgtgtatatgtcgtttttagagtataataatataaaagaccttgaataa

SEQ ID NO: 407148 - DNA, 789 bp, Staphylococcus aureus
atgactacatttgatgctaaaaaattaaaaaaagaatatcttgattggtataatcagaccttagagttttctaatttatcaaacaatgtagtaagaatagatactccttttaaagataattctttagataatttaataatttacgctttatacgatcagtccagagacatgattacactgacagatgacggctatactatatttgatttagaaaataatggtatttctttaaataaatcaaaaaaacgtaaaaagatttttgaagagcacctttcagcttacggtattaaatataacgataaaactcacgaaatttttgttcaaactaactttaaaaattttaataaatcgaaacataatttattacagtgccttatatttgttaatgatatgtacttactttctaatcctaagtcacagaacatatttacagaagatgttgcaaacaaattggatgaacataacatttattacggaagagatttacctattataggaagcagtggtgttgttcataatttcgacttttttattagcgctaagaaaaatcaaaaagaaaaatttatcaatgctatttctaaccctaataattctatgattattaagtcgaaaataacggatgctatgcaagcaaaaaaaataaaaagacacaggcaaaatgagtttatttttattttaaatgactcaaaaaaagaaataaatgaacataataaaaatcttcttcatgaaaactatattagtacaatagattatagcgaattagatgaaaagataggtttattgatttaa

SEQ ID NO: 407149 - DNA, 231 bp, Staphylococcus aureus
atgctcagcacactcaacgaaattaaattaggtcaaaaaacccaagagcaagttaacattaaattagataaaaccttagatgctattcaaaaagaaagagaaatagatgaaaagaataagaaagaaaatgataagaacatacgtgatatgaaaatgtgggtgcttggtttagttgggacaatatttgggtcgctaattatagcattattgcgtatgcttatgggcatataa

SEQ ID NO: 407150 - DNA, 288 bp, Staphylococcus aureus
atggcaaaagaaattatcaacaatacagaaaggtttattttagtacaaatcgacaaagaaggtacagaacgtgtagtatatcaagatttcacaggaagttttacaacttctgaaatggttaaccatgctcaagattttaaatctgaagaaaacgctaagaaaattgcggagacgttaaatttgttatatcaattaactaacaaaaaacaacgtgtgaaagtagttaaagaagtagttgaaagatcagatttatctccagaggtaacagttaacactgaaacagtatga

SEQ ID NO: 407151 - DNA, 153 bp, Staphylococcus aureus
atgcaggataacaaacaaggattacaagctaatcctgaatatacaattcattatttatcacaggaaattatgaggttaacacaagaaaacgcgatgttaaaagcgtatatacaagaaaataaagaaaatcaacaatgtgctgaggaagagtaa

SEQ ID NO: 407152 - DNA, 3786 bp, Staphylococcus aureus
gtgatacatgttttagattttaacgacaagattatagatttcctttctactgatgacccttccttagttagagcgattcataaacgtaatgttaatgacaattcagaaatgcttgaactgctcatatcatcagaaagagctgaaaagttccgtgaacgacatcgtgttattataagggattcaaacaaacaatggcgtgaatttattattaactgggttcaagatacgatggacggctacacagagatagaatgtatagcgtcttatcttgctgatataacaacagctaaaccgtatgcaccaggaaaatttgagaaaaagacaacttcagaagcattgaaagatgtgttgagcgatacaggttgggaagtttctgaacaaaccgaatacgatggcttacgtactacgtcatggacttcttatcaaactagatatgaagttttaaagcaattatgtacaacctataaaatggttttagatttttatattgagcttagctctaataccgtcaaaggtagatatgtagtactcaaaaagaaaaacagcttattcaaaggtaaagaaattgaatatggtaaagatttagtcgggttaactaggaagattgatatgtcagaaatcaaaacagcattaattgctgtgggatctgaaaatgacaaagggaagcgtttagagctagttgtgacagatgacgaagcgcaaagtcaattcaacctacctatgcgctatatttgggggatatatgaaccacaatcagatgatcaaaatatgaatgaaacacgattaagttctttagccaaaacagagttaaataaacgtaagtcggcagttatgtcatatgagattacttctactgatttggaagttacgtatccgcacgagattatatcaattggcgatacagtcagagtaaaacatagagattttaacccgccattgtatgtagaggcagaagttattgctgaagaatataacataatttcagaaaatagcacatatacattcggtcaacctaaagagttcaaagaatcagaattacgagaagagtttaacaagcgattaaacctaatacaccaaaaattaaacgacaatattagcaatatcaatactatagtaaaagatgttgtagatggtgaattagaatactttgaacgcaaaattcataaaagtgatacaccgccagaaaatccagtcaatgatacgctttggtatgatacaagtaaccctgatgttgctgtcttgcgtagatattggaatggtcgatggattgaagcaacaccaaatgatgttgaaaaattaggtggtataacaagagagaaagcgctattcagtgaattaaacaatatttttattaatttatctatacaacacgctagtcttttgtcagaagctacagaattactgaatagcgagtacttagtagataatgatttgaaagcggacttacaagcaagtttagacgctgtgattgatgtttataatcaaattaaaaataatttagaatctatgacacccgaaactgcaacgattggtcggttggtagatacaaaaactttatttcttgagtatagaaagaaattacaagatgtttatacagatgtagaagatgtcaaaatcgccatttcagatagatttaaattattacagtcacaatacactgatgaaaaatataaagaagcgttggaaataatagcaacaaaatttggtttaacggtgaatgaagatttgcagttagtcggagaacctaatgttgttaaatcagctattgaagcagctagagaatccacaaaagaacaattacgtgactatgtaaaaacatcggactataaaacagacaaagacggtattgttgaacgtttagatactgctgaagctgagagaacgactttaaaaggtgaaatcaaagataaagttacgttaaacgaatatcaaaacggattggaagaacaaaaacaatatactgatgaccagttaagtgatttgtccaataatcctgagattaaagcaagtattgaacaagcaaatcaagaagcgcaagaagctttaaaatcatacattgatgctcaagataatcttaaagagaaggaatcgcaagcgtatgctgatggtaaaatttcggaagaagagcaacgcgctatacaagatgctcaagctaaacttgaagaggcaaaacaaaacgcagaactaaaggctagaaacgctgaaaagaaagctaatgcttatacagacaacaaggtcaaagaaagcacagatgcacagaggagaacactgactcgctatggttctcaaattatacaaaatggtaaggaaatcaaattaagaactactaaagaagagtttaatgcaaccaatcgtacactttcaaatatattaaacgagattgtccaaaacgttacagatggaacaacaatcagatatgatgataacggagtggctcaagctttaaatgtggggccacgtggtattagattaaatgctgataaaattgatattaacggtaatagagaaataaaccttcttatccaaaatatgcgagataaagtagataaaaccgatattgtcaacagccttaatttatcaagagagggtcttgatatcaatgttaatagaattggaattaaaggcggtaacaataacagatatgttcaaatacagaatgattctattgaactaggtggtattgtgcaacgaacttggaaaggcaaacgatcaaccgatgatatattcacacgtcttaaagatggacatctaaggtttagaaataataccgcaggcggttcactttatatgtcacattttggtatttcaacatatattgatggagaaggcgaagacggaggttcatccggtactattcaatggtgggataaaacttacagtgatagcggtatgaatggcataacaatcaattcctatggtggtgtcgttgcactaacgtcagataataatcgggttgttctggagtcttacgcttcatcgaatatcaaaagcaaacaggcaccggtgtatttatatccaaacacagacaaagtgcctggattaaaccgatttgcattcacgctgtctaatgcagataatgcttattcgagtgacggttatattatgtttggttctgatgagaactatgattacggtgcgggtatcaggttttctaaagaaagaaataaaggtcttgttcaaattgttaatggacgatatgcaacaggtggagatacaacaatcgaagcagggtatggcaaatttaatatgctgaaacgacgtgatggtaataggtatattcatatacagagtacagacctactgtctgtaggttcagatgatgcaggagataggatagcttctaactcaatttatagacgtacttattcggccgcagctaatttgcatattacttctgctggcacaattgggcgttcgacatcagcgcgtaaatacaagttatctatcgaaaatcaatataacgatagagatgaacaactggaacattcaaaagctattcttaacttacctattagaacgtggtttgataaagctgagtctgaaattttagctagagagctgagagaagatagaaaattatcggaagacacctataaacttgatagatacgtaggtttgattgctgaagaggtggagaatttaggattaaaagagtttgtcacgtatgatgacaaaggagaaattgaaggtatagcgtatgatcgtctatggattcatcttatccctgttatcaaagaacaacaactaagaatcaagaaattggaggagtcaaagaatgcaggataa

SEQ ID NO: 407153 - DNA, 1485 bp, Staphylococcus aureus
atgatagacactattaaagtgaacaacaaaacaattccttggttgtatgtcgaaagagggtttgaaataccctcttttaattatgttttaaaaacagaaaatgtagatggacgttcggggtctatatataaagggcgtaggcttgaatcttatagttttgatatacctttggtggtacgtaatgactatttatctcacaacggcattaaaacacatgatgacgtcttgaatgaattagtaaagttttttaactacgaggaacaagttaaattacaattcaaatctaaagattggtactggaacgcttatttcgaaggaccaataaagctgcacaaagaatttacaatacctgttaagttcactatcaaagtagtactaacagacccttacaaatattcagtaacaggaaataaaaatactgcgatttcagaccaagtttcagttgtaaatagtgggactgctgacactcctttaattgttgaagcccgagcaattaaaccatctagttactttatgattactaaaaatgatgaagattattttatggttggtgatgatgaggtaaccaaagaagttaaggattacatgcctcctgtttatcatagtgagtttcgtgatttcaaaggttggactaagatgattactgaagatattccaagtaatgacttaggtggtaaggtcggcggtgactttgtgatatccaatcttggcgaaggatataaagcaactaattttcctgatgcaaaaggttgggttggtgctggcacgaaacgagggctccctaaagcgatgacagattttcaaattacctataaatgtattgttgaacaaaaaggtaaaggtgccggaagaacagcacaacatatttatgatagtgatggtaagttacttgcttctattggttatgaaaataaatatcatgatagaaaaataggacatattgttgttacgttgtataaccaaaaaggagaccccaaaaagatatacgactatcagaataaaccgataatgtataacttggacagaatcgttgtttatatgcggctcagaagagtaggtaataaattttctattaaaacttggaaatttgatcacattaaagacccagatagacgtaaacctattgatatggatgagaaagagtggatagatggcggtaagttttatcagcgtccagcttctatcatagctatctatagtgcgaagtataacggttataagtggatggagatgaatggattaggttcattcaatacggagattctaccgaaaccgaaaggcgcaagggatgtcattatacaaaaaggtgatttagtgaaaatagatatgcaagcaaaaagtgttgtcatcaatgaggaaccaatgttgagcgagaaatcgtttggaagtaattatttcaatgttgattctgggtacagtgaattaatcatacaacctgaaaacgtctttgatacgacggttaaatggcaagatagatatttatag

SEQ ID NO: 407154 - DNA, 4530 bp, Staphylococcus aureus
atgggagaaagaataaaaggtttatctataggtttggatttggatgcagcaaatttaaatagatcatttgcagaaatcaaacgaaactttaaaactttaaattctgacttaaagttaaccggcaacaacttcaaatataccgaaaaatcaactgatagttaccaacaaaggattaaagaacttgacggaactatcataggttataagaaaaatgttgatgatttagccaagcaatatgacaaggtatctcaagaacagggtgaaaacagtgcagaagctcaaaaattacggcaagaatataacaaacaagcaaatgagctgaattatttagaaagagaattgcaaaaaacatcggctgagtttgaagagttcaaaaaagcccaagttgaagctcaaagaatggcagaaagtggctgggggaaaaccagtaaaatttttgaaagtatgggacctaaattaacaaaaatgggtgatggtttaaaatctattggtaaaggtatgatgattggtgttaccgcacctgttttaggtattgcagcagcatcaggaaaagcttttgcagaagttgataaaggtttagatacagttacccaagcaacaggagcaaccggcggagagcttaagaagttgcagaattcatttaaagatgtttatggcaactttccagcagatgctgagactgtaggcggtgttttaggggaagttaacacaaggttaggtttcactggcaaagaacttgagagtgccacagagtcattcttgaaatttagtcacataacaggttctgaaggcgtacaagccgttcaattaattacgcgtgcaatgggtgatgcaggtattgaagctgatgagtatcaaagtgtacttgatatggtagcgaaagcagcacaggctagcggtataagtgttgatacattagctgatagcattactaaatacggtgctccaatgagggctatgggctttgagatgaaagaatcaatcgctttattctctcaatgggagaaatcaggtgttaatactgaaatagccttcagtggtttgaaaaaagctatatccaattggggtaaagctggtaaaaatccaagagaagaatttaagaagacattagcagaaattgaaaagacgccggatatagctagcgcaacaagtttagcgattgaagcatttggtgcaaaagcaggtcctgatttagcagatgctattaaaggtggtcgttttagttatcaagaatttttaaaaactatcgaagattcccaaggcactgtaaatcaaacgtttaaagattctgaaagtggctccgaaagatttaaagtagcaatgaataaattaaaattagtaggtgctgatgtatggacttctattgaaagtgcgtttgcaccagtaatggaagaattaatcaaaaagctatctatagcggttgattggttttccaatttaagtgatggttctaaaagatcaattgttattttcggtggtattgctgctgcaattggtcctgtagtttttggattaggcgcatttataagtacaattggcaatgcagtaactgtattagccccactattagctggtattgcaaaggctgatggattaattagttttttatcgactaaagtacctatattaggaactgtcttcacggctttaactggtccaattggcattgtattaggtgttttggctggcttagcagtcgcatttacaattgcttataagaaatctgaaactttcagaaattttgttaatggtgcaattgaaagtgttaaacaaacatttagtaattttattcaatttattcaacctttcattgattctgttaaaaacatctttaaacaagcgatatcagcaatagttgattttgctaaagatatttggagtcaaattaatggattctttaatgaaaacggaatttctattgttcaagcgcttcaaaatatatgcaattttatcaaagctatatttgaatttattataaattttgtaattaaaccaatcatgttcgcgatttggcaagtgatgcaatttatttggccggcggttaaagctttaattgtcagtacttgggagaatataaaaggtgtgatacaaggagctttaaatatcatactaggtttaattaagttcttctcaagtttatttactggagattggcgaggagtttgggatgcgattgttatgattcttaaaggagtcgttcaattaatatggaatttaattcaattatggtttgtaggcaaaatacttggcgttgttaggtactttggcggattgctaaaaggattaatagcaggtatttgggacgtaataaaaagtatattcagtaaatctttatcagcaatttggaatgcgacaaaaagtatttttggattcttatttaatagtgtcaaatcaattttcacgaatatgaaaaattggttatctaatacttggagtagtatccgtacgaatacgataggaaaagcgcagtcattatttagtggcgtcaaatcaaaatttactaatttatggaatgcgacgaaagaaatttttagtaatttaagaaattggatgtcaaatatttggaattccattaaagataatacggtaggaattgctagccgtttatggagtaaggtacgtggaatttttacaaatatgcgtgacggcttacaaagtattatcagcaaaattaaaagtcatatcggcggtatggtagatgctattaaaaaaggacttaataaattaatcgacggtttaaactgggtcggtggtaagttgggcatggataaaatacctaagttacatactggtacagagcacacacatactactacaagattagttaagaacggtaagattgcacgtgacacattcgctacagttggagataagggacgcggaaatggtccaaatggttttagaaacgaaatgattgaattccctaatggtaaacgtgtaatcacaccaaatacagatactactgcttatttacctaaaggctcaaaagtatataacggtgcacaaacttattcaatgttaaacggaactcttccaagatttagtttaggtactatgtggaaagatattaagtccggtgcatcatcagcatttaactggacaaaagatcaaataggtaaaggtaccaaatggcttggcgataaagttggcgatgttttagattttattgaacatccaggaaaacttttaaattatatacttgaagcttttggaattgatttcaattctttaactaaaggaatgggaattgcaggcgacataacaaaagctgcatggtctaagattaagaaaagtgctactgattggataaaagaaaatttagaagctatgggcggtggcgatttagtcggcggaatattagaccctgacaaaattaattatcattatggacgtaccgcagcttataccgctgcaactggaagaccatttcatgaaggtgtcgattttccatttgtatatcaagaagttagaacgcctatgggtggtagacttacaagaatgccgtttatgtctggtggttatggtaactatgtaaaaattactagtggcgttatcgatatgctatttgcgcatttgaaaaactttagcaaatcaccacctagtggcacgatggtaaagcccggcgatgttgttggtttaactggtaataccggatttagtacaggaccacacttacattttgaaatgaggagaaacggacgccattttgaccctgaaccatatttaagaaatgcaaagaaaaaaggtaggttatcaattggtggcggtgatgctacttctggaagtggtgcaacttatgccagccgagtaatccgacaagcgcaaagtattttaggaggacgttataaaggtaagtggattcatgaccagatgatgcgagttgcaaagcgtgaaagcaactatcaatcaaatgcagtgaataattgggatattaatgctcaaagaggagacccgtctagaggattattccaaattatcggctcaacttttagagctaacgctaaacgagggtacactaattataataatccagtacatcaaggtatctcagcaatgcagtacattgttagacgatatggttggggtggttttaaacgtgctggtgattacgcatatgctacaggtggaaaagtttttgatggttggtataacttaggtgaagacggtcatccagaatggattattccaacagatccagctcgtagaaatgatgcaatgaagattttgcattatgcagcagcagaagtaagagggaaaaaagcgagtaaaaataagcgtcctagccaattatcagacttaaacgggtttgatgatcctagcttattattgaaaatgattgaacaacagcaacaacaaatagctttattactgaaaatagcacaatctaacgatgtgattgcagataaagattatcagccgattattgacgaatacgcttttgataaaaaggtgaacgcgtctatagaaaagcgagaaaggcaagaatcaacaaaagtaaagtttagaaaaggaggaattgctattcaatga

SEQ ID NO: 407155 - DNA, 138 bp, Staphylococcus aureus
atgatggacttaattgaaaatggtaaagacgctaacgaagttttaaaaatgccatttcattatgtactttccatatatcaaaataaaaacaatgacatttctgaagaaaaagcagaggctttaattgatgcattttaa

SEQ ID NO: 407156 - DNA, 351 bp, Staphylococcus aureus
atggcaaaattaaaacgtaacattattcaattagtagaagacccgaaagcaaatgaaattaaattacaaacgtacttaacaccacacttcatttcatttgaaattgtatacgaagcaatggatttaatcgatgatattgaggacgaaaatagcacgatgaaaccaagagaaatcgctgacagattgatggatatggttgtaaaaatttacgataaccaattcacagttaaagacttaaaagaacgtatgcatgcacctgatggaatgaatgcacttcgtgaacaagtaattttcattactcaaggtcagcaaactgaggaaactagaaattttatccagaacatgaaataa

SEQ ID NO: 407157 - DNA, 645 bp, Staphylococcus aureus
atggcagtaaaacatgcaagtgcgccaaaggcgtatattaacattactggtttaggtttcgctaaattaacgaaagaaggcgcggaattaaaatatagtgatattacaaaaacaagaggattacaaaaaattggtgttgaaactggtggagaactaaaaacagcttatgctgatggcggtccaattgaatcagggaatacagacggagaaggtaaaatctcattacaaatgcatgcgttccctaaagagattcgcaaaattgtttttaatgaagattatgatgaagatggcgtttacgaagagaaacaaggtaaacaaaacaattacgtagctgtatggttcagacaagagcgtagagacggtacatttagaacagttttattacctaaagttatgtttacaaatcctaaaatcgatggagaaacggctgagaaagattgggatttctcaagtgaagaggttgaaggtgaggcacttttccctttagttgataataaaaagtctgtacgtaaatatatctttgactcagctaacatgacaaatcatggtggcgacggtgaaaaaggcgaagaggctttcttaaagaaaattttaggcgaagaatatactggaaacgtgacagaggataacgaagaaactttgtaa

SEQ ID NO: 407158 - DNA, 408 bp, Staphylococcus aureus
gtgattgatattttgtacaaagttcatgaagtgattagtcaagacagaattattagagagcacgtaaatatcaataatattaagttcaataaataccctaatgtaaaagatactgatgtaccttttattgttattgacgatatcgacgacccaatacctacaacttatactgacggagatgagtgtgcatatagttatattgtccaaatagatgtttttgttaagtacaatgatgaatataatgcgagaatcataagaaataagatatctaatcgtattcaaaagttattatggtctgaactaaaaatgggaaatgtttcaaatggaaaaccggaatatatagaagaatttaaaacatatagaagctctcgcgtttacgagggcattttttataaggaggaaaattaa

SEQ ID NO: 407159 - DNA, 405 bp, Staphylococcus aureus
atgagtgtgaaagtgataggtgataaagcattagaaagagaattagaaaaacgttttggcataaaagagatggtaaaagttcaagataaggcgttaatagctggtgctaaggtaattgttgaagaagtaaaaaaacaactaaagccctcaaaagatacgggagcattaattaatgaggtaagttttagtaaacctgaatggataaacggaaaacgtacaattactgttcattggcgaggttctaaagaccgttataaaatcgtacatttaattgaatatggacacgttcaaaaagaaacaggtaaatttatcaaacctaaagctatgggcggtgttaatagagcaataagacaagggcaaaataagtattttgagacgctaaaaagggagttgaaaaaattgtga

SEQ ID NO: 407160 - DNA, 363 bp, Staphylococcus aureus
atgaagaaagtgtttaaaaaacctagaattacaactaaacgtttaaatactcgtgttcatttttataagtatactgaaaataatggtccagaagctggagaaaaagaagaaaaattattatatagctgttgggcgagtattgatggtgtctggttacgtgaattagaacaagctatctcaaacggaacccaaaatgacattaaattgtatattcgtgatccgcaaggtgattatttacccagtgaagaacattatcttgaaattgaatcaagatatttcaaaaatcgtttgaatataaagcaagtatcaccagatttggataataaagactttattatgattcgtggaggatatagttcatga

SEQ ID NO: 407161 - DNA, 285 bp, Staphylococcus aureus
atgacgattgatgatttgcttgtcaaatttaaatcacttgaaaagattgaccataattcagaggatgagtacttaaagcagttgttaaaaatgtcgtacgagcgtataaaaaatcagtgcggagtttttgaattagagaatttaataggtcaagaattgatacttatacgcgctagatatgcttatcaagatttattagaacacttcaacgataattacagacctgaaataatagatttttcgttatctctaatggaggtatcagaagatgaagaaagtgtttaa

SEQ ID NO: 407162 - DNA, 285 bp, Staphylococcus aureus
atggtgaaatttaaagttgttagagcttttaaagacatagagcacaatcaacacaagtacaaagtaggggagttgtatccagctgaagggtataacaatcctcgtgttgaattgttgacaaatcaaatcaaaaataagtacgacaaagtttatatcgtacctttagataagctgacaaaacaagaattattagaactatgcgaatcattacaaaaaaaagcgtctagttcaatggttaaaagtgaaatcgtcgacttattgaatggtgaagacaatgacgattga

SEQ ID NO: 407163 - DNA, 1146 bp, Staphylococcus aureus
atgactataaatttatcggaaacattcgcaaatgcgaaaaacgaatttattaatgcagtaaacaacggtgaaccgcaagaaagacaaaatgaattgtacggtgacatgattaaccaactatttgaagaaactaaattacaagcaaaagcagaagctgaaagagtttctagtttacctaaatcagcacaatctttgagtgcaaaccaaagaagtttcttcatggatatcaataaaaacgttaactataaagaagaaaaacttttgccagaagaaacaattgatagaatttttgaagatttgacgacgaatcatccgttattagctgatttaggtattaaaaacgctggtttgcgtttgaagttcttaaaatctgaaacttctggcgtagccgtttggggtaaaatctatggtgaaattaaaggtcaattagatgctgcgttcagtgaagaaacagcaattcaaaataaattgacagcgtttgttgttttaccaaaagatttaaatgattttggtcctgcgtggattgaaagatttgttcgtgttcaaatcgaagaagcatttgcagtggcgcttgaaactgcgttcttaaaaggtactggtaaagaccaaccaatcggcttaaaccgtcaagtacaaaaaggtgtatcggtaactgagggtgcttatccagagaaagaagaacaaggtacgcttacatttgctaatccgcgcgctacggttaatgaattgatgcaagtgtttaaataccactcaactaacgagaaaggtaaatcagtagcggttaaaggtaatgtaacaatggttgttaatccgtccgatgcttttgaggttcaagcacagtatacacatttaaatgcaaatggcgtatatgttactgctttaccatttaatttgaatgttatcgagtctacagtccaagaagcaggtaaggttttaacgtacgttaaaggtttatatgatggttatttagctggtggtattaatgttcagaaatttaaagaaacacttgcgttagatgatatggatttatacactgcaaaacaatttgcttacggcaaagcgaaagataataaagttgctgctgtttggaaattagatttaaaaggacataagccagctttagaaggtaccgaagaaacactataa

SEQ ID NO: 407164 - DNA, 738 bp, Staphylococcus aureus
atgaaagtggagattaaaggcgtcatcgtttccaacgaagataaatgggtttacgaaatgcttggtatggattcgacttgtcctaaagatgttttaacacaactagaatttagtgatgaagatgttgatattataattaactcaaatggtggtaacctagtagctggtagtgaaatatatacacatttaagagctcataaaggcaaagtgaatgttcgtatcacagcaatagcagcaagtgcggcatcgcttatcgcaatggctggtgaccacatcgaaatgagtccggttgctagaatgatgattcacaatccttcaagtattgcgcaaggagaagcgaaagatctaaatcatgctgcagaaacattagaacatgttggtcaaataatggctgaggcatatgcggttagagctggtaaaaacaaacaagaacttgtagaaatgatggctagggaaacgtggctaaatgctgatgaagccattgaacaaggttttgcggatagtaaaatgtttgaaaacgacaatatgcaaattgtagcaagcaatacacaagtgttatcgaaagatgtattaaatcgtgtaacagctttggtaagtaaaacgccagaggttaacattgatattgacgcaatagcaaataaagtaattgaaaaaataaatatgaaagaaaaggaatcagaaatcgatgttgcagatagtaaagtatcagcaaatggattttcaagattccttttttaa

SEQ ID NO: 407165 - DNA, 1188 bp, Staphylococcus aureus
atgagtattctagaaaagatatttaaaactaggaaagatataacatatatgcttgatttagatatgatagaagatctatcacaacaagcgtatgtgaaacgtttagcgattgatagttgtattgaatttgttgcgcgagctgtcgctcaaagtcattttaaagtattggaaggtaatagaattcaaaagaatgatgtttactacaagttaaatataaaaccaaatactgacttatcaagcgatagtttttggcaacaagttatatataaactaatttatgataacgaggttttaatcgtagtaagtgacagcaaagaattacttatcgcagatagcttttacagagaagagtacgctttgtatgatgatatattcaaagatgtaacggttaaagattatacttatcaacgtactttcacaatgcaagaggtcatatatttaaagtacaacaacaataaagtgacacactttgtagaaagtctattcgaagattacgggaaaatattcggaagaatgataggtgcacaattaaaaaactatcaaataagagggattttgaaatctgcctctagcgcatatgacgaaaagaatatagaaaaattacaagcgttcacaaataaattattcaatacttttaataaaaatcaactagcaatcgcgcctttgatagaaggttttgattatgaggaattatctaatggtggtaagaatagtaacatgcctttttctgaattgagtgagctaatgagagatgcaataaaaaatgttgcgttgatgattggtatacctccaggtttgatttacggagaaacagctgatttggaaaagaacacgcttgtatttgagaagttctgtttaacacctttattaaaaaagattcagaacgaattaaacgcgaaactcataacacaaagcatgtatttgaaagatacaagaatagaaattgtcggtgtgaataaaaaagacccacttcaatatgctgaagcaattgacaaacttgtaagttctggttcatttacaaggaatgaggtgcggattatgttaggtgaagaaccatcagacaatcctgaattagacgaatacctgattactaaaaactacgaaaaagctaacagtggtgaaaatgatgaaaaagaaaaagatgaaaacactttgaaaggtggtgatgaaaatgaaagtggagattaa

SEQ ID NO: 407166 - DNA, 1662 bp, Staphylococcus aureus
atgattagtaataaatacgttgatgaatatataaatttgtggaaacaaggaaagataattttaaataaagaaagaattgatctctttaattatctacaaaaacatatatattcacgagatgatgtatattttgatgaacagaaaatcgaggattgtatcaaatttattgaaaaatggtattttccaacattaccatttcaaaggtttatcatagctaatatatttcttatagataaaaatacagatgaagctttctttacagaatttgctattttcatgggacgtggaggcgggaaaaacggtctaataagtgctattagtgattttctttctacgcccttacacggagttaaagaatatcacatctccattgttgctaatagtgaagatcaagcaaaaacatcgtttgatgaaatcagaaccgttttaatggataacaaacgaaataagacgggtaaaacgccaaaagctccttatgaagttagtaaagcaaaaataataaaccgtgcaactaaatcggttattcgatataacacatcaaacacaaaaaccaaagacggtggacgtgaggggtgtgttatttttgatgaaattcattatttctttggtcctgaaatggtaaacgtcaaacgtggtggattaggtaaaaagaaaaatagaagaacgttttatataagtactgatggttttgttagagagggttatatcgatgcaatgaagcacaaaattgcaagtgtattaagtggcaaggttaaaaatagtagattgtttgctttttattgtaagttagacgatccaaaagaagttgatgacagacagacgtgggaaaaggcgaacccaatgttacataaaccgttatcagaatacgctaaaacactgctaagcacgattgaagaagaatataacgatttaccattcaaccgttcaaataagcctgaattcatgactaagcgaatgaatttgcctgaagttgaccttgaaaaagtaatagcaccatggaaagaaatactagcgactaatagagagataccaaatttagataatcaaatgtgtattggtggtttagactttgcaaatatccgagatttcgcaagtgtagggctactatttcgaaagaacgacgattatatttggttaggacattcttttgtaagacaagggtttttggatgatgtcaaattagagccacctattaaagaatgggaaaaaatgggattattgaccattgtagatgatgatgtcattgaaattgaatatatagttgattggtttttaaaggctagagaaaaatatgggcttgaaaaagtcatagctgataattatagaactgatattgtaagacgtgcgtttgaggatgctggcataaaacttgaagtacttagaaatccaaaagcaatacatggattacttgcaccacgtatcgatacaatgtttgcgaaacataacgtaatatatggagacaatcctttgatgcgttggtttactaataatgttgcagtaaaggttaaacccgatggtaataaagaatatattaaaaaagatgaaaatagaagaaaaaccgatgggttcatggcttttgttcacgcattatatagagcagacgatatagtagacaaagacatgtctaaagcgcttgatgcattaatgagtatagatttctaa

SEQ ID NO: 407167 - DNA, 345 bp, Staphylococcus aureus
atggagattatagttgatgaaaacttagtgcttaaagaaaaagaaaggctgcaagtattatataaagacatacctagcaataaattaaaagtagttgatggtttaattattcaagcagcaaggctacgtgtaatgcttgattacatgtgggaagacataaaagaaaaaggtgactatgatttatttactcaatctgaaaaggcgccaccatatgaaagggaaagaccagtagccaaactatttaatgctagagatgctgcatatcaaaaaataatcaaacaattatcggatttattgcccgaagagaaagaagacacagaaacgccatctgatgattacctatga

SEQ ID NO: 407168 - DNA, 300 bp, Staphylococcus aureus
atgatgactaaagacgaacgtatacgattctataagtctaaagaatggcaaacaacaagaaaaagagtgctagaaagagataattatgaatgtcaacaatgtaagcgagacggcaagttaacgacatatgacaaaagcaagcgtaagtcgttggatgtagatcatatattatcgctagaacatcatccggagtttgctcatgacttaaacaatttagaaacactgtgtattaaatgtcacaacaaaaaagaaaagagatttataaaaaaagaaaataaatggaaagatgaaaaatggtaa

SEQ ID NO: 407169 - DNA, 417 bp, Staphylococcus aureus
atgataaagattgagaaacatgatatcaaaaagcttgaagaatacattcagcacatcgataactatcgaagagagttgaagatgcgagaatatgaattacttgaaagtcatgaaccagataatgcaggagctagcaaaagtaatttgccaggtaatccgattgaacgatgtgcaataaagaagtttagtgataacagatacaatacattaagaaatatagttaatggtgtagatagactgatagatgagagcgatgaggatacgcttgagttattaaggtttagatattgggattgtcctattggttgttatgagtgggaagatatcgcgcattactttggtacaagtaagacaagtatattgcgtagaagaaatgcactgatcgataagttagcgaagtatattggttatgtgtag

SEQ ID NO: 407170 - DNA, 201 bp, Staphylococcus aureus
atgtggattactatgactattgtatttgctatattgctattagtttgtatcagtattaatagtgatcgtgcaagagagatacaagcactcagatatatgaatgattatctacttgatgaagtagttaaaactaaaggatacaacgggttagaagaatacaggattgaattgaagcgaatgaataacgatattaaaaagtaa

SEQ ID NO: 407171 - DNA, 150 bp, Staphylococcus aureus
atgattaaacaaatactaagactattattcttactagcgatgtatgagctaggtaagtatgtaactgagcaagtatatattatgatgacggctaatgatgatgtagaggcgccgagtgattacgtctttcgagcggaggtaagtgagtga

SEQ ID NO: 407172 - DNA, 207 bp, Staphylococcus aureus
gtgacacaatacttagtcacgacattcaaagattcaacaggacgcaagcatacacacataactcgagctaagagcaatcaaaggtttatagttgttgaggcagagagtaaagaagaagcgaaagagaagtacgaggcgcaagttaaaagagatgcagttattaaattaggtcagttgtttgaaaatataagggagtgtgggaaatga

SEQ ID NO: 407173 - DNA, 537 bp, Staphylococcus aureus
atgaataacacattaacaatcgatcagttacaagagttattacaaatacaaaaggagttcgacgatagaataccgacgctaaacttaggagatagcaaaattgcatatgtagttgaattctttgaatggtttaatacattggaaacgtttaagaactggaagaagaaaccaggtaagccgttagatgttcagttagatgagttggcggatatgttggcgtttggtttgagtattgcgaatcaagtaggagtgtcatcagaagagataaaagaagcgattgaatcaagttttaaagatacagaatttcacaaaatgtttaattttaaagataaagaatttgctcaaggcgcagttgttagtacaccacagataatattcaaagaattttatcccgaccaattggcaattgtgatagcgatagacatagcttacaacttatatactatcgaccaactcattgacgcatacaaaaagaaaatgaaaaggaaccacgaaagacaagatggaacagcagacgcaggaaaaggatacgtgtaa

SEQ ID NO: 407174 - DNA, 447 bp, Staphylococcus aureus
atgagtgttgaaatagaatcaattgaacatgaactagaagaatcaattgcatcattgcgacaagcaggcgtaagaattacacctcaaagacaagcaatattacgttatttaatttcttcacatactcatccaacagctgatgaaatttatcaagcactttcacctgattttccaaatataagtgttgcgacaatatataataacttaagagtgtttaaagatattggaattgtaaaagaattaacatatggagactcatcaagtcgattcgactttaatacacataatcattatcatattatatgtgaacaatgtggtaagattgttgattttcaatatccacagttaaatgaaattgaaagattagctcagcatatgactgactttgacgtaacacatcatcgaatggaaatttatggagtttgtaaagaatgccaagataaataa

SEQ ID NO: 407175 - DNA, 960 bp, Staphylococcus aureus
gtgacatatatgaaagttgttgggttaaatcgtatgcgtgaagttgaaactgaattacaacaacgcttttcagatttagattttaaattttataaaaaagcatcagaaatacctgagagcgacttggctgatttagatatattagttggttatgatggcggtatcaatgaggcatttttacgacgttgcccgaatttaaaatggattgcatggtttgcaacgggtgtaaatacattgccgttagattatattgcagatcacggcatacttttaactaatggaaaaggtgttcaagctaaacaattatctgaatacattttagctttcgttttagatgattataaaaagatgaaactatcatatgataaccaacgacaacatatatatgattcgaaaataactggtaaacgcctatcaggacaaacagttttatttttaggtacaggtgcaattgctactagaactgcgaagttagcaaaggcttttaatatgaatttaattggtctgagcaagtcaggtcagaacaaagatgagtttgacgagatatatactatcgaatcacttgaaagcacattaccaaatgctgacattattataaatgctttaccagaaacgcaagaaacgattcatttactaaagaaaaaacattttgaattaatgaaagatgaagcactttttataaatataggacgaggtagcatagttaaagaagcgctcttaatagaagtattaaaaagtaaagttattcgacatgcatatttagatgtgtttgaaaatgaacctttgaaacctaatcatgaattatatgaattggataatgtaactataacagcgcatataactggtaatgattatgaagcaaagtatgacttattagatatttttaaaaacaatctagttaattttctcaataagaatggtctaattgagaatgaagttgatgctaaaaaaggctattaa

SEQ ID NO: 407176 - DNA, 456 bp, Staphylococcus aureus
atgttgcaaaaaggagaacaatttccaatatttaaattagaaaatcaagacggaactgtcattacaaatgatacattaaaaggtaaaaaggcgattatatatttttatcctagagataatacacctacttgtaccacagaagcttgtgactttagagacaatttagaaatgttcaatgatttagatgttgcagtatatggtataagcggtgattcaaagaaaaaacaccaaaattttattgagaaacacggattgaatttcgatttattagtagatgaagattttaaattagctaaagaaactggcgtatatcagttaaaaaaatcatttggcaaagaaagtatgggcattgtaagaacgacttttataatagatgaacaaggtaaagtattagatgttatcgagaaggttaaggttaaaacacaaatagaagaacttaaaaacattttggggtga

SEQ ID NO: 407177 - DNA, 1290 bp, Staphylococcus aureus
atgaattttagtgaaagtgaacgtttacaacaactttcaaacgaatatattctaggcggtgtcaattccccttctcgttcttataaagctgtaggaggcggtgcacctgttgttatgaaagaaggacacggtgcatatttatatgatgtcgatggcaataaatttattgattaccttcaagcatacggtccaattattacggggcatgcacatcctcatattactaaagcaattcaagaacaagctgctaaaggtgttttatttggtacaccgactgaattagaaattgaattcagcaaaaaattacgtgatgcaattccatctcttgagaaaattcgctttgtaaattctggaacagaagcagtcatgacaacaattcgtgttgcacgtgcatatactaaaagaaataaaattataaaatttgctggatcttatcatggccattctgatttagtattggttgcagcaggtagcggcccatctcagctcggttctccagactcagctggtgttccagaaagcgtcgcacgtgaagtcattactgtacctttcaatgatattaacgcctataaagaagcaattgaattttggggtgatgaaattgccgcagtattagtagaaccaattgttggtaactttggaatggtaatgcctcaacctggatttttagaagaggttaatgaaatttcacataacaatgggaccctagtgatttatgatgaagtaattactgcattccgtttccattacggtgccgctcaagatttattaggtgttatccctgatttaactgcatttggtaaaattgttggcggtggtttaccaattggaggctatggtggacgtcaagatattatggaacaagtagcacctctaggacctgcatatcaagctggtacaatggctggtaacccgttatctatgaaagcaggtattgcattactcgaagtactagaacaagacggtgtttatgaaaaattagacagcttaggccaacaactagaagaaggtttacttaaattaatcgaaaaacataatatcacagctacaattaatcgtatttatggatctttaacattgtactttacagatgaaaaagtcacacattatgatcaagttgaacattctgacggcgaagcgttcggtaaatttttcaaattaatgttaaatcaaggtatcaatttagcaccttctaagtttgaagcttggttcttaacaactgaacatacagaagaagatattaaacaaactttaaaagctgcagactatgcttttagtcaaatgaaataa

SEQ ID NO: 407178 - DNA, 1146 bp, Staphylococcus aureus
atgaatacgaatattagatattcaataaacttaaaaggggcgtcattatttttgagactaggagctcggatttttaaaactggtatagccattattttagctatgtctatcgcttctttactaccggatgatgttggtctgaaagccttagctggtgtcagtgctgttgttgcaatgcaacctagtatttatcgttcatttaaaacagtttctgatcaagcattgggtaacattataggtgccatactatctgttacaatggtaacaatttttagtgataattttatcattatgggtgttaccgtcatagtacttattgctattttatttaaatttaatttagcacatgttgctactttggcgagtgtaacagcattaatcattatgggacaacataccggttctttctatattaccgccttttacaggtttgtacttgtaatgattggtgtcataagttcatctctagttaactttgtgtttctaccacctaaatttgaaacaaaaatttactataattcattaaatatatcctcagatatttttatgtggtttaaattagtattaaatgatacgacggagtttaataatattaaacaagatagtcataatttaaaacaacgtgtcgaaaagttagagaaaatttatgattactatagcgaagaacgtcctattacaaaaaaacatattcaccaacataatagaaagaaaatacttttcagagaagtagttcagacgactagacaagcttatgaagtattaaacaaattgtcgcgttatcaaaacgacttatatttacttaataacaatttcctattacaaatcaaattagatttagattcattaactgcttttcacgagcaaattttagctagcctttctaaaaaagcacgttataatgtgacacatgttgattatgagttagataatccgcagaaaaaagatttattgtccacatttcagcatgagttaataaatcatccttatcaaacggaatattcgtttgccaatgttatgcaaattgttgcagccatcgaagagtatcgacaccatttagagcatttagaccgcataagaattagctttttcacatatcatagatctgatgcagacattgaaattgttgaagaagactttgatttataa

SEQ ID NO: 407179 - DNA, 1737 bp, Staphylococcus aureus
atgattaaacgatatttgcaatttgttaagccatacaaatatcgtatttttgcaacgattattgttgggataattaagtttggtataccaatgcttataccactattaattaaatatgcaatagatggcgtgattaataaccacgcactaacgactgatgaaaaagttcatcatttaactattgccattggtatcgcattatttatttttgtaatagtgagaccaccaattgaatttatacgtcaatatttggcgcaatggacaagtaataaaatattgtatgatatacgtaaaaagttatacaaccatttacaagctttaagtgcgagattttatgctaataatcaagtaggtcaagtaatatctagagtgattaatgatgttgaacaaacaaaagatttcattttaaccgggttaatgaatatttggttagattgtataacaattattattgcactatccataatgttctttttagatgtgaaattgactttagcagcactgtttatcttcccattttacattttaacggtgtacgttttctttggaagattaagaaaattgacacgtgaaagatctcaagcattagctgaggttcaaggattcttgcatgaacgtgttcaaggtatttcagtcgttaaaagttttgcgattgaagacaatgaagcgaaaaactttgataaaaagaatactaatttcctaacacgtgcgttgaaacatacaagatggaatgcctattcctttgccgcaattaatacagttacagatattggaccaattattgtcatcggtgttggtgcatatcttgctatttctggatcaatcacagtaggtacacttgcagcatttgttggatacttagagttattgttcgggcctttacgtcgtttagtcgcatcatttacaactttaacgcaaagttttgcttcaatggaccgtgtattccaattaattgatgaagattatgacatcaaaaatggtgttggtgctcaacctattgaaattaaacaaggtcgtattgatattgatcatgttagttttcaatataacgataacgaagctccaattttaaaagatattaatttgagtattgaaaaaggagaaacagttgctttcgtaggtatgagtggtggtggtaaatcaacattaattaacttaataccgagattttacgatgtaacttctgggcaaattttaatagatggtcacaacattaaagattttttaacgggaagtttaagaaatcaaataggattggtgcaacaggataatattttattctctgatacagttaaggaaaatattttacttggtcgtccaacagcaacagatgaagaagtagttgaagcggcgaaaatggctaatgcacatgactttattatgaacttgccacagggatatgacactgaagtaggtgaacgaggtgttaaattatcaggtggtcaaaaacaaagattatcgattgctagaatatttttaaataatccgccaattcttatcttggatgaagcaacaagtgcacttgatttagaaagtgaatccattattcaagaagcattagatgtgttgagtaaagatcgaacgacacttatcgtagcgcatcgcttgtccactattacacatgctgacaaaattgtcgtaattgaaaatggacatattgttgaaacaggtacgcatcgtgaattgattgcaaaacaaggtgcttacgagcatttatatagcattcaaaacttataa

SEQ ID NO: 407180 - DNA, 543 bp, Staphylococcus aureus
atggtcagagaatccatacctaaagaaggggaaaacattaaaattcagagttataaacatgatggtaagattcatcgcgtttggtctgaaacaacaatattaaagggtactgatcatgttgtcattggtggaaatgatcatacgttagtgactgaaagtgacggaagaacttggataacacgtgaaccggcaattgtttactttcactcagaatattggtttaatgttatctgcatgtttagagaagatggaatttattactattgcaatttgtcatcaccatttgtttgtgatgaagaggcattaaaatatatagactatgatttagatattaaagtatatccaaacggaaagtatcatttattagatgaagatgaatatgagcaacatatgaatcaaatgaattatccgcatgatattgatattattttaagacgcaacgtggacattcttcaacaatggatagaacagaagaagggcccattcgcgccagattttatcaaagtttggaaagaacgttacaaaaaaattagacagtattaa

SEQ ID NO: 407181 - DNA, 1038 bp, Staphylococcus aureus
atgtatcagcagtctagttttaaagaaaatttgatacactggtttgatgaaaatcaaagagaaatgccatggcgacaaacgaccaatccgtactatatttggttaagtgaggtcatgttacaacagacacaagttaaaacagttattgactattatcatcgttttgttgaacgatttccaactgtggaagttttgagtcaagcttcggaagatgaagtgttaaagtattgggaaggcttaggatattatagtagagctcgaaattttcatacggcgattaaagaagttcatgataaatatgaaggcttagttcccaaagatcctgatcaatttaaagcgttaaaaggtgttggcccatacacacaagctgcagtaatgagcattgcatataatgtaccactagcaactgtagacggaaatgtttttcgagtatggtctagattgaatgatgactatcgagatattaaattacaatcgacgaggaaatcgtacgaacaagaattattaccgtatgttactacagaagctggaacgtttaatcaagctatgatggaattaggggcgttaatttgtacaccaaaaaatccattatgcttattttgtccagttcaagaaaactgtgaggcatttgataaaggtacatttgaaaagttacctgttaaatctaaaaatgtaagtaaaaaagtaattgagcaatccgtctttttaattagaaataatcaaggtcaatatctgttgcaaaagcgtagcgaaaaattattgcatggtatgtggcaatttcctatgtttgaaagtgagcatgctagacgtaaaatgactgaaaaaatcggtcatgacattcaaccagtagaaacacctatttttgagttgaagcatcaatttactcatttaacatggaagattaaagtatacgccgtttcaggagcaattaacattgaaacattaccagatgacatgatttggtttgatttaagtgatcgagatcaatatacattccctgtacctatgtcaaagatttatcaatttataaatgggtaa

SEQ ID NO: 407182 - DNA, 978 bp, Staphylococcus aureus
atggacactgcaacacatatcgcaattggggtgggccttacagcacttgcaactcaagatccagcaatggcttctacgtttggtgcaacagctacaacccttatcgttggttcattaattcctgatggggatactgttcttaaattaaaggacaatgcaacatatatttcgcatcatagaggtatcacgcattccatccctttcacaatactatggccaattttaattacatttttaatattcacgttctttagtggaaccaacccatttcatgtatggatgtgggctcagctcgcagtatttttacatgtctttgtagatatattcaattcttatggtacacaagcgcttagacctatcacaaacaaatggattcaattaagtgtgattaacacatttgaccctattattttcacagttctttgtattggtattgtattatgggttataggcttgcatccatttgcagtcttctttcctataatcgctttactaatcatttattacatgattcgttttaaaatgagagccgtaattaagcaacaagctttaaaagcaattcaacaagagcatcaccctgttaaagtatttgttgcgccaacaataaaatttatggaatggcgtgtcgcgatacaaactgatgcacatgactatgttggaaaagcatatggtaggaatgtggtgtttagtgataaagtggaacgtcaaacattatcaacagactccattttatggaaagtcaaaggtaataaagatatacgtacttttttaaacttttcatcaatctatcgttggcaaacaacaacgttagcagatggttctactgaaattcgtttgattgatttgcgttatttaaaaaatgatcattattcatttgtggcaattgcacatgtaacaaacgataatgtcatagaccactcttatattggctgggtatttacagaagataagttacaacgtaaactgtatgctaaataa

SEQ ID NO: 407183 - DNA, 837 bp, Staphylococcus aureus
atgctagataatattattttatattttaaaaacttaccgcatactaaaaggtatgtaacagaacgtttaaaacaaagttggaaaagttttctaatcgtattagctgcatgtttaatacttattattgcaagtgaaacgctattttcctttagtcatttgaccgatgttaaagaggtgagatggttatttagaatcattgtattgattgtttttgcggtagtgatgttcacaatttatatctcttatcatcattatatgaatgactttttagttactaagttatttaatatttccgcagcgacgccagtagttattatgtctattttaagttttattatgctagtcattttgacgatgattagtgcattggttaaaccagtaaacttcgaaacatcatatatagcgctattctattttattgtgatggcaactatttttgtaggattaatatccgttacttttggtcttattcgactgttaactgaaaaaataaatatcatattttatggggtttgtgtattgtgtttcttattgttaccaattattttcataccaaatccaaatcatgtatttatcaatcacatcctaatgctaaatccaatgtattacattgttaatggtatagcacaatctatcatatttggtatatcaagtatggaaaacattccatatcatttttactttattttattcttatgtttaatagctgcagtaaatttcgtattagcaaggtatacgacacacgcaatttataataaaacatctaaagtgacacaaactgataatcaacaggatgtttcaaatgatagtacagacgaggcggatacttcttcatga

SEQ ID NO: 407184 - DNA, 1518 bp, Staphylococcus aureus
atgggaagttcaattgttttaaagttactaaaagtaacacactactataggaataaacagaataagaaatggtatttaccttttggatatgatgctgaagatatcgatttaaacaatattagtttacatatttatcaaggagaagcattaggtataattggtgaacctgaatcttccaaagcgttggtaggtcaattgttggcaggtgcaattaaacctgataaaggtaaagtagtttgtactgaagatttgttctacggatatattgaagatcaatcgttaattcatcaaactgttgaagcttatacagcgcagttagttcaactatttccatatgaaattaatgatcataaagctgaacagattattcaatatgcacatttaggtgattataaaacgaagccggttaaccatatttcgaaagcggcatacgctcaattactattaagtattgcacgctcatcaaaatcaaatattattattttaaatcatgttattgactatttaacaccacaatttatggaacgtgcgattgaattaacaaatgattatattgaaaataatttaacgattgtgtcaattggtgatgatattgataaaatttcacaagtgagtaactacatagcttggttttcacatggtcaattaagaatggaagggtcacttaaacaagttattccatcttttaaagaacatgaacgtgatcgattaagtctaaactcaaaagaagaaattgaaaactttgatttagattggaaaaagaatcgtacaagaataccagagatgacctataatttcaaacgtgttgagcgctataatcatgcaaaaccgcctaagtttttagtgcgtttttggactttagcctcaggtactattttaggcttagcattgatgatgttgctcattttcaataatataggaattatttcgataacagattttacgaatcgtgctacgatgcaaaatgaaaataaagatccatatggcgaaaagttagcttatggaattgcttttaatggcagtgtggatatgcaaggggataaacaagtcacaattccaaaatatagtgtagttacaattactggcgaaaatagtaaaaattatcgtgttaccgccgataataagacttactatgttagtaaagataaattagaatattttaacccggcaggtttatatcaaacgcatagttttaaaaaattagcaccatatatgaaatcaaattatagtaattactatgcatactttaatagtcaattacataaaaagcatagttcagttataaaaactttagttcctgatgatgataaccgtttcgttgcatccgttacacaacaaccgatacaattacttttcaatgataataatcagttatacggttttgtttatccaattgtagataaaaaagaattaaaagataagtttaatattaacaataacatttggattactaaagttgggaatggatattgtattgccaatttgaaagaagacaaatggatttatattgaattgtag

SEQ ID NO: 407185 - DNA, 315 bp, Staphylococcus aureus
atggaacagaagaaattgagtgagatgtctgagccagaattaagacacgaaatacaactttataaagagaaaatgagaaaagctgagatgaatggtattttaaatgaatatgacgtttatcaaagtaaagtaattgttgccgaaagttacttagtagacagaaaaaagatagaaattggtaaaatttataaactgactgatggcagtaatcaatattttaaagtagaaagattaaaaggtatttttgcgtgggggtttagatttaatagcgatgaacccgaagaaggattacctatagcgttattacaattatag

SEQ ID NO: 407186 - DNA, 819 bp, Staphylococcus aureus
gtgccgaagattactaaaatagaagttcaaaagaaaaacaaagaacggtttaatctttttttagacgaacaatttgaaatgggtatagatattgatacattagtcaaatttaatttaaaaaaagggcaacaacttgaagctgctgacatggcagagattcaaaagtatgatcattatcgcataggtttaaataaagcaatccaatatttatcatataaaaagagaactgaaaaagaagttatacaatatttacaaaaagaagagatatcagagcaagcgatttctgaagtgattgaatattgttatcgcgaaaagttaatcgaccatcaagattatgcggaaagtttaaaaaatacaatgattcgcacgacagataaaggacctaaaatttatcaacaaaaactatatcaacttggtatagaaccaaatatcattgaaatatttacagaactttatagagaacaacaggaacttgatgatattatccaaattgctgaaaaaatatctaaaacaaaaaaagggccacaaaataaagttaaagaaaaagtaatgcaatctttaattcaaaaagggtttgaaatggaaaccattcatgctgtattgaatgaaatggattttacacaagatgaagcggttttagacgatttattacaacgagatttagaaaaaatttataataaaaatcgaaagaagtacacgcaacagaaattaatttcaaaaactatcgaaggccttatgagaaaaggatataaatatgataaaattaaagctaaattagaagaaagtggtattgccgatggaacagaagaaattgagtga

SEQ ID NO: 407187 - DNA, 810 bp, Staphylococcus aureus
atgaaaagaagcgataggtactcaaactcaaatgaacattttgagcatatgaaacacgaacctcactataatacgtattatcaaccagttggcaaaccgccgaaaaagaaaaaaagtaaacgaatactattaaaaatattattaaccattctaatcattatcgcattgtttattggtatcatgtattttttatctacacgcgataatgtggatgaactaagaaaaattgaaaataaaagtagttttgtgtcagctgataacatgccagagtatgttaaaggtgcctttatttcaatggaagatgaacgattctacaatcatcatggattcgatttgaaaggtacaactagagctttattttcaacgattagcgacagagatgtgcaaggtggtagtaccattacacaacaagttgtcaaaaattatttttatgataatgatcgttcatttactagaaaagtaaaagaattatttgtagctcatcgagttgaaaaacaatataataagaacgaaattttaagcttttatttaaataatatttactttggggataatcaatatacgcttgagggcgcagcaaaccattactttggaacaaccgtgaataaaaatagtacaacaatgtctcacataacagttttacaaagcgctattttagctagtaaagtcaatgcacctagcgtatataatatcaataatatgtcagagaattttacgcaacgtgtaagcacgaacttagaaaaaatgaagcaacaaaattatatcaatgaaacacaatatcaacaggctatgtcacaattaaatcgttaa

SEQ ID NO: 407188 - DNA, 516 bp, Staphylococcus aureus
atgactaaaaaagtagcaattattctagcaaacgaatttgaagatatagaatattcaagccctaaagaggcattagagaatgcaggctttaatactgtagtgattggagatactgcaaatagtgaagttgttggtaaacacggtgaaaaagttactgtcgatgtaggcattgcagaagctaaaccagaagattatgatgcattattaattcctggaggattttcaccagatcatttacgtggagatacagaaggtcgatatggcacatttgctaaatactttactaaaaatgatgtaccaacatttgccatttgtcatgggccacaaatactaatagatacagacgatttaaaaggtcgtacgttaacagcagtattaaatgtacgcaaagatttatcaaatgcaggcgcacatgtagttgatgagtcagtagttgtagacaacaatattgtaacaagtcgagtaccagacgatttagatgattttaatcgagaaatcgttaaacaattacaatag

SEQ ID NO: 407189 - DNA, 162 bp, Staphylococcus aureus
atgaatgaacaacaaacaatcgaacagataaaagcgcgtttaaataagtttattgaggatatcgatcatgtaaatcctgatgaagtacgtgttgaagatatagatgaatggattggattgttagatcagcttgaagaaaaggttaaattagtatctaagtaa

SEQ ID NO: 407190 - DNA, 738 bp, Staphylococcus aureus
gtgtataaagtaaagtattcaagttttaactactatccagatattctattgatttctaatattgctgtaggtgttatttttcaaatagaaggtaataatggttattatgcaaatgaattcaatctaatgcaaagaaaaaacaaactttttagttttgacgaagagcttgacaaagattttacaaaaatgtttttaaaatcgataagggaaaactttcttaattttaaaggtgaaataaaagaattcactagattctatgtaaataattttaaatttactaatatacaaattagaaactttgatagtctagatgaagctaaagcatttatagaagatactacgaaatacattttgcatcctactcaagaagctggaaataaaatgactgaagcagaaaagagggaatatataaataactatttacttaagacttttagcactgtgcaaaaatcttatgtattcaaaggtgccaaaaaccgagataaaataactgttgattttatggttgaagaccatacaggaaaaaaaataggttataaagttataaataattctcctcaagcgctatttaacattagatcttatgtagctcatgcatggtttaataaagaaaatctcacatttattatggatgatgatatggaaagcgagcaaagatacgtgaatagtttaactagagaattcaacaatgaagcagagataaacgctatattaaaaaaagatttagttacacaataa

SEQ ID NO: 407191 - DNA, 795 bp, Staphylococcus aureus
atggtgaaaatattaacagagattacgagtagagtcggtaatggtgtaacaacaccgtattatgcaatgatagactctttggctgtagtagttaaatcgattaacaataacgaagggttttatgctttattcaatgaagcagtaggttattttattgcagagaggttagacttttcacatcctgattttggatttgcacagtataaatctgatttaacgataaatcgcataccaaatgattcgagtttcaatgacaaggaaatatttacatatactgttttagaaaattcagttatacacatagaaggaccaggtatgattaatacaattgataataaagatattattgaattgataatatttgattcattcatatctaatacagacagaaataaaggtaacatattaattaaaatgcctaaaaaaggacaaaaagccaagttattccctttggattatacacatatttttccaggtgaatgcatttggtttgatgttttaaaaagagggaatccatcgatagaaaaaatggtagaagatgtttttcaaactggaaactatcaattgttattagaaaataaaagttttgaccctatagagatacgaaaaatcggctatgaaattaagaaaaaattagtgaatattgacatggatgatataatcagttctatgcctaatgaaattagtgttggtcattcaaaacaagatatttacttgttgaaaaagtttatcgaaagaaatattagtgaatttgatgatataatagaagaaataacgaaacatttagtgaggtga

SEQ ID NO: 407192 - DNA, 1413 bp, Staphylococcus aureus
atgccgtcggttagaacatacagtcaagctattagctaccttaaaagcctagagggtaaggcgtggaatccagacaatgcatttggatatcaatgcttcgatactgccaaccaatattggctttacttatttaatcataggttgaaaggtgtgggcgctgcggacattcctacatggaatgatttcactaacgaagcaaccgtttacgaaaatactgtgtcgtttcaagcattgccgggcgacgtcgttatttttaaccgtaattatggcggtggttatggtcatgtaggtattgtaataagcgctacgttagattctataactattttagagcagaactggctaggcggtgcttactggagtccaccagaagttactacaagacgtacacacggctacgacttccctatgtggtttatccgtccattctacgcaaaagaaacgaccgctaataagctaagaagcgcagtgacgccagttaaacaagataagttatcaaaaggtaaaaaaatcatgcttgtggctggtcatggtattggtgcatactctaacgacccaggtgccgttgcgaatggagaaaacgaaagagattttaaccgtaaaaatattatacctagagtgaaaaagtatcttgagtcagtaggcaacacagtattgttatacggtggcaactcgatgaatcaagacttatatcaagatactttgtacggtcaacgtgttggaaactataaagactatggcatgtactggattaaaaacgaagttaaaccggatgcaatcatagagtttcatttagattctgctagtccgcaagcaagtggcgggcatgtaatcattagcgaccgtttcccagctgatgacattgacaaggcattaagtagcgcattagataaaacagtaggtaaaataagaggtgtgacacctagaggggatttattgaacgctaacgtgtccgctgaccttaatcttaattatcgtttaatcgaattaggctttatcacatcaacgaaagatttaaactacattaaaaataatctagacagcttcacgaagcggattgctgaagctattaacggcagacaaattgatgcgccaagcagtaagccaagcgctgacaaaataacatggaattggaaaggcgtattttatcctaatccagaaaaagctataagagtcagaaaaacagcaggattaaccggcacagtcgttgaagaagattcatggctatacacaaaagatgattgggtaaaattcgatcaagtcattaaaaaagatggctactggtggattagattcaaatatcaacgtgagggctctagtactaacgatttctattgtgcagtgtgtagaatcacagataaagaacagaagattaaaaatgaaaaatattggggaacgattgagtgggcttaa

SEQ ID NO: 407193 - DNA, 276 bp, Staphylococcus aureus
atggatatcggtacaatcgtaagaacaattttattaatagtcgcatggatcaatcagtttttagcaatcaaacatatttctccaatcccagttgacgaagtgtttataagcacagtcgttactgggattgtttcaatttggacgtggtggaagaataacaactttactcacgcatctaagaaagggcaacaaaaaatttatgaagtaaaagctggcattcagtcaactggtggcgcacctaaagtgaacggagatgataacaatgccgtcggttag

SEQ ID NO: 407194 - DNA, 396 bp, Staphylococcus aureus
atggaaggtaattttaaaaatgtaaagaagcttatttacgaaggcgaagaatatacaaaagtatatgctgaaaatatccaagtatggaaaaagccttcatcttttgtaataaaacccttacctaaaaataaatatccggatagcatagaagaatcaacagcaaaatggacaataaacggagttgaacctaataaaagttatcaggtgacaatagaaaatgtacgtagcggtataatgaggatttcgcaaactaatttagggtcaagtgaattaggaatatcaggagtcaatagcggagttgcaagtaaaaatatcaactttagtaatccttcagggatgttgtacgtcactataagtgatgtttattcaggatctccgacattgaccattgaataa

SEQ ID NO: 407195 - DNA, 264 bp, Staphylococcus aureus
ttgcaacagattggctcaaaagttagtacagaagattttgagaaattcaaacaaacactaaatgatttatatgctccaaaaaatcataatcatgacgagcggtatgttttgtcatctcaagcttttactaaacaacaagcggataatttatatcaactaaaaagcgcatctcaaccgacggttaaaatttggacaggaacagaaaatgaatataactatatatatcaaaaagaccctaatacactttacttaattaaggggtga

SEQ ID NO: 407196 - DNA, 489 bp, Staphylococcus aureus
atgaaaaaagtaaacaaagagtacttattgaactttataattgtaacgttcttactcggaataataatcatacctatatccgtattagtattctcaataccattttttagcataataggtttccaatcattagcagataatttaaatataagttctttaataacaataaattggtattcaaataatatgttttataacattggctatattgcattattctttatagtaacttatctaatatttatttttcttgaactttttataatatttttacatataaaatacaaaaagaaatttaataatattatcttattcatattctttataactgctaatatgatcgtattaaacttaataattttgaagattttctacaacattcatataaatttatattttcaaattttcatttattctttatgcttctatcttttatttactcataaagagatttacaaaatatttgaagaaaataaaagtaaaaaataa

SEQ ID NO: 407197 - DNA, 609 bp, Staphylococcus aureus
atgaagaatttaaaaagtttttttattaaaaatactttggtactaacatctactgcattattattttctagttttgaacctgtagttcatgctgcagaaaataaggaagttgttaaaacagtagaaaatgataatgtagaattcaatgaattgttagaaggacaagaatatatttgggaagttttatctagagatgatgaaggatttaaaatgtttctagatgagcaaagagcttttaatcctaattttgataatgatgttttactagcaaaacaagaaggtgctttaaattcttcagtatttgctaataattctatgactttaaactcaaataagcctactcctagaggtcctatcggtgcaactttaaaagctattaaggctctatcaccttctttgagacatggtggaactgctatatcttggatcattaaaccattaagtagaaaacatgctgttctagtaaaaaaatattcaagaaagatgtctaatgcaattgataggttagataagtctacgaaatcagctgttgaaaatgcttttgttaaagcaggtataccaagaagtgatgcgaaaactttaacttatattgtatttttagttatttag

SEQ ID NO: 407198 - DNA, 1524 bp, Staphylococcus aureus
atgaagagtaaaaaaagaatggaaagattgtacgatgatttatttagtactaattttttaattaattatggttattttgatattactcctaaaaataatcaagatttaacagaattaaacagctacggtaaatcagatgcattttatttgaaaatatttaatatgagtaaattagctgaatatattacttataatccattttacattaaaaaattttttaatgatagaaacatacgtagtactgaaccaataatatttactattccgaaaaataatacatcaagaagagaatataagattcctaatatttatagctatttaaatttgatgtttttcatgcaagaaaataaaaaagaatttaaagaagtttttctaaccaataaattttcaacatctaaatttttttcacttccagattttgattttaaatttactgacaatttaaaaaagactttactttacggtggtaatcatatattaaacgttgatttatctaatttttatcattctctttatacacatagcataccttgggtaataatgggaaagaagaatgctaaaaaagaaagaaagaaaggtttttcaaatcaattagataaattaattacatcctgtcaatataatcaaactcatggaatacctactggcaacatattaagtcgtattattagtgaattatatatgtgttatattgattctgaaatggaaaataaagggtatagatatgcgagatatgtggatgacatatcattctcatttaattttgaagaagagaaagataaattttacagagattttaacaaactatgtatgaaatatgaattaaaaattaatgacaagaaaactgaagtaaatgattttccatatatacatccacaaaacaaagactttatatttaattatttcaaaaattattcctcaaatagtaaagatgaaacttggattataggtattaagaactttattgatttatgtatagatgaagaaagaaaaggaaataaaggggcaataaaaagtattttcccagtaatagaaaatactttaaagaagaaaaaaataaataaacatcaaataagtaagatatttggatataggaataatattactaaattcaatatcttgcaattcatattagatttatcactaaaagactctaaattaacaaatagatgcctatctttattaaactatttgactattaaaatggacgataaaaaaatagtctcaaaacaagttaaacagtattttaaaaatagaaacgaagaaattagaaaattgttagtattttataataaaaataattatcatcaagaagcataccaaattcttgtttatattgttgaatatgatgtagatattcttttaaaaaatgatgttttgagtttgctaaatgaaaatacagataacttatctctatcgttattgacaataatatatctaagaaagtcttggaaaatagaaaatttattaaaaaaattgataatctatttaaaaattctaaggatgattatcctgcaacagtag

SEQ ID NO: 407199 - DNA, 846 bp, Staphylococcus aureus
ttgaaaaagttaatatttttaattgcaattgctttagttttaagtgcatgtaattcaaacagtccacatgccaaaaagttaaatgatttagaaaaaaaatataatgctcatattggtgtttatgctttagatactaaaagtggtaaggaagtaaaatttaattcagataagagatttgcctatgcttcgacttcaaaagcgataaatagtgctattttgttagaacaaataccttataataagttaaataaaaaaatacatattaacaaagatgatatagttgcttattctcctattttagaaaaatatgtaggaaaagatatcactttaaaagaacttattgaggcttcaatgacatatagtgataatacagcaaacaataaaattataaaagaaatcggtgggatcaaaaaagttaaacaacgtctaaaagaactaggagataaagtaacaaatccagttagatatgagatagaattaaattactattcaccaaagagcaaaaaagatacttcaacacctgctgctttcggtaagactttaaataaacttatcgcaaatggaaaattaagcaaagaaaacaaaaaattcttacttgatttaatgttaaataataaaagcggagatactttaattaaagatggtgtttcaaaagactgtaaggtggctgataaaagtggtcaagcaataacatatgcttctagaaatgatgttgcttttgtttatcctaagggccaatctgaacctattgttttagtcatttttacgaataaagacaataaaagtgataagccaaatgataagttgataagtgaaaccgccaagagtgtaatgaaggaattttaa

SEQ ID NO: 407200 - DNA, 1758 bp, Staphylococcus aureus
atggctaaattactaataacgagcgtagtaagcttttgttttatatttctattgttagtattttttaagtacatattaaaacgctattttaattatagtttaaattataaagtttggtatctaactgtgcttgctggattaattccttttatcccaattaaattctcttttataaaattgaataatgtgaataatcaagcgcccacagttgaaagtaagtcacacgacttgaaccataacataaataccaccaaacctgttcaagagttcacaacagatatccataagtttaattgggattcaattgataatatctgcacagttgtttggatagttttagttattattttaagttttaaatttttgaaatcattattatatcttaaatatttaaagaaacagtcactttatctaaacgaaaatgaaaaaaataaaatagatacgatacttttcaaccatcaatataaaaaaaatattgtgattcgaaaagcagagactattcaatctccaataactttttggtatgggaaatatattattttgattcctagttcatattttaaaagtgtaattgataaaagactaaaatatataatactgcatgaatatgctcatgctaaaaatagagatactttacatttaattatctttaatatcttctctattgttatgagttacaatccattaatacatattgtaaaaagaaagataattcatgacaatgaagtagaagccgatagatttgttcttaataatattaacaaaaatgaatttaaaacttatgcggaatctattatggactccgtattaaatattccattttttaataaaaatatattaagccattcatttaatggtaaaaagtcattactcaaaagaagattaattaatataaaagaagccaatttgaaaaaacagtccaaattaattccaatttttatttgtatttttacttttttgctcatggtaattcaaagccagtttttgatggggcaatccataactgattataattataaaaagcccttacagaacgatcaccaaattttagatgaaagtaaaaattttggttcaaatagtggatctttcgtcatgtacagcatgaagaaagacaaatactatatttataatgaaaaagaaagtagaaaaagatattctcctgattcaacttataaaatttatttagcgatgtttggacttgaccatcatatcataagtgataaaaattcacgtatgtcatggaatcataaacattatcctttcgagtcttggaataaggaacaagatttaaatacagcaatgcaaaattcagttaattggtacttcgaacgtattagtaatcaaataccaaagaactatactgcggctcaactcaagcaattaaattatggtaatgaaaacttgggaagttataaaagctattggatggaagatagtttgaaaatatctaatcttgaacaagtaatagtttttaaaaatatgatggaacaaaataaccattttagtaaaaaagcaaagaatcaattatcttcttcattattgattaagaaaaatgaaaagtatgaactgtatgggaaaacaggtacaggtatagtaaacgggaagtataataatgggtggtttgtaggttacgtaattacaaatcatgataagtattattttgctacacatttatcagatggaaagccgtctgggaaaaatgctgaattaatcagtgaaaaaatattaaaagaaatgggtgttttaaatggccaataa

SEQ ID NO: 407201 - DNA, 381 bp, Staphylococcus aureus
atggccaataagcaagttgaaatatctatggctgaatgggatgttatgaatataatatgggataaaaaatcagtatcagctaatgaaattgtagttgaaattcaaaaatataaagaagttagcgataaaacgattagaacattaatcacaagactatataaaaaagagattataaaacgatacaaatcagagaatatttatttttactcatcaaatattaaagaagacgatattaaaatgaaaactgctaaaacctttcttaataaactgtatggaggggacatgaaaagtttagtgctgaattttgcgaaaaatgaagaattaaataacaaagaaattgaagaattgcgagacattttaaatgatattagtaaaaagtaa

SEQ ID NO: 407202 - DNA, 579 bp, Staphylococcus aureus
ttgaaaataggttatgcaagagtttcaactggattacagaacttggatttacaggaagatcagttaaatcaatatggttgtgaaaagatatttaatgatcatatgagtggttcaaaaagtaagcgacctggtttagataaagccattgaatttgcgaggtcaggagatacgattgttgtttggagactagatagactaggacgtaacatggaagatttaatcatattagttaatgaacttaataatcgaggcgtgagttttcatagtttagaagaaaatataacaatggataaatcaagttctacaggacaattgttatttcatttattcgcagcatttgcagagtttgaacgtaatttaattttagaacgttcttcagcgggacgaattgcagctcgtgctagaggacgctatggaggtcgacccgaaaaattaaataaacaagatttaaaattactcaaaacactttatgataatggaacaccaattaaaactattgcagagcaatggaaagtttcacgtacaacaatctatcgttatctcaataagttaaataaccaagaaaataaagataaataa

SEQ ID NO: 407203 - DNA, 612 bp, Staphylococcus aureus
gtgattataggttatgcgagagtatcttcgatagatcaaaatttagaaagacaactagaaaatttaaaaacgtttggtgctgaaaaaatatttacagaaaaacagtctgggaaatctattgaaaatagaccggtacttcaagaagttcttaattttgtaagaatgggagatcgattcgttgtggagtctattgaccgtttaggacgtaactatgatgaaattattgaaactgtgaactatttaaaagaaaaagatgtacagttaatgattacaagtctacctatgatgaatgaagtgattggtaatcatttactggataaatttatgaaagatttaatcattcaaatcttagcaatggtttcagaacaagagagaaatgaaagtaaacgtcgacaagctcaaggtattcaagtcgcaaaagataaaggtgtatataaaggacgtcctttactctattcaccgaatgcgaaagatcctcaaaaacgtgttatctatcatcgagttgtcgaaatgttagaagaaggacaagcaattagtaagattgcgaaagaagttaatattacaagacagacagtttatagaattaaaaatgataagggattatgttggtaa

SEQ ID NO: 407204 - DNA, 420 bp, Staphylococcus aureus
gtggaattagataattgtataaattatttgttgagtacttctcagaatagagtgtttaaacattttaaaagtttattaagtccctataatattactccagcagaatatggtgttttgaattgcttgattaatagtaatttgaatacacctaaagcgattggtaatactttaaatttagaaccttcaacaatatctggaatattagataagatgtccaaaaaggatctaataacacgtcaaactgataatgaaaatagaagaactgtgctaataaacagtacaaataaagcaaaagacttatggccaacattagaaaagaaagcctatcaacttaataataattacttcgctaatttaactaatgaagaaactgtagtgtttaaaaagatattactaaagataaatgaaactacgttttaa

SEQ ID NO: 407205 - DNA, 972 bp, Staphylococcus aureus
atgttcaatgcggtagtagtgagaaaaagtgcatcaaatgttagttataaagtagaaaccgttgatgaatcttatttatcgaagggtgatgtcttagtaaaagtgttatactcttcaataaattataaggatatgctagctttacaatataacggcggtgtaattagagattatcctatgattcctggtatagattttgcaggtattgttgaatcaagttcgaatgataagtttaaagaaggcgataatgtattagttactggttatgatgtcggcgtgacacatacaggtggattttcagaatatgcacaagtgcctggagagtggattgttcctattccccaagaaatgtctattaaagagtctatggtatatggcacagccggttttacggcagcattatcaatttttgaactagaaaaatatggaatgaatatcaaatcacaacctgaaattttagtgtctggggctacaggtggtgtgggcagtgttgctatacaaattttacgtaaaattggatatgaaaatatcactgctatcgtaagaaaagaaaagcaaatagaaatcgcaaaaaaattaggtgcaaaacaagtaataataattgaagatgataataaaccacttaaaaaaggtatttttgattatttcctagatacagtagggaataatgtaacattatacggtttaaaacgtctaaattatcaaggtgttgctactgtatgtggaaatgtagcaggaaattcacttaacgctaatatattaccgtttattcttagaggtattaaattaattggcattgattctgtatgtgttgatcataatatccgtgaagatatatggagtaagttagcaaatgaatggaatataggaaattcacttctatacaatgaaattggatttgaagaattctataaaacgatagatcagcttttaaaaggacaacatttaggaagaactattttaaaagtataa

SEQ ID NO: 407206 - DNA, 780 bp, Staphylococcus aureus
atgttaaataaaatcttacttttattgctctctgttacttttatgttgttatttttctctttacattcagtaagtgctaaaccagatccaagacctggagaattgaatagagttagtgattataaaaaaaacaaaggtactatggggaatgttgaatccttatataaggataaagcggtaatagcagaaaatgttaaaaatactagacaattcttaggacatgatttgatttttcctattccttattcagaatacaaagaagttaaaagtgaatttataaataaaaaaacagctgataaatttaaagacaaacggttagatgtgtttggaataccctatttttatacatgtttagtacctaagaatgaatcaagagaagaatttatttttgatggagtttgcatatacgggggcgttacaatgcactccacagctgatagtatatccaaaaatataattgttccagttactgtagataataaacaacagttctcttttacaattagtacaaataaaaaaacggttacggtacaagagctagattataaagtaaggaattggttgactaacaataaaaaattatatgaatttgatgggtcggcatatgagacgggttatatcaaatttattgaagaaaataaagatagtttttggtacgatttgtttcctaaaaaggatttggttccctttataccttataaatttgtaaatatttatggagataataaaactatagatgcttcgagtgttaagatagaagttcacctgactacaacgtga

SEQ ID NO: 407207 - DNA, 807 bp, Staphylococcus aureus
atgaaaaaaacaatatttatactgattttctccctgacgttaacactactaataacccctttagtttacagcgatagcaaaaatgaaacaattaaagaaaagaatttgcacaaaaaatcagagttaagtagtattactttaaataacctcagacatatatacttctttaacgaaaagggtatctctgaaaagataatgacagaagatcaatttttagattacacactattatttaaaagttttttcataagtcattcacagtataacgacttattggtacaattcgattcaaaagaaacagttaataagtttaaaggcaaacaagtagatctatacggatcttattatggttttcaatgttctggtggtaaaccaaataaaacagcatgtatgtatggtggagtaacactgcatgaaaacaatcaactttatgatactaaaaaaatacctattaatttatggattgatagcatcagaactgttgttccgctagatatagttaaaacaaataagaaaaaagtaaccattcaagaactagatcttcaggcaagatattatttacataaacaatataatttatacaaccctagtacttttgatggtaaaattcagaaaggactaatcgtgtttcatacctcaaaagaaccgttggttagttatgatttatttaatgttataggtcaatatccagacaaattattaaaaatataccaagataataaaatcatagaatctgaaaacatgcatatcgatatatatttatatacaagcctaattgtattaataagtctacctttggttctgtag

SEQ ID NO: 407208 - DNA, 168 bp, Staphylococcus aureus
atgactttttctttattaacaaaagtagctatgtctggattaatattaactggtgccataggaacagccggattagttagtgtgcctgttgccaatgttgaggctaaagcagcagagttcaatcccaaagtagacaaattattaaaatttgaagtttctaaaaagtaa

SEQ ID NO: 407209 - DNA, 777 bp, Staphylococcus aureus
atgaaaaaatttaacattcttattgcattactcttttttactagtttggtaatatctcctttaaacgttaaagccaatgaaaacattgattcagtaaaagagaaagaattgcataaaaaatctgaattaagtagtaccgcgctaaataatatgaaacattcttatgcagataaaaatccaataataggagaaaataaaagtacaggagatcaatttttagaaaatactttgctttacaaaaatttttttactgaccttatcaattttgaagatttattaataaacttcaattcaaaagaaatggctcaacatttcaaatctaaaaatgtagatgtttacgctataagatatagcattaattgttatggtggtgaaatagataagactgcttgtacatatggaggtgtcactccacacgaaggtaataaattaaaagaacgaaaaaaaataccaatcaatttgtggataaatggtgtacaaaaagaagtttctttagataaagttcaaacagataaaaaaaatgttaccgtacaagaattagatgcacaagcaaggcgctatttgcaaaaggatttaaaattgtataataatgatactctcggaggaaaaatacagcgcggaaaaatagagtttgattcttctgatgggtctaaagtctcttatgatttatttgatgttaagggtgattttcccgaaaaacaattacgaatatacagtgataataaaacattatccacagagcaccttcatattgacatctatttatatgaaaagtag

SEQ ID NO: 407210 - DNA, 1038 bp, Staphylococcus aureus
atggctttaggtatattatcaaaattggcaatggcaggtattgttttaactagcgttacaggcgctgcaactctaggaggcgtttctagtattgctcatgaagtacatgcagaggaaaacgctaatcaagaacactttgagaaaactttagaaggtaaggtattaaatttcaaagatgtattgagtaaaaatacaatatcaataaaagacttcagtaaagcagttgaaaatgaattgaaaaataaaggctttgaccctagtgagtataaacttaaatttaaggtaaaagtaggacatagtgtgtatcaaagtagtgatggaggaaatttaattgttggtaatgaacatattggcactgcaactgccgaattcaatcctactaaacacaaattaggggtatatgaatctgaaatagaaaagattattgattatattattaaaaatattacatttaaggacttagatgtttcagtaaatatgcaaaacaagatttttcaatatattcatttacaatatttacgtactgacgccggaagaattaattttatgaatttaattgaaaatccgtttacatataaacctagaaaaaaacctatcgatctagatgaaatacaaaaacacaaaaatacaataataaagtttaatgaaatttttaagcaaggcaacaacctagaaaacttattaaaaagaatgaaaaaaccatctaacatgaattttcatattgcaataagtgaagataatttattaactagtgataatccagtaatcgctactgataattggaaccaaataatgcttccaattactccaaatattcttatagaatttcaagaagataaaattaactcatctaacgatttaagagtaatattaaaaaaaaataaaacaagatatgtaaatgaagcaacaattaatacagcaaattattttgttatatcaaataaagagtttacccgttatcaatataaatatatagacaatcgctttaataataagaattgggagattggttatcctcatgtaaatttgaaaaattaa

SEQ ID NO: 407211 - DNA, 813 bp, Staphylococcus aureus
ttgagtttaaaggacatagaattttggatgagtttatacgatattcttaaagatgtgtggtttttaattttaattcctattgttattagtattgtaaaactattgaataaaaatgacttatatcagactcgaaatgttgagaaaataaagatggtattaaaaaatacgcggttatttattttgattactattggagcactgatatatttggtgtcgatgatatttttttcattgagtgcctatcctaaagacgaagttatggaatatatatctaaatgggataacattggttcattcaccattttaatcattatgtatgccatgttgtttccaatagttacaattccttttcttggagaacgtagaaataagcgattctttttagaaaagaataataacgaggttatagaaagagaaatcattgaccgtgtctatatcaacggaaaagataaattaattttaaaagatggcgaaggtattcaaactgaaaagaatgttacagatatagataatttaacatttaaaatacaagataaaaaatcatggatagcaatggaagatatacaaaaaatctttttaaaatttcaagacagaagcaaaaaaaagagaatctccatttttatttttatatgtagtattccaacagtttatttagcttggaatttaccgagcataattgatatgtttactaaattacaaaaatggacagatatatttatgtatatcagtttttttactttgccattgatactgatcatagaattatattacgttgtctacattgtttataaaagtttatttaaaaaggtctaa

SEQ ID NO: 407212 - DNA, 678 bp, Staphylococcus aureus
ttgattgcttgtatttctttaggaatatctatttttgctttaggtatttcaatatatactgtgttttatcagagaaaaaaagataataatcttttaagacctcaactttttttagaatctcaaaataagcaaactgtagattacataggtattaatttagatattggaggttacgaaaagctacaggaatatgatgttttattaacatttattaatacaacgcaagtaagaattatagatttgtctgtatctattgatgtgaggaaaaatgatacttttgattatttattaagtaaagcattagaagaaaaagaaaacaattttgatatagaaaaagatatgtttggtaatgatacttatggttgggataaagtttttggtttggaagaaacgacaaaagaaaaaatatcagttcttgatggcggagattcattcgaattgagattaccaagtattttttcagctttattattaggtgccatgtatttaaatagaaatgactttacagaatctaactttacaatagattttgatgtaaaaattttatataatcatgattttgctaataaaggtaaatatgtttgtgtaaataagactgtttcagtaaatatcacttatgaaagagcgattcaaggaccatgggttgtttatgattctattatttttgataaattgtga

SEQ ID NO: 407213 - DNA, 1065 bp, Staphylococcus aureus
ttgttaacggtagatcaagtgaaagaattggtaggagaaattaaagatcctattatagatgtgcctttaaaagaaacagaaggtattgttgaagtttctattaaggaagaaaaagaacatgtgagtgttaaattagcaatggcacaattaggtggtgcaccgcaattagatttacagatggctgttgttaatgcattaaaagaaaacggtgcgaaaacggtcggtatacgatttgaaacattgccggaagaaaaagtaaatcaatttaaaccaaaagaagaaaataaacctaaaacgatagaaggcctattatctcaaaataatccagtcgaatttattgcaatagcctccggtaaaggtggtgtcggtaaatctactgttgcagtaaatttagccgttgccttagctcgtgaagggaaaaaagtcggattagtagatgccgatatatatggatttagtgtaccagatatgatgggtattgatgaaaagcctggaattaaagggaaggaagtaattccagttgaacgtcatggcgttaaagttatatcaatggccttttttgtggaagaaaatgcgccagttatatggagagggccaatgttaggtaaaatgttgacgaatttctttacagaagttaaatggggagacattgaatatttaatactcgatcttccacctggaacaggagatgtagctttagatgttcatacgatgttaacttcaagtaaggaaattattgtaacgacacctcatcctacagcagcatttgttgcagctcgcgcaggtgcgatggcaaaacatacggatcattctattcttggcgtaattgaaaacatgagttattttgaaagtaaagagacgggtaataaagaatatgtctttggcaaaggtggcggtactaagttagctgatgaacttaatactcaattacttggggaattacctttagagcaaccatcttggaatccaaaagattttgcaccgtcaatatatcaatcagatgatcgtctaggtaaaatttatagctcgattgcacaaaaagttatagctgctacaaataaatag

SEQ ID NO: 407214 - DNA, 1443 bp, Staphylococcus aureus
atggctaaagttgaattaacaacccggagacgaaacttcatagttgctgttatgttgattagtgcgtttgtagctattttaaatcaaacattattaaatacagcgttacctagtataatgagagaattaaatatcaatgaaagtacatcgcaatggctagttactgggtttatgcttgttaatggcgtcatgatacctctgacggcatatctaatggatagaattaaaactagacctttatacttagcggcgatggggacatttttattaggttctattgttgcagccttagctccgaattttggagttttaatgttagctcgtgtaattcaagcgatgggtgcaggcgtacttatgcccttaatgcaatttacgttatttacattgttcagtaaagaacatcgaggttttgcaatgggactagcaggtttagtaattcaatttgcaccagcaataggacctacagttacaggattaattattgatcaagcgagttggcgagttccatttattataattgtaggaattgctatacttgcctttgttttcggtttggtttcaatctcgagttacaatgaagtgaaatatacgaaattagataagcgttcagtaatgtattcaactattgggttcgggttaatgctatacgcatttagtagtgcaggagatttaggatttacaagtccaatagtaataggtgcgttgatattaagtatggttattatctatttatttatacgtagacaatttaatattactaatgcacttttaaatttaagggtttttaaaaatagaacatttgcattatgtacgattagttcaatgattataatgatgtcaatggttggacctgcgctgcttataccgctatatgttcaaaacagtttatctttatctgccttgttatcaggacttgttatcatgcctggtgcaataataaatggtattatgtcagtttttacaggtaaattttatgataagtatggtcctagaccattgatttatactggttttacaattttaacaattactacaattatgttgtgtttcttgcatacagacacatcttatacgtatttaatagtcgtatatgcaattagaatgttttcagtttctttactcatgatgccgataaatactacaggaattaattctttgagaaatgaagaaatctcacatggcacggctattatgaactttggtcgtgtaatggctggttcactaggcacagctttaatggttacattaatgagttttggtgcaaaaatatttttatctacatcgccatcgcatttaactgcaactgaaattaaacagcaatccattgctataggggtggatatctcatttgcttttgtagctgtgcttgttatggcggcttatgtgatagcactttttataagagaacctaaagaaatagaaagtaatagaaggaaattttaa

SEQ ID NO: 407215 - DNA, 468 bp, Staphylococcus aureus
gtgaattatcttaaacataagttttataacttgttaactacaatgattgttctctttatttttgtactttctggtgcgatttttttaacatttctagggtttggtttatatggattaagtagaatacttatttattttaggttgggtgactttacatataatagaagtatgtacgataacctattatattatggcagttatataatctttgggtacttcatcatatttgcagtcgagcatttaatggattattttagaaaaatgttgcctgaaaatgcatattttagaggcgcgacttttcatttgatttcttacacagttgcaacaacgttattttattttattattcatctgaactatgtgtatatcaatatcgatttttgggtcatcatggttattatagggttcttatatgtttgtaagcttcaattttaccctgaaagtaaaaatttaaataatagaaaatag

SEQ ID NO: 407216 - DNA, 1344 bp, Staphylococcus aureus
atgcgattaaagtcaatcataactgttatagctttaatattaattatgtttatgtcagcgattgaatcatctattatttcgcttgcattacctacaattaaacaagatttaaatgcaggaaatttaatttcattaattttcacagcgtattttatcgcattagtaattgccaatcctatagtgggcgaattactttcgagatttaaaattatttatgtggcaattgcaggattacttttatttagtataggtagttttatgtgtggtttaagtactaattttactatgctaattatatcacgcgtgatacaaggttttggatcaggtgtattgatgtcattatcgcaaattgttccaaagttagcatttgaaattccgttacgatataaaattatgggcatagttggcagtgtttggggtatttcgagtatcattgggccacttctaggtggtggtatattagaatttgcaacatggcattggttattctacataaatataccgattgcgatcattgccattatattagttatatggacatttcattttccagaggaagaaacagttgctaaatcaaaatttgatactaaagggctcacgctattttatgtatttattggattgattatgtttgctttattaaaccaacagctgttacttttaaatttcttgagttttatcttagctatcgttgtggcaatgtgtttatttaaagtagaaaaacatgtttcttcaccatttttacctgtggttgaatttaatcgttcgattactttagtttttataactgaccttctaacagctatttgtttaatgggattcaatttatatattccagtctaccttcaagaacaactaggattatctccattgcaaagtggattggttatttttcctttatctgtagcttggattacattgaattttaatttacatcgaattgaagcaaaactatcaaggaaagttatttacttactatcatttacattgctactagtaagtagtattatcatttcatttggtattaaattgccggtacttatagcatttgtgttaattttggcaggattaagttttggatatatttatacgaaagatagtgtgattgtccaagaggaaactagcccattacaaatgaagaaaatgatgtcattttatggattaactaaaaatcttggggcatcaataggttcaacaataatgggatatctttatgcgatacaatcaggaatctttggtccaaacttacacaatgtgttaagtgctgttgctgtaattagcattgggcttattgttttatgggtcgtattttttaaagaacagtcatctcaatcaaaagaatag

SEQ ID NO: 407217 - DNA, 687 bp, Staphylococcus aureus
atgatgtccaaatcaactaaaaaaagtaatgacacaatcgtagaaacatttaaggatatcatccctttatcatttggagaagaaattggtaatgcggcatctcatggtgttgcagctttgttaacattattagtgttaccctatgcggctgtgcacagttatattgcacatggtacgcttgcgtctgtgagtatgtctatttatgttatttctatctttatgatgtttatttcatctactatttatcattctatgcaaaatgaaacacctcataaatatattttaaggattatcgatcacagtatgatttacgtagcaatttctggtacatatacgcctattttgttaacagttgtaggtggttggataggttggacagtatttattttattatggggaacgacactttgggggattttatataaatccatagctgtcaaagttaaccaaaagttaagcttaattgtctatttagtgatgggctgggtaggtattatcttgttaccaattatttttattcgcacatcatggatattcatattattcattttcttaggtggtgtgtcttatacaattggtgcatggttttatgcacaaaagaatagaccatattttcatatgatttggcatatttttattgtaatagcatcactattgcatttaattgcaatcttatattttatgtag

SEQ ID NO: 407218 - DNA, 1188 bp, Staphylococcus aureus
atgctagataaaaatcaattagctaaatataaacaagatcatttgtgtgaatatgaaaaaataatgagtaacaatgaaaaagaagcacttgaagagaaggtagcgtcattagatttagattttattgccaaattatataacgatttatacatcaataagaaaacaatagatgatgtatctgcagtttctgaagtgaaatatgatattaaatcacaaatgagtgatgatgagattaagcgtttagaggaacaaggacttcaagctattaaagaaggacaatttgcagtacttttgatggcaggtggtcaaggaacaagacttggttacaagggccctaaaggttcgtttgaaattgaaggtgtaagtttatttgaacttcaagctaaccaattaaaaacattgaatcatcaatctggacatacgattcaatggtatattatgacaagtgatatcaatcatgaagaaactttagcttatttcgaagcacatagttattttggatatgatcaagaagcaatccatttctttaaacaagataatattgtggcgcttagtgaagaagggaagttaattttaaatcaacagggtcgtattatggaaacgccgaatggtaatggtggcgtgtttaaatctttagacaaggcaggatacttagaagaaatgtctaataatggcgttaagtatattttcttgaataatatcgacaatgttttagtaagagtgttggatccactatttgcaggatttacggtagaacatgattacgatattacttctaaaacgattcaaccaaaaccaggagaaagtgttggacgtttagttaatgtcgattgtaaagatacagtactggagtattcagaattagatccagaagttgcaaatcaatttaacaatgctaatatcggtattcatgcatttaaacttggttttattttaaacgctgtaaatcgtgagttaccttatcatttagctattaagaatttgaagcaattagatgagaactttggtgttattgaacaaccaactttaaaattcgaattgttctattttgacatatttacttatggaactagttttgtcacgttacaagttcctagagaagaagaattttcacctcttaaaaataaagaaggtaaagatagtgttgcaactgcaacagaagatttacgtagaatgggtttaatttaa

SEQ ID NO: 407219 - DNA, 516 bp, Staphylococcus aureus
atgacaggtaaaacacatgcttcatgcggcatgctcgttggagcgctaacaacacaatattttcaaacggatattttttcgtcggttacggttatcattctagcaactctagctagcttattacccgatatatgtcacactcaaagtaagattggcagaaggtttaaggtaattagtttttttgtgagattgatctttggacatcgaacctttacgcattcaatattatttatcgcaatcatagcatttttattgcaaattattcagacgcctaattattatatggcagcaattataattggattagtgtcacatgttatactagatatgataacaccaaaaggcgtgaaattattttatccgttaccgtttaatgtgaagacaccgattcaatttaaaacaggtggacttgtagacttatctttagctacagcgttaatggtcggaacagtttatgttttatttcagcctttcatcaatgatataataagcaactggaatactaagtttttatag

SEQ ID NO: 407220 - DNA, 261 bp, Staphylococcus aureus
atggcaatgacagtaaaaaaggataataatgaagtgcgtattcaatggagagttgctgatatcaaaattcctacaagtgaaattaaaaatattacacaagaccaagatattcatgcagttcctaaattagacagcaaagatgtatctagaatcggctcaacgtttggtaaaacgaatcgcgttattatcgatactgaagaccacgaatacattatttatactcaaaatgatcaaaaagtttacaatgaattaactaaataa

SEQ ID NO: 407221 - DNA, 1371 bp, Staphylococcus aureus
atggatagcttttcaaggaaagagatagttattgggagacttaagtttattacgatgtctttaattggtatcttattatttttagtaccaattccagtcgaacaagatggacagaagcaaacaacgttgcccgtggcatttttagcaggcgtgcttaaagatgtattaggtggcgtaatgccatttttaattgtgacgataattactttatcgggtatcataactctgatttgttcaactattttaaaagataaattgaaacctgacgggctaatgaacaatgcttttaacgttagaattggttggttaattttacgaatattagcagttgtttttgcatggatgacatttttacgaattggttcaaaggttatttactcagatgaaacgggtggattattgttctcaagtttattgccaacattagtggcagtattcttatttgcagctctatttttaccgctattaatggaatacggtttgttagagatgttgggtcctatttttagaccggttatgagacctttatttacattgccaggacgttcgacggtagataatttagcatcatttattggagacggaactgttggtgtcttaattacaagtagacaatatggtgaaggatattattctcgtcgtgaggcaacagttatttcaacgacatttagtgtagtttctatcacctttgcaattgtagttgctgaaacagtgcacatgcaaaatcaattttttgctttctatttatcagtgatagtatcctgcctcgttgcagcagtcattatgccaagaatttggcctttaaataaaattcctgatgagtatgctaaggaggtacctgaaagtgcgcgtactgaggcattgccagaaggaaagacggcattgagacatggctttgatactgcaacagaagtaggtattaaagcaccgggcgttattgacttttttaagtcaggattaaaaacagtcattgatatgtggtttgttattttgcctgtagtaatgagtattggtactattgctaccattattgcgaactacacgcccttttttgtcatattgggtaaaccttttgttccatttttagagttaatgcaaatacctgaagcggcacaggcttctcaaacgattattatcggttttgccgatatgtttttaccttctatattaattgaaggtgtacaaaatgatataactcgttttgttattggggcacttagtatatcgcagttaatatacttgtctgaagtaggtggcgtcatacttggttcgaagattcctgtaagcatcggcaaattgtttatgattttcttgattagaacaatcattacactaccaattatttctttgatggcacatcttttgttataa

SEQ ID NO: 407222 - DNA, 969 bp, Staphylococcus aureus
atgatgacaacgaaaattatacgtcgttatagtttaatcacaatccttttaattgtgagtatattcataagtttatgtgtagggtctgtcatgattcatccgattgatgctattaagggaatctttacacaagatgattttattttaaatgagtatcgtatacctagaacattacttggtattattatcggtagtagcttggctatttcaggtgcaattatacaagctgtaataagaaacccgttagcctcacctgatgttataggtatttctaaaggtgccagtttagctgctgtgattattattatgacctttccaacagcaccattgtttgtattacctataggttcattcttaggtgcctttgcagtaagtttatttttatcatttttaatttcaaaatatgatgttaaaggttcaaagcttgccttaattggtttagcaataggcgcaatatgtacggcgattgtgcagttcttattaatcagaaatccactggaagcaaacaaagcgcttgtttggttgacaggtagtctatatggacatgatatgtcgaatatttatactatattaccttggtttttaataacgataccaatcatcattttattgagttatcaattagatgtattgaatctaggtgatgctgttgcaaccgcactcggtttaaaagttaaaactattaaaatgctattgttaattttagcagtaatattagcaggatccgcaatttcagttgtcggtggtattagctttttaggattaattgcacctcatattgcgagacaattaataggaaataaaacattacacgttattatcatgtcggggttaattggtgctatattgttaacatttggagatggtttagcccgtggcattcatccgccactggatattcctgttggggttatcattgcaattatcggtgcaccatacttcttaatattattacgaagaatgaaataa

SEQ ID NO: 407223 - DNA, 1032 bp, Staphylococcus aureus
atggctataaaagaaataagtagccaatctgccatagatcataaaagaaaaagacgcacaacactcacgtatatagtgagtttgtgctttctttttatttgtatatatttaaatatggcgattggttcttcgaaaattaattttagcgatatcattcactatgttactggtcatacagatacgaaagcaacgtttttattgcataatgtacgtatgccaaggatgattgcagggttatttattggcggtgcattagcggtatctggtttgttaatgcaagcaatgacacgcaatccgctagcatcacctaaaatttttggtgtcagttctggtgcatcgtttttcattgtatttgtgacgattatcattccagcattagaatattatgcattatatttaggtgtgataggtgcatttataggtggtttaactgtttatacactttcaggtgctacgaaaggtatgacacccattaaattagcattggctggtatggccatccatttgttttttagtagtatgaccgaaggtattattattttgaatgagaattcaaacgaacaagtgatgttttggcttgtcggttcattatccagtatgaagtgggatgaaattttaaccattctaccatggattattggtgctttaattgtaacgatttttattggacgtcaactaacgataatggaactaggcgatgacattgctaagggattgggtcaaaatataaataaagttagaattatcattggactattagtcattattcttacaggtatgtcggtgtcagtggcaggaccaattggatttgttggcttaatcgtaccgcatatagtcaaacgctatgtgagtaagaattatttagtcatgattccattaacatttattataggtgcagatttgttactactatcagatgtattaagtcgtttaattacatatccttatgaatcaccagtagggattgttacatcattcgtaggtgcactttacttcttatttataacgattaaaggggtgaaaagaatatga

SEQ ID NO: 407224 - DNA, 984 bp, Staphylococcus aureus
atgagaggtctaaaaacttttagtatattgggattaatagttgccttacttttagttgcagcttgtggtaatacggataattcaagtaaaaaagaatcatcaactaaagatactatttcggtaaaagatgaaaatggtacagtaaaagtacctaaagatgcaaaacgtatcgttgtattagagtactcatttgcagatgcattagcagcattagacgttaaaccagttggtattgctgatgatggtaagaaaaaacgtatcattaaaccagttagagaaaaaattggggattatacttctgtaggtacacgtaaacagccaaacttagaagaaattagtaaattaaaaccggatttaattatcgctgatagcagtagacataaaggtattaataaagaattaaacaaaattgcaccaacattatcattaaagagttttgatggagactacaaacaaaatattaattcgttcaaaacaattgctaaagctttaaataaagaaaaagaaggcgaaaaacgtcttgctgagcatgataaattaatcaataagtataaagatgaaattaaatttgatagaaatcaaaaagtgcttccagcagtagttgctaaagctggtttattagcacatccaaactattcatatgttggacaatttttaaacgaactaggatttaaaaatgcattaagtgacgatgtaacaaaaggtttaagtaaatatttgaaaggaccttacttacaattagacactgaacatttagctgatttaaatccagagcgtatgatcattatgacagatcatgctaaaaaagattctgctgaattcaagaagttacaagaagatgcaacatggaaaaagttgaatgcagttaaaaataatcgcgtggatattgttgaccgtgatgtttgggcaagatctcgtggcttaatttcttctgaagaaatggctaaagaacttgttgaattatcaaaaaaagaacaaaagtaa

SEQ ID NO: 407225 - DNA, 1071 bp, Staphylococcus aureus
atggcacacgttaacataaatatatcgaagattaaatataacgccaaagtacttcaaacagtttttcaaagtaaaaatatgcaattcacaccagtaattaagtgcatagctggtgaccgtacaattgtagaaagcttaaaagcgttaggtatcaatcatgttgcagaatccagattggataacataattagtattgcagatcaggatttaacatatacgttattgcgtacgcctgccaaaaaagagatttcagatatgatagaaaaagttgatatgagtatccaaacagaattatctaccatacatcaaataaatgaagtagcagaagttttaggaaaaaaacataagattttattaatggtagattggaaagatggccgtgaaggtgttctgacttatgatgttttagattatattaaagagattattcacttgaaaaatatccattttgtaggtttagcattcaattttatgtgttttaaatctgatgcgccaagtgatgatgatatctttatgattaatcgattcgtctcagctgttgaaagagaaataggatatcgattgaaaattatttcaggtggtaattcgagcatgttaccacaacttttatataatgatttgggtaaaataaatgaattgcgaataggtgaaacgttgtttagaggtgttgatacaacgacaaatcaagcgatcgctatgttatatcaagatgcgattacattggaggctgagattttagaaattaaacctcgagttaatacacaaacgcatgaatcattcttacaagctattgtagatattggttatttagatacaaaagtcgataatatttcacctatggatcagcatatcaatattttaggcgcttcgagtgatcatttaatgcttgatttaaatggtcaaggacactatcaagttggagatcatatatctttttcattaaattatgaagcactttctcattcgatgtatatgaaaaatttacataaggtatatattgatgattcaaagattgatacgctacttcaaaattttgatgtgaaatctcctgctatggtaaaccactattaa

SEQ ID NO: 407226 - DNA, 1758 bp, Staphylococcus aureus
atggtatatcttgaatgggcaaaggcagatagaaatattcaatatcgtgtaattaacgccattattaaagaacgtatttaccccgagcaaacatttatttcgcaaaaaggatctttaattgaaattcagtatcatatgcatgtgttgactattgaagttgttagaaaaagtgcattagaacgctatgagtttacaggtgatattacttatttaaataaaggtgaaacgtcattaattataactttagaaggtttattagatgtgttgaatcatgactttgatatccctatttcagagcgactacgcgaagagttaatacacagtcgagatagtttagttgaaacatataagcaaatgtctcacagacaaacgttaataagtcaaagttttaaattttcaaggttaccacaagatattaactttttttcatggttacaacatgtaaaagatagtgataagacagatgatttaacttattctgagagtttggtaccagaggggcatccaacacaccctttaaccaaaacgaaattgcccttaactatggaagaagtacgagcatatgcacctgagtttgaaaaagaaatccctttgcaaattatgatgattgaaaaagaccatgttgtgtgcacagctatggatggtaatgatcaatttattattgatgaaataattcccgaatactacaatcagattcgtgtgtttttaaagagtttaggtttgaaaagtgaagactatagagcgattttagtacatccttggcaatatgatcatacgatagggaaatattttgaagcatggattgctaaaaaaatattaattccaacgccgtttacaatactttcaaaagcaactttatcatttaggacgatgtctttaattgataaaccataccatgttaagttgcccgtcgatgcacaagcaacaagtgccgttagaacagtctcaactgtgactactgtagatggaccaaagttaagttatgctttacaaaacatgttgaatcaatatccaggatttaaagttgctatggaaccgttcggtgaatatgcaaatgttgataaagatagggcacgtcagcttgcttgtattataagacaaaagcctgaaattgatggaaaaggtgcaacagtagttagtgcaagtctagttaataaaaatccaatagatcaaaaagttatcgtggatagttacttagagtggttaaatcaaggaattactaaagaaagtattacgacatttattgaacgatacgctcaagcattaatcccgcctttaattgcttttattcaaaattatggaattgctttagaagcacacatgcaaaatacagtagtgaacttggggccacattttgacattcaatttttagtgagagatttaggtggttctagaattgatttagaaacattacaacatcgtgtatcagatattaaaattacaaatgatagtttaatagctgattctatagatgcagtgattgcaaaattccaacatgctgttattcaaaatcaaatggcagaattaatccatcattttaatcagtatgattgtgttgaagaaaccgaattatttaacatagtacagcaagtagtagcgcatgccattaacccaacactaccacatgcaaatgagttaaaagatattttgtttggaccaacaattactgtcaaagcgttgttaaatatgagaatggaaaataaagtaaagcaatatttaaatattgagttagataatccgataaataaagaggtgtag

SEQ ID NO: 407227 - DNA, 1194 bp, Staphylococcus aureus
atgacaaaatatttttttagcagttcttttctactatttctaggtaattggattggacaaatagggctaaattggtttgtacttaccacttatcataacgcagtttatctggggattgtcaatttttgcagacttgtaccaatattattactaagtgtgtgggcaggggcaattgccgataaatatgataaagggcgattgctgagaattacaatttcatcatcatttttagtaactgcaattttatgtgtgctcacgtatagtttcactgcaattccaattagcgtcattattatatatgcgacattaagagggattttaagtgcggttgaaacacctttaagacaagcaatcttaccagatttatcagataaaatatctactacacaagctgtatcatttcattcattcatcattaatatttgtcgttcaatagggcctgccattgctggtgtcatattagcagtctatcatgcgccaacaacatttcttgcacaggcaatttgttattttatcgcagttttattatgcttaccattacattttaaagtaactaaaatacctgaagatgcatcaagatacatgccgttaaaagttattatagattacttcaaattacatatggaaggtcgacaaatatttataacatcattattgattatggcgacaggtttttcatatacgacacttttaccagttttgacaaacaaagtatttccggggaaatctgaaatatttggtatcgctatgacgatgtgtgccattggtggtattattgcaacgctagttttacctaaagtacttaaatatattggtatggtaaatatgtattatttaagttcatttttatttggcattgctttgttaggtgtggtatttcacaatattgtcatcatgttcatttgtattacattgattgggttatttagtcaatgggcacgtacgacaaatcgcgtttattttcaaaataatgttaaagattatgaacgtggtaaagtactgagtattattatgatggatagaggtatgattccattgggaagtctattaatgagtatatgtgcagatgtgtttggcattgttagaactttttcaataatgggaataagtactatatgcattacaatggtattctattttataaatagaaagttgaagttaaagttggaggaaagtaatcatggtatatcttga

SEQ ID NO: 407228 - DNA, 1977 bp, Staphylococcus aureus
atgaacttgaacttaatttttaaagaacagacattaaaatttaacaaagaagaacaagaaacatatttatttttacaacaacataatagcgattgggctaatatttttaaagagatgattttacaaggaagagataaagtcactcagagattggtcacatcaatgcatcgcgaaaacttagttaaagcgcgcactcaaagtaagaaaatattgagtcgtgatttgattatgttagatatctcaacgactcatatactagaaatccagttcccacaagctaagcaaacattatatgctcctatcactggagaacacgcctttgatcgaattgatgttgaaggccctttctacattaaagatgacattacaaatacgattacacgagtacaccatccaaatgaaattcttgagtgtattttaattgaagcaccagatttaaaaaatgctgctagtgatcaatttcagcaagatttaataaacagtgcaactaatatgacatttgcaattagctatcaagcactgtcaatgcaacatgattctgcacctttatttaatattatcgaaaatagcgaagatagttacttgcgttcagagcaagccgttattgaaggtcatccgctacatcctggggctaaattacgtaaaggtttaaatgcattacaaacattcctatattcttcagaattcaatcaacctattaagttgaaaatagtactgattcacagtaaattaagccgtactatgtcactgtctaaagattatgatacaactgttcatcaactatttccggacttaattaaacaattagaaaatgaatttacgccaaagtttaactttaatgattatcacattatgattgttcatccatggcaattagatgacgtattacattctgattatcaagcagaagtagataaagaattaatcattgaagcaaaacatacgttggattattatgctggtttatctttcagaacattagttcctaaatacccagctatgtcgccacacatcaaattgtcgacaaacgttcatattacaggtgagattcgtacattatcagaacaaacgacgcacaatggtccactaatgacacgtattttaaatgatattttggagaaagatgtcatatttaagtcctatgcatcaacaattattgatgaagttgctggtattcatttttataatgagcaagacgaagcagactatcaaactgaacgaagtgaacaattaggtacattatttagaaaaaatatataccaaatgattccacaagaagtcacaccattgattccttcaagcttagttgcaacctacccatttaacaatgaatcacctatcgtgacattgattaaacgttatcaatcagctgcatcattgtctgattttgaatcatcggcgaaatcgtgggttgaaacttatagtaaagcattgcttggtctcgtaatcccactagttactaaatatggcattgcattagaggctcacttgcaaaatgctattgcaacatttcggaaagatggtctattggacacgatgtatattagagactttgaaggtttaagaattgataaagcacaactaaatgaaatgggatacagtacatctcatttccatgaaaaatcaagaattcttactgattcaaaaacgtctgtgtttaacaaagccttttattctaccgttcaaaaccatttaggcgaattaattcttacaatctctaaagcatcaaatgattcaaacttagaaagacatatgtggtatatcgttcgtgatgtactagataacatttttgatcaacttgtactttcgacacacaaatctaatcaagtaaatgagaatcgcataaatgaaattaaagataccatgttcgcgccatttatagattataagtgtgttacaacaatgcgtcttgaagatgaggcacatcattatacttatattaaagttaataaccctttgtatcgagaaaataattaa

SEQ ID NO: 407229 - DNA, 771 bp, Staphylococcus aureus
ttgggttttatcaaacgtaaacgaatgccaattgaatattttacgcatcaattcgaagaaattacatatttgtcagatgacttacaagtaaaagctttaatgatgacaccacatcatgaagtaaatcgcattgtagtttatttgcgaggtggcaaaggtcaagtaggacgtgtgcgcgcaggtagattaatgcaattttcagatagtcaaactttagtgattgggccatactaccgaggtaacaatgggagtgaaggcaaagacgaattttaccgtggcgatttaaatgatgtgacgcaattattaaggttgctacatgataaatatccacatgcatttatccacatggttggtttttcgcgaggtggtttacaaggattgttgacatttcaagacttaccagtaacaagttatacaatctggggtggtgtctcagatattgatttaatgtatgaagaacgtgtcgatttaagaggcatgctacgaagaatgattggtcatccgaaaaaagatcgagcggcatatgaggcacgccaagcgattccaaacattaatgaaaacagtccgccaatattaattgtacatggagggaaagaccagcaagttggtattcatcatgcgtattatttagcggaccaactagagttaaaaggtgccacgcatgaaacattttatcaaatggcagaaggacatgtgccaagaccaccagcgatggttgaaacattgacttatattaaagagtttatgaaccaagttgagtcgcatagctag

SEQ ID NO: 407230 - DNA, 480 bp, Staphylococcus aureus
atgcgcgtgaagtttagggataaagataatcgtcaagttaatttgacatttaaaaaggataatgagatagcagatggcaatcatgtgctagctattccaacgtttaaaaatcaattgctttttaccaaacataatttacgggggattgaatttcctggtggtaaaagggaacgcggggaaagtagtgctgaagcagttacacgtgaattatatgaagaaacaggcgccaaagttaaaaatatttattacatagcacaatataccattgaaacacatgatcaaactgattttgtaaaagatgtatattttatcgaagttgaatcattggtaagcaagaacgattatttagaaacagcagggccagtgttgtttaactgtatcaatgatattgaactcgcacaacggagtttcttactgcaagatagtaccattttaaaatgcgtagagagggtgcaatcacttgggttttatcaaacgtaa

SEQ ID NO: 407231 - DNA, 258 bp, Staphylococcus aureus
atgaaaaagatattcttggcgatgattcatttttatcaacgtttcatttcgccactcactccaccaacttgtcgtttttatccaacatgttcagagtacactagagaagcgattcaataccacggtgctttcaaaggcctttatttaggtatccgtcgtattttaaaatgtcatccgcttcataaaggcggctttgaccctgttccgttaaaaaaagacaagtcagcaagcaagcattcacataaacataaccattaa

SEQ ID NO: 407232 - DNA, 1002 bp, Staphylococcus aureus
atgaagttgacagctttgcatttttataaatatagtgagccatttaagtcacaaattgtaacaccgaaagtcactttaacgcatcgtgattgtttgtttatcgaattgattgatgacaaaggaaatgcatatttcggggaatgtaacgcttttcaaacagattggtatgatcatgaaacaattgcctcagtgaaacatgtaattgagcaatggttcgaagataatagaaataaatcatttgaaacgtatgaagcagcactaaaattagtagattcattggaaaatacgcctgctgcaagggcaactattgtcatggcattgtatcaaatgtttcatgtactgccttcattttcagtagcatatggagcgacagcgagcggcttatcaaataaacaactagagtcattaaaagcaacaaagccgaccagaattaaattaaaatggacgcctcaaatcatgcatcaaattagagtgttacgggaattagactttcactttcaattggttatagatgcaaatgagtccttggatcgtcaagatttcacacagttacagttattagcgcgtgaacaggttctttatatcgaagagccatttaaagatatctccatgcttgatgaagtagcggatggaacaatacctccaatagcccttgatgaaaaggcaacatcgttgttggacataattaatttgatagaattatacaatgtgaaagttgttgtattaaaaccatttcgtctaggtggcattgataaagtgcaaacggcaattgatactttgaaaagtcatggtgcaaaagtggttattggcggcatgtacgaatatggtttaagccgctattttacagcgatgcttgctcgtaaaggtgattatccaggagatgttacaccagcaggttattattttgaacaagatgtggtggcgcattcaggcatattaaaagaggggcgactcgaatttcgcccccctttagtggatataactcaattacaaccatattaa

SEQ ID NO: 407233 - DNA, 1479 bp, Staphylococcus aureus
atggacttttggttatataaacaagcacaacaaaatggacatcatattgcgataacagacggtcaagaatcttatacttatcaaaatttatactgtgaagcgagtctattggctaaaagactcaaggcttatcaacaatctcgtgttgggctatacatagataattcgattcaatcgatcattttaatacatgcatgttggttggcaaatattgaaattgcgatgattaatacaaggttgacacctaatgagatgacgaatcagatgaagtcaatcgatgtacaattgattttttgtaccttgccactggaattacgagggtttcaaattgtatcgctggatgatattgaattcgctggaagggatattacaacgaacagtttgttggacaacacaatgggtatccaatatgaaacatcgaatgaaactgtggtgccgaaagagtcgccgtccaacatattaaatacatcatttaatttagatgacattgcatcgattatgtttacatcagggacaacgggccctcaaaaagcggtgccacaaacgtttcgtaatcattatgccagtgcaatcggatgtaaagagagcttgggatttgatcgtgacactaattggctatctgtcttgccgatttatcatatttcgggtctcagtgtacttttaagagctgttattgaaggttttactgtgcgcattgttgataaattcaatgccgaacaaattttaacgatgattaaaaatgaacgaatcacgcacatttcgcttgtgccacaaactttaaattggcttatgcaacaaggtttacatgaaccttataatttacaaaaaatattactcggcggtgctaaattatctgccactatgatagagacggcattacaatataacctgccaatttataattcatttggtatgactgagacatgttcgcaatttttaacagcaacaccggaaatgttgcatgcacgtcctgacactgtagggatgccaagtgccaatgttgacgtaaaaattaaaaatcctaataaagaaggtcatggagaattaatgattaaaggcgccaatgtgatgaatgtatatttgtatccaacagatttaacgggtacgtttgaaaatggttattttaatacgggtgacattgctgaaatagatcatgaaggttatgtcatgatttatgaccgacgtaaagatttaattattagtggcggtgaaaatatttatccatatcaaattgaaacggtagcgaagcaatttccaggtatcagtgacgcagtatgtgtagggcatcctgatgatacttggggccaagtgcctaaattatattttgtcagtgaaagtgacatttcaaaggcacaattgattgcatatttatcacaacatttagcgaaatataaagtaccgaaacactttgaaaaggttgatactttaccttatacatcaacaggtaaattacaaagaaataagttgtatagaggatga

SEQ ID NO: 407234 - DNA, 483 bp, Staphylococcus aureus
ttgaaaaagtttttaaaattcaaggggatgaaaatatgtttaatgctatatctactgatttttttaagtagttgtagcacaaataataaaatagtaggccaacgatttgaaatacaacaacataatgaaacaataggtagtatttacttttcagcagactatgcacatataagaggtatagaaaaaggcactgcaaaatatttcatagacaaagtaggcagcaaacgttacttatttattgaatatattccggataatgtattgaattgcaagccggacttttggaaaacgttaaaatataaaaaggacaaggtaacatattatgtatatctcattgaaaatttagatgatgaagtattccatttaagtgcattacaagacatgaaccgtataccaattgacattgcagatgatgtggcaacaatgggtaaatcaccacatcaaaatgacagaatgacactaaaattaaataaaaataactga

SEQ ID NO: 407235 - DNA, 615 bp, Staphylococcus aureus
ttgaatacagagaacaacaagaatcaaaaccaatctgttaaaaattctgaaagacgcggcatgttaaaaggatgcggcggttgccttatttcttttattttattaataatcttattatcagcctgttcaatgatgtttagtaataatgacaattccactaataatcaatcatcaaaaacgcaattaactcaaaaagatgaaaataaaaatgaagataagcctgaggaaaaatcagaaacagcaacagatgaggatttacaatcaaccgaagaagtacctgcaaatgaaaatactgaaaataatcaacatgaaattgatgaaataacaacaaaagatcaatcagacgatgatattaacacaccaaacgttgcagaagataaatcacaagacgacttgaaagatgatttaaaagaaaagcaacaatcaagtaaccatcatcaatccacgcaacctaagacctcaccatcaactgaaacaaacacgcaacaatcatttgctaattgtaagcaacttagacaagtatatccgaatggtgtcactgccgatcatccagcatatcgaccacatttagatagagataaagataaacgtgcatgtgaacctgataaatattaa

SEQ ID NO: 407236 - DNA, 996 bp, Staphylococcus aureus
atgagcaatcaattcaaaagcgaagaagagcgaagacaatgggaacaattccaagctttccaaaatcaacaaaaccaacagaaccagcaatacggacaaaagaaatctaaaaaaggatggttctggggctgtggtggttgtctagtattatttattttaattatcatcggtatttcagcttgtacagctggtattacaggtaaccttggcggaaatagttctaaagaaacgaacaaaacccataaaatcggtgaaactgttaaaaatggcgaccttgaagtcactgtaaattcagtggaaactatgaaatctgtaggaccatctcttgcaccaacaaacgctaaaggtatatttgtcgttgctgatgtgacgattaaaaacaaaggtaaagaagcgttaacaattgatagttcaatgtttaagctaaaatccggtgataaaacatttgaagcagataatacaggttcaatgtctgctaatcaaagtgacaatggtagtatagaaaattcatttttcttacagcgtataaatccagatagcactgctcaaggtaaaattgttttcgatgtgtcagaaaacatagccaacgcaaaagataaaaaattagaagttatttctagtttatttagcgttaagaagattacatttgatttatccgatgctaaaaaaacatcaaaagctaaaaaagacaagcaagatacagaagtagctgttgcgagttcaaatagcgataatgtaagttatgaagcttcggctactacacctgctacaacttctagtgcggatactgattctgaagatagcgaaaagtctagtaaagatgaggataagcagaatgcgtctaaaagtgataaatctagtgtagaaaaaagtgaatctaatgaggaaactgctcctgtagagcccatgccccatagcaaacctaccactagtgaagcaccacctagccaaaatattcacaatgaagatagcatgtacgacgcttcaacagaataa

SEQ ID NO: 407237 - DNA, 627 bp, Staphylococcus aureus
atgaaattcaaagctatcgttgcaatcacattatcattgtcactattaactgcctgtggtgctaatcaacataaagaaaatagtagtaaatcaaatgacactaataaaaagacgcaacaaactgacaacactacacagtcaaatacagaaaagcaaatgacaccacaagaagccgaagatatagttcgaaacgattacaaagcaagaggcgttaatgaatatcaaacattaaattataaaacaaatcttgaacgaagcaatgaacatgaatattatgttgaacatctagtccgcgatgcagttggcacaccattaaaacgttgtgctattgttaatcgacacaatggcacaattattaatatttttgatgatatgtcagaaaaagacaaagaagaatttgaagcatttaaaaagagaagccctaaatacaatccaggtatgaacaatcatgatgaaacagatggtgagtcagaagacattcaacatcatgacattgataataacaaagcaattcaaaatgacataccagatcaaaaagtcgacgataaaaatgataaaaatgctgttaataaagaagaaaaacatgataatggggcaaataattctgaagaaactaaagttaaataa

SEQ ID NO: 407238 - DNA, 345 bp, Staphylococcus aureus
atgataacatttgagaatatacaacaacttgagaaatacaccttaatgactatgcatggtctttttaatcaacttaaactcggcattatttcaatcgaaaacgcagagcatacgctttttacaccttatatgttggaaacgctctcttccctaggcgtgaaagacagcattgtcgatttaattcataaagggactgaattagaagactttgcggcatttaatttatcaattgaagacacagttacagtctgtttacaaagaactgaagaactattaaaacaatacaaaaatgtggaattcaatgacaaaatattaatcaattggcgtattatacaagagaaatag

SEQ ID NO: 407239 - DNA, 552 bp, Staphylococcus aureus
atggagaaaaatgaatatatagctaaatataatgaatatagtcaattattagacgctacatactcgcaagctgtagcataccttttaagtaaatatggcgctgtaaccgatgattattataaagaaaaatcatacacgcgatttttaaatggagaaatcaaaagtatttcaaaaggaaaatacactagagctagcgaaggattatattgccatcatataagcgaggacaaattccaaaatctatctgatctaagattcatttccaaatttaagtactcatacgacgttcaaaagaaagaaaacttagtgtactgtgatctaatcgagcatttaattttacatgcaattattacaaaagaatcccatggccaatttggtgtagctggattatgtcaaatgatcaaaccaacagtcattgattggtacattggcgaatataatccaaaaccagcatggatgcaagccaccaaagcacgtgcctatttgcctggaatattagtagagaaattactcattaaaattgacgatatgttaaaaggaatagaaatataa

SEQ ID NO: 407240 - DNA, 642 bp, Staphylococcus aureus
atgtttacacctatagttataaatttattaaatgatgtaggttcgatttttttagttagggtggggaatcaattgaaagttattgagaaagttcattatgaagatattttagaatcaaaaatagttcgattatttcaggcatttataaaggacaaaatggatcaactttttattacttctgaacactttgctattgacatagacaagctattatttcaacttaatttaaatgttagatatattaaaatggagggtaatacttcgggttatttaagtggaagaacaatctatattaataataatcactcgattaataatacaagattttcaatagctcgtgaattgggccgttatttatttaaaaatacagacttaatgagagatagtaacgataatagtctaaagaatttacatgaaatgatttatgaaagcgacgtaaatcagttttcagtcgacttacttatgcctaaaaagcaaatagaggcattagtctataatttttatgaagtcaataatatcaatttaagttctggtttatctgaaaaagaacgaaacaaactattgaaccttatatcaactaagttggaagtttcgaaagtagctgctggattaaggctgtataatttaggaatacatatttga

SEQ ID NO: 407241 - DNA, 186 bp, Staphylococcus aureus
atgaaacaaattagcattggctatgaagaaatctatggggatagaatttttcatagccattttttaaaagagcatgaagtaaaaaattggaaaaccgtcaatcaaataattgaaaaagaacacttggacaaaaatgaatatgaagcggaaccgccgttatttttcttttcaggatcgttagattag

SEQ ID NO: 407242 - DNA, 177 bp, Staphylococcus aureus
atggatagattaaaatattcacttaaagttggaattttagcattattattattttgtactttaaattatttagttccaatgcaaagcaatgctttttcaataattatatattcggcaatttttgctgtgttacttatgcttttagtttatatatttttaggaattttaaagaaatga

SEQ ID NO: 407243 - DNA, 384 bp, Staphylococcus aureus
ttgagtaaccaaaatttatttgatgaacttgagaaaaaaggttataaactggaagatatatttacaaaagaagaaataaaaaaatataaagctgaagaccaattgagagcgggtaaaactcaatatgtagaaacaggtaaagatactgcaacattatatctttcttctgcatatacaaaaacaatagctgctttaggtgcgggggctattagcgttatttctgcactaacaggaggtttagttggcgcaggtgttggtggtttccttggatctatagctgcatcgaatattgatactagtaagggaatatatataaaattaaaaactaaaaagaatgcagccggggaatacgttctgacaggagaaaaatggggatatcagtaa

SEQ ID NO: 407244 - DNA, 144 bp, Staphylococcus aureus
atgacaagagaaagaagatcatttagttcagagtttaagttacaaatggttagattatataaaaatggtaagcctaggaatgaaattatacgcgagtatgatttcacaccttcgacgtttgtaaatggcggttataaaatgtag

SEQ ID NO: 407245 - DNA, 378 bp, Staphylococcus aureus
ttgaataaaaaatatcttatgattgtaattataattttaatattgattctaggcggaatctttttgaagatgaaatatgacgaaaagaaatattatgatgaacaaaaagaaagaataacgatttatatgaagtacaatgtgaaaggttataaaaatataagcttcgctaattttaaagaaaacccaatggatggttattctattagtggttatataaataatgataaaaagttatcatttacagctggtataagatctgttgatgattttcaatttgataccgatatttcttatacagatgaattgggtagaaaatttaataaaaatcctaagtcagtttctgaaataaaaaaagagcaaaatacgtccaataaataa

SEQ ID NO: 407246 - DNA, 4113 bp, Staphylococcus aureus
ttgaaacgatcaacgaatcaagaaaaatttcttgatacactaattagacttaatactaagattgaagaactaggaaagataaatattttaaataatcatatatattccgaatatttttttagagacctgttaaatattgtatatgggtattcacttgagaatcataataaaaaacaaaaaaatgcaccagcatttgatcttatagataatacgaataaaattattattcaagttaccgcaacgtgtaaaaagcaaaaaatagaggacactctaaaaaaagagtatttaacaaataaaatggaagaaggttatcgattaaagtttatatttattggaaatcaaaataataatattaaaaataagaatttttcaaatccacataatatattattcgatagtaaaaaagatattattttaactcaagacttatgcgaagagtttttgaatttaaacataaataagcaagatcacgctattgaattattaaaaaaagaattatctccgcttttatttgaagattctttgtcatatttaaaagaagaatttattaatgaaaaattagaatttaatatatcgaatttagcttcacgatatactgcgaataatgatgtcgatactattaataataaaattatagaaggtatttctattaccaataattttaaatatactaatatttcatatctaaaagaattaaaaggttatatcgaaaatgatattttagataagatgaaatcaaaatacgcaaagaatatttatttgaatttcaaaaaaatattctctaatttagaacaatcagtcaataattatttggaactggaagaagagtttgaagaaaagaaaaaatacttaagtgaaatttatgaattgatagacgaaattaatattgacccttatatttttctgacagaacataatgaatgtaatatatacaaaataagtgagaatgaaaaattagaacttcaaacttatatgagtaaaatcgaaaaagtattattaaaatatcaaacgtatttaaaagaaacatgtaaagaatgcttgttttatccttatttgctagttcaaggtgaagctggcataggaaaatcacaccttttagcgcatctatctaaaaaacttagagatgaaaatcatattatttatctgtttttgggacaattttttactaaaaatgaagatccatggcatcaaatacttaatgatttagaagttacaaattctgttgataattttttaaggtcaataagtaataaggccaaagaaacaaaaaaaagagcttttattattattgatgcgcttaatgaaggtgaaggtaaaaggttatggggaaattattttcaaagctttatcaaccatataaagaagtattctaatatagctttaatattttctattagaaccccttttgaagatgttatattacccaaaaacgcaatacaagataacaatattgtagtatttcagcatgaaggttttagtaaggaagaaaactataatccaattgtatctttttgtgatttttatggattagagctacctaagttacctatattaaatccagaattcaacaatccattatttttaaaactaatgtgtgagtactgtgtaaataaatttaaggaatttgaccaaactataagtgttgcagagctatttacaaatgttcttaagacagtaaatattaatttatctaaggaagataaatttgattttgataaaaatattaatgttgtacaaaaagtaataaaaggattagttgaattaatgaacgactcagaatttaatcaactaaattatgaggaatcctatactgttgttaataatatagctaaagagtatgttcaaaagtcaaatagatttttagaagcgctaatagatgaaaatatattaattaaaaatactggctataaaggtgaaatgattatttatttttcgtatgagcgtatgggagattactttttatcagaataccttttagagaaatatagaaatgttgataaaagagatttagtaactaaattacagtcagatgaaaaagtgacaaggtattttcaaaaggaagacgatttatcttataatagaggtcttattaatgaactttttattaaattagcaaatgaatttaatatagagctatttgaagtatttccacagtttaaaaacaattataacatgatatattcttttataaatagtttagtatggagaaaagatggtagcataagtaaacatactaaatgctatatatccgataatgttattccttatgatgcatttagaaataattttttagatgtcttattaataaaaatgcctcaaaaaaaccatccgttaaatatttgggctttacataaattattgaaacaatgcaatttaggaaaaagagattttttatggactcaatatatatctataaataatgaaaaggtttttgaaattattaattggctatttagtaactataagaaattagatgaagaaactgcggaaaaatatatgatttttttaacgtggatattttctgcaactaataataaattaagagatctcggtactaaatctttagtaaaattattcaaaacatttccaactaaaattattggtttattaaaattatttgaaaataacaatgatccatatatagtcgaaagattatatgcttctgttttaggggcgacacttcgaatcgacatttgtgaaatacatatagagattgctaattatatttatgaagaaatatttgataaagaaatggtatatcctcatattttaatgagagattatgctaggcaaacaattgaatatattagtttatcaaaagatatatctaatataaatttagaaaaaattaggccaccttataaaagtaattggtataaaaaagaatattcgaatttaaatatagacgattacataaaatctttaaaaaacaaattagatagccatttacatttttctatcgataaaattaaaaactcaatgacaacggaatatggaagaggaactggggcatatggcgattttggcagatatgtatttggttatgctgtacgaaactgggtaaagggttttaaaagtgatcaagacttaagtaatatagcattaatgaggatttttgaaatgggttatgatgcaaaattacatggtgaatttgatatgtgggttaatcgttatgataactttaataattcaattgaaagaattagcaaaaaatatcaatggattgcttactatgaaattttagctaaacttgtagataaatttcctgatgttcaatattctggactatgggatgattatattagagatattgatcctactttactattacttgaaattgataaagaatcaaaaatactagtaccctcaccacttccttcgcatcaatcgaatgaatgggtaaaaaataccaaagtttttgatgaaacaaaattatttttagaaatagatatagacaatcatagatatatatgtttaagctcaaagtttaattttgaaaagagagagaaagaaataccatttgaagatagagactcatgttatttcttagcgatgggatatttttataataaagaagatagtaatgaaattatcaaaggttatgaaaataattatgatagaggtattaatattcctcgagcacatagtatatatttatatgaatattattggagcgaagcttataaaaattataaagagggatatttaactgaatcagatggtaaattatgtccagctatttatgaatatttttgggagttagattattctgttaaggacaaatcaataagtttttatattccgtgtaaagaaatagtagattatttttcattaatacaaacggaagaaggagtatggaaaactaaatttggtgaaacaatatgtattaattctaaattactcgaatttgataatgaatgtttacttattaaaaaagaaagtttattaaactttcttaatactaaaaaattgtctattggatggaaaatatatctagaaaaaatttctcttcgagatagacaagaatggtggtacaatgttttttatgacgatggcaaatataataagaaaataattaagaatgacatgtcaaaaattaggcgtaatttttag

SEQ ID NO: 407247 - DNA, 1200 bp, Staphylococcus aureus
atgagtaatacacaaaagaaaaatgtgccagaattgagattcccaggatttgaaggcgaatgggaagagaagaagttagggaatcttactaccaaaataggtagtggaaagactcccaaaggtggaagtgaaaactatacaaacaaaggcataccatttttaaggagtcaaaatattagaaatggtaaattaaatcttaatgacttagtttatattagtaaagatatagatgatgagatgaaaaatagtagaacgtactatggtgatgttcttttaaatattacaggagcatcaataggtagaacagccattaattcgatagttgaaacgcatgctaatttaaatcaacatgtatgtattattagattgaaaaaagagtattattataatttttttggacagtatctattatcaagaaaaggtaaaaggaaaattttccttgcacaaagtggaggtagtcgagaaggtctaaacttcaaagaaattgctaatttaaaaatcttcaccccaactatatttgaagaacagcaaaaaataggcaagttcttcagcaaactcgaccgacaaattgaattagaagaacaaaaacttgaattgcttcaacaacagaaaaaaggctatatgcagaaaatcttcacacaagaattgcgattcaaagatgagaatggtgaagaatatccagagtgggaaaacaaattcataaaagacatctttatctttgaaaataatagaagaaaaccaattacttcttcattaagagaaaaggggttatacccttactatggtgcaactggaattattgattacgtaaaagattatttattcaataatgaagaacgattactaataggagaagatggtgcaaaatgggggcagtttgagacgagtagctttattgctaatgggcaatactgggtaaataatcatgcgcatgtagttaaaagtaatgatcataatttgttttttatgaattattatttaaattttaaagaactacgagcatttgtcacaggtaatgcaccagctaaattaactcatgcgaacttatgcaatataaatcttaaaataccttgtctcactgaacaagataaagtaagtgcattgttaaaatctatagacaataaaatgaataatcaaatgaatagaattgagttattaaaagaacgtaaaaaaggactattacaaaaaatgtttatttaa

SEQ ID NO: 407248 - DNA, 354 bp, Staphylococcus aureus
atgatatcaatcattttagtcatgattggcggcggttttggcgcaattgctagaagtgccattactgattattttaatcataaatttacttcaaagttacctatcgcaacattgatagtaaatctagttggtagttttttaattggattaactataggcttatcaatttcaatctcatggttccctgcgttctttgttaccggttttttaggtggcttaacaactttctcaacgttagccaaagaacttacactaatgatgacgccaaaatttaatattaacctttttctcaattattcacttttacaattcatcattggatttatagcttgttatattggctatcatatttaa

SEQ ID NO: 407249 - DNA, 366 bp, Staphylococcus aureus
atgcaatatgtatatatttttatcggtggtgctttaggcgctttattacgttacctcatttcttttctgaatactgacggaggttttccaatcggaacactgatagccaatttgactggtgcctttgtaatgggattgctaacagccttaacaattgcatttttttcaaaccatccgaccctaaaaaaagctattacgactggttttcttggtgctttaacgactttttcaacatttcaattagaattaatacatatgtttgatcatcaacaatttataactttactactatatgctgtaacaagttatgtctttggtattttgttatgttacgtcggtataaaactaggtggtggtttatcatga

SEQ ID NO: 407250 - DNA, 303 bp, Staphylococcus aureus
atgtctcgttcaaaaaaatacttttacttatctagcttaatgattattttaagctttttctttaatacaaataacgttttcctaagtggactttttaattcttttattaaattaatacttttctgcagtgttattaactcaattgtactaattttgtctataatttttgcagatcgttcaattaaatcactaaagcctgatgcagattggattagaattgcgagtaaaagtttgccttggattattctaattgttattttagtacatatcttttcaattgttcgtacattcggttttatttaa

SEQ ID NO: 407251 - DNA, 714 bp, Staphylococcus aureus
atggctaaactaaatgtagaagtatttgcggacggtgcagatattgaagaaatgaaagcagcttataaaaacaaacaagtggatggttttacaacaaatcctagtttaatggctaaagcgggcgtaacagattacaaagcttttgctgaagaagctgtgaaagaaattccagatgcttcaatttcatttgaagtatttgcagacgatttagaaactatggaaaaagaagcagcaattttaaaacaatatggcgaaaatgtatttgttaaaattcctattgtaaatacaaaaggtgaatcaacgattcctttaattaaaaaactttcagctgacaatgtgagattaaacgttacggctgtttacacaattgaacaagttaaagaaataactgaagcagtaactgaaggtgtgccaacatatgtttcagtatttgcaggacgtattgcagatacaggcgtagatccattaccattaatgaaagaggctgtaaaagttacgcatagtaaagacggcgttaaattattatgggcaagttgccgcgaattattcaatgtgattcaagctgatgaaattggtgcagatattattacatgcccagcagatgttgtgaaaaaagtgaatacaaacttaggtcgcgatattaacgaattatcagtagatacagttaaaggctttgcgaaagatattcaatcttcaggtctttctattctataa

SEQ ID NO: 407252 - DNA, 636 bp, Staphylococcus aureus
atgcaaaaattcaaagactttttttacgatgatttatcggttacacgaggaaattattttttaactttaatggcagcattttttattactatcattttatttatcggcatagttgtcagtgaagtacatttactttatagcatgctaattgtattagtaggtttaattctattgaggctattcaaaatcaatttattctcttttaaaaaattaacattgtctcaagttatttatattataggcggtgcactattaatttatgggttagataatctttatttatattttcatgacgtaccggcaaatgaacaacaattagagcaagcaatacgaaatacaccattctatatttctattttcactgttaccatcatccccgctattgtggaagaaattgtttttcgcggtatgataataagggttatcttcagaaaacacttgtttttagggttaattgtgtctagtttagtttttgcatcattacacgaatctgacacttggattggttatttaccttacttatattctggtttgatttttggcctaatttatataaaaacaaaacgattagaagttgtaatattcatgcacttcttaaataacttgttagctctgctctttataatatggagataa

SEQ ID NO: 407253 - DNA, 444 bp, Staphylococcus aureus
atgaataaagcatcatttgataaaaaagttaaaaagcaattatggtttttgaacaagaaggagaaacaagcattagatcaacgattgtcttctatatctgatgatgacagcgttaacttaaataagcctgttacctttgctaatgcttacttaagacaaaatgtatttcgaaataaagaaacaaaaagttatagtatgtttgttacattagtagtgatgatgtttgcttatgttgctttattaggtttgtttttatttgggctaattacaagtctatctggcgtacaatttttcgttagtcctaaggtagatttatctacaactgttgttattttaacaattattggagcgattttattaatgtttgctagcatatattttataaaaattgtgacatcatactttactaagaaacttttagaaattaaatttaattcgaaatag

SEQ ID NO: 407254 - DNA, 444 bp, Staphylococcus aureus
ttgcaagacaattctactaaatatctactttatatccaaactgctacttcaaaccatctcgaaacaaattgtgtctttttacattgcgattacattcttaaagttccaattaacaaactcgtttcatattatgcgaaattgcatttatcatcacaaagtgtgctaattgagactgcaaaaaacatactaaatattaataaactggttcctatttacatcaacccaaaaactatactttttccgttaaaacataaacgtgcaccgatacaaatttatatcaatgcacattatattgttggtatgactgccatagagaattcaacattaatacattttcaagaaggcattcagctagaagttgatgagccattttctctagtttcaaaaaaatgtcatgaaagtttagctttgaagcacttcattgaaaatactatttcgaattaa

SEQ ID NO: 407255 - DNA, 471 bp, Staphylococcus aureus
ttgaaatttaatgacgtatacaacaaacaccacaaaatcatacaccatcttttaaaaaaatataatattagctataattatgatgagtattatcaactactcttgataaaaatgtggcaattgagtcagatatataaaccctcaagcaagcaatctttatcctcttttttattcactcgattaaatttttaccttatcgatttattcagacaacaaaatcaattaaaagatgtcattttatgtgagaataattcaccaacattaactgaacaaccaacatactttaatgaacatgaccttcgtttacaagatatcttcaagcttttaaatcaaagagaaagactatggctcaaactataccttgaaggatacaagcaatttgaaattgctgaaatcatgtcattatcgctttcaacgattaaattaattaagatgtccgttaagcgtaaatgccaacataattttaattag

SEQ ID NO: 407256 - DNA, 225 bp, Staphylococcus aureus
atggattacgcacatttaaatttagaacatttttttgcacgaaacgacgatttagatgttataagagatcgcgctgatttcgtgatgataaataacttcactaatgaaatgatgtatcgtgatggtcaaattgaaggcacgattgatttaaatcagtactattataaaaatagatcaaatgcagcaagttttattatgatggattataaaaaagaaactaagtaa

SEQ ID NO: 407257 - DNA, 855 bp, Staphylococcus aureus
atgaataaacacaagaaaggttctatttttggaataataggacttgttgtcatatttgctgttgtctcatttttatttttctcaatgatatccgatcagatatttttcaaacatgttaaatccgacattaagattgaaaagttaaatgttacattaaacgatgcagcaaagaaacaaataaataattatacgagtcaacaggtatcaaataaaaagaatgatgcatggagagatgcatctgcaactgaaattaaaagtgcaatggatagcggtacttttatcgataatgaaaagcaaaaatatcaatttttagatttatcaaagtatcaagggattgataaaaatagaattaaacgtatgttagtagatagaccaacgttattgaaacatacggatgatttcttaaaagctgctaaagataagcacgttaacgaagtttatttaatttcacatgcattattagaaactggcgcagttaaaagtgaattagctaatggagtcgaaattgatggcaaaaagtactacaatttctatggagtaggagcccttgataaagacccaattaaaacaggtgcagaatatgctaaaaagcatggttgggatacacctgaaaaagctatttcaggcggtgctgatttcattcataagcacttcttatcaagcacagatcaaaatacattgtatagtatgagatggaatccaaaaaatccaggagaacatcaatatgctacagatattaagtgggcagaaagtaatgcaacaattatcgctgacttttataagaacatgaagactgaaggaaaatacttcaaatactttgtgtataaagatgacagtaaacatttgaataagtaa

SEQ ID NO: 407258 - DNA, 396 bp, Staphylococcus aureus
atgactaaaaaaacaatttattttatatgtacaggcaactcatgtcgaagtcaaatggctgaaggttgggctaaacaaatcttagcggatgattggaatgtatattctgctggtatcgaaacacacggtgttaatcccaaagcgatagaagctatgaaagaagtaggcattgatatatcaaatcatacatcagatttaatcgataataatattattaaaaattcaaatttagttgttacattatgtagtgatgcagacgtaaattgcccttctttaccaacaaatgttaagaaagaacattggggatttgatgatcctgcaggcaagccttggtcagagttccaacgtgtaagagatgaaattaaaatcgcaattgaaaatttcaaatcacgatga

SEQ ID NO: 407259 - DNA, 1293 bp, Staphylococcus aureus
atgatgacaactttagcgacactcatttttctagtaactttattatttgtattatggcaacctaaaggcctagatattggcattaccgcactaactggtgcctttattgctgttattactggtgttgtaagtttttccgatgttttcgaagtaacaggtattgtttggaatgctactttgacttttgtctcagtcattcttatttcattaatattagataaagttggattattcgaatggtcagctattcacatgcttcatgcttcaaaaggcaatggtttaaaaatgttcgtttatatcatattattgggtgccattgttgctgcatttttcgcaaatgatggcgcagcgttaatcttaacgcctattgtattagcgatggttaaaaatataggttttagtaagcgggccatattcccttttattattgcgagtggttttatagctgacacaacttctttacctttaatcgtgagcaatctagtgaatattatatctgctgattattttcatgtaggattcgttcgatattttagtagaatgattatacctaatttattctcgcttttagcaagtattatagtattgtggttatattttagaaaagcgatacctaaaacgtttgatgataataatataaagcatcctaaagatgccattaatgatttaaagctatttaaaatttcatggattgttctagttatattacttttcggctatctaatcagtgaatttactaaaattccggtatcaattttcactggaatcattgcttttatttttctaatgttggctcgtaaatcaaatgctgtaaatattaagcaagtcattaagggcgcaccttggaatatagtattattttcaattggtatgtatatcgtcgtattcggcttaagaaatgctggcattactttaatattggctaaaatattagaatatatttccaattacggtctatttagcactattttgggaatgggcttcatttcagcgtttttatcatcaataatgaataatatgcctacagttttaatagatgcgattgctattggtcaatcaaatgtccatggcatgttaaaagaaggcctaatttatgcgaatgttatcggttctgatttaggtccaaaaattacaccgataggctctttagctacattactgtggttacacgtcttaacacaaaaagatgttaagatttcttggggcacatactttaaaactggtatcatcattacaattccagtactatttataaccctcatagggttgtatctaacacttatcatattttaa

SEQ ID NO: 407260 - DNA, 315 bp, Staphylococcus aureus
atgacgtataaagaactagcaacatttttaaaagttttatcagattcaagcagattagaaatactagatttactttcttgtggagagttatgcgcttgtgatttgttagcacattttcaattctctcaacctacacttagctatcatatgaaagcattagtaaaaaccaacttagttacgacacgaaaaatcggaaataaacatttattccagctcaatcataatatttttgagtccgtaattaataacttgtctaaggttcatacctctaaccaacgatgtatttgtcataaccttaagactggtgaatgctaa

SEQ ID NO: 407261 - DNA, 1503 bp, Staphylococcus aureus
atgcgtgtagcaataataggcatgggaactgctggtgtaagtgtattgagagagttagttaagcacccgaagtttaatcaattagatatagatttatacgatgataaagtaaatatgggacagggcgtaccatttcaaaatgatagttctgagctgctaattaatatgccttcgaaaaagatgagtttaaatttagatgatgagactgaattttggaagtggtataaacaacaaactgattttaattttgatgaacctgcatatttaccgagatttgtattcggacattatatgaaatcttatttatctatgttcacgaaaaaatatccaaatatatcaactaattataataaagttcaagagatttatacaaattctaatatcgatgaaacgaatttaacttattacatatgtactacaaattcaggacaatcatggcaagcgtacgattatgtatttttaacatgtggtacatttgcctaccatgatccatataacttaaagggtaaaaaaggatatatcgctacgccttatccaacatataatacgttagacgaagtaaatgaactggacgatattgcgattattggtacaggccttgccagtttagatgttgtccgttatgttgctgctcatcatccaaaattaccaattactatgacgagtcgttctgctcatttaccaagtgtaagaggtacaatgatagacgtgacattcaagtacttaactaaagacaaattaaatgacattaaaaaacatcatttcggcaatgcaccgcttgatactttagtttctttatttttaaaagaatgtgctgattatgacattgattttaaaaaattagtacatagacgtacaggaaatcatattgcagatttgaagtatgatttagcgcgtccaacagaaatgggcattttccaaagtatgattgaacatttgaaagagaatttaaattggatatggaatagcttaagtattgaagaccaacatcaatttaatcaaaaatactcaaagatgattcaattaaattcaaatccaatgcctccaagaactgctgaactaattattgaattaatagaaaataagtctttaattttgaaaaaagatttagaagatgtgaaacatgatggcaagttgtattatttttcatacaaaaaccaagaatcagtagacatatataatgttgtcattaacgcgacaggtgcaaaaagtcatttaaatgaattggatcaagatgatcaattaattagaaatcttgaaaatagacaaattgtacaagcacacccaatgggaggcatacaaatcattccggaaaccaatcaagttattagtccaaggtttggaacattaacaaatatgattgcgataggtcaaatgacaaacggtgttaataaactacgaaacggtgtgaaaatgattgtagaacaagttgcgcatacagtatctcaattatatgatgctttagaatcgaatgagcaacaacagcgcagtgacaatcaataa

SEQ ID NO: 407262 - DNA, 1044 bp, Staphylococcus aureus
ttgagtcaatttatggattatgcgattcaacttgcaaatatggtacaaggtcaaacaggtgttaatccacccgttggcgctgttgtagttaaagaaggtaggattgttggtattggtgcacacttgagaaaaggtgacaagcatgcggaggttcaagcacttgatatggcacaacaaaatgctgaaggtgcgacgatttatattacgttagagccatgtagtcattttggttcaacaccaccctgtgttaacaaaataattgattgtaagatagcaaaagtagtatacgcaacaaaagacaattcgttagacacacatggtgatgagacgttacgggctcacggtattgaggttgaatgcgttgatgatgaacgggcatcacaattataccaagacttttttaaagcaaaagcaaagcaactgccacaaattacagtgaaagtatctgcaagtttagatggtaaacaagcgaatgataatggacaaagtcaatggattactaacaaagaggttaaacaagatgtctataagttaagacatcgacacgacgcagtgttaactggaagacgtacagttgaattagatgatccacaatatactacacgtattcaagatggaaaaaaccctataaaagtaatattgtctaagtctgggaatattcattttaatcagcaaatttatcaagatgaatcaacaccaatttggatatatactgaaaatccaaatttaacaaccaatcaaacacatattgaaattatttacttgaagtcttgcgatttaacaacaattcttcacaatttatataaaagaggagttggaactttgctagtcgaggcaggtccaaccactacttcagaatttctccaatctaattatatagatgaatttattctctattatgccccgaaattaattggcggatctggaaattatcaattttatcaaacaaatgatgtgattgagataccagatgcgaaccaatttgaaattgttcattccgagttattaaatcaaaatgttaaattaactttacgaaagaagtga

SEQ ID NO: 407263 - DNA, 633 bp, Staphylococcus aureus
atgtttactggcatcgttgaagaaataggtgtcgttaaaagtgttcaaattcgtcaatcagtcaggacgattgaaattgaagcacataagattacggcagatatgcatattggtgattccatcagtgttaatggtgcatgtttaacagtgattgattttaatcagacatcttttactgttcaagtaattaaaggcactgaaaataaaacctatttagcagatgttaagcgacaatcagaagtaaatttagagcgtgccatgagtggtaacggtaggtttggtggacattttgtcctcggtcatgtagatgaactaggaacagtttcaaaaataaatgaaacagccaatgcaaaaattattacgattcaatgtagccaacatattaataatcagttagttaagcaagggtctattactgtggatggtgttagtctaacggtatttgataagcatgataacagttttgacattcatcttattccagaaacgaggcgttcaacgattttatcatccaaaaaattaggagataaagtacatttagaaacagacgttttgtttaaatatgttgaaaatattttaaataaagataaagaccaattatctgtagataaattaagagcatttggtttttag

SEQ ID NO: 407264 - DNA, 1182 bp, Staphylococcus aureus
atgcaattcgataatattgacagtgctttaatggctttaaaaaatggagaaccaattattgtagtagatgatgagaatcgtgaaaatgaaggtgatttagtagcggttactgaatggatgaacgataataccattaattttatggcgaaagaagcaaggggattaatatgcgcaccagtgtctaaagatattgcacaacgtttggatttggtacaaatggttgatgataactccgacatctttggtacgcaatttacagtgagtattgatcatgtagatacaacaacaggaattagtgcttatgaacgtacattgactgccaaaaagctcattgatcctagtagtgaagctaaagattttaatcgtcctggtcatttatttccattagtagcacaagataaaggcgtattagctagaaatggacacacagaagcggctgttgatttagctaaacttactggtgccaagcccgctggtgtcatttgtgagattatgaatgatgacggcacgatggcgaaaggacaagatttacaaaagtttaaagaaaaacatcaattaaagatgattacgattgatgatttaattgaatatcgtaaaaaattagaaccagaaattgaatttaaggcaaaagtgaaaatgcctacagatttcggaacatttgatatgtatggttttaaagcgacatacacagatgaagagatagttgtactgacaaaaggtgcaattcgacaacatgaaaatgtacgcttacattctgcgtgccttacaggcgatattttccatagtcaacgttgtgattgtggtgctcaacttgaatcgtctatgaagtatatcaatgaacatggtggcatgattatttatctacctcaagaaggtcgtggcataggattgttaaacaaattacgcgcatatgaattaattgagcaaggatatgatacagtaactgcaaatttagcattaggttttgatgaagatttgcgagattatcatattgctgcacagattttaaaatattttaacatcgaacatatcaatttattaagtaataatccaagtaaatttgagggattaaaacaatatggcattgatattgcagaaagaattgaagttatcgtaccagaaacggtacataatcatgattatatggaaacgaaaaaaataaaaatgggtcatttaatatag

SEQ ID NO: 407265 - DNA, 465 bp, Staphylococcus aureus
atgaattttgaaggtaaattaattggaaaagatttgaaagttgcaatcgtagttagtcgatttaatgattttatcactggaagattacttgaaggtgcaaaagatactttgattcgacatgatgttaatgaagacaatattgatgtagcatttgtgccaggtgcgtttgaaattcctttagtagctaaaaaattagcctcatcaggaaattatgatgcagtaattacattaggatgcgtaattcgcggtgctacgtctcattatgattatgtttgtaatgaagtcgcgaaaggtgtttctaaagtgaatgatcaaactaatgtaccagtcatatttggtattttaacgactgaaagtattgaacaagctgtggaaagagcaggtacgaaagctggcaataaaggtgctgaagcagcagtaagtgcaattgaaatggctaatttattaaaatctataaaagcatag

SEQ ID NO: 407266 - DNA, 1002 bp, Staphylococcus aureus
atggcactattaaagaatttttttatcggattatctaataatagttttttaaacaacgcagcaaaaaaagtgggcccacgtttgggcgccaataaagtcgttgccggaaatacaattccagagttaattaatacaatcgaatacttaaatgacaagaatatcgctgttacggtagacaatttaggggaatttgtcggtacagttgaagaaagtaatcatgctaaagaacaaattttaacaattatggacgcgcttcatcaacatggcgtaaaggcacatatgtctgttaaattgagtcagttaggtgcagaattcgacttagaattagcttaccaaaatttaagagagattttacttaaagcaaatacttacaacaatatgcatataaatattgatactgaaaaatatgctagcctgcaacaaattgttcaagttttagatcgcttaaaaggcgaatttagaaatgttggtactgtaattcaagcatatttatacgatagccacgaattagttgataagtaccaagatttacgattacgtttggttaaaggtgcatataaagaaaacgaatcaattgcatttcaatctaaggaagacgtagatgcaaattacatcaaaataattgaacaacgtttgttaaacgcacgcaatttcacttcaattgcaacacatgaccatcgcatcattaatcatgtaaaacaatttatgaaagaaaatcacattgaaaaagatcgtatggaattccaaatgctctatggttttagatcagagttagcagaagaaatcgcaaatgaaggctataatttcactatttatgtaccttatggcgatgattggtttgcgtattttatgagaagattagcagaacgcccacaaaacctatctcttgctgtaaaagaatttgtgaaacctgctggcttaaaacgtgttggcataattgcagctttaggagctacagttatgttaggtttaagtacaattaaaaaattatgccgtaaatag

SEQ ID NO: 407267 - DNA, 828 bp, Staphylococcus aureus
atgtggaagtgggaagctgaaaatgatgcgaaaggcgtcgttgttattgctcataatatattagaacatacgggaagatatgcatatgttattacgatgttaagaagaaatggctatcatgtgattatgggagatttgcctggtcaaggtcaaacttcaagagctaataaaggacaaattgaaaactttcaaacgtatcacgaaagtttgctagactggttaaagatagctaatgaatataaaattcctacttatgtattaggggtaggacttggcggtttgattttattaaatttacttgaaaaagtagaattgccaatcgaggggatgatgttaatttctcctatgctagaacttcaaaagaatggaaaaaatcgtaaagataaacttgtttcaaatataggtaaaatttcaaaagacacacgttttaatgttggtgtagaaccaaaagatttaacacgtaatttagaaattgttgaagaaacagttaacgatggtttaatgttaaaaaaagcaacgtatcattggtataatacaattaatgagacgatgaaagatacgatggctcatattcatgacattcaaccaatgccaacgctattaatgtatggaacgaaggatttaattgttgatactagggcaattgatgagtttaaagaaaaatatcaaacacctgaattatattttaaagcttggcaaggtttttaccacgaggttcacaatgagccagaacgtgatgaagtaatgcgttatattctgactttcttaaataacagcgtcaatacaatgggctttattgttgaagatgacgaaattgtagaaatttaa

SEQ ID NO: 407268 - DNA, 1902 bp, Staphylococcus aureus
atgacaataattgtaagaccacctaaaggtaatggcgcacctgtaccagtagaaacaactttagtgaaaaaagttaatgctgacggtgtattaacttttgatattctcgaaaacaaatacacttatgaagttattaacgctatagggaaaagatggattgttagtcatgtcgaaggtgaaaacgacaagaaagaatatgtaataactgtcattgataggaaatcagaaggcgacagacaactggttgaatgtactgctagagagattcccatagacaagttaatgattgatagaatttatgttaatgtaacaggatcttttacagtagaaagatattttaacattgtgtttcaaggtactggaatgctttttgaagtcgagggcaaagttaaatcttcaaagtttgaaaatggtggtgaaggcgatacaaggttagaaatgtttaaaaagggattagaacatttcggtttagaatataaaataacgtatgacaaaaagaaagacagatataagtttgtattgacgccttttgcaaatcaaaaagcgtcttattttatttctgacgaagtcaacgccaacgctataaaactcgaggaagatgcaagtgatttcgccaccttcattagaggatatggtaattattcaggagaagaaacattcgaacacgctgggctcgtaatggaagctagaagtgcattagctgaaatatacggcgacatccacgcagaaccatttaaagatggtaaagtgactgaccaagaaactatggataaagaattgcaatcgagattgaaaaagtcgttaaaacaatctttgtctttagattttttggtcttaagagaatcatatccagaagcagacccacaacccggagacatagtacaaataaaatctaccaaactaggtttgaatgatttagtccgtatagtacaagttaaaacgattaggggtataaacaatgtaattgttaagcaagatgtaacgcttggtgagtttaatcgagaacaacgatatatgaaaaaagttaatactgcagctaactatgtttctggattaaatgatgttaacctttctaatcctagtaaagcggcagaaaacttgaagtctaaagtagcgtcaatagctaaatcaacactcgatttgatgagtagaactgatctaattgaagacaaacaacagaaagtgagttctaagactgtaactacatcagatggcactatcgttcatgattttatagataaatcaaacattaaagatgtaaaaacaattggaacgattggcgattctgtagctagaggatcacatgcgaaaactaatttcacagaaatgttaggcaagaagttaaaagctaaaacgaccaaccttgcaagaggtggcgcaacaatggcaacagttccaataggtaaagaagcggtagaaaacagcatttatagacaagcagagcaaataagaggagacctaatcatattacaaggtacagatgatgactggttacatggttattgggcaggcgtaccgataggctctgataaaaccgacactaaaacgttttacggcgccttttgttctgcaattgaagttatcaggaaaaataatccagcttcaaaaatacttgtaatgacagctactaggcaatgccctatgagtggtacaacgatacgccgtaaagatacggacaaaaacaaactagggttaactttagaggattatgtcaatgctcagatattggcttgtagtgaattggatgtaccagtatatgatgcctatcatacagattattttaagccatataatccagcgttcagaaaatcaagtatgccagacggattgcatccgaacgagaggggtcatgaagttattatgtacgaacttattaaaaattattaccagttttacggatag

SEQ ID NO: 407269 - DNA, 948 bp, Staphylococcus aureus
atggacatagaattaacaaaaaaagatggtactgtaatcaaattaagtgaatacgggtttatcgttaacgatatagtaattgatagcatgcaaatcaacacaaagtatcaagacaaagaaaatatgaacggtcgtatattaatggggagcaattatatcagtagagatatagttgttccttgtttttgtaaagttaaaaatcgttcagacattgcttatatgcgagatatgttgtataggttaacgacagacatagaacctatgtatttacgagaaataagaagaaaagaagagttgaattacaggtttactcaaccaatttctgatgattacgtgaaattagataaaaacaacttcccggattatgaatattcaagacacgatcaacaaatttatgtaaatggtaaacagtataaagttatttttaacggagttataaaccctaaacaaaaaggtaataaagtttcttttgaactaaaattcgaaactacagaattaccatacggtgaaagtattggaacaagcctagagttagaagaaaacaaaaaggttggattgtggtcgtttgattttaatattgattggcatgcaggcggagacaaaagaaagtatacatttgaaaatttgagcaaaggtacagtttactatcatggtagtgctcctaacgaccaattcaacatgtataaaaagataacaattattttaggcgaagatacagaatcgtttgtatggaatttaacgcatgctgaaataatgaaaatcgaagggatcaaactaaaagctggagacagaattgtttatgatagcttccgagtttataaaaacggtgttgaaataagtaccgaaacgaatatagcccaaccaaaatttaaatacggagctaataaatttgagtttaatcaaacagttcaaaaagttcagtttgatttgaaattttattataagtag

SEQ ID NO: 407270 - DNA, 3465 bp, Staphylococcus aureus
gtgacggaatataaaattaaagcgactattgaagctagtgtagccaaattcaaaaggcaaattgatagtgcggttaagtctgtgcaaagatttaaacgagtagcagatcaaactaaagatgttgaattaaacgctaacgataaaaaattacaaaaaactatcaaagttgctaaaaagtctttagatgcctttagtaacaaaaatgtaaaagctaaattagatgctagtatacaagatttacaacaaaaggtactagaatcgaattttgaactagacaaactaaactctaaagaagttacaccagaagttaagttgcaaaaacaaaagttgattaaagatatcgctgaaacagaagctaaattatcagaattagaaaagaaacgtgtcaatattgacgtcaatgcagataacagtaaattcaatcgagtgttaaaagtatctaaagctagtctcgaagcattaaataggtctaaagccaaagctattatagacgtggacaatggtgttgctaactctaaaatcaaacgtactaaagaagaacttaaaagtattccgaacaaaactagatctcgacttgatgtagatacagggctttctataccaacaatttatgcgtttaaaaaatcgttagatgcattgccaaacaaaaaaacaacaaaggtagatgtcgatactaatggtttaaagaaagcttatgcctacataataaaagcaaacgacaatttccaaagacagatggggaatttagctaatatgttccgtgtgttcggtactgtaggttctaatatggttggtggattactaacttcatcttttagtatcttaatacctgtaatagcgagcgtagtacctgtagtatttgcgctattaaacgctatcaaagtgttaactggcggtgtacttgctttaggtggtgcggtagcaatagccggcgctggctttgtagcatttggcgcaatggctatcagcgctataaagatgcttaatgatggcactttacaagctagctcagcaacaaacgaatacaaaaaagcgttagatggcgtaaagtcagcatggactgatattataaagcaaaatcaatccgctatcttcacaactcttgcaaatggtttaaatactgttaaaactgcaatgcagagcttacaaccattttttagtggtatttcaagaggaatggaagaagcgtctcaaagcgtgcttaaatgggctgaaaatagcagtgtagcttcaagattctttaatatgatgaatacaacgggtgtttcggtatttaacaagctattaagtgctgcaggcggttttggtgacggattagtcaatgtattcacgcaattagcaccactgtttcaatggtcggctgattggttagacagattaggtcaatcgttctctaattgggctaatagtgcagctggagaaaattcgataactcgttttattgaatacacaaaaacaaatttacctatcattggcaatatttttaaaaatgtttttgctggaattaacaatttgatgaatgcatttagtgggtcatcaactggaatcttccagtctctcgaacagatgacggctaagtttagagaatggtctgaacaagtcgggcaatctcaaggttttaaagattttgtcagctatatacaaactaatggaccactaataatgcaattaattgggaacattgcaagaggattagttgcattcgcaacagcgatggctcctatagctagtgcagtattacgcgttgcagtagcaataactggttggatagctaacttgtttgaggcgcatccagctacagcacaattagttggtgtcattataactttagttggtgcatttagatttttaattgctccaatattagcggtaatggattttctggggccattagcagcaagattagtcgcattagtaactaagtttggttgggctaaaacaggaactttagtattaagtaaggcaatgacatcattaaaaggtccaataaaattagttacagctatattccaattgttattcggtaagattggattaattagaaatgctatcacaggactagtaactgtgtttggtattttaggtggtccaataacaatagtaattggtgtaatcgctgcattaatagctatatttgttttattgtggaataaaaatgaaggattcagaaactttattataaatgcttggaatgcgataaaaacatttatggttacagtttggaatgtgttgaaaactgtagcttcggttgtatggaatgctattttaaaagctatcactacagcagtatcaaatgtatacaattttataatgattatttggaatcaaatagttgcttatttgcaagggctatggaatggaattatcgctattgcaacaacagtatggaaccttttagttacaatcatcacaactgttttcacgacgataatgacaatagttatgacgatatggacagctatttggacattcttaagtacaatctggaacacgataattacaatcgctactacgatttggaatttgttagtcactgtaataactacagtatttaccacaattatgactatcgcaatgacaatttggaacgctatttggacgttcttacaaacgttgtggaacactatagttactgtggcaactaaggtttggaacgctatcactacaactatatctactgcgttacaagcggcatggagttttatttctaatatatggaatacgatttggagtttcttatctggtatattaacgacaatttggaataaagttgtaagcatattcacacaagttgtatcaactatatcagacaaaatgtctcaagcttggaacttcattgtcactaaaggtatgcaatgggtatctactataacaagtacgctaattaactttgttaatagagttattcaaggattcgttaatgttgtaaacaaagttagtcaaggtatgacaaatgcagtaaataaagttaaaagctttgtggatgactttgtatcagcaggtgctgatatgatccgtggtttgatgagaggtattggtaatatggctagagacttagctgaaaaagcagctagtgtagcaaaaggtgctttaaatgcagccaaaagagcgctaggtattcactcaccttcacgtgaattcatggatgttggtatgtattcaatgttaggtttcgttaaaggtatagataatcattcaagtaaagttatccgtaatgtttctaatgttgcagataaagtagttgatgcatttcaacctacattaaacgcacctgacatttctagtattacaggaaacttaagtaatttaggtggaaatataaatgcgcaagtacaacacacacattctattgaaacatcaccgaacatgaaaactgttaaagttgaattcgatgtcaataacgatgcgcttactagtattgttaacggcagaaatgctaaacgcaattctgagtattacttataa

SEQ ID NO: 407271 - DNA, 345 bp, Staphylococcus aureus
atgtcaacacttggtattacagatttgaacgttattgagcaaatgacattaacagaatataactatcgaatgtatgcgaaagagtatgaaatgctaacccaagaattcgaacgttacaaacttgcgtttgctattcgtgatgctgcagctactaaaaatgttgggacagaaaataaacctaaagaggaatatgtttttaacaatgcaaacgacgtattgccttatgaagaaaatatccaacggcttaacgaaggtaaagatataagatttagtagcgaacgtgatgaatacgaaccacaaaataatgaattctttaaagttatagcagaatttaataagcaatag

SEQ ID NO: 407272 - DNA, 366 bp, Staphylococcus aureus
atgaatgtagaaattaacggaaagtcattagaattaagttttggttttaaatttttaagagaaatcgataaccgattaggtttaaaagttgaacaagcttctatcggtcaaggtgtatcaatgttgcctgtaggtttagaaagtggaaatccggttgtgattggcgaagttttaatcgcagctacatctcacttaaaaaaacaagcaattactattaataacattgatgaagcattagatgaaatcgcagaaaatatcggactagaagaattcggttcggatattttaacggagttgggaaagcgacctatgacccgaaacctagtcgaagtagtggaaacggaagaaaaaccagcggaagcctaa

SEQ ID NO: 407273 - DNA, 582 bp, Staphylococcus aureus
atggcaaatatgaaaaatagtaatgatcgtattattttatttagaaaagctggcgaaaaagtagatgctactaaaatgctttttttaactgaatacggcttatcacatgaagctgatacagatacagaggatacaatggacggttcttataacactggtggttctgttgagtcaacaatgtctggtactgctaaaatgttttatggtgacgattttgcagatgaaattgaagatgcagttgtagatcgcgtattgtatgaagcttgggaagttgaaagtagaataccaggcaaaaatggggattccgctaaatttaaagcgaaatatttccaaggtttccacaataaatttgaattaaaagcagaagctaacggtattgatgaatatgaatatgaatatggagtgaatggtcgtttccaacgtggatttgcaacactacctgaggctgtaacaaagaaacttaaggcgactggatacagattccacgacactacaaaagcagatgcattaactggcgaagatttaacagcaattccacaacctaaagtagattcaccaccggttgcaccaagagaggtataa

SEQ ID NO: 407274 - DNA, 384 bp, Staphylococcus aureus
atgacaccgaacttacaactttataataaagcgtatgaaacgctacaaggatatggattccctgttatttctcgtaaagagatgcaacaagagattccgtatcctttttttgtaataaaaatgccggagtcaaacagaagtaaatacacgtttgatagttattctggtgacacgaatttagttattgatatttggagtgtaagtgatgatttaggacatcatgacggacttgttaaaagatgtattgatgatttaacacctagcgttaaaacaaacgattatgactttgaagaagaagatactaacatcacacagttagttgatgatactaccaatcaagaattgctacacacatcagtaacgatatcttacaaaacattttaa

SEQ ID NO: 407275 - DNA, 348 bp, Staphylococcus aureus
atgaatatagacggattagacgcactgttaaaccaatttcacgatatgaaaaacaacatcgatgatgatgtagatgatactttacaagaaaaagccaaagaatatgtagtacgagctaaattgaaagctagagaagtaatgaataagggttattggactggtaatttatcacgcaatatcagatataaaaaaactggcgatttgcaatacactatcacatcgcatgcagcttatagtggtttcttagagtttggtactcgatacatggaggcagaaccttttatgtggccagtatatgaggtaataagaaaatcaactgtagaagaattgaaagcgttgtttgaatag

SEQ ID NO: 407276 - DNA, 303 bp, Staphylococcus aureus
ttgagatatgaagatagagccgtctttcaatcagaacaagcagcaacttacaatcctaaaactagcaaaaaagaaaacactctaatcacttatgatgcgataccatgcaatattaatcctatttctagagcaagaaagcaacttgaattcggcgatgtaaaaaacgatgtaagtgtcctgaggataaaagaatcaatatcttaccctgttagccacgtgttaattaatggtattcgctacaagataattgatacaaagacatacagacacgaaacgtcatattatatcgaagaggtcaattga

SEQ ID NO: 407277 - DNA, 333 bp, Staphylococcus aureus
atgactacgctagctgatgtaaaaaaacgtattggtcttaaagatgaaaagcaagatgaacaattagaagaaatcataaaaagttgtgaaagccagttgttatcaatgttacctattgaagttgaacaaataccggaaaggtttagttacatgattaaagaagttgcagttaaacgctacaacaggattggtgctgaaggtatgacatcagaagcggttgacggacgtagcaatgcgtatgaattgaacgatttcaaggagtatgaagctattattgataattactttaatgctagaacgagaactaaaaaaggaaaggctgtgttcttttga

SEQ ID NO: 407278 - DNA, 288 bp, Staphylococcus aureus
atgcccgaaatcattggaattgttaaagtagattttacagatttagaagataacagacatgtctatatgaaagggcatgtctaccctcgcaaaggttatgatcctacagatgaacgtatcaaagctttagctagtgttgaaaataaacgcaacgaacaaatgatttacattgtaaatgacaaattaaccaaaaaagaacttgtcgaaatagcaagtgttgctggcttacaagttgatgaaaaacaaacaaaagctgaaattatcaatgcttttgagtcactagagtag

SEQ ID NO: 407279 - DNA, 975 bp, Staphylococcus aureus
atggaacaaacacaaaaattaaaattaaatttgcaacattttgcgagtaacaatgttaaaccgcaagtatttaaccctgataatgtaatgatgcacgaaaagaaagatggcacgttgatgaatgaattcacaacgcccatcttacaagaggttatggaaaactctaaaattatgcaattaggtaagtacgaaccaatggaaggtactgagaagaagtttactttttgggctgataaaccaggtgcttactgggtaggtgaaggtcaaaaaatcgaaacatctaaagctacatgggttaatgctactatgagagcgtttaaattaggggttatcttacctgtaacaaaagaatttttgaattacacttattcacaattctttgaagaaatgaagcctatgattgctgaagcattctataaaaagtttgatgaagcgggtattttgaatcaaggtaacaatccattcggtaaatcaattgcacaatcaattgaaaaaactaataaggttattaaaggtgacttcacacaagataacattattgatttagaggcattacttgaagatgacgaattagaagcaaatgcgtttatctcaaaaacacaaaacagaagcttgttacgtaaaattgtagatcctgaaactaaggaacgtatttatgaccgtaacagtgatacgttagatggtctacctgtggttaaccttaaatcaagcaatttaaaacgcggtgaattaattactggtgactttgataagttgatttacggtatccctcaattaattgaatacaaaatcgatgaaactgcacaattatctacagttaaaaacgaagatggcacacctgtaaacttattcgaacaagacatggtggcattacgtgcaactatgcatgtagcgttacacatcgctgacgataaagcattcgctaaattagtgcctgctgacaaaaaaacagattcagcaccaggagaagtttaa

SEQ ID NO: 407280 - DNA, 615 bp, Staphylococcus aureus
atggatatccaagaaaagttaaaactcaaattacagttttttgctgaagaatcagatggagataatggaaaatcaaaagataacaacgatgatgaaggcaaatacaaacaagacaaaaagactaattcagaagaagaaatcgaaaaaagactacaagaagaatataacaagcgtcttaaagaagaattaagtcgtcgtatgaagcagaaagaaaaagagaaacaagaagctgttgatgaagctaaacgattagcaaaaatgaacaaagatcaaatcgctgaatatgaacgcgaacaaatggaaaaagagctggagcaattacgctcagaaaaacaattaaatgaaatgcgttcagaagcaaggaaaatgttaagtgaagcagaagttgattcatcagatgaggttgttaatttagttgtaacagatactgctgaacaaactaaattgaatgttgaagctttttctaatgcagtaaaaaaagcggttaatgaagcggttaagattaacgctagacaatcgccattgactggtggagattcatttaatcactcgactaaaaataaaccgcaaaacttagctgaaatagctagacaaaaaagaattattaaaaattaa

SEQ ID NO: 407281 - DNA, 171 bp, Staphylococcus aureus
atgagtaatactgacaaataccttagagacatagcaagagaattaaaaggtatacgtaaagagttacaaaagcgaaacgaaacagttattattgatgcaaacttagacagtgtaaggtcggcagtattagccgataaagaaaaatcgaaatataatgaacctctcttttaa

SEQ ID NO: 407282 - DNA, 996 bp, Staphylococcus aureus
ttgcctaacaaaaacactcaagaatattgggaagaacgcggacgcaaagcaatcgagaatgagttgaagcgtgataaaactaaagctgaagaaatagaacgtatattgaatatgatgattaagcgcattgaaaaagagatcaatgcgtttattgttaagtacggagattttgcaggcgttacattacaagaagcacaaaagattattgatgagttcgatgtaaaagcgtttcaagaagaagcaaaaagattggtcgaaaacaaggactttagcgatagagcaaatgaagaattaaagaagtataacactaagatgtatgtatctagagaacagatgttaaagattcaaatagaattcttaattgcttatgcaacagctcaaacagaattatcgatgagggaatatttcgaatcaacagcttatcgtgtgttcagtgatcaagcgggtattttaggtgaaggtgtacaagtagctaaagaagttatagatacaatcgttgatacacaatttcatggtgtcgtttggtcagagcgattatggactaataccgaagcaatgaaacaagaagtagaagaaataattgctaatgtagttattagaggtcgacatcctaatgaatatgttaaagatatgcgcaagcacttaaataaattcgaaggcacagcacgacaaaagaccgcagcaattaaatcattgctttatacggaatcggcacgtgttcacgcacaatcaagcattgacagcatgaaagaaatttcaccggaaggatattatatgtatattgcaaaaatcgataatagaacaactaaagtatgcaaagggcttaatggagaaatattcaaagttaaagacgctaaaattggtgttaatttctatcctatgcatatcaattgtcgttcagattgcgctttactacctaaatctatgtggccgaaaaaaccaagcaagaaacgaaaaacaaaatacttcggagggaaagtgaaaagcggtgattga

SEQ ID NO: 407283 - DNA, 1536 bp, Staphylococcus aureus
atgttaaaagtaaacgaatttgaaacagatacagatctacggggaaacataaattacttatttaatgatgaagccaatgttgtttacacatatgacgggacggaatccgatttattacaaaacgttaatgaagtaagtaaatacattgaacatcacatggattaccaacgacctagattaaaagtgttgagtgattactacgaaggtaaaactaagaatctggttgagttaacacgacgcaaagaagagtacatggcagataaccgtgtagcgcatgattacgcatcttatattagtgattttattaacggttatttcttaggtaatccaattcaatatcaagatgatgacaaagatgtattagaagctattgaggcgttcaatgatttgaatgatgttgagtcgcacaatagatctttaggattagatttgtcaatttatggtaaagcttatgaattaatgattagaaaccaagatgatgaaacgcgtttatacaagagtgatgcaatgagtacttttgtcatatacgacaatacaattgaacgtaatagtatcgtaggcgttagatatttaagaactaaaccaatagacaagactgacgaagatgaagtgtttacagttgatttatttacttctcacggcgtttatagatatcttaccagtagaacaaatggattgaagctcacaccacgtgaaaacgtttttgaatcacactctttcgaacgtatgcctattacagaatttagcaataacgaaagaagaaaaggggattacgagaaagtaatcactttaattgatttgtatgataatgctgaatcagatactgctaactatatgagtgatttaaatgacgctatgttacttattaaaggtaatttaaatttagatcctgtagaagttagaaaacaaaaggaagctaacgtgttgtttttagaaccgactgtttatgctgatagcgaaggtagagaaacagaaggttcagttgacggtggttatatttataagcaatacgatgtacaaggtaccgaagcttataaagaccgtttgaacagtgatatacacatgtttaccaacacgcctaacatgaaagatgataactttagtggcactcaatcgggcgaggcaatgaaatacaaattatttggattggaacaacgtactaaaactaaagaaggattgtttactaaagggttaagacgtcgtgctaagttgttagagacaatacttaaaaatacacggtcgattgacgctaacaaagatttcaatactgttagatacgtatacaacagaaacttacctaaatcattgattgaagaattaaaagcttatattgattctggtgggaagattagccaaacaactttaatgtctctattctcgttcttccaagaccctgaattagaagtcaagaaaatagaagaagatgagaaagaatctattaaaaaagctcaaaaaggcatttataaagaccctagagacatcaatgatgacgaacaagatgatgatacaaaagatactgttgataaaaaggaatga

SEQ ID NO: 407284 - DNA, 1287 bp, Staphylococcus aureus
gtgagtacgatgacgaaagttaaattaaactttaataaaccatctaatgttttcaatagaaacatattcgaaatactaaccaattacgataacttcactgaagtacattacggtggaggttcgagcggtaagtctcacggcgttatacaaaaagttgtacttaaagcattgcaagactggaaatatcctaggcgtatactatggcttagaaaagtccaatcaacaattaaagatagtttattcgaagatgtcaaagattgtttgataaacttcggtatttgggacatgtgcctttggaataagactgataacaaagttgaattgccaaacggcgcagtttttttgtttaaaggattagataacccagagaaaataaagtcgataaaaggcatatcagacatagtcatggaagaagcgtctgaattcacactaaatgattacacgcaattaacgttgcgtttgagggagcgtaaacacgtgaataagcaaatatttttgatgtttaacccagtatctaaactgaattgggtttataagtatttctttgaacatggtgaaccaatggaaaatgtcatgattagacaatctagttatcgagataataagtttcttgatgaaatgacacgacaaaacttagagttgttagcaaatcgtaatccagcatattacaaaatttatgcgttaggtgaatttgctacactagacaaattggttttccctaagtatgaaaaacgtttaataaataaagatgagttaagacatttaccttcttattttggattggactttggctacgttaatgatcctagtgcttttatacattctaaaatagatgtaaagaaaaagaagttatacatcattgaagagtatgttaaacaaggtatgctgaatgatgaaatagctaatgtcataaagcaacttggttatgctaaagaagaaattacagcagatagtgcagaacaaaaaagtatagctgaattaaggaatctagggcttaaaaggattttaccaaccaaaaaagggaagggctcggttgtacaagggttacaattcttaatgcaatttgaaatcattgttgatgaacgttgtttcaagactattgaagagtttgacaactacacatggcaaaaggacaaagatacaggtgaatataccaatgaaccagtagatacatacaatcattgtatcgattcgttgcgttattcagtggaacgattctacagaccggttagaaaacgcacaaatgtcagttcgaaagttgacacaataaaatctctaggattatag

SEQ ID NO: 407285 - DNA, 441 bp, Staphylococcus aureus
atgaacgaaaaacaaaagagattcgcagatgaatatataatgaatggatgtaatggtaaaaaagcagcaattacagcaggttatagtaagaaaacagcagagtctttagcaagtcgattgttaagaaatgttaatgtttcggaatatattaaagaacgattagaacagatacaagaagagcgtttaatgagtattacagaagctttagcgttatctgcttctattgctagaggagaacctcaagaggcttacagtaagaaatatgaccatttaaacgatgaagtggaaaaagaggttacttacacaatcacaccaacttttgaagagcgtcagagatctattgaccacatactaaaagtacatggtgcgtatatcgataaaaaagaaattactcagaagaatattgagattaatattggtgagtacgatgacgaaagttaa

SEQ ID NO: 407286 - DNA, 423 bp, Staphylococcus aureus
atgactaaaaagaaatatggattaaaattatcaacagttcgaaagttagaagatgagttgtgtgattatcctaattatcataagcaactcgaagatttaagaagtgaaataatgacaccatggattccaacagatacaaatataggcggggagtttgtaccgtctaatacatcgaaaacagaaatggcagtaactaattatctttgtagtatacgaagaggtaaaatccttgagtttaagagcgctattgaacgtataatcaacacatcaagtaggaaagaacgcgaattcattcaagagtattattttaataaaaaggaattagtgaaagtttgtgatgacatacacatttctgatagaactgctcatagaatcaaaaggaaaatcatatctagattggcggaagagttaggggaagagtga

SEQ ID NO: 407287 - DNA, 147 bp, Staphylococcus aureus
atgatgtggttagtcatagcaattatattactagtcatcttattgtttggtgtgatgttgcaagctgaacagttaaaaggcgatgtgaaagttaaagagcgggagatagagatattaagaagtagattgagacattttgaagattaa

SEQ ID NO: 407288 - DNA, 903 bp, Staphylococcus aureus
atggcattagacaaagatatagtaggttctatagaattccttgaagtagtagggttacaaggttcaacttaccttttaaaaggaccaaacggtgaaaacgtaaagttaaaccaatcagaaatgaacgatgatgatgaattagaagtaggtgaagaatatagtttcttcatttatccaaaccgttcaggtgaattatttgcaactcaaaatatgcctgatattacgaaagataaatatgactttgctaaagtacttaaaacggatcgcgatggggcacgtatagatgttggattaccccgtgaagtgttagtaccatgggaagatttaccaaaagtgaaatcactatggccacaacctggtgattatttgctagttacattacgaattgaccgtgagaatcatatgtatggacgtttagcgagtgaatctgttgtagaaaatatgtttacacctgtacacgacgataatttaaaaaacgaagtcattgaagccaaaccttaccgcgtattacgaattggtagctttttattaagcgaatcaggttacaaaattttcgtacatgaatcagaacgtaaagctgaaccaagattaggtgaatctgttcaagttagaattatcgggcataatgataaaggtgagttaaatggttcatttttaccacttgcacatgaacgtttagacgatgacggccaagtcatctttgatttactagttgaatatgatggtgaattaccattctgggacaaatcaagccctgaagcgattaaagaagtattcaatatgagtaaaggttcattcaaacgtgcaatcggtcacttatataaacagaagattattaatatagaaacaggtaaaatcgctttaactaaaaaaggttggagtcgaatggactcaaaagaataa

SEQ ID NO: 407289 - DNA, 1602 bp, Staphylococcus aureus
atgttacaagtaactgatgtgagtttacgttttggagatcgtaaactatttgaagatgtaaatattaaatttacagaaggtaattgttatggattaattggtgcgaatggtgcaggtaaatcaacattcttaaaaatattatctggtgaattagattctcaaacaggacatgtttcattagggaaaaatgaacgtctagctgttttaaaacaggaccactatgcttatgaagatgaacgcgtgcttgatgttgtaattaaaggtcacgaacgtctttatgaggttatgaaagaaaaagatgaaatctatatgaagccagatttcagtgatgaagatggtatccgtgctgctgaacttgaaggtgaatttgcagaaatgaatggttggaatgctgaagctgatgctgctaaccttttatctggtttaggtatcgatccaactttacacgataaaaaaatggctgaattagaaaacaaccaaaaaattaaagtattattagcgcaaagtttattcggtgaaccagacgtactattactggatgagcctactaacggtctcgatattccagcaatcagttggttagaagatttcttaattaactttgataatactgttatcgtagtatcgcatgaccgtcatttcttaaataatgtatgtactcatatcgctgatttagacttcggtaaaattaaagtttatgttggtaactatgatttttggtatcaatctagtcagttagctcaaaagatggctcaagaacaaaacaagaaaaaagaagaaaaaatgaaagagttacaggactttattgctcgtttctcagctaacgcttctaaatctaaacaagcaacaagtcgtaaaaaacaactcgagaaaattgaattagatgatattcaaccatcatcaagaagatatcctttcgttaaattcacacctgagcgcgaaatcggtaatgacttactaatcgttcaaaatctatctaaaacgattgacggtgaaaaagtattagataatatttcattcacaatgaatccaaatgataaagcaattttaattggggatagtgaaattgcgaaaaccacattgcttaaaatattagccggtgaaatggaaccagacgaaggttcatataaatggggtgtaacaacgtcattaagttacttccctaaagataactcagaattctttgagggcgttaatatgaaccttgtagattggttaagacaatacgcaccagaagatgagcaaactgaaacatttttacgcggcttcttaggccgtatgctatttagtggagaagaagttaagaaaaaagctagtgtactttcaggtggagaaaaagtacgttgtatgctaagtaaaatgatgttatcaagtgcaaacgttcttttacttgatgaaccaacaaaccacttagacttagaaagtattactgctgttaatgatggacttaaatcattcaaaggttctattatctttacttcatatgactttgaatttatcaatacaatcgcaaaccgtgttatcgatttaaataaacaaggtggcgtttcaaaagaaattccatatgaagaatatttacaagaaatcggcgttttaaaataa

SEQ ID NO: 407290 - DNA, 1206 bp, Staphylococcus aureus
atggtaacaagaagtgtgttgaaatttggcggatcatccgtcagtgattttacaaaaataaaaaggatcgctgaaatgttaaaggagcgagtcaatcaagatgaacaattaattgtcgttgtaagtgctatgggtaacacaacagatcaattaatgacgaatgtatcaaccttgactaaagcaccaaaacaacaagaactggcattattattgacaaccggagagcaacaaactgtatcttatttatcaatggtattaaatgatatcggtatgaatgccaaagcaatgactggctatcaagcgggtattaaaaccattggccatcatttaaaaagtaaaattgctcaaattaatcctcaaacatttgaacaagcctttcaagaaaacgatattttagtagttgctggatttcaaggcatcaatgaacatcaggaattaacaactttaggcagaggtggttctgatacgaccgctgtggcacttgctgttagtaatcaaataccttgtgaaatttataccgacgttgatggtgtgtatgccactgacccaagacttttaccaaaggctaaacgactagacatcgtctcatatgaagaaatgatggaaatgagcgctttaggtgctggtgtacttgaaacaagaagtgttgaattagctaaaaactataatatccctttatatttaggaaaaactttatcgaacgtgaaaggaacatggattatatcaaatgaagaaatattagagaaaaaagcagttactggtgtggctttggataaacatatgatgcatgtaacaattagttatcccctacctgacaatcagctacttacccaactatttacggaacttgaagaaggtgctgtaaatgttgatatgatttcacaaatcgtcaacttggatgggctacaactatccttcacgattaaagatagtgattttcatcaaatttctatgattcttgaaacattaaagaatcaatatgaagcattagcttataaaatcaatgagcattatgtcaaaatttcattaattggctcaggcatgcgtgatatgtcaggtgtggcatcaaaagcatttttgacattaattgaaaataatatacctttctaccaaacaacaacatctgaaataagtatttcatacgtcattgatgattttaatgggcaacaagcggtagaaaaactatatgacgcatttaacatttaa

SEQ ID NO: 407291 - DNA, 990 bp, Staphylococcus aureus
atgacaaagttagcagttgtgggtgcaacaggattagtaggtacaaaaatgttggagacattaaatcgtaaaaatattcctttcgatgaattagtattattttcatcagcacgttctgcagggcaagaagttgaatttcaaggaaaaacatatacagttcaagaattaactgatgctcgtgcaagtgaacatttcgattatgtattaatgagtgctggtggcggtacaagcgaacactttgccccactttttgaaaaagctggtgcaatcgttatagacaattcaagtcaatggcgtatggcagaagatattgatttaatcgttccggaagtcaatgaacctacatttacaagaggtatcattgccaatccaaactgctctacgattcaatctgttgtacctctaaaagtattgcaagatgcttatggtttaaaacgagtggcatatacaacatatcaagctgtatcaggttcagggatgaaaggtaagaaagatttagctgaaggtgtaaatggtaaagcaccagaagcatatccacatccaatttataataatgtgttaccgcatattgatgtgtttttagaaaacggatatacaaaagaagaacaaaaaatgattgatgagacgagaaaaattttaaatgcgccagacttaaaagtaacagcaacatgcgcacgtgtgcctgttcaagatagtcatagtgttgaaattgatgtaacgcttgacaaagaaacaacagcagaagatattaaagcgttatttgatcaagatgaccgcgttgttttagtagacaatccagagaacaatgaatatccaatggcaatcaattctactaataaagatgaagtgtttgttggccgtatacgtagagatgattcattagaaaatactttccatgtatggtgtacatcagacaatttattaaaaggtgctgcattaaatgctgtacaagtattggaacaagttatgcgtttaaaaggagcgaattaa

SEQ ID NO: 407292 - DNA, 888 bp, Staphylococcus aureus
atgacacatttatttgagggtgttggcgttgcacttacaaccccttttacaaataacaaagttaatattgaagctttgaaaacacacgttaattttttactagaaaataatgcccaagcaatcatcgttaatggaactactgctgagagccctactttaacaacagatgaaaaagaacgcattctaaaaacagttattgatcttgtagataaacgtgttcctgtcatagcaggaactggcactaatgatactgaaaagtcaatccaagcttcaatccaagctaaagccttaggggctgatgcaattatgttaattacgccctactacaacaaaacgaaccaacgtggtttagtcaaacactttgaagcgattgcagatgctgtgaaattaccagtcgtgctgtacaatgttccttcaagaacgaacatgacaattgaaccagaaactgtagaaatattaagtcaacatccttatatagttgctttaaaagatgctacgaatgattttgagtatttagaagaagtgaaaaagcgcattgatacaaattcatttgcattatatagtggcaatgatgacaacgtcgtcgaatactatcaacgtggcggtcaaggggttatctctgttattgccaatgtcattcctaaagaatttcaagcgttatacgatgctcaacaaagtggattagatattcaagatcaatttaaaccaatcggcacactgttatcagctttatcagttgatattaacccaattcctattaaagctctaacaagttatttaggatttggaaattatgaattacgtctaccattggttagcctagaagatacagatactaaagtgcttcgtgaaacatatgacacatttaaagcgggtgaaaatgagtga

SEQ ID NO: 407293 - DNA, 723 bp, Staphylococcus aureus
gtgaaaatattactaattggctatggcgcaatgaatcaacgcgttgctagattagcagaagaaaaaggacatgaaatcgttggggtcattgaaaatacaccgaaagcaacaacgccatatcaacaatatcaacatattgcagatgttaaaggtgccgatgttgcaatagatttttcaaatccaaatctgcttttccctttattagatgaagattttcatttgccattagttgtggcaacaactggcgagaaagaaaaactacttaataagttagatgaattgagtcaaaatatgcctgtgtttttcagcgcgaacatgagttatggcgttcatgcattgactaaaattttagcagctgctgttcccctacttgatgatttcgacatcgaattgactgaggcacatcataataaaaaagtagatgcaccaagtggtacgttagaaaaattgtatgatgtgatcgtatctttgaaagaaaatgtaacacctgtgtatgatagacatgaattaaatgaaaaacgccagccacaagatattggtatacattctattcgtggaggtacgattgtcggtgaacatgaagttctatttgctggcactgatgaaacgattcaaatcacgcatcgtgcacaatcaaaagatatttttgcgaatggtgcaatacaagcagcagaacgcttagttaataaaccaaacggcttttatacgtttgacaacttataa

SEQ ID NO: 407294 - DNA, 720 bp, Staphylococcus aureus
atggtacaacatttaacagctgaagaaattattcaatatataagtgatgctaaaaagtctacaccaataaaagtatatttaaatggtaattttgaaggcatcacatatccagaaagttttaaagtatttggttcagaacaatctaaagtaatcttttgtgaagcggatgattggaaacctttttacgaagcatatggtagtcaattcgaagatatagaaattgaaatggatcgtcgcaattctgctattccattaaaagacttaacaaatacgaatgcacgaattgaaccaggtgcgtttattagagaacaagccattattgaagatggtgctgtcgttatgatgggcgcaacaattaatattggcgcagtcgttggcgaaggtacaatgattgatatgaatgctactctcggtggtcgtgctacaactggtaaaaatgtacatgtaggggctggcgcagtattagcaggtgtgattgaaccccctagtgcttcaccggttataatcgaggatgatgtattaatcggtgcaaatgcagttattttagaaggtgtacgtgttggtaaaggtgctattgttgcagctggcgcgattgtgacacaagatgtaccagctggtgcagttgttgctggtacacctgcaaaagtgattaagcaagcttctgaagtacaagatactaaaaaagagattgtagcagcattaagaaaactgaatgactag

SEQ ID NO: 407295 - DNA, 1152 bp, Staphylococcus aureus
atgaatgaattagaatttgttacgaaacatcgccgtcatttacatcaacatcctgaattaagcttacatgaatttgaaacaactgcttatattaaagcgtttttagatagtttaaatattaaatacgattgcccattggaaactggcgtcattgcatacttagaaggtaatggctcacatacgatagcgtatagagctgatattgatgcgttacctattttagaggaaaatgatgtgccttatcgcagtcaatctgatcatgtgatgcatgcttgtggacatgatggtcatacaactgcattaatgctttttgtacaacgttgcaaagacatgcaagatgcaggtcaattaccgcaaaatgtcgttttcattttccaacctgcagaagaaactggtggcggtgcaaatcgattaataaaagccggtgcctttgataagtatccaattgaagcggtatttggtattcatgttaacccatttgctgatgaaggcattgcagtgataagagatgaagaaattacggccagcgcaacagagtatcgctttttcttaacaggcctgtcaagtcatgttgctgataaagaacaaggtcattcttgtggtgaagcattacaacatgtattaactcaaatatcacaaattcaacaatttcaccttaacggtttgaaacgaaatattgttcatattggtcattttaaagctggtgaagcgattaacactgtaccaagtaatggctatttagaaggtactattcgtacatatgatattgatgatttaacaatcgttaaaaatcaaatgcacaagatagcagaaagtgtcaagcttctgtttaatgtagattgtgaagttaaatttgcagaaggttatccccctacaatcaatagtccgaaattacgtactcaaatagaggacgccttaataaaagctgatttaaatgtctatgacaaaccaacgccattcttatttggggaagattttagtttttatggtcaacaactagctccagcttactttgtttttataggaacacgaaatgaagataaaggttttgtaactggtttgcacacatcacatttaaattttgatgaaaaagtgttaataaacgtggttaatttttacgaaaatttattaaataattacaaagaggtgtaa

SEQ ID NO: 407296 - DNA, 1086 bp, Staphylococcus aureus
ttgacagcaacatggtctgtaaataagaaaatatttttacaaaatgcaatcacagtcaaaaacaatcagccattaatggcagttgttaaaaataatgcatatcactatgacctagaatttgctgtaactcagtttatccatgcaggtatagatacatttagcacaacatcactacgagaagcaattcaaattagacaacttgctccagatgcaacaatctttttaatgaatgcagtttacgagtttgatttagtccgtgaacatcaaatacatatgactttgccgtcgttgacatattactataaccataaaaatgatttagctggtattcatgttcacttagaatttgaaaatttattacatcggtctggatttaaagatttaaacgaaattaaagaagtattgaaagatcaccatcataatcaaaatgcaaaaatgattattagtggtttatggacccattttggatatgctgatgaattcgatgtgtcagattataatgttgaacgttcacaatggatggaaattgttgaagcacttttatctgaaggttatcagttcgacctaatccatgctcaaaatagtgcgagtttttatcgggaaggacaaatattactaccccaccatacacatgcgcgtgtaggtattgcgttatacggttcaagaccatatagttcactgaatcaacatgatatagttcagtcattaactttaaaagcacatgttattcaagtgcgcgaagtacaagctggtgattattgcggttatagctttgcctttgaagtgactaaaaacaatacaaaattagctgtagttgatatcggttatggcgatggaattttaagaactcgtgctaaacatgaagcacttatcaatggtaaacgctacccgatacgtgcattaatgatgagccatatgtttgttgaagtagatggcaatgtacatgcacaagatgaagttattctttataataatgatatccgcatcgatgaatatacctttaaaggtgttggtgcaaattctgaacaattaagtgctatgaatcatgattctttaaaaaaggagtacatttcaaatgactgttaa

SEQ ID NO: 407297 - DNA, 1266 bp, Staphylococcus aureus
atgactgttaaatataatcaaaatggcgaattaacaatggatggtattagtttaaaaacgattgcacaaagctttggtacacctaccattgtttatgatgaactacaaattagagaacagatgcgccgttaccatcgcgcatttaaagatagtggattaaaatacaatatttcatacgcctcaaaggcatttacttgcattcaaatggtcaaacttgtagctgaggaagatttacagttagatgttgtttctgaaggtgaattatatacagctttagaagcaggttttgaaccgagtcgcatccatttccatggtaacaataaaacgaaacatgaaattaggtatgctttagaaaataatatcggttattttgttatagattcattagaagaaattgaattaatagaccgctatgctaatgatacggttcaagttgtattacgagttaatccaggtgttgaagcacatacacacgaatttattcaaactgggcaagaagatagtaagtttggattatcaattcaatatggcttagctaaaaaagcaattgacaaagtccaacaatctaaacacttaaaattaaaaggtgtacattgtcatattggttcacagattgaaggtacagaagcatttattgaaactgctaaaattgttttacgttggcttaaagagcaaggcattcaagttgaattattaaaccttggtggtggctttggtattaaatatgttgaaggtgacgaaagtttccctatcgaaagtggtattaaagatattacagacgcaataaaatccgaaattaaagttctaggtatagatgcaccagaaataggtattgaaccgggacgatcaattgtaggtgaagctggcgttactttatatgaagttggaaccattaaagaaattccagagattaataaatatgtttcaatcgatggcggtatgagtgatcatatcagaactgcactttatgacgcaaagtatcaagcattgcttgttaatagaaatgaagaagcagatgacagtgtaactatagctggaaaattatgtgagtctggtgatatcattattaaagacgctaaattaccttcatcagtcaaacgtggagactatcttgctatattatcaactggtgcatatcattactctatggcatccaattacaatcaaatgcaaaagccttctgtgtttttcttaaaagatggcaaagcacgtgaagttataaagcgacaatcgttaagacaactcattattaatgatacaaaataa

SEQ ID NO: 407298 - DNA, 402 bp, Staphylococcus aureus
atgaaatatcttatccttagtttagttgctaatttattagttttcggtgtattatctgcaattggattaaatattaatattttagcagcaatgatgattgtattagtgattccgataatgatttctgggatactatttttcaaaactaatattgataaaacatacatattttttaacatcatatttatcgacttttattactatatttacaatgtacatttaatgactttgccaaagtttaataattatattaaagcagagatgatggaattagaagatattgatgtattaattacaagtaaagattttggatttgatgaaattctgttttatacattatatttgttgttaattcttatcgttttatattatttgaaaaagcaagtaaagcataaaatctaa

SEQ ID NO: 407299 - DNA, 201 bp, Staphylococcus aureus
atgaaacaaggtacagttaaatggtttaacgctgaaaaaggattcggctttatcgaagttgaaggagaaaatgacgtattcgtacatttttcagcaattaaccaagatggttacaaatcattagaagaaggtcaagctgttgagtttgaagtagttgaaggcgaccgcggtccacaagctgcaaacgttgttaaactataa

SEQ ID NO: 407300 - DNA, 309 bp, Staphylococcus aureus
atgtggacagttaccaaaattagagccgattatgagggatggtggttattcagtgactggccagaaaacattgttgaaaaatatcaatatcaagattttgatgacatgtttaagcactatcaacaattgattaatcaatgtaaagttcagttcgataactatgtcacaggcaaatataatatttatgcattttataataattgtgacatgaactattgcgaagattgtgaagaggatttacaaatattttatagtttcattgttttacaaaataatgaagtatattataaactaccaataattgattaa

SEQ ID NO: 407301 - DNA, 270 bp, Staphylococcus aureus
atgagacatatacatttacaagtattcggacgcgttcaaggcgtcggatttagatattttacacaacgcattgcaatgaactataacattgtcggtactgttcaaaatgtagatgactatgtagagatatatgcacaaggggatgacgcagatatagagagatttattcaaggtgtaattgaaggtgcctcaccagcatcaaatgtaacaagccatcaacttgaagagttagaactaaatcaaaaattatcggattttcgatcaatataa

SEQ ID NO: 407302 - DNA, 624 bp, Staphylococcus aureus
gtgagatataatatttctcatatatttggggtgttagtgggaattcctgtagcgtttttaacaagcatatttgggatgattgcacttgatgtatcttttttaattgatatgtctattggtattgttggctttttaatgacatacctaccgatacaaaaactcacttcacgcaaatatttaaacgaaattggtttgactagaaaagactatcgctatattcgaaatcagttaaatcatacacaccaaaaacttagaggtattttaaaaacgtatgtcaatataagatcaattaaagattttaggcagattaatgatatataccaaatttcacgttctatttatacgacagttagacagagacctgcatcattttataaagttgaaggctttttttattctcatattgataatgctttaaatttggttgatgcatatacacgtctagcaaaaatgcccaaaaaatcaattaatgaacagcaaaagttagaacaaacacgaattactttggatgaggtcaaacgaacattaatcgctgatttaaagcgtctcaacgaagatgattatgaacgtttagatattgaaatggaattaaataagttacatcaaaaacatcatcaagattga

SEQ ID NO: 407303 - DNA, 1137 bp, Staphylococcus aureus
atgactgaaaataaaagtttcaaagaaagccatccactagatgattttataagcgataaagaattatcgaatactactattcaaaaagaaaagttaacaattgaacaacaaaaacaggtagacacaatcagtaaacaaattaaccctttagacaatgaaggtttattagcgtttggttctgatttacagaaacaaatgtctcaattttcacatcaaatgttggatgaagtacaaagtaaagatgttggtcctattggagatactttgtcagatctaatgtcaaaactaaagtcagttaatccaaatgagttaaatactgataaaccatctatgttaaaaagaatttttagcagagcaaagtcgtctatcaatgaaatcttttcaagaatgcaatcagttagtgctcaagtcgatcgcataacgattcaactgcagaaacatcaaacacatttaacaagagatattgaattattagatacgctatatgataaaaacaaacaatactttgatgacttatcattgcatatcattgctgcacagcaaaaaaagttgcaattagaaaatgaaaagctaccacaattgcaacagcaagcgcagcaatccactaatcaaatggatattcaacaagttgcagatatgcagcaatttatagatagactagataaacgcatatatgacttacagctttcaagacaaatagctttgcaaactgcgccacaaattcgtatgattcaaaatgttaatcaagcacttgccgagaagatacaaagttcaattttgacaagtattccactatggaaaaatcaaatggccattgcgcttacattaatgagacagcgtaatgcagttgctgcacaacgagctgtcactgatacaactaatgatttattaacagcaaatgctgaaatgttgaaacaaaatgcgattgaaactgcaacagaaaatgagcgtggcattgttgatcttgatacattgaaacgtacacagcgtaacattattgagacaattgaagaaacattaattattcaacaacacggtcgcgaagaacgacaattagctgaaaaagaattacaacaattagaacaagatttaaagtcacatttagtgaacatcaaaggaccgaataaacaatcataa

SEQ ID NO: 407304 - DNA, 201 bp, Staphylococcus aureus
atgaccaatccaacaagaacgaaacgttgtgggggggatgttctatgtggtattgataatcattttcaactactattatacattagtgagaatcattgtcaattagaaactaaaactttttttgaatattttttaagaatagtaaataaaacgcatgattacgctattttagaaaataaaaaaatttgtatttctcattag

SEQ ID NO: 407305 - DNA, 660 bp, Staphylococcus aureus
atgacgcaaattttaatagtagaagatgaacaaaacttagcaagatttcttgaattggaactcacacatgaaaattacaatgtggacacagagtatgatggacaagacggtttagataaagcgcttagccattactatgatttaatcatattagatttaatgttgccgtcaattaatggcttagaaatttgtcgcaaaattagacaacaacaatctacacctatcattataattacagcgaaaagtgatacgtatgacaaagttgctgggcttgattacggtgcagacgattatatagttaagccgtttgatattgaagaacttttagcaagaattcgtgcaattttacgtcgtcagccacaaaaggatattatcgatgtcaacggtattacaattgataagaacgcttttaaagtgacggtaaatggcgcagaaattgaattaacaaaaacagagtatgatttactatatcttctagctgaaaataaaaaccatgttatgcaacgggaacaaattttaaatcatgtatggggttataatagtgaagtagaaacaaatgtcgtagatgtttatataagatatttacgaaacaagttaaaaccatacgatcgtgacaaaatgattgaaacagttcgtggcgttgggtatgtgatacgatga

SEQ ID NO: 407306 - DNA, 1356 bp, Staphylococcus aureus
atgacaaaacgtaaattgcgcaataactggattattgttaccacgatgattacgtttgtcacgatatttttgttttgtttaattattatttttttcttgaaagatacactgcataatagtgagcttgatgatgcagaacgaagctcaagcgatattaataatttatttcattctaagcctgttaaagatatatctgcattagacttgaatgcatctttaggtaattttcaagagataattatttatgatgagcataataataaattatttgagacatcgaatgataacacagtgagagttgaaccaggttatgaacaccgttattttgaccgcgtaataaaaaaacgctataaaggcattgaatatttaattattaaagaaccaattacaacgcaagatttcaaagggtatagcttgttaattcattcactagaaaattatgataacatcgtaaaatcattgtatatcattgcgctggcatttggagtgattgcaacaattataactgccacaatcagttatgtattttcaacacaaattactaaaccgcttgtcagtttatcaaataaaatgattgagattcgacgagatggttttcaaaataaattgcaattaaatacaaattatgaagaaatagataatttagcaaatacgtttaatgagatgatgagccaaattgaagaatcatttaatcaacaaagacaatttgttgaagatgcgtcacatgaattacgaacaccattacaaattattcaaggtcatttaaatttgattcagcgatggggaaaaaaagacccagcagtattagaagaatcgttaaatatttctattgaagaaatgaatcgtatcataaaattagtcgaagaattacttgaattgactaaaggagatgtaaatgacatttcttctgaagcacagaccgtgcatattaatgatgaaattcgctcgcgaatacactcattaaaacaattgcatcctgattatcaatttgatacggatctgacatctaaaaatctagaaattaaaatgaaacctcatcaattcgaacaattatttttaatctttattgataatgcaatcaaatatgatgtgaagaataagaaaattaaagttaagacaaggttaaaaaataagcaaaaaataattgaaattacagatcatggaattggtattccagaggaagatcaagatttcatttttgatcgcttttatcgagtggataaatctcgttcaagaagtcaaggcggtaatggactcggattatctattgctcaaaaaatcattcaattaaacggaggatcgattaaaattaaaagtgaaattaacaaaggaacaacgtttaaaatcatattttaa

SEQ ID NO: 407307 - DNA, 2799 bp, Staphylococcus aureus
atgactaacgaaagaaaagaagtttcagaggctcctgtaaacttcggtgcgaatttaggtctaatgttagatctatatgatgactttttacaagatccatcatctgtaccagaagatttacaagtcttattcagcacaattaagaatgatgactcaattgtaccagctttaaaaagtacaagtagtcaaaatagcgacggcacaattaagcgtgtcatgcgtttaattgataatattcgccaatacgggcatcttaaagccgatatttatcctgtaaatcctccaaaaaggaaacatgtacctaaattagagattgaagactttgatttagatcaacagactttggaaggtatatcagcaggaattgtttcagatcactttgccgacatttatgataatgcttatgaagcaattttaagaatggaaaaacgttacaaaggaccaattgcatttgagtatacacatattaataacaataccgaacgtggttggttaaaaagaagaattgaaacgccatataaagtaacgttaaataataacgaaaaaagggcactattcaaacaattagcgtatgttgaagggtttgaaaaatatcttcataaaaacttcgttggtgcaaagcgtttttcaattgaaggggtagacgcacttgtaccgatgttacaacgtactattacgattgctgcgaaagaaggtattaaaaatatacaaataggcatggctcaccgtggacgtttaaacgttttaacgcatgtcttagaaaaaccgtacgaaatgatgatttcagaatttatgcatacagatccaatgaaattcttacctgaagatggtagcttgcagttaactgctggatggactggtgatgtgaaatatcaccttggtggcattaaaactactgattcatacggtacaatgcagcgtattgcactggctaacaatccaagtcacttggaaattgttgcacctgttgttgaggggcgtacgagagcagcacaagatgatacacaacgagctggggctccgacgactgatcatcataaagcaatgccaattattatacatggcgatgctgcttatcctggtcaaggaattaacttcgaaacaatgaacttaggaaacttgaaaggctattctacgggtggttcattgcatattattactaacaatagaattggatttactacagaaccaattgatgcacgttcaacaacttattctacagatgtggccaaaggttatgatgtgccaatattccatgtcaatgcagatgacgttgaagctactattgaagcaattgatattgcaatggaatttagaaaagagtttcataaagacgtcgttattgatttagtaggttatcgtcgtttcggacataacgaaatggatgaaccatcaattactaatccagttccttatcagaatattcgcaaacatgactctgttgaatatgtgtttggtaaaaagcttgttaatgaaggtgtcatttcagaagatgaaatgcattcatttatagaacaagtccaaaaggaactaagacaagctcatgataaaattaataaagctgataaaatggataatccagatatggaaaagcctgcagatcttgcattaccgttacaagcagacgaacaatcatttacttttgatcacttgaaagaaataaatgatgcattgttaacatatccggatggctttaacattttgaaaaagttaaacaaagttcttgagaagcgtcatgagccgtttaataaagaagatggtttagttgattgggcacaagcagaacaacttgcatttgcgacaattttacaagatggtacaccgattcgcttaactggtcaagatagtgaacgtggtacattcagtcataggcatgccgtgttacatgatgagcaaacaggtgaaacatatacacctttacatcatgttcctgatcaaaaagcgacatttgatatacacaattctccgctttcagaagcagcagtagttggttttgaatacggctataatgtggaaaacaaaaaaagcttcaatatttgggaagcacaatatggtgattttgcaaatatgtcacaaatgatttttgacaacttcttattcagttctcgctcaaaatggggagaacgttcaggattaacattattcttacctcatgcatatgagggtcaagggcctgaacattcatcagcaagattagagcgatttttacaattagctgctgaaaataattgcacagttgtcaacttatctagttcaagtaattatttccacttattgcgtgcacaagcggctagtttagattctgaacaaatgcgaccattggttgttatgtcaccaaaaagcttactgagaaataaaacagttgcaaaaccaattgatgaatttacttctggtggatttgagccaattttgacagaatcatatcaagcggataaggttacaaaagttattttggcaactggtaaaatgttcattgatttaaaagaagcattagctaaaaatccagacgaatcagtattactcgttgcgattgaaagattgtatccattcccagaggaagagattgaagcattactagcacaattgccaaaccttgaagaagtgtcatgggtacaagaagaacctaaaaatcaaggtgcatggttatatgtctatccatatgttaaagtgctagttgcagataaatatgatttaagttatcatggcagaattcaaagggctgctccagctgaaggcgatggagaaattcataaacttgttcaaaataaaattatagaaaatgcattaaaaaataactag

SEQ ID NO: 407308 - DNA, 1269 bp, Staphylococcus aureus
atgccagaggttaaagttccagaattagcagaatctattacagaaggtaccattgcagaatggttgaaaaacgtaggggatagcgtagaaaaaggtgaagctattcttgaattagaaactgataaagttaatgtcgaagttgtatctgaagaagcaggtgtattatctgaacaacttgcaagtgaaggcgacactgtagaagttggacaagcaattgctatcatcggcgaaggtagtggcaatgcttctaaagaaaatagtaacgacaatactccacaacaaaatgaagaaacaaataataaaaaagaagaaacaacaaataattcggtagataaagctgaagtaaatcaagcaaatgatgacaatcagcaacgtattaatgctacgccttctgcgcgtcgatatgctcgtgaaaatggtgtgaatcttgctgaagtaagtccgaaaacaaatgatgtggttcgtaaagaagatattgataagaaacaacaggcaccggcatcaacacaaacaacacaacaagcatctgcaaaagaagagaaaaaatacaatcaatatcctacaaaaccagtgattcgtgaaaaaatgtcacgtagaaagaaaacagctgccaaaaaattattagaggtatctaataatacagctatgttaacaacatttaacgaagttgacatgacaaatgttatggaattgcgtaaacgtaagaaagaacaatttatgaaagatcatgatggtactaaattaggatttatgtcattctttactaaagcttctgtagcagctttgaaaaagtatccagaagttaatgcagaaatcgacggcgacgacatgattacgaaacaatattatgatattggtgtagctgtttctacagatgatggattattagtaccatttgtaagagattgtgataaaaagaattttgcagaaatcgaagcagaaattgctaatttagcagttaaagcacgagagaaaaaacttggcttagatgatatggttaatggttcatttacgattacaaatggcggtatttttggatcaatgatgagtacgccaattatcaatggtaatcaagctgcaatcttaggcatgcattcaattattacaagaccaattgcgattgatcaagatacaatcgaaaatcgtccaatgatgtatattgcattaagctatgatcatagaattattgacggtaaagaagcagttggattcttaaaaacaattaaagaattaattgaaaacccagaagacttattattagaatcttaa

SEQ ID NO: 407309 - DNA, 810 bp, Staphylococcus aureus
atgtgtggacttagaagtataacattaggtacaacaaatatagaacagacaaaacatttcatggttgacatattaggattaaattatgaagaacttcttgaaaactcaattcgtttcggcgatgcagatataagcccaggaacaagacttcaatttatacaagttccaagtgagcaattagaagaatctcactttgtgggtattggattacgtacaccaactgactcaggtttagaggagtatgcggaaatattatcgaataaggatattccatttacaacagttaaagaattaaatggcaataaatatttcagtctcgaagataacaatggtcatattttctcaatatattcaaacgagaataattatggcgttggtttaggtatgccttcttttgagagtgcggtcaatccgttacatcaagtgcaaggtttaggaccagtgattcttaaagtgaatcatgtagatattacaggtcaaattttaacaaatatattcggacttgaagtatttgcagaataccaacccttcgacaatgctgactatcatgtccaagtattcaaagttggaacgggtggtctaggtggcgaaatacatttaatgcctgtagaaaccgaaatgacaatgccggaatatggcgcagtcgatcaagttgagtttgaaacgaaagatgcagatttctttaatcaagcgaaatcgcgcttagatgaagtggaaataccatatcaaacgcttgagcaagatgatattgaatcaattagaattactgaaaacagtggattatcgtttatattcactttacaaaaataa

SEQ ID NO: 407310 - DNA, 204 bp, Staphylococcus aureus
atgttacatgaaacttggaaagaacgtacaccaatcaagaaagtagaagtcattaatacagatgcaaagaaatttacagtttctgacatgttaacggttggcaaacaatatgatgttatcaacgaaactgaagaatattatcaaataatagataattctggattagttggcggttactataaaacatatttcaaagaagtttaa

SEQ ID NO: 407311 - DNA, 792 bp, Staphylococcus aureus
atggcactaaaacattataagaattcagattcaacagttttcaatgatgcgaaggcattatttgatttaaataaaaatattttacttaaaggtccaacaggttcagggaaaacaaagttggcagaaacattaagtgaagttgttgatacacccatgcatcaagtcaattgttctgttgatttagatacagaaagcttattaggctttaaaacaattaaaacaaatgcggaaggtcaacaagaaattgtctttgtagatggtccagttattaaagctatgaaagaggggcatattttatatattgatgaaataaatatggctaaacctgaaacattgcctgtattaaatggggtcttagattatcgtcgtcaaattacgaatccatacactggtgaagtaatcaaagctgtaccaggatttaacgttatagcagcgataaatgaaggttatgttggtactttgccaatgaatgaagcactaaaaaatcgctttgttgttattcacgttgattatattgatggggacattttaaaaaatgtgattaaagagcaaagtttattacaagatgataaacaaatcgaacaaattattaagtttaatgaagatttacgtactatgtctaagcagggacaaatttctgaagaagccgctagtatccgtgcattattagacttgtgtgatttaatcactgtaatgccagttgaacgtgcaattaaacgtacaattattgataaattggaagatgaacgtgaacaacaagcaatatataatgctgtagaactaaacttttaa

SEQ ID NO: 407312 - DNA, 1887 bp, Staphylococcus aureus
atgagtgatcgtttcataaaatttaatgacgaacagttagatgccaagcaagtaatgatgttgcaagacttagctcgactcttattaaaaaatgaacaaacacaagttaaaatccaaaaattcccttactataatcctgttcaaaatgttttgattacgagttggttttggtcacatcgaccaagccatatcgaaatggctggtttaaaaacagatgttatgttagctgcttacggttatcatatgatggatgtacaaattgtaaatgaagtagtacaagataaaacttttaaacaccctaaattttatcaacaactttttaaattattagaagatatgcgcgtattaaattctattaaagttgagcgcccaagtactgctaaattaattgatcttcgcttagatacacgtatatcatatacggaatctcaaattaaagtgtatcgtactaaaacacaatatacagatttattatttttgtatttagaacatgcatttttaagccaagatttctttgatataccatctatacattcagatttagatgatattttagtaaatatgttcttatatttacctaattttttccaaaatcaaaattctgaagataatatgtatctggctcaaagaattatgtatcaagtagatgatattttaaaagaagatatgctaaacgaatattattacttacctaaaacactatataatacattagctagtccagagtttgatgatttaaagagaactgatgcaagtcaagtcgatgggcaagatgatacttcagaagatgatgataacgaaagtgaaaaagctgactctaaatctgcagatagtgagtcaaaaggtggcgcctatttagaaatggagcttcacgaaggacaaaatagtgaaacattaggtaatgatgaagcacgtgaaggcgatgctacagatgatatgactgatatgatgaccaaaaagggcaaaggatcaaacgatacgctaaatcgtgaagaaggcgatgctgttggtcaaagccaagcatttcaacttgatggtgtgaacaaaaatgtagaaataaaatggcaaattcctgaaattgagccacaatatgttttagaatatcaagaatcgaaacaagacgtacaatatgaaatcaaagacttaattcaaattataaagaaaacgattgaacgagaacaacgagatgcacgttttaatttaacaaaagggcgattacaaaaggatttaattaattggtttatcgacgatcaatataaattgttttacaaaaaacaagatttaagtaaatcatttgatgcgacatttacattgttaattgatgcgtcagcaagtatgcatgataaaatggctgaaacgaagaaaggtgtagtgttattccacgagacgttaaaagcattgaacattaaacatgaaattttatcattcagtgaggatgcctttgattcagacgagcatgcacaaccaaatatcattaatgaaattattaactatgattactcaacctttgaaaaagatggcccacgtattatggcacttgaacctcaagatgataatcgtgatggtgttgctattagagttgcaagtgaacgattaatgcgtcgaaatcaacatcaacgatttttaatcgtattttcagacggcgaaccgtctgcatttaattatagtcaagatggtattattgatacgtatgaagctgtagaaatgtcacgtaaatttggtattgaagtatttaatgtatttttgagtcaagatccaataactgaagatgttgaacaaacaattcataatatttatggtcaatatgctattttcgttgaaggtgttgcgcatttacctggacatctctctccattattaaaaaaattactacttaaatctttataa

SEQ ID NO: 407313 - DNA, 1344 bp, Staphylococcus aureus
atgaataaaaatacatgggtcattgggtttacgctcttcgctatgttttttggcgcaggcaatctaatttttcctcctaatctcggattggatagtggtcaatttttctggcccgccattttagcgtttgttctaactgggattggtttaccattattaggtgtgattgtaggtgcacttgataaagaaggatatattggcgcattaaataaaatttcacctaaattttcaatattgttcttaatcatcatttatttgactataggaccactttttgcaatacctagaactgcatctacatcttttgaaatgacaattacaccaattatacatagcaatagtagtatcgctttatttatatttacgattatctacttcatagtcgttttgaatatttgtttaaatccatctaagttaatcgatcgtattggttcattattaacaccattattattgattactattttagcgatgattattaaaggatacttagactttagcggtaatagtgctggaaagggcaatgaagcactatatcattctaatttttcaagttttgctgaaggctttacacaaggctatttaacaatggatgccattgcagcaattgctttttcaatgattgttgttaatgcagtaaaactaacaggcattactaaaacaaatcaaatattcaaacaaactttgactgctggtttaattgcagccgtagctttaattttcatatatatttcattaggttatattggtaatcatatgccagtaagtgacatgacgttagatcaattgaaatccaaagatcgaaacattgggacatatttattaacgacaatggcttcaacaggatttggttcattcggaaaatatttattgggcatcattgtggcgctggcatgtctaactacagcatgcgggcttattgttgcagtttctgaatatttccatagaatcgtacctaaagtatcatacaaagcatttgtattagttttcattttaatgagttttattattgctaaccaaggtttaaatgctgttatctcaatgtcaattccggtattaagcattgtatacccagtagcaataactgttgtattattaattttaattgccaaattcataccgacaaaacgcatttcacaacaaattccagttattatcgtatttatattgtcgattttcagtgttattagtaagttaggttggctgaaaattaactttatagaatcattgcctctaagagcgtattctttagagtggttcccagtagcaattattgcaacgatattaggctatctagtcggcatatttgtaaaacaagatccaattaaatatcaacaggaataa

SEQ ID NO: 407314 - DNA, 213 bp, Staphylococcus aureus
ttgaataataatttaagtttgttgatggggaaacatagagttacggcgtcaaaacttagcacggtaactggtatttccagaacatcaatacatggcttgtatcacgaacgtactgaaaatccagatacaaaaacagttatgaagttatgtgaatatttcaacataacaccaaatgaattttttggaattattgaaaaagagggggttaaataa

SEQ ID NO: 407315 - DNA, 735 bp, Staphylococcus aureus
atgacttttggtgaaatattaaaaaaagaaagagtgagttggaagctttcggttaaagaactctctactttatcaggcgtttcgcaaacatatataagtaaattagaaaacggaaaaagaaatttcccttctttagaaacaattttcaatttactaataggctttaaaacacatatcgaatataaaatgggcagtgaaagcccgttttatgaaatcaataatagttacttagatgaaattctcataatgtttataaactcatctaatagtactattagcgatagagaccccaatgaacttattacacaattcaatgaatattatgatgttacaattaaaaaaaaacagaacgaaaactcaaaaattgaaagtgatatatttagtaataaaatcaaattggttaaagggactacaaaaaaagaagttatagaaaagccttattttgacttaaattggctacttactcaaaatgaatatgaagtgttttttgacagaagctttctcttagataataattttttaaataagaagcatttcacagaaaaagatatgtattattacaacgttttaaatgataacgatttaaagacaattaaagatttaatcgttgtatttttacttaataaatacaattacattaaaaacaaggatgatttttttaatatctttacaaactcggaagatgataaaactaaaagagacgccttatataaaattttatatgaaacagattaa

SEQ ID NO: 407316 - DNA, 729 bp, Staphylococcus aureus
atgaataaaatatttagaatactcactgttagcttgtttttcttcacatttttaataaaaaacaatctagcatatgctgatgtaggggtaatcaaccttagaaacttttatgctaattatgaacctgaaaagcttcaaggagttagttctggaaatttttctacttctcatcaattagagtatattgatggaaaatacactttatattcacagtttcataatgaatatgaagcgaagagattaaaagatcataaagtagatatctttggaataagttactcaggtctttgtaatacaaaatatatgtatggtggaattacgttggcgaatcaaaatttagataaacctagaaatatacctattaatctctgggtcaatggtaagcaaaatactatatctacagacaaagtttctactcaaaaaaaagaggtaactgctcaagagattgatattaagttacgaaaatacctacaaaacgaatacaatatatatggttttaataaaacaaaaaaaggtcaggaatatggatatcagtcaaaatttaattctgggtttaacaaaggaaaaattactttccatttaaataatgaaccttcttttacatacgatttgttttacaccggaactggtcaagcagagagttttttaaaaatttacaatgataataaaactatagatgcagagaattttcatttggatgtagagatttcatatgagaaaactgaataa

SEQ ID NO: 407317 - DNA, 729 bp, Staphylococcus aureus
atgaaaaaattaataagcatcttattaataaatataataattttaggtgtctctaataatgccagcgctcaaggcgatataggaattgataatctcaggaatttttatacaaaaaaagactttgtagatttaaaagatgtaaaagacaatgatactcctatagctaatcaactacaattttcaaatgaatcttatgatttaatttcagaatcaaaagattttaataaatttagtaatttcaagggaaaaaaacttgatgtttttggtattagttataatggccagtgtaacactaaatacatatatggtggagtcacagctactaacgaatatctagataaatctagaaatatacctataaatatatggatcaatggaaatcacaaaactatttctaccaataaagtttcgacaaataaaaaattagttaccgctcaagagattgatgtcaaattaagaaagtaccttcaagaagaatacaacatttatggacataacggcactaaaaaaggagaagaatatggtcataaatcaaaattttattctggatttaatattggtaaagtaacgttccatttaaataataatgacactttttcatatggtttattctacacaggagatgatgggttaccaaaaagttttttaaaaatttacgaagacaataaaactgtagagtctgagaaattccatttggatgtcgatatttcttataaagaaacgatataa

SEQ ID NO: 407318 - DNA, 1221 bp, Staphylococcus aureus
atgtggtttgaaaaatttaaaaataagaataaagaaactaaatatagatattacgagaagtacaaagacccactcacaaacaaatggcgacgtgttagtgtggttcttaataagaatggtaagcaatcacaaaaagaagctcaaaggctcttaaatgagcgtatagaagcaaaactgaatgataagacacctactacacttaagtcactaacttttcatgctgcaagtgatgagtggtttcagaactatatcaaaacgtctgggtcaaaaagaacgagtattaaaactaaattgagtaagctaaacactttgaagaaatttgtagatgaagatattttaatcaataaaataacactttcatatgcgcaacaagttttcgatgaaatggatagtaaaggttatgtatatcaagttaacaaagatgcgttaagcatattcaaaaatgtatttgaatacaccagacgcatctataaactgcaagatttagaatttttaaaagatataacgttaaataaaagaattaagtcttatgatgaagtgaaagctaaacgtaataaatacctcgaattaaatgaaatacaatctatcatcaaagatattaatatgaaggctcagaaaatgcactcaggtatccataaacggttttatttattcgttgcactcatgaccgaatttcaagccttaaatggtatgcgtattggtgaaatgttagccattcaaaatgaagatatagactttgataataagagtttaaatattaacggaacaatccattggtttcacgatgaatctggtggattcggtgtaaaagataccactaaaacagagtctagttatagaacaattggattgagtagcagaagttgcgagatattaaagaaagcaatactggagaacaaaaaggattcaaaatggaatgatggatatctaaatagaaattttgtatttactaatcataaaggtaacccaatgcagactgaaagattcaataaaatccttagggaagcagctaaagatgttggtattgataaagaagtttcttcacatatattaagacatagccacatatcattactctctcaacaaggcgtgtcacttaaagctattatggatcgtgtaggccattccgaccaccgtacaacgctttccatttattctcacgttactgaacagatggataaggatatgatgaacaaacttgaacagttaaaacttggataa

SEQ ID NO: 407319 - DNA, 822 bp, Staphylococcus aureus
atgaaaaaattatttggtcttattttagtattaacatttgcagttgtattagcagcttgcggtaatggaaacaaaagtggcagtgacgacaagaaaataacagtaggtgcttcaccagcaccacatgctgaaattttagaaaaagcaaaaccattattagagaaaaaaggttatgaactagatattaaaacaattaacgattacactacacctaataaattactagacaaaggtgaaattgacgcaaactatttccaacatacaccatatttaaacacagagaaaaaggataaaggttacaaaatcgtaagtgccggtgatgttcacttagaacctatggctgtatactctaaaaagtataaaagtttaaaagaattaccaaaaggtgcaacagtctatgtgtctaataatccagctgaacaaggacgtttcttaaaattcttcgttgatgcaggtttaattaaaatcaaaaaaggcgtaaaaattgaagatgctaagtttagtgatattacagagaataaaaaagatattaagtttaataataaacaatcagcagaattcttacctaaaatttatcaaaatgaagacgctgatgctgttatcattaattcgaactttgcaatcgaacaaaaactaaatcctaaaaaagattctattgctgtagaaagtgcgaaagataatccttatgcaaacttaattgctgttaaagaaggacatcaagatgataagaaaatcaaagcattaattgaagtattacaatctaaagatattcaagacttcattaatgaaaaatacaatggtgcagttattcctgctaaataa

SEQ ID NO: 407320 - DNA, 696 bp, Staphylococcus aureus
atgggtaaatcatttagtgaaattataaatgaaatgattacaatgcctaatattcagtggccagaagtttggactgcaatagtcgaaacactatacatgacagtcgtctcaactatatttgcatttatacttggtcttattttaggtgtgttattattcttgtctgctaaaggtaagtctatcggtgcaaggttattttattctatcgtttctttcattgttaacttatttagagcgataccatttattattttaattttattattaattccatttacaagtttgatacttggaacgataagcggtccgacaggtgcgttaccagccttgatcattggcgcagcaccgttttatgcaaggctcgtagaaattgcttttaaagaaattgataaaggtgtcatcgaagcggcttggtcaatgggcgctaatacttggacagtaattcgtaaagtccttttacctgaagctatgccagcgctagtgtctggcattacagttacagcaatcgctttagttggttcaacagcagttgcaggtgtaattggtgccggtggtttaggaaatttagcatacttaacaggtttcactcgaaatcaaaatgatgtcattttagtatcaacagtttttattttaattattgtatttataatccaattcattggggattggcttacaaataaacttgataaacgataa

SEQ ID NO: 407321 - DNA, 1026 bp, Staphylococcus aureus
gtgattgaattaaaagaagttgttaaagaatatcggactaaaaataaagaagtccttgctgtagatcacgttaatttatcgattcgagcaggatcgatttatggcgtcattggtttttctggagcaggaaaaagtactttgattcgaatgtttaatcatttagaagcgcctacatcaggtgaagttattatagatggagaccatataggtcaattgtccaaaaatggattaagagcaaaaagacaaaaagtaagtatgatcttccaacattttaatttgttatggtcaaggactgtgttaaaaaatattatgtttccgcttgaaattgcaggtgtccctagaaggagagctaagcaaaaagcattagaacttgtcgaactcgtcggtttaaaaggtagagaaaaggcttatccatcagagttatcaggtggacaaaagcaacgtgttgggattgcacgagcgttagctaatgatccaacggtcttgctttgtgatgaggcaacaagtgcacttgatccgcaaacaacagatgaaattttagatctactactaaaaattagagaacaacaaaatttaacaattgtactaattacgcatgaaatgcatgtcattcgtcgtatttgtgatgaagttgcagttatggaaagtggtaaagtgatagaacaaggaccggtgacacaggtttttgaaaatccgcaacacactgtgacaaaacgatttgtgaaagacgatttaaatgatgatttcgaaacatctttaacagaattagagccattagaaaaagatgcatatatcgttagattagttttcgctggttcaacaacaaccgagcctattgtatcgagtctatcaactgcctatgatattaaaattaatattttagaagcaaatattaaaaatacaaaaaatggaacagtcggctttttagttctgcatattccatatatttcaagtgtagatttcggaaaattcgaaaaagagttaattgagcgacaagttaaaatggaggtgttaagacatgggtaa

SEQ ID NO: 407322 - DNA, 297 bp, Staphylococcus aureus
atgaataattcattagacatcaaagatgtaactacattttatgaggaagacaaacatttaatctttggttatacaccaacgtgtggtacttgtaaggtttcagaaagaatgttagacattgctaatgaaatattgcagttaccattattgaaaatagatttaaacttttatcctcagttttgtaaagatatgcaaatcatgtctacgccgattttattgttgatgaataaagataaagaagtaaaacgaatttatgcatttaaatcggtgactgatttgttagaaaatttaaaatag

SEQ ID NO: 407323 - DNA, 387 bp, Staphylococcus aureus
atggctattgtaaataaagtgataattgttgaaggaaaatctgataaaaaaagggtgcaacaggttattgcagaaccagtcaatattatttgtactcatggaacaatgagtatagataagcttgatgatatgatagaatcactgtatgataaacaagtttttgtattagccgattctgatgacgaaggagatcgaattagaaattggtttaaacgttatttgagtgaaagtgaacatatatttattgataaaacttactgtcaagttgcgaattgccccaaacaatatttggcgcatgtactttcaaaacatggctttacttgtaagaaagaaacacctcttttaccgaatataaataatgaaaggttagttttagtaaatgaataa

SEQ ID NO: 407324 - DNA, 177 bp, Staphylococcus aureus
atgaacacactatacaaaacaaccttcctcatcacaatggcagttgcgacttggaaggtttggaagattgagaaaaacacaagatttaaacttagaaattttgattatccaaaaattaataatgctcagagcaaatcattgttggatattgctagtcacgatttaaaagatatttaa

SEQ ID NO: 407325 - DNA, 231 bp, Staphylococcus aureus
atggaatttaatgattttcaaaatttctttggtgaacttagtaatcaagccgaaaaagaattcggtggtgacagtgacttttttagagatagaataaataagttgaaagaagatgctcctgaaaacgtatcttacgaaattatttattcaatagctttatacgaaagcttaaaagctcaacaagatatgaaaattttgaatacagttaaatatcttttaaatcgtgactag

SEQ ID NO: 407326 - DNA, 222 bp, Staphylococcus aureus
atgataaaaaatagtttgcaagctaaagaacttgcagtaattttatctgtttctaaatccaaagcaggacaaataataagagaactgaataaagagcttgaagacgaaggttacattgcgattcgaggcagaataccagtccaattagctagagaaaaattcccttatcacggcttgtcagacgagagaataatggaggcgttgaaaaaagaaaatgagtaa

SEQ ID NO: 407327 - DNA, 261 bp, Staphylococcus aureus
atgtattacgaaataggcgaaatcatacgcaaaaatattcatgttaacggattcgattttaagctattcattttaaaaggtcatatgggcatatcaatacaagttaaagatatgaacaacgtaccaattaaacatgcttatgtcgtagatgagaatgacttagatatggcatcagacttattcaaccaagcaatagatgaatggattgaagagaacacagacgaacaggacagactaattaacttagtcatgagatggtag

SEQ ID NO: 407328 - DNA, 222 bp, Staphylococcus aureus
atgaatcagactgtaacttatatcatccgtcatagggatatgccaatttatataactaacaaaccaactgataacaattcagatgttagttactccacaaatagaaatagagctagggagtttaacggtatggaagaagcgagtatcaatatggattatcacaaagcaatcaagaaaacagtgacagaaactattgagtacgaggaggtagaacatgactga

SEQ ID NO: 407329 - DNA, 624 bp, Staphylococcus aureus
atgactgaacaaacattatttgaacagttgaacagtaaaaacgtgaatgatcatacagaacaaaaaaatggattaacttatctagcatggtcatatgcacaccaagagctgaaaaagattgacccaaactacacagtaaaagtacacgagtttccacatccagatattaacacagaaaattattttgtaccttatttggctacaccagaaggctattttgtacaggtatctgtgactgtgaaagatagtacagagactgagtggcttccagtattggactttagaaataaatcgcttgctaaaggtagtgcaacaactttcgatattaacaaagcgcaaaaacgatgttttgtaaaagcttcggctttacacggtttaggcttatatatctacaacggcgaggaactaccaagtgcaagtgacaacgatattacagaattagaagagcgtatcaatcagttcgtgaacttatctcaagaaaaagggcgagatgcaactatcgataaaacgatgagatggctaaaaatatctaacattaataaattaagtcaaaaacaaatcgcagaagcacaccaaaaattagatgcgggattaaaacaattggatagtgaggagaaacaataa

SEQ ID NO: 407330 - DNA, 429 bp, Staphylococcus aureus
atgttaaacagaacagtattagtaggacgcttaacaaaagatccagaatatagaacaacgccaaatggtgtgagtgttaccactttcactatcgcagttaacagaacatttactaacgctcaaggagaacgtgaggcagactttattaactgtgtaacttttagaaaacaagcagaaaatgtaaataattatttatccaaagggtcattggctggcgttgatggacgtttacaatcacgcagttatgaaaacaaagacgggcaacgtgtgtttgttacagaagtagcagcggacagtgttcaattcttagaaccgaagaatagcaaccaacaaccaaacaacaattatcatcaacaaagacaaactcaaactggtaataatccttttgataataccactgcgattactgatgatgacttaccgttctga

SEQ ID NO: 407331 - DNA, 669 bp, Staphylococcus aureus
atgccaataattactagttatatcactcaagatgacggtacaacaacagttgtcatctcgggtgttgaattaggcaataaagaaacattactacttgataacggatttgatgtggaagtcgatgtaagcgtcatagatccgtttcaaattaccggcaagcaacgacgaaaaatattcgcgcttgtcaaagacatagaagaatatacaggtcaaccaatggactatatgcgacatatgttcatcgagtatgtaaggacttactacggctatgatgaacgtatttcactaagtaattgtacgagaacacaagcaagtcaaatcattgaagcaacgcttgactggacgttctacaatgacataccacttagctacaaaacaagcgacttgctgaaacaagataaatcgttcttatactggtcaactgtcaaccgcaactgtgtaatatgcggaaagcctcacgcagacctggtacattatgaagcagtcggcagaggcatgaacagaaacaaaatgaaccactatgacaaacatgtattagcgttatgtcgcgaacatcacaacgagcaacatgcgattggcgttaagtcgtttgatgataaatatcacttgcatgactcatggctaaaagttgatgagaggctcaacaaaatgctgaaaggaggagaataa

SEQ ID NO: 407332 - DNA, 765 bp, Staphylococcus aureus
atggttaaatcgatatttttacaagatggagaagaaatttttgttgatgatgaagattatgagagggttaatcaatatatttggacaaaatcttatgtagataacgttagaagaattcacacaaatccactcaacgttagcttaagtggatttgtattagaaaatggttttcaaaaaataaaaaataatgattttaccaaaaacaacatcacttcaattggttatcaacaacgatgggcaaggcctacaagaaatacttcgagtatctataaaggtgtttatttaaatcgaaaaacaaaaaaatggtctgctgtaataaaaattgatagcaaatctaaatatttaggtagttttgttgatgaatgggaggcagctaaagcatacaacagcgcagtagataaatattgggacggacaaggttataagaatcataaaaatcaaaatgactctatatttgaatatgaatacaaaacttacaaagaccaaaaacgtcgtagaagaggaaaaagtaagttcaaaggagtctatttaactcaaagtggttatgtagcgcaaataacttataaaagaaagacatatcatattggatggtcaaaaaatatttatgagactgctctcatgtttaataaaattaatttttatttacatggttcagacgtaatccttaatgacgtacctatgacagatgaacttaaagaattcataaataactgggaagtaccggacaaaataaaagcactgaaagaaggtgctgagaatgactga

SEQ ID NO: 407333 - DNA, 738 bp, Staphylococcus aureus
atgactgaacaaccaagttactactcaataataacggcaaatgtcagatatgataatcgacttactgatagtgaaaaattactttttgcagaaataacgtctttaagtaataagtatggatactgcacagcaagtaatggttactttgcgaaactatatgaagtgacaaaagttaccgtatcacgccgtatagccaacttaaaagaatgtggatatttacatgttgaaatcattagaaacggtaatgaaattaaacaaagaaagttataccccttaacagaaatgataagacctattaacacaaatgataatacccctattaacaattctgttaatacccctattatcacaaatgttaaagagaataatacaagtattaataatacaagtaataacaatataaatagaatagatatattgtcgggcaacccgacacgcatcccatataaagagattattgattatcttaacgaaaagactgggaagaagtttaaacataatacaactaaaacgaaagattttattaaagcaagatggaatcaagattttaggttggaggattttaaaaaggtaattgatattaaaacagctgaatggttaaacacggatagcgataaataccttagaccagaaacactttttggcagtaaatttgaggggtacctcaatcaaaaaatacaaccaactggcacggatcaattagaacgcatgaagtacgacgaaagttattgggattag

SEQ ID NO: 407334 - DNA, 780 bp, Staphylococcus aureus
atgaaaccactattcagcgaaaagataaacgaaagcttaaaaaaatatcaacctactcatgtcgaaaaaggattgaaatgtgagagatgtggaagtgaatacgacttatataagttcgctcctactaaaaaacacccgaatggttacgagtataaagacggttgcaaatgtgaaatctatgaggaatataagcgaaacaagcaacggaagataaacaacatattcaatcaatcaaacgttaatccgtctttaagagatgcaacagtaaacaactacaagccacaaaatgaaaaacaagtacacgctaaacaatcagcaatagagtatgtacagggtttctctacaaaagaaccaaaatcattaatatttcaaggttcatatggaactggtaaaagccacctagcatacgctatcgcaaaagcagttaaagctaaagggcatacagttgcttttatgcatataccaatgttgatggatcgtatcaaagcgacatacaacaaaaatgcagtagagactacagacgaactagtcaaattacttagtgagattgatttacttgtactagatgatatgggtgtagaaaacacagaacacactataaataaacttttcagcattgttgataacagagtaggtaaaaacaacatctttacaactaactttagtgataaagaactaaatcaaaatatgaactggcaacgtataaattcgagaatgaaaaaaagagcaagaaaagtaagagtaatcggagacgatttcagggagcgagatgcgtggtaa

SEQ ID NO: 407335 - DNA, 162 bp, Staphylococcus aureus
gtggtaatcacaaaacaaaatataaaagaaatattacattgtagagatgtatatgctcaaaagatgattgattttgcaaacggagaccaagagaaacttaaaaaacttattgatgataagttgaaagaaaaagaagaaagacccgcaatcgtcgaatattaa

SEQ ID NO: 407336 - DNA, 222 bp, Staphylococcus aureus
atgccgaaagaaaaatattacttataccgagaagatggcacggaagatattaaggtcatcaagtataaagacaacgtaaatgaagtttattcgctcacaggagcctatttcagcgacgaaaagaaaattatgactgatagtgacctgaaacgcttcaaaggcgctcacgggcttttatatgagcaagaactaggattacaagcaacgatatttgatatttag

SEQ ID NO: 407337 - DNA, 405 bp, Staphylococcus aureus
atgagtaaatacaacgctaagaaagttgagtacaaaggaattgtatttgatagcaaagtagagtgtgaatattaccaatatttagaaagtaatatgagtgacactaattatgatcatatagaaatacaaccgaaatttgaattacaacctaaattcgggaaacaaagaccgattacgtatatagccgatttctctttgtggaaggaagggaaactggttgaagttatagacgttaaaggtaaggcgactgaagttgccaacatcaaagcgaagatattcagatatcagtatagagatgtgaatttaacgtggatatgtaaagcgcctaaatacacaggtcaagaatggatggtatatgaggacttagtgaaagtcagacgtaaaagaaaaagagaaatgaagtga

SEQ ID NO: 407338 - DNA, 186 bp, Staphylococcus aureus
atgcaacaacaagcatatataaacgcaacgattgatataagaatacctacagaagttgaatatcagcattacgatgatgtggataaagaaaaagatacgctggcaaagcgcttagatgacaatccggacgaattactaaagtatgacaacataacaataagacatgcatatatagaggtggaataa

SEQ ID NO: 407339 - DNA, 258 bp, Staphylococcus aureus
atgaagttgaacgaagtattcgcaactaatttaagggtaatcatggctagagataacgtaagtgtccaagatttgcacaatgaaactggcgtatcaagatcaactattagtggatataaaaacggaaaagctgagatggttaacttaaatgtattagataaattggcagatgctctaggtgttaatgtaagtgaactatttactagaaatcacaacacgcacaaattagaggattggattaaaaaagtaaatgtatag

SEQ ID NO: 407340 - DNA, 360 bp, Staphylococcus aureus
atgagtatcgtaaagattaacggtaaaccatataaatttaccgaacatgaaaatgaattgataaaaaagaacggtttaactccaggaatggttgcaaaaagagtacgaggtggctgggcgttgttagaagccttacatgcaccttatggtatgcgcttagctgagtataaagaaattgtgttatccaaaatcatggagcgagagagcaaagagcgtgaaatggctaggcaacgacgtaaagaggctgaactacgtaagaagaagccacatttgtttaatgtgcctcaaaaacattcacgtgatccgtactggtttgatactacttataaccaaatgtttaagaaatggcaggaagcataa

SEQ ID NO: 407341 - DNA, 684 bp, Staphylococcus aureus
atgattcaaaataccttcggttatttaccggagtatattgtagctgatgcaggttatggtagtgagcaaaactatatggctattatagatgattttaataaaacgccacttattacgtatggcatgtttattaaagataaaactagaaagtttaaaagtgacattttcaacactcaaaattggaaatatgacgaacttaatgatgaatttatatgtcctaataacaaaagaataggttttaaaagatatgcataccgtaatgatagatatggttttaaacgagacttcaaactatatgaatgcgatgactgttcagcatgttctttgaggcaacaatgcatgaaaccaaattcaaaatccaataagaaaatcatgaagaattataattgggaatactttaaagtccaaattaatcaaaagctttctgaaccagaaacgaaaaaaatctatagtcaaagaaaaattgatgtagagcctgtttttggatttatgaaggctattttgggtttaactcgaacgtcagttcgaggaataaataaagttaaacgagagctaggttttgtattaatggcacttaatataaggaaaatagcagctcaacgagctgtacattataaaatacatatcaaaaaagctgatttctatcaaataattaatagaaatcagcttttttacattgcctaa

SEQ ID NO: 407342 - DNA, 834 bp, Staphylococcus aureus
atggaggttaaaacattttataatggaaacacgatgccacaaattggtttagggacatttcgtgtggaaaatgatgaaaattgcatggaaagtgttaagtatgccattgaacaaggatatcgtagtattgataccgcaaaagtttatgggaatgaagaacaagtaggtgctggcattcgtgccggattggagtcaactggtattgctagagaagacttatttattacttcaaaattatattttgaggatttcggtcgtgaaaatgtagcagctgcttacgaagctagtttatctagattaggtttaaaatacttagatttgtatctagtacattggccaggtacgaacgaagccgtaatggttgatacatggaaaggtatggaagatttatataaaaataataatgttaaaaatataggtgtcagcaattttgaacctgaacatttggaagctttgttggcacaagtgtcaattaaacctgtaattaatcaagttgaatatcatccatatttaacccaacataaattgaaattatatttggcagcacaacgtatcgtgatggaatcttggtcaccattgatgaatgcacaaattttaaatgatgagacaattaaagacattgctcaagaattaggaaagtcacctgcccaagttgttttaagatggaatgtgcagcatgctgtggttacaatccctaaatcggtgacaccaaacagaatctctgaaaatttccaaatatttgatttcgaattatcagatgaacaaatgacgcgaattgatggtttaaatcaagataagagaattggacctgatccaaaaaaatttgaaggctag

SEQ ID NO: 407343 - DNA, 909 bp, Staphylococcus aureus
atggatttatcttcaccgatagtcattggactcattattgcagtagtcattgcattaatcttttttgtcctttttttagttgccttaggtagtaagaaaaaagttaagcgacaaacagaagaaaagtatgaacaacaagaacaaaacattaaaaagtctcatgaagaagctttagagaaagagcgtattcaaaataaaaagacaattacaaaacaacaagaagattataatcacatggttagtacaaaagatcgtgagattgacgcattaaaattgttctcgaaaaatcatagtgaatatgtaacggacatgagattaattggtattcgtgaaagattagttaaagaaaaacgaattcgaccagaagatatgcacattatggcaaatatctttttaccaaaggatggctttaataatattgaacgaattagtcatttagtattaacaagaactggtctttatattattgattctcaattgttaaaaggtcatgtttataatggtattagtggcggtcaatttaaagatttaccaccaatggaacaagtatttgatacattggatttagataaatctagaccgcaaactattgtgatggatcaaaatgatgacaaacgttcattatcatttgtaaattattcagatcaaattgaggcgattaaacaattggctgaagacttacaaaaagaattaggtgccaaatatacaccaacttcaattttatactttaatcttaaaaatgaaggcgatgtaacgatttcaaattataatcaaaatagtgctgtcaaagtgcttgtcggtgctgaacaattagacgagttctttaacaaatttgtattccatggtcgtattcaatacaacgtggaagacttacaacaaatgatggataaaattgaatcattcaattaa

SEQ ID NO: 407344 - DNA, 1194 bp, Staphylococcus aureus
atgttaaataacaaacgattatttacttcagagtctgttacagaaggacacccagataaaatcgctgaccaagtgtcagatgcaatattagatgctattttaaaagacgatccaaatgcacgtgtagcttgtgaaacaactgttacaacaggtatggcattgatcgccggcgaaatttctacaacaacatatgttgatattccgaaagttgttagagaaacaattaaagaaattggatacacaagagcaaaatatggttatgattatgaaacaatggcaattttaactgcgattgatgaacaatcacctgacattgcacaaggcgtggataaagcattagagtatcgtgataaagatagcgaagaagaaattgaagcaacaggtgcaggtgaccaaggtttaatgtttggttacgcaacgaatgaaacagagacgtatatgcctctagcaatttatttatcacatcaattggcaaaacgtttatcagatgtgcgtaaagatggtacgttaaattatttacgaccagacggtaaagttcaggtcactgttgaatatgatgaaaatgataacccagtacgtattgatacgattgtcgtatcaacacaacatgctgaggatgtgacacttgaacaaattcaagaagacattaaagcacatgtcatttatccaactgttccagaaaacttgattaatgaacaaactaaattctacatcaatcctacaggacgctttgtaatcggtggacctcaaggtgatgcaggattaacaggacgtaaaatcattgttgatacgtacggtggctatgcacgtcatggtggcggatgcttcagtggtaaggatcctacaaaagtagaccgttcagctgcatacgctgcacgttatgtggctaaaaatattgttgcagcaggtttagcagatcaatgtgaagtacaattggcatatgcgattggtgttgcagaaccagtgtcaattgcaattgatacatttggaacaggtaaagtttctgaagggcaacttgtcgaagcagttagaaaacactttgacctaagacctgcaggtattattaaaatgcttgatttgaaacaaccgatttacaaacaaactgctgcttatggtcattttggacgtacagatgtcttattcccatgggaaaaattagacaaagtggaagaattaaaagacgcagtaaaataa

SEQ ID NO: 407345 - DNA, 1593 bp, Staphylococcus aureus
atgtcagtagacacatacactgaaacaactaaaattgacaaattactgaaaaaaccaacgtcacattttcaactttcgacgacacaactttataataaaatcttagacaataacgaaggggtattaacagaacttggtgctgttaatgcaagtactggaaaatatactggtcgttcgcctaaagacaaattttttgtctctgaaccttcatatagagataacattgattggggagaaattaatcaacctatcgatgaagaaactttcttgaagttataccataaagtactagactatttagataaaaaagatgaactatacgtatttaaaggctacgctggtagcgataaagatacaatgttaaaacttacagtcatcaatgaattagcatggcataatttatttgctaaaaatatgtttattagacctgaatcaaaagaagaagctacaaagattaaacctaacttcactatcgtttctgcaccacattttaaagcagatccagaagttgatggtactaaatctgaaacctttgtcattatttcatttaaacacaaagtcattttaatcggcggtactgaatacgctggtgaaatgaaaaaaggtatcttctctgtaatgaattatctcttaccgatgcaagatattatgagcatgcattgctcagcaaacgttggtgaaaaaggcgatgttgcattattctttggtctatctggcactggtaaaacaaccttatcggctgacccacaccgtaaactaatcggtgatgatgaacacggctggaataaaaacggggtctttaatatcgaaggtggctgctatgcaaaagcaattaatctttccaaagaaaaagaaccacagatttttgacgcaatcaaatatggtgcaattttagagaacactgtagttgcagaagatggttcagtggactttgaagacaatcgttatacagaaaacacgcgtgccgcttatccaattaatcacattgacaatattgtagtaccatctaaagcagcacatccaaatacaattattttcttaactgcggatgcatttggtgttattccaccgatttcaaagttaaataaagaccaagcaatgtatcatttcttgagtggtttcacttctaaattagctggtacagagcgtggtgtgacagaacctgaaccatcattctcaacatgtttcggagcaccgttcttcccgttacaccctactgtttacgctgatctattaggtgaacttatcgatttacatgatgttgatgtttatcttgttaatactggatggactggcggaaaatatggtgtaggacgtagaatcagcttacattacacacgtcaaatggtaaaccaagcgatttctggcaaattgaaaaatgcagaatatacaaaagatagtacgtttggtttaagcattcctgtagaaattgaagatgtaccgaaaacaattttaaatccaattaatgcttggagcgacaaagagaaatataaagcacaagcagaagatttaattcaacgttttgaaaagaacttcgaaaaatttggtgaaaaagttgaacatattgctgaaaaaggtagcttcaacaaataa

SEQ ID NO: 407346 - DNA, 186 bp, Staphylococcus aureus
atgagtgattataaattaaaaataattgaattgatcaaaagtgatataacaggttaccaaattcacaaacaaactggcgtagcgcaatatgtaatttcacaattaaggcaaggaaagcgcgaagtagataacttaactttaaatacaactgaaaaactatacagttacgcacggcaagtgttataa

SEQ ID NO: 407347 - DNA, 129 bp, Staphylococcus aureus
atgctagacataataaaaacacttctagaacatcaagtattggcagtactgataattccagaagtgttaaaacaacttagagaatggcatctcggctacctagaccgaaagccaaacaacaaagattaa

SEQ ID NO: 407348 - DNA, 969 bp, Staphylococcus aureus
atgaagccatttgaaagtcataataaacaattgaaaattctaagaagaagaggaatggaagtaccgagtagtgctaaaagagatttagaaaatgaaaattattataatatcataaatggttataaagatttatttttagaactagatgttaatggtaattttttggttcctgataaatataagcaaggtactcattttaaagaagtcttttctttatacaaactagatagaaaatttaggaatgttttattagagtatttgttagtatttgaaactcatattaaatcaagaatttcatattattttagcgaaaaatatagagaaccacattcatatttatactttaaaaattattcatctgacacaagtaagacagatagcatcgtgaaaatggttgctacatttagctcggttatgagtaatagaaaaaataaaccattaaaacattatattaatactcataatggagtgccactatggatattggtgaattatttaactttaggtaatgtttcaaaaatgtattccaatttggatgatgatcttcgattggaagttgctaaagactataaaaggaaattggaaagagattataaaacacgtgttcaaataactccatcagatgtagacagtatactacaacaagcacatatgtttcgtaacgtgtgtgcgcatgaagaaagattgtatgattataaaatagacagggctaaaagtagagctaatatattcgccaattataacaaaatatacgataaagaatacgttcctacaatgaatggtagttatgtattcgatttgttgatttcactatgtctatttttgaataaacatgattacataaaattgatgaaaaatatggataaactaataagtaattattcacattctttctatacaattactatagatgacctatatacaaaaatgaattttccagatcaaacaaaaatactggatatgttataa

SEQ ID NO: 407349 - DNA, 570 bp, Staphylococcus aureus
atgagtgagttaacggcaaaacaagcgcgttttgtgaatgagtatataagaacacttaatgtaacacaaagtgccataaaagcaggctatagcgcaaatagcgcacatgtgacagggtgtaggttattgaagaagccacacatcaagcaatatatacaagaacaaaaagataagattatagatgagaatgtattaaccgcaaaagagttactacatgtgcttacgaatgcggcagtcggtgatgaaacagaaacgaaagaagttgtagtaaagcgtggagaatataaagagaatccacaaagtggcaaagtacaattagtctataatgaacatgttgaactgatagaggtaccaataaaacctagtgatcgtttaaaagctcgtgatatgttgggtaaataccataagttatttacagataagcatgatatcaacggggatgttcctatattcattaacattggtgaatgggacggagacgatgaggaattagataaaactgtaaaagatgtatctaacgctaatcctaaccatactgtgattgtggatgatataccgttagaggattga

SEQ ID NO: 407350 - DNA, 342 bp, Staphylococcus aureus
atggataaacagcaaataaaagacttcgtttgtgattatcatgagcgaactagaagtgatgtattaatagatgatgatataaatactgatgaattcttttcaataggtgatgaaaattccaatgaatggatggcagacgataacattgatgatcatattgtaaagaatcacttagaaatgattgttgaccgagtagctaatgataaagagttttatattttcgattctttaatacaaggacgtagttttaaagatattagcaatgtcttagagtgttcagaacaatctgtaagattatggtatgaaaccttattagataaaattgtggaggtgatagaatga

SEQ ID NO: 407351 - DNA, 246 bp, Staphylococcus aureus
atggtgttgttgaaaacggtactaaatcattatacagaaaaagagcagaagcaagttgtaaaatatatgcgttcaaatggacgatataaggcctacaacgtcattgaacgcttacaggttgatttgtatcaagcaagtattaaacaacgttcagaacgtcaaaaacaaagaaatatagcaattgaaaatagcaagattgcacgagtaaatgcttatcatcaatcttcatatgtaaaagtggtgtaa

SEQ ID NO: 407352 - DNA, 219 bp, Staphylococcus aureus
atgggaacaaaatacgagttaaataatactaaaaaggtcgcaaatgcatttggtttaaatgaagaagatacaaatctattaataaatgcagttgatttggatattaaaaacaatatgcaggagatttcaagtgagttacaacaatcagaacagtctaagcaaaagcaatatggtacaacgctacaaaatttagctaagcaaaacaggattattaaatag

SEQ ID NO: 407353 - DNA, 579 bp, Staphylococcus aureus
atgaaaactgaatcgtactttaaagaatacaaccaatttgtaatagatcaacaaaaggctatacaagaattggaacaagagcgtaatgcattggagagtaaaataaagatagataagtccacatataaacagttaatcatggatggacaagatgataaagcagataacctatatcaagcaacagatgctgatgaaaagaaactaaaagcacttaataaacgcttagagacaaagaaaagtgtgtcgaaagaagttaaatatcaaaagacaattgaattattaaaacatcaaagcgagttgtcatcattatatgaatcagaaaagcaatcagctttaggtaaattaaaaaaggtagtcgatgcatataatgagatcattgatgaaatagaagatattaatgatagatatgaagatgagcatcagcaatatgcgagtatttatagtcaagaacaattatatgatgataaagaggctagggaagcattgaatggctactttagagaaaatatatttacatcatatattaatggtaatgatttgccatacgaacacaataacaagttgtttttaaaacgttaa

SEQ ID NO: 407354 - DNA, 342 bp, Staphylococcus aureus
atgcaaagtatcgcagaaaaagagacgtatcatttacccaccgaacacctgcaagttttcaatgtgataaaaaatacgtccaataagtatattactaaaactaaaatcttaaatcaattgggatatgaatataattcaagcaatgaacgatggttacgaagagtaatcaattcattagtatatgattatggctatcctatcggatgcagttataaacctagtgaacgtggttactacattattacgacagaacaagaaaagcaacaagcgatgagaagtattaagaaattagctgatggcagtatgaaacgctatgaagctttgaaacgaattaaagtgtaa

SEQ ID NO: 407355 - DNA, 1422 bp, Staphylococcus aureus
atgcaatcattttggatagaccctagaacgaaaattatttatatgacacaagcgcgtccgggcaatcattacatgttatctagattgaagcctaatggacaatttattgatagattgcttgttaaaaacggcggtcacggtacacacaatgcgtatagatacattgatggagaattatggatttattcagctgtattggacagtaacaaaaacaacaagtttgtacgtttccaatatagaactggagaaataacttatggtaatgaaatgcaagacgtcatgccgaatatatttaacgacagatatacgtcagcgatttataatcctatagaaaatttaatgattttcagacgtgaatataaagcttctgaaagacaagctaagaattcattgaatttcattgaagtaagaagtgctgacgatattgataaaggtatagacaaagtattgtatcaaatggatatacctatggaatacacttcagatacacaacctatgcaaggtatcacttatgatgcaggtatcttatattggtatacaggtgattcgaatacagccaaccctaattacttacaaggcttcgatgtcaaaacaaaagagttattatttaaacgtcgtatcgatataggcggtgtgaataacaactttaaaggagatttccaagaggctgagggtctagatatgtattatgatctagaaacaggacgtaaagcacttttaattggggtaactattggaccaggtaacaacagacatcactcaatttattctatcggtcaaagaggtgtaaaccaattcttaaaaaacattgcacctcaagtatcaatgactgattcaggcggacgtgttaaaccgttaccgatacagaacccagcatatctaagtgatattacggaagttggtcattactatatctatacgcaagacacacaaaatgcgttagatttcccgttaccgaaagcgtttagagatgcaggttggttctttgatgtactgcctggtcattataatggtgcgttaagacaagtactaactagaaacagcacaggtagaaatatgctcaaatttgaacgtgttatcgacatctttaacaagaaaaacaacggttcatggaattttaacccacaaagtgctggttattgggaacatatccctaagagcatcacgaaattgtctgatttaaaaattgttggtttagacttctatatcaccactgaagaatcaaaacgtttttctgacttccctaaagattacaaaggtattgcaggctgggtgttagaagtaaaatcaaatacaccgggtaacacaacacaagtgctaagacgtaataactttgcttctgctcaccagtttttcgttagaaactttggtactggtggtaatagtggttggagcataatagaaggtaaggaggttgaataa

SEQ ID NO: 407356 - DNA, 1824 bp, Staphylococcus aureus
atggtagtagataatttttcaaaagatgataacttaatcgagttaaaaacaacatcacaatataatccagttattgacacaaacatcagtttctatgaatcagatagaggaactggtgttttaaattttgcagtaactaagaataacagaccgttatctataagttctgaacatgttaaaacttccatcgtgttaaaaaccgatgattataacgtagatagaggcgcttatatttcagacgaattaacggtagtagacgcaattaatgggcgcttgcaatatgtgattccaaatgaatttttaaaacattcaggtaaggtacatgctcaggcattcttcacgcaacacgggagtaacaacgtagttgttgaacgtcaatttagtttcaatattgaaaatgatttagtcagtgggtttgatggcataacaaagcttgtttatatcaaatctattcaagatactatcgaagctgtcggtaaagactttaaccaattaaagcaaaatatggctgatacacaaacgttaatagcaaaagtgaatgatagtgcgacaaaaggcattcaacaaatcgaaatcaagcaaaacgaagctatacaagctattactgcgactcaaactagtgcaacacaagctgttacagctgaattcaataaaatagttgaaaaggagcaaacgatatttgcgcgtgtcaatgaagttgagcaacaaatcaatggtgctgaccttgtcaaaggcaactcgacagtcaattggcaaaagtctaagattactgatgattatggcaaagcgattgaatcgtctgagcagtccatagatagcgttttaagcacagttaacacatctaggattattcatattactaacgcaacagatgcgccagaaaagacggatataggcacgttagagaagcctggacaagatggtgttgatgacggttcttcgttcgatgaatcaacttatacatcaagcaaatctggtgtgttagttgtttatgttgttgataataatactgctcgtgcaacatggtacccagatgattcaaacgatgagtacacaaaatacaaaatctacggcacgtggtacccgttttataaaaagaatgatggaaacttaactaagcaatttgttgaagaaatatctaacaacacactgaatcaagctaaacagtatgtagatggtaagttacaaagtataagttggcaacaacataagttaacagaacataacggtcaatcaatccaaaagaacttatataacgccaaaggtaatttagaagcattgggcgctgggaattattacgtaacaagtgtgcctgatttaccaggtattgttgaaagttacgaaggctacttatcagtatttgttaaagatgatacaaacaagctatttaacttcacgccttataactctaaaaagatttacacacgatcaatcacaaacggcagacttgagcaacagtggacagttcctaatgaacataagtcaacggtattgttcgacggtggagcaaatggtgtaggtacaacaataaatctaaccgaaccatacacaaactattctattttattagtaagtggaacttatccaggtggcgttattgagggattcggactaaccacattacctaatgcaattcaattaagtaaagcgaatgtagttgactcagacggtaacggtggcggtatttatgagtgtttactatccaaaacaagtagcactactttaagaatcgataacgatgtgtactttgatttaggtaaaacatcaggttctggagcgaatgccaacaaagttactataactaaaattatggggtggaaataa

SEQ ID NO: 407357 - DNA, 378 bp, Staphylococcus aureus
atgaaaatcacagtaaatgataaaaatgaagttatcggatacgttaatactggcggtttacgcaatagtttagatgtagacgataacaatgtgcctatcaaattcaaagaagagttcgaacctagaaagttcgttttcactaacggcgaaattaaatacaatagcaatttcgaaaaagaagacgtaccgaatgcatcaaaccaacaaagtgaatcagatttgagtgatgaagaacttcgcggaatggttgcaagtatgcaaatgcaggtgacgcaagtaaacattttggcgatggaattaaagcaacaaaacgctatgttaacacaacagttgactgaactaaaagctggtaaaacaaatacagaggaggacgtttaa

SEQ ID NO: 407358 - DNA, 183 bp, Staphylococcus aureus
atggagaaaattaagatgatttatccaactttcaaggacattaaaactttttatgtgtggggttgctataaaaatgagcaaattaagtggtacgtagacatgggtgtaatcgacaaagaagaatatgcattgatcactggtgaaaaatatccagaaacaaaagatgaaaagtcacaggtgtaa

SEQ ID NO: 407359 - DNA, 921 bp, Staphylococcus aureus
atgactgaaaataataaattacaaactattgaacaacaattagtacaagaaaagaacgtatctgacaacgtattaaacaaagtgagagttttagagtcacaaggcaatttggaattgccaaatgattattcaccaagtaatgccatgaaacaagcatggttacaaatcagccaagataacaaattaatgagttgtaacgatacaagcaaagcaaatgccttattagacatggtaacgcaaggtttaaatccagctaaaaatcaatgctactttattccttacggcaacaaaatgcagttacaacgtagctatcacggtaatgtaatgatgttaaaacgtgatgcaggtgctcaagatgttgttgctcaagtgatttataaaggcgatacattcaagcaagaaatgggaggaacaggacgtatcaaagcgattaaacacgaacaagacttctttaacatcgacaaagaaaacattatcggtgcgtactgcacaatcgtatttaatgatggacgagataactatattgaagtcatgactattgaacaaattaaacaagcatggatgcagtcatcaatgattaaagatgaaaaagcattacaaaattctaaaacacataataatttcaaagaagaaatggctaaaaaaacagttatcaatagagctgctaaacgttatatcaacacatcaacagatagcaatcttttcaaatacgcacaagaatccgaacaacgtcaacgcaaagaagtgttggacgcagaagttgaagaaaatgcaaatcaagaacaattggactttgaacaaccagttctcgaagaagcacaatacacagaattagaaaatgataagcctattgatgtatctgactttgaagaaataaaagaacctgcaacagaaaaagaaagcgaagaagagccattttaa

SEQ ID NO: 407360 - DNA, 948 bp, Staphylococcus aureus; identical to SEQ ID NO: 407269

SEQ ID NO: 407361 - DNA, 1902 bp, Staphylococcus aureus; identical to SEQ ID NO: 407268

SEQ ID NO: 407362 - DNA, 345 bp, Staphylococcus aureus
ttgtttgttgattcttctccacctgtttcaggtagttcagatttcttagattgtggttttttagttggtgccactgctttaaccttttcattgatttcaataacaggtgttactactttaccttgttccactggtttagaaggttttttaggttcttctttagcaggtggtattggtttaccaggttcagttggtacctctggcgttggcggtgttggtgtttccggctcgcttggtacttctggtgtcggtggtgttggtgtttccggctcgcttggtacttctggtgtcggtggcgttggtggcacgattggaggtgttgtatcttcttcaatcgtttgttga

SEQ ID NO: 407363 - DNA, 210 bp, Staphylococcus aureus
gtggaacaaggtaaagtagtaacacctgttattgaaatcaatgaaaaggttaaagcagtggcaccaactaaaaaaccacaatctaagaaatctgaactacctgaaacaggtggagaagaatcaacaaacaaaggtatgttgttcggcggattattcagcattctaggtttagcattattacgcagaaataaaaagaatcacaaagcataa

SEQ ID NO: 407364 - DNA, 870 bp, Staphylococcus aureus
atgaatgaaattaaattagaatatgacacacatgtttcagtggtacattatgaaagtttagactcacgttcatttaagagcttttcaaaacctaaatggagtaagttaattaataaactgtctgtgcctatagaagcaaattataagtatgcacgtggtgttgctgtttacggtgatattaaaaatggtgcaaatgatcatggtgaaattatcaaaaagcatcgcaatgacgttaatgtcgtatacagagatgtgattgtacttgattatgatgaaataaatgatttaaagcaattacatgaagcaatcagctcagctttaagcaatgttgcatggttttggcacacatcgttcagccatacaactgaacaagctagaatacgcctgtatatccctctgaatgagcgaataagtgcagatgattatcgtaaatatacaaaagtattagcaaataaaattggtcataaagtggatgaaggttcatatcagccaagtagatgttttgcgttaccagttattcaaaaaggacacatatttattaagcgagtgaatgactgtccaattatgaatgttgatatgctcgaacagtggtcaaaggagtatgaacaatcaaatgatagtcctaatatcaaaggatacacgcgacatggtagtgtgtattggcgagatatagcttttggtgtaagtgagggagagcgcaattcaacattggcttcaattacaggttatcttttgcgtaggtatgtagatccaaacttagtttatgggttagtgagtgcgtgggcaagtgtatgcaaaccacctattaatcaaagtgaagtaaacaatacttttaaaagtattttaaaaaaagatagtaaaaacagttag

SEQ ID NO: 407365 - DNA, 1458 bp, Staphylococcus aureus
ttggaagatgttacaaacgaagaagtatttgaaatgattgatagcagaaccggtgttttaaatgctaatgattggaaaagtcaattaaggcgttctgctactacacaagcattgaaaaaaacgactacaaatgctgaaatcatattgtgtaatgatgagagtttaaaagggctagtacaatatgacgcttttgaaaaagtaaccaaactgaaacgtctaccgtattggaggtcaaaaggggatgcgaattattattgggctgatatagataccacacatgtgatttcacatattgataaattgtataatgtgcagtttagccgtgatcttattgatactgtaattgaaaaggaagcttatcaaaatagattccaccctattaaatcgatgattgaatctaaatcatgggacggaatcgaaagaatcgaaacgttattcattgattatttaggtgctgaagataatcactacaatcgagaagttacaaaaaaatggatgatgggtgcagttgctagaatctatcagccaggtattaaatatgattccatgattattttatatggtggtcaaggtgttgggaaatctacggcagtgagtaaattgggaggtcattggtataaccaaagtattaaaacgtttaaaggtgatgaggtctataagaaattgcagggttcttggatatgtgaaattgaagaactgtcggcatttcaaaagtctactattgaagatattaagggttttataagtgccattgtagatatttatagagcttcgtatggtaaacgcacagagcgtcatcctagacagtgtgtgtttgtagggacaaccaataactatgagtttttaaaagaccaaacaggcaatcgtcgtttttttcctattacggcagataaaaataaagcaactaaaagcccatttgacgatctaacaccagatgttgtgcaacaaatgtttgccgaagctaaagtatattttgatgagaatccgacggataaagcattgttgctagataaagaagcgagtgaaatggctttaaaagtccaagaagctcattctgaaaaagatgctttagttggagaaatagaagaatttcttgaacgtcctattccgtcagactattggtatagaacgttagaagaaaaaagagtgtctgcgcatgatgttatagaccaagactatattaaattatatggtgatggtaaattgattgaattaccgaatacaaaaccaggtgcttatgtatggcgtgacaaggtatgtagcatggaaatttggaaagtgatgatgaaacgagatgaccaaccacaacaacaccatttaagaaaaattgataaagcgttaagaaatacaaattattgtggcactgtgaaaaagcaaacgcgatatggtgaaggtattggtaagcaatatggctttagtgtagatttagcttcttattataagaatcttaaagtttaa

SEQ ID NO: 407366 - DNA, 363 bp, Staphylococcus aureus
atgaataaaaatcaattaaagtcagaaattttagaatatataaaggggcatgctggtacatcatttgtagaaatagaacgtgtatttgaagaaaataactttgattataaaggtgacggcgcatatacaagtggtcaacatcctaatgttgtgttttgggttgggtggaatcaagaagcgtttgatgttatcgctgaacttaaaaaagatggacatattgagatggatatttgtgagccaattgtttatatggttgatggtaaaggtttggatttgcctattgtaaggtcgaaaaatattaaaacagatcattggttgcctgtcacgtttaatgttagtaagaaagaaatggagtgtgtctaa

SEQ ID NO: 407367 - DNA, 285 bp, Staphylococcus aureus
atgaatgacaaagagaaaatttataatcaacttcatcatgatgcaccaatccaaattatgccagcacccgaaaatttatttgttgaatatatagaagatggcgaagtgtggtattcaccagttgtatgtatggctttaagtaaagctcataatattaatttttatgatagtgatgatatgggatgcatcgataaagcggctacatgtagcattaagaaatttaatactgagacaggtgagtttgaacaattcagcaaaatgcctcaaaaggagattgcacaatga

SEQ ID NO: 407368 - DNA, 1617 bp, Staphylococcus aureus
atggacgaagtatcactttataaaaaacatttcgaatttcattctaaattagattatgtttcaacgattaatctatctaggataaaagagataagcaagcgtataaactttgcatcaatctcaacagatagacaagtttttaataacaaaggaaatgtatatcatcgagaaaaagataatgttgcaggtgattatattagtaatcttactttagattataccataaaaccaaaagaaattgggcttgtttatggaaccgtcaatatcaagactgttgataaaaatggtgaagaagaaaaacaatctacgtttaaaactagtcattttcataactatgcacgttttatagctgatctaatttctgacagggtcatttattcaaaacaactagactgctttattatagttaagaataaccagtatgaagtgatagacaatacaaactttgcgttaacctatccagttgataacaagtactatattgatgatttcttagatgtgatgttagagctttaccgcgaacatttaaatgtaactcataactttaagatttatccttatcgcattgcaggtaatgactgggtatatgattgccaaaatttaacgcttacagaacaaaaattaaaaagtgatgagctctactcaattaaatatgacgtagatattaaagatatcaatttagaaatacccagaaacttctttgatttagtaactgacaatgaaaagagtaaaaacaatttaatgctaacacacgcttatacaatgtatcgaaaaatgaaattgatacaagcagaaaagtggtttttacttaaagattttggtcgttctggaaaaggtttgtttatggctacatttgaaaaattgatgacagtgaacaaagttaattttgatagccttatttctggtggttttgaatcggcaaatgagtggatgaatttttacggtgcagatatagctcatgctaatgagacaggtgaaatcactaaacaaatgatgcgcatattaagaaaaatagcaacaggtgaaacaatttctggacggggcattggaagaaacgcatttacatttaaaaataacgccgtattaatactagatacaaatgaaagtgtcgatactggtgaaattacagccaatacaacgcgaacagttaaaatatcgctaaaggatagacccataaatgaaactgatgaagaacgttatcagatttttaagccttattgggattatatacaacctaatggcaacacttcagttaatgcgtctgtgtcattcttaataacgagtttggaatatttaaaagaaaatgggcgagaatttaaatttaaagatgtaatgctcaagtattattttaatgaagatgaattgactgaaactcaaattactatgatcagattgttatcaaaacagggctttatattagcaggcgatgaaacattacaacgcttaatagaacaagattactcaagtttacgttacaagaacgctaaagaagatatgaggaaaattggcattagtatcaataatcaaaagaaaatagacggggtaaatacaaaagttcataaagttggaaacattgaattatttaacatggctttagaactaatttctgaacactaa

SEQ ID NO: 407369 - DNA, 804 bp, Staphylococcus aureus
atgacaggttatcatgtagcgaaacacttattaagtaagaatattgaagttataccactaaataatcacaaaaagccaactgtttcatttgctgatatagatattactgatgaattcgttgaatatcattctaatatttatcatcaaaccaatgtattgggcgtattaacacgaggtgtatggtgtatcgacattgatgtagatcatgaagatggtaagaatggtttcgatagtttgaaacaaataccatattacgaagaacttgttaccaatgcacaaaatacattagtacagacaacggcaagtggtgggaaacatatcatattcaaaaagcatgacaatatcgaatacggacagaagataggttatttaccatctgttgatatcaaagcacatcccaataattattttgtgcttgcaggtagtcaaacagctaaaggtatatacactcataacggtgtcaatgtaactgagtatcaaggagagtttgagaaacgaatattttctaaagctggtaattacaaacaacaagtattagagccatattccattcgacgagcactacctaattatagttttagtcacgtaagagttggcaaaggtggagaaggaaaacgtgcatatcaacgcattatagacggtcaaagtgaatataggaacaatgatttatataaagcagtaagttatgcgattcaatgtaacgtagatattgagccgttacgtgtattgattggagataataaaaacggcgatgtatttacggagagagattgggaggcgactgttagaagtgcaagccgttaa

SEQ ID NO: 407370 - DNA, 273 bp, Staphylococcus aureus
gtgcaagccgttaaagaggattacaatttagacgaacaagctcaaaggattggtttaataactggtatatctaacgaaatatactattgttcaataagttatttatcaacggtttatttagaatatattgataacacttggactgcatggcgtgagagttatattcctaaattaaataaaagaacaagttacaaagttatagcttcaggaagttttgaattagtgctagctagattaaagagttatttaaattatataaaaaggagtaagtga

SEQ ID NO: 407371 - DNA, 945 bp, Staphylococcus aureus
atgcccaattttgagaaatacaatttatcacaagtaaaaactgaaagattttaccaactgcctaaatatttgttcgaagatgcatattttaagaaaatgtcagcagaagccaaaattatgtatgcattattaaaagatcgtttcgaattatccatccaaaatgaatgggtagatagaaataataacatttactttattttcagtaataaacatttgtgcgagtacttaggttatggagaacaaaaaatcataaaattgaaaaaagagttagtaaattttaatttattaactcaagagcgtgttggccttaataaaccaaatagattatatttattaaaaccaaattattatattgaagcaagtcttaccaaggaacttccagattcacagttccagaacaatgaatctggaagttctagaactgtgaatttaagtggtcaagaacttccaaattcacagtctaatgatactgagttaaataatactaattatatagaaaatgaggataatgatacgtatgatatgaatgatattatatctaatactttaataaataataatcatcattcgaatcatacaaatcatcaaaaaactgaatttaataatgacgcccttaagttccaagtactcgaagaattgccacaacaacttcaagactatttaagtaaatttgaaattagagaaattcggattattaaaagcgtattactcaaagggaaaaagtcatttaatacttcacatgatacttattatcgtttagaagatgttgagtttgaaattgtaagtgtattgaaacgttttaaagcgatgttgctacaaaagaatgaaaccgttgaagctatgcaaggttatttaatgcaatccattaaagctgaacttgaagaaacacatgccctttatatgcgccgtaaaaacatgaaacaatataatatctttaatcaataa

SEQ ID NO: 407372 - DNA, 771 bp, Staphylococcus aureus
atgaaaactattaaaatggttgctgatgaattgaatgtaactaaacaaactattgttaataatgctaaaaacttaaatatatcttttaaaaaagaaaatggaattaattatattaatgataatgattgtttaaaaattatagaaaagatcactaagaaagaaaggacaatgcaaaataaagaatcaataaaaaaagaaagatttaatgaaaatactgcagagtttgaaaagcatatatacaataattcaaatagttttgagtcattaaaaacaaaagtaaatgaattagaaaagcaaatagaaatctttgaaactagagctaaaaatgatgaaaaatatattgagaatttaactaaacaactagatcaacaaaatagcaatgttaatacattaaataaactgttggagaatcaacaaatattagctttagaaagtaataaaaagattcaaaaactagaaaaccaattagaagaagaaagacagcttaattactcttttgatacagcgactaatgatagacaaagcattaatccgcaagaagcaacttttactgaagaatatcaaaatagcaaccagcaacaaaagaaaatacaaccaatagaagcagaattaaatcataagggcataactaaagcgaaaaaggatgacagtgcaaacgaagacgtattaaagagagatgataaactatctgaagaaatagagagtggacctgaggacagggaagtagaaacacctaaaaaggggttttggagtcgtttgtttggtagctaa

SEQ ID NO: 407373 - DNA, 402 bp, Staphylococcus aureus
atgaaaaatagttatcaatcccaaaaagtgattgaagaagtgtttaaagaaaagccgaattctcgttggttgtttcttacattatcaatacgaaatgcaataggtggagatacgttagaacaaaatttaacacatttaactgagtcgtttagaagattatttaaatataaaaaaatcagtaaaaatttaattggctttatgcattcaactgaagtaacagttaataaaaatgacggtagttataatcaacatatgcacgttttgttgtgtgttgaaaatgcgtattttagaaagaaaaaatatattacacaaacagaattggttgatttatggcaacaagcattaaaagtaaattatcgacctgtcgtaaatattaaagcgatcaaaccaaaaaggagataa

SEQ ID NO: 407374 - DNA, 477 bp, Staphylococcus aureus
atgaaagaaagatatggaacagtctataaaggctctcagaggctcatagacgaagaaagtggagaagtcatagaggtagacaagttataccgtaaacaaacgtctggtaacttcgtaaaggcatatatagtgcaattaataagtatgttagatatgattggcggaaaaaaacttaaaatcgttaactatatcctagataatgtccacttaagtaacaatacaatgatagctacaacaagagaaatagcaaaagctacaggaacaagtctacaaacagtaataacaacacttaaaatcttagaagaaggaaatattataaaaagaaaaactggagtattaatgttaaaccctgaactactaatgagaggcgacgaccaaaaacaaaaatacctcttactcgaatttgggaactttgagcaagaggcaaatgaaaaacaagaaaatgcattatctgattattattctttcaaggactag

SEQ ID NO: 407375 - DNA, 735 bp, Staphylococcus aureus
atgaacgagaaaaatataaaacacagtcaaaactttattacttcaaaacataatatagataaaataatgacaaatataagattaaatgaacatgataatatctttgaaatcggctcaggaaaagggcattttacccttgaattagtacagaggtgtaatttcgtaactgccattgaaatagaccataaattatgcaaaactacagaaaataaacttgttgatcacgataatttccaagttttaaacaaggatatattgcagtttaaatttcctaaaaaccaatcctataaaatatttggtaatataccttataacataagtacggatataatacgcaaaattgtttttgatagtatagctgatgagatttatttaatcgtggaatacgggtttgctaaaagattattaaatacaaaacgctcattggcattatttttaatggcagaagttgatatttctatattaagtatggttccaagagaatattttcatcctaaacctaaagtgaatagctcacttatcagattaaatagaaaaaaatcaagaatatcacacaaagataaacagaagtataattatttcgttatgaaatgggttaacaaagaatacaagaaaatatttacaaaaaatcaatttaacaattccttaaaacatgcaggaattgacgatttaaacaatattagctttgaacaattcttatctcttttcaatagctataaattatttaataagtaa

SEQ ID NO: 407376 - DNA, 726 bp, Staphylococcus aureus
atgaaagaattacctaagagcagattaacgttcaaagaaagtatgattgagagtcaatatttagcaactaaaacaaaagaagaaaagaaacaatacaagcaactatctgttgaagacaaaagagaaattttaaaagaataccaaagtaaacctagaaaagaagtgaaatttgaaagtgaaatcaataaatctgacgaaaacttatctaaaatctaccaaagatttagcgaaataggtgtagaggatttgtttggtacaaaaaaagaagtgaaagaactacctatgattttaaaagataatgaaaacataatgtatgtaacttcgggattgtacaataataatacctacttaatagtatgtactgatctaagattgttattcttagataaaggtatgatatatggtttgaaatttcatgaatttccattcgagaaaatcaattctgtttcgtataaaaaaggacttctttttggcgaaataattatacatcacggttcatcaagtatcgctataggaagcatatcaaaaaacactgtatctagaatggcggaaacaatacaagaacaaatctctattcgagaaagttctatgaaaccatccaattctgaaaaaatgagtttttctgttgctgatgaattaataaaatataaagaattattagatgtcggagtaatttctcaggaagagttcgataagaaaaaacaacaattattggatattgattaa

SEQ ID NO: 407377 - DNA, 675 bp, Staphylococcus aureus
ttgaaattaaattatgaaaaatctttttttaaatctgcgaaagcagtttacgagatcacaaatggtctatataacttatcttttcctttagatatatttgaaattatctcaaaagataaacgtattaaattagtgactttctctgaattttctcagaatactggcactttatattttaaaataccttctattttcggttcagaagaagcgtttcatattagaaaaggagacaaagcgattatagtttataacgatttactgcctatgaatcgtctaagatttactttagctcatgaatatggtcattttataatgggacatactggagttaatttaaataaaacattcacatataaagattattatagaaggattgctgaagaatatgaagcaaactcatttgcttcatgtttattgtttcctttacatataagatacaaatatataaacaactttaatattgagcaaatttcgtacaagtatcaaatgagttttcaagcgatccatatagcggtaaaagtaatcagaagacatatacacaatgggttaaacgactatatgtcaaataacgaaaattaccacgcagaaaactacttaagttttttagaagagaaaatggaaagcaaatctgattttataaatgaatttaaatatgcttatgatctaacgatttaa

SEQ ID NO: 407378 - DNA, 333 bp, Staphylococcus aureus
atgaatctagtacaaagaatccgtaatttgtgcaattcaaaaggtatgacttttgctgaattagagagaactttagggttttcaaacggacaaatcagaagatgggagaaaaccaaaccaggcattgataaggtgcaaaaaattgccgatcacttcgatgtatcagttgattacttattaggtagagaaaaagatgagtactccggagaagataaaagtgaagatattcttattatgcatcgagctacagaaaatatgacggaggcacaaaggcaaaaagctttgactatattagaagcaatgtttgatgattgggatgatttaactaagtaa

SEQ ID NO: 407379 - DNA, 195 bp, Staphylococcus aureus
atgtcgacaacagatttcggcttgaaagtgagaacggaattattaaaacgcaacatgacaaacaagcaacttgcggaaatgctagaaatttcaagtgcttacttatcggatattttacgtggacgtagagatgcttttgaacaaaagaaacgtattgcgaaaattttagaaattaaagaagaggtgaagagttaa

SEQ ID NO: 407380 - DNA, 1005 bp, Staphylococcus aureus
atgcaagttaatcatacaaaatatatagacgaaaatcaagataataaaacattaaaagatatgacgaaaagtgggaaacaacgcccatggagagaaaagaaaatagataatgtaagttatgcagatatactggaaatcttaaaaataaaaaaggcttttaacgtaaaacaatgtggtaacgtcttagagttcaagccaactgatgaaggttatttgaaattacataagacatggttttgtaagtcaaaattatgcccagtttgtaattggaggcgtgctatgaaaaatagttatcaagctcaaagagtgattgaagaagttgttaaagaaaagccaactgctcggtggttatttcttactttgtcgacaaaaaatgcaatagatggtgaccacttggaacaaagtttaaagcatatgtctaaggcttttaataaattaaagatgtatacaaaagttaaaaagaatttggtaggttttttacgttcaactgaagttacagttaataaaattgacggtagttataatcaacatatgcatgttttgttatgtgttgaaaatgcgtattttagaaaaaaagaaaattatattacgcagactgaatgggtcgatttatggcaaaaagcattacaagtaaattatcgacccgtagcaaatattaaagcgatcaaaccaaatcaaaaaggagataaagatattcaagcagctatcaaagaaacctctaaatattcggttaagtcatctgattttttaactgatgatgacgaaagaaatcaagaaatcgtgaacgatttagaaaaaggtttataccgaaaacgtatgttgagttatggtggattgcttaaacaaaaacataaaattttaaatttagacgatgccgaagatggcaatttaattaatacaagtgacgaagataaaacaacagacgaagaagaaaaggcgcattcaattactgcgatttggaattttgaaaaacaaaattattacttaaaagatttgaaacgttag

SEQ ID NO: 407381 - DNA, 324 bp, Staphylococcus aureus
atgcattatttatatttatttatctcaattgcaacagaaataatcggaactagtcttttaaaaacatcagaaggtttcacaaagttatggccaacattaggtacactactttcgtttggaatttgcttttattttttaagtttaacaataaaatttttgcccttaaatataacttacgcaacatgggcaggtctaggattagtattaacaacaataatctcagttatcgtttttaaagaaaatgttaatttaattagtataatttctattggcttaattgttataggtgtagtgctcttaaatgtatttggagaaagccattga

SEQ ID NO: 407382 - DNA, 261 bp, Staphylococcus aureus
atgtattacaaaacgggtgacgtatgtcgaaaaatatttaatgtagatggctttgattttcaattaagagttaagaagcgagcatatagtgtcgaaatagtcgttttagatcatgaaggaaattcaattgacgggctactagtttctgacgagaacgatctatacacagctttagatattttgaaacaaagtatttatgaatggattgaaaataacacagatgaacaggacagactaattaacttagtcatgagatggtag

SEQ ID NO: 407383 - DNA, 303 bp, Staphylococcus aureus
atgactaaaaattataaagacatgacgcaggaagaaataaaagacttattatctgaaaaaacggcagaattgtatgaattagcgaaagaaattaagggagaaagtaaatttgatattttgcttttctcatcaataggagttatcgacggagattatttagcaggttcaagttctgtgattggtcatacttttgatcttgcttacttattggatagcactaagagttataaagatattgtcaatgttctccaaatgtgtaaatcacaaaaaattctcggtatagatgacgacaaggaggactaa

SEQ ID NO: 407384 - DNA, 162 bp, Staphylococcus aureus
atgagcaacatttataaaagctacctagtagcagtactatgcttcacagtcttagcgattgtacttatgccgtttctatacttcactacagcatggtcaattgcaggattcgcaagtatcgcaacattcatattctataaggaatacttttatgaagaataa

SEQ ID NO: 407385 - DNA, 321 bp, Staphylococcus aureus
atgccacatattttaaacgtaacagttccaatacctgaaacacatgtacttatcacaaaagatgaatatgatgagctaattggttattcattagaccctgtatggaacatgagtgacttaaagaagaaattaaaaattgcatctgatgagactatcaaggacagattactatttcatcctagatttgaaaaagaactaagagcgcaaggaattgtgcattacccagatgagaattttaatcgctggagatttaacgcaagaaagatgaataaattcgtcgatgagcatttcaatgaaatatataaggagagaataaaatga

SEQ ID NO: 407386 - DNA, 381 bp, Staphylococcus aureus
atgaaattagatcatgattgtgttagacatcttttgttagaaattgaaactaataaaaagattggtgaaccgctcaccgaatacaatttcaaagataatgttgtatttggaaaatatgattttgaaactgtaatgtatgcattattaaaactggaagaagcaaagtatgttagtgttaaattcggttgggaagatggacatatttatggttatacaattaacgatataacttggtcagggcatgaatttttagataatatccgagacaatcacacttggaaagaagttaaaaaagtcgcaaacaaaaccactagtatgtccgtaacattgctaagcaaattagcttttaattatctaacacaaaaatttaatctaacttaa

SEQ ID NO: 407387 - DNA, 198 bp, Staphylococcus aureus
atgcaagctcaaaacaaaaaagtcatctattactactatgacgaagaaggtaatagacgacccgttaatattcaatacaacgatggctacgacttaatgatagaccagcgttttattgaaatgacgcttgaaagacatccgcatttaaaaaataacttttatggattaatagatggaaaagaatttaagttagattaa

SEQ ID NO: 407388 - DNA, 492 bp, Staphylococcus aureus
atgctcaaaagaggtttattatttttaactgttttattgttattattctcattttcttcaattactaatgaggtaagtgcatcaagttcattcgacaaaggaaaatataaaaaaggcgatgacgcgagttattttgaaccaacaggcccgtatttgatggtaaatgtgactggagttgatggtaaaggaaatgaattgctatcccctcattatgtcgagtttcctattaaacctgggactacacttacaaaagaaaaaattgaatactatgtcgaatgggcattagatgcgacagcatataaagagtttagagtagttgaattagatccaagcgcaaagatcgaagtcacttattatgataagaataagaaaaaagaagaaacgaagtctttccctataacagaaaaaggttttgttgtcccagatttatcagagcatattaaaaaccctggattcaacttaattacaaaggttgttatagaaaagaaataa

SEQ ID NO: 407389 - DNA, 756 bp, Staphylococcus aureus
atgaaaacatacagtgaagcaagagcaaggttacgttggtatcaaggtagatatattgattttgacggttggtatggttaccaatgtgcagatttagcagttgattacatttattggttgttagaaattagaatgtggggaaatgcaaaagatgcaatcaataacgattttaaaaacatggcaacagtatatgaaaacacaccatcgtttgttccacaaataggtgatgtggctgtatttaccaaaggaatatataaacaatacggtcatattggtttagtgtttaatggtggtaatacaaaccaatttttaattttggaacagaactatgacggtaacgcaaatacgcctgcaaagttacgttgggataattattacggctgtactcactttattagacctaagtataaaagtgagggcttaatgaataagatcacaaataaagttaaaccacctgctcaaaaagcagtcggtaaatctgcaagtaaaataacagttggaagtaaagcgccttataaccttaaatggtcaaaaggtgcttattttaatgcgaaaatcgacggcttaggtgctacttcagccactagatacggtgataatcgtactaactatagattcgatgttggacaggctgtatacgcgcctggaacattaatatatgtgtttgaaattatagatggttggtgtcgcatttattggaacaatcataatgagtggatatggcatgagagattgattgtgaaagaagtgttttaa

SEQ ID NO: 407390 - DNA, 255 bp, Staphylococcus aureus
atgattaattggaaaattagaatgaaacaaaaatcattttgggtagcgatattgtcagctatctttttatttgctcaaaacatcgccaaagctattgggtatgatattcaagtttatacagagcaattaacagacggtttaaacgctatattaggatttttagtattaactggtgtgattcaagacccgactactaaaggtataggtgatagccaccaagctttagaatatgaagaaccaagaagaaaatactag

SEQ ID NO: 407391 - DNA, 141 bp, Staphylococcus aureus
atgcaatataatactactagaagtataaccgaaaatcaagataataaaacgttaaaagatatgacgaaaagtgggaaacaacgcccatggagagaaaagaaaatagataatgtaaggttctgttgcaaagttaaaaaataa

SEQ ID NO: 407392 - DNA, 348 bp, Staphylococcus aureus
atgagttatgaaaatacttgtgatgtgatctgtgtacatgaggataaagttaacaatgctttaagttttttagaagatgataaatctaagaaattacttaacattttagaaaaaatttgtgatgagaagaaattgaaaatcatattatctttgattaaagaagatgagttgtgtgtttgtgatatttctttgatattgaaaatgagtgttgcttcaacttcacatcatttaaggcttttatataaaaatgaggtacttgatttttataaagatggaaagatggcatattattttattaaagacgatgaaataagagagtttttctctaaaaatcatgagggtttttga

SEQ ID NO: 407393 - DNA, 618 bp, Staphylococcus aureus
atgattcaaacggttgttgctgctgctgttctttatattgctacagcagttgatttattagtaattttattaatattttttgctagagcaaagactagaaaagaatatagagatatttatgttggtcaatatttagggtctattattttaatattagttagtttgtttttagcttttgtattaaattatgttccagaaaagtggatattaggtttattgggtttaataccaatttatcttggaattaaagtggctatttatgatgattgtgaaggagaaaagagagctaaaaaagaattgaatgaaaaaggattgtctaaattagttggtacggttgcaattgttacgatagcaagttgtggcgccgataatattggtttatttgttccgtattttgtgacattaagtgttactaatttattacttactctgtttgtctttttaattttaattttcttcttggtgtttactgcacaaaaattagctaatatcccaggaattggagaaattgttgagaaatttagtcgttggattatggctatcatttatatagctttaggtttatttattattattgaaaatgacactattcaaacaattttaggatttatattttaa

SEQ ID NO: 407394 - DNA, 1557 bp, Staphylococcus aureus
atgtctattactgaaaaacaacgtcagcaacaagctgaattacataaaaaattatggtcgattgcgaatgatttaagagggaatatggatgcgagtgaattccgtaattacattttaggcttgattttctatcgcttcttatctgaaaaagcggaacaagaatatgcagatgccttgtcaggtgaagacatcacgtatcaagaagcatgggcagacgaagaataccgtgaagacttaaaagcagaattaattgaccaagtcggttacttcattgagccagaagatttattcagtgcgatgattcgtgaaattgaaacgcaagatttcgatatcgaacacctggcgacggcaattcgtaaagttgaaacatcaacattaggtgaagaaagtgaaaatgactttatcggtctgttcagcgatatggatttgagttcaacgcgactaggtaacaatgtcaaagaacgtactgctttaatctctaaagtcatggttaatcttgacgacttaccattcgttcacagtgacatggaaattgatatgttaggtgatgcatatgaattcctaattgggcgctttgcggcgacagcgggtaaaaaagcaggcgagttctatacaccacaacaagtatctaagatactggcgaagattgtcacagacggtaaagataaattacgtcacgtgtatgacccaacatgtggttcaggttcactgttgttacgtgttggtaaagaaacacaagtgtatcgttatttcggtcaagaacgtaacaatactacatacaacttagcacgcatgaatatgttattacatgatgtgcgttatgagaacttcgatatccgtaatgatgacacattggaaaacccagcctttttaggcaatacatttgatgcggttattgcgaacccaccgtatagtgcgaaatggactgcagattcaaagtttgaaaatgacgaacgattcagtggttacggcaaacttgcgcctaagtctaaagcagactttgcctttattcaacacatggtacattacctagacgatgaaggtaccatggccgttgtactcccacatggtgtattattccgaggtgctgcagaaggtgtcattcgtcgttatttaattgaagaaaagaactacttagaagctgtgattggtttgccagcgaatattttctatgggacaagtattccaacatgtattttagtatttaaaaaatgtcgccaacaagacgacaacgtactatttatcgatgcatccaatgattttgaaaaaggaaaaaatcaaaatcatttaagcgatgcccaagtcgaacgtattatagacacatataagcgtaaggaaacaattgataaatatagctacagcgcgacactacaagagattgccgataacgattacaacctaaatataccgagatatgtcgatacattcgaagaagaagcaccgattgatttagatcaagtccaacaagatttgaaaaatatcgataaagaaatcgcagaaattgagcaagaaatcaatgcatacctgaaagaacttggggtgttgaaagatgagtaa

SEQ ID NO: 407395 - DNA, 462 bp, Staphylococcus aureus
atgggaaaatacgaagaattgcttatgaaatgtgaagttgaagtgaaagaaacacaaagagtacctcgaggattcgatggttggtatcaagaaggagaaatttttattagaccttccctatccgaaaggaacaaattagaagtgttatatgaggaacttgctcatcacaagttgacgtatggcaacattttagatcagtcgaagttcaacaatcgcaagttcgaaaattacgcacgtagacacggctttatctcagctgttccattacgcgaaattgtagaagcttataattatggcgtacgtaacttgtatgaattgtctgagtatctacaattaagcgaagaatacatattagaagcaatagaacaatataaaaagatatatggtattggaactcactatggcgagtattcgatcacatttgagccgttgagagtttttaaattgcatcacattgattaa

SEQ ID NO: 407396 - DNA, 315 bp, Staphylococcus aureus
atggctaaacaaattctttcaaagaatttaaaaaatcttttagaacgaaaaggcaaaacacaaacagacatggcaaaagatttaaatttaaaagaatctactgtaagtagttggatgaatgcagtcaaatatcctagaagagataaaatcgaattacttgctgactattttggagttatgccctccgacataactgatgataaaagtattcatcaagaaactatagccggtcatgcaaataaagatgaatttactcccgaagaatgggaagaaatcgaaaactttatgcaatgggttagagatagaaagaaataa

SEQ ID NO: 407397 - DNA, 213 bp, Staphylococcus aureus
atgacagatacaattgaggcattttctctaaagggtgcgcgaaatgaatttgattacacgcaagagcaaatagctgataaattaggggtttctcgagcacagtatattgcgtgggaaaaaggtgatgtaatacctaaaagcatggtagtttatgctttagcttacatctatggtattaacgctgacttattaagagtcagcaaaaaaatttaa

SEQ ID NO: 407398 - DNA, 1203 bp, Staphylococcus aureus
atgtgtaatgataccttagaattactaagaataaaagatgaaaatataaaatatataaaccaagaaattgacgtcattatcaaaggaaaaaaagcaacagtggttaatgctgtactaacgtataagccttcggcctgttattgttgtggagttaaaaatgaaggacaaattcataaacatggtaagcgtgtttctcgtattactttacttaaaactcaagggtataacacatacctcaacttagctaaacaacgttttaaatgcttagaatgcaatggcacttttactgctaaaacgtcaattgttgatgagtcgtgttttatctcaagatgtgttactcaaaaagttatagaagaagctactaaagttaaaacagagattgatactgcagaagataactgtatctctccatctactgtaagtcgtattagaactaaagcggctaattcattacgaattaaaccctttaattgtttgccagaacacatcgctatggatgaatttaaaagcgttaaaaatgtaactggatcaatgagtttcatttttatagataatgatactcatgatgttatagatattttagaaaatagaactacaagattcttgcgtgcctatttcgagcgattcgatttaaaaaatcgacaacaagttaagacggttactattgacatgtatgaaccctatgtccgattatttcgcgacctatttcctaatgcagctattatttttgacagattccatatcgttcaacatttaaatagagaacttaataagtatcgtgtacaagttatgaatgaataccgtaataaaaaaggacctgattatacaatttttaagaataactggaaagtcctattgatggatactagtaaaaccatatttagtaaatacagatggaataaatcttttaaggcttataaacgctcatctgacattgtagaattcatgctttcaaaagacgatatactacgacactcctacgaacttgtccaaggattacgaaaagacctaaggttatgtaattggcctaaatttattaatcgtttaaattcagttagtaaaaagtctgtgagtaagggtgtatggaaagtggttaaatattatagaaaacatcaaaggatgttaagaaatacaatttattacccagcatttaataatggtgctatagaaggaattaataataagataaaattaatcaagtga

SEQ ID NO: 407399 - DNA, 207 bp, Staphylococcus aureus
atgaatgagattgaaactattataagtgaaatagaaaagttattaactaacaatacaccatatagtatttcaaaaaactcaggtgtaccacgtcaaacagttactgatttaaaggtaggtaaaactaaaataaaagaagctaaatttaaaacgataatcaagttatatgaatatcaaagaacattagaaaataaaacagaatgttaa

SEQ ID NO: 407400 - DNA, 243 bp, Staphylococcus aureus
atgacagataacgcacgcaaagaatacctaaatcaattctttggatctaagagatatctgtatcaagataacgaacgagtggcacatatccatgtagcaaacggcaattattactttcacgggcatatcgtaccaggttggcaaggcgtaaagaagacgtttgatacagccgaagagctagaaatatatataaagcaacatggtttggaatacgagaaacagaagcaactaactttattttag

SEQ ID NO: 407401 - DNA, 252 bp, Staphylococcus aureus
atgatgaataaccgcgaacaaattgaacagtccgttataagtgctagtgcgtataacggtaatgacacagagggattactaaaagagattgaggacgtatataagaaagcgcaagcgtttgatgaaatacttaagggtttacctaatgctatgcaagatgcactcaaagaagatattggtcttgatgaggcagtagggattatgacgggtcaagtggtctataaatatgaggaggagcaggaaaatgactaa

SEQ ID NO: 407402 - DNA, 537 bp, Staphylococcus aureus
atgactaacacattaacaattgatcagttacaagagttattacaaatacaaaaggagttcgacgatagaataccaactagaaatttaaatgacacagtagctagtatgattattgaatttgtagagtggattaacacacttgagttttttaaaaattggaagaaacaaccaggtaagccactagatacacaattagatgagattgctgattacttagctttcagtttgcaattaactttgactattgttgatgaagaagatttggaagaaactactgaggttatggttgatttgattgaaaatgaagttactttacctaaactacattcagtttattttgttcatgtaatgcatacactaacagaacaatttgtaaaaggtattgataatagcattgtacaagttttaataatgccgtttttgtacgccaatacttactattctatcgaccaactcattgacgcatacaaaaagaaaatgaaaaggaatcatgaaagacaagatggaacagcagacgcaggaaaaggatacgtgtaa

SEQ ID NO: 407403 - DNA, 246 bp, Staphylococcus aureus
atgagttacatcattacattagttctaatacttgtattcatagtaatatttaacaatttattcaacagatatatggttttgtacaaagaattagatttatttacatgcagaattggaatgttattagtcttaatcgttatagtagattttgcaaagcaaaaaaatatgttggctacattgagtgttgtactaatacttttattcgtagaaaaacttagaatcattcaaaggagtgataagaagtga

SEQ ID NO: 407404 - DNA, 165 bp, Staphylococcus aureus
gtggcacatatccatgtagtgaacggcacttattactttcatgggcatatcgtgccaggttggcaaggtgtgaaaaagacatttgatacagcggaagagcttgaaacatatataaagcaaagtgatttggaatatgaggaacagaagcaactaactttattttaa

SEQ ID NO: 407405 - DNA, 207 bp, Staphylococcus aureus
atgaaaatcaaaattgaaaaagaaatgaatttacctgaacttatccaatgggcttgggataaccccaagttatcaggtaataaaagattctattcaaatgatgttgaacgcaactgttgtgtgacttttgatgttgatagcatcttatgtaatgtgactggatacgtatcaattaacgataaatttactgttcaagaggagatataa

SEQ ID NO: 407406 - DNA, 402 bp, Staphylococcus aureus
atgaaaatcaaagttaaaaaagaaatgagattagatgaattaattaaatgggcgcgagaaaatccggatctatcacaaggaaaaatatttttttcaacaggatttagtgatggattcgttcgttttcatccaaatacaaataagtgttcgacgtcaagttttattccaattgatatccccttcatagttgatattgaaaaagaagtaacggaagagactaaggttgataggttgattgaattattcgagattcaagaaggagactataactctacactatatgagaacactagtataaaagaatgtttatatggcagatgtgtgcctaccaaagcattctacatcttaaacgatgacctaactatgacgttaatctggaaagatggggagttgctagtatga

SEQ ID NO: 407407 - DNA, 348 bp, Staphylococcus aureus
atgatgttgaaatttaaagcttgggataaagataaaaaagttatgagtattattgacgaaatcgattttaatagtgggtacattttgatttcaacaggttataaaagtttcaatgaagtaaaactattacaatacacaggatttaaagatgtgcacggtgtggagatttatgaaggggatattgttcaagattgttattcgagagaagtaagttttatcgagtttaaagaaggagccttttatataacttttagcaatgtaactgaattactaagtgaaaatgacgatattattgaaattgttggaaatatttttgaaaatgagatgctattggaggttatgagatga

SEQ ID NO: 407408 - DNA, 261 bp, Staphylococcus aureus
atgtattacgaaataggcgaaatcatacgcaaaaatattcatgttaacggattcgattttaagctattcattttaaaaggtcatatgggcatatcaatacaagttaaagatatgaacaatgtaccaattaaacatgcttatgtcgtagatgagaatgacttagatatggcatcagacttattcaaccaagcaatagatgaatggattgaagagaacacagacgaacaggacaaactaatgaacttagtcatgaaatggtag

SEQ ID NO: 407409 - DNA, 162 bp, Staphylococcus aureus
atgagtaacatttataaaagctacctagtagcagtactatgcttcacagtcttagcaattgtgcttatgccattgctgtacttcactacagcatggtcaatcgcgggattcgcaagtatagcgacattcatattttataaggaatacttttatggagaataa

SEQ ID NO: 407410 - DNA, 129 bp, Staphylococcus aureus
gtgccaccacacattcaacaaatgttatacgaaatccagttaaaagctggtatacctcaaaaattaatggaaatgcaaggtttgataaacgatgaaacaaccaaagaggagaaaaaagaaaatgagtaa

SEQ ID NO: 407411 - DNA, 246 bp, Staphylococcus aureus
atgtcatatagtgaatatgaacagctttactataaaattgttaatgaagctgatgaactatacggtggtcaaagtgaacacttcaagaagaaccttcaaaaacttacagagaatgctgatgaaggtgtttccagtgaaaagatttactctaccgctttacatgaatcacttgagtaccaacgaaacttcatcttcttggaattaggtaaggttctctttagtgaaatcggaaaatgccttaagtag

SEQ ID NO: 407412 - DNA, 216 bp, Staphylococcus aureus
atgaacacgttacataaaacaaccctcctcatcacaatggcagttgtgacttggaaggtttggaagattgaacgaaatacgagaaagtctgtaatcaatcgaaatgattttagtaaagagtctacagcagaaacgattgagcgacacagtgatcctgattcaggaataaaactacttaaggcattttccgatttcactaaagagaaccttacctaa

SEQ ID NO: 407413 - DNA, 534 bp, Staphylococcus aureus
atgactaacacattacaagtaaaactattatcagaaaatgctagaatgcccgaacgaaatcataagacggatgcaggttatgatatattctcagctgaaactgtcgtacttgagccacaagaaaaggcagtgattaaaacagatgtagctgtaagcataccagagggctatgtcgggctattaactagccgtagtggtgtaagtagtaaaacacatttagtgattgaaacaggcaagatagacgcgggatatcatggcaatttagggattaatatcaagaatgataatgaaacgttagagagtgagtatataagtaactttggacgtagtccttctggtatagacggacaatatgccctactacctgtaacagataaaattttatgtatgaatggtagttatgtcataaacaaaggcgacaaactagctcaattggttattgtgcctatatggacaccggaactaaagcaagtggaggaattcgagagtgtttcagaacgtggagcaaaaggcttcggaagtagcggagtgtaa

SEQ ID NO: 407414 - DNA, 171 bp, Staphylococcus aureus
atgaaaaaatttaatgttcaaatcacatacactggcatgattgaagagactatcgaggctgaaagtttagacgaagcagaatttgaggctcatgatattgcgagaatggaagtgccatttgattgtgatgaatttgaaattaatgtagaggtggaacaggaaaatgactaa

SEQ ID NO: 407415 - DNA, 255 bp, Staphylococcus aureus
atgaataaccgtaaacaaatagaacaatcagtgatcagtactagtgcgtataacggcaatgacacagagggattactaaaagagattgaggacgtatataagaaagcgcaagcgtttgatgaaatacttgagggaatgacaaatgctattcaacattcagttaaagaaggtattgaacttgatgaagcagtagggattatgacgggtcaagttgtctataaatatgaggaggagcaggaagatgaaaaaatttaa

SEQ ID NO: 407416 - DNA, 885 bp, Staphylococcus aureus
atgactggttggataaaacttcatagaaaactattagattcgcctatttttcagaacgaaaagttattcaaagtatttgcatattgtcttatgaaggctagtcataaggatcatacacagcttgttggcagacgagttgttgaattagaaaaaggtcaatttgtgttcgggagaaagcgagcaagcgaagagttgcgtctcaaagaatccacagtaagagactacataaagcttttagaaaaccttggaactatcgtcgtaaagtccgacaacaaattttctgttataaccgttgtcaattgggcgatttatcaaagtatggaagaaaattccgacagcaaaaacgacaacaaatcaacaacaaatcaacaacaaatggacaacaaatcaacaacaaatcaacaacaaatcaacacaaacaagaatgtaaagaatggggataatgtaaagaatggtgagaatgagaagaagaaggtaaccgccttcgacttcttccaagataacggattcggtttcataactccttacaatttagacgatttaaattactatcttgattcatttgaaaatgattcagatgaaatagttaccgcatcacttaaaatcgctaaagacagaaacaaggttacttggggatatgctaaaagcattttgaatacttggcttaatgcaaacttgaaatctattgaacaagtacgtgcatttgaaaagcaacaacttgaaagcaaaaaacaaaattataaacctttcgttaaacaatcaaaagaaaaaacacccaaatggctcacagacagcacgagagaaacgaaaacgccggaagtagatgaaaaccttgagaaagacagagaagcttttattaagcgtctaaatagcaaatgggagtga

SEQ ID NO: 407417 - DNA, 219 bp, Staphylococcus aureus
atggatgcatttgataaatactatctatttgatcatgacggcaacaaaatgttttcagttacaccacattttaaagatggacggcatttagttgttggattaaaacatacaaaattcaatggtcgacgttggtacttagatgattatgaattaaaaacacttattgataatgaacaaatggagttaggacaccaaacaagcttatttgaatatatatga

SEQ ID NO: 407418 - DNA, 552 bp, Staphylococcus aureus
atgaatgttaaacgaatatgggaaagtaacacacagtgctaccaaatgcttaatttaggcaagtatcaaggtgtttcagttagcgcacttaataagatacttaaaggtaagggaacattgaataatcaaggtaaagcgttcgcagaagcttgtaaaaaacacaacattaatgaaatttatttaatcgcgcatgctttcttagaaagtggatatggaacaagtaacttcgctaacggaaaagatggagtatacaactacttcggcattggcgcttacgacaacaatcctaactacgcaatgacgtttgcaaagaataaaggttggacatctccagcaaaagcaatcatgggcggtgctagcttcgtaagaaaggattacatcaataaaggtcaaaacacattgtaccgaattagatggaatcctaagaatccagctacccaccaatacgctactgctatagagtggtgccaacatcaagcaagtacaatcgctaagttatataaacaaatcggcttaaaaggtatctacttcacaagggataaatataaataa

SEQ ID NO: 407419 - DNA, 543 bp, Staphylococcus aureus
atgacccgtaaatcaatcgcgattgatatggatgaagtattggcagatacattaggagaaatcattgatgctgtcaattttagagcggatttaggtattaaaatggaagctttgaatggtcaaaaacttaaacatgttattcctgaacatgatggattaattacagaagtattgagagaaccaggcttcttcagacatcttaaagtgatgccgtatgcacaagaagttgtgaaaaaattaactgaacattatgatgtatatattgctacagcagcaatggatgtaccaacatcatttagtgataaatatgaatggttactagagttctttccatttttagatcctcagcattttgttttttgtggtagaaaaaacatcgttaaagctgattatttaatagatgacaatcctagacagcttgaaatttttactggtacaccgattatgtttacagcagtgcataatattaatgatgatcgatttgaacgcgtaaatagctggaaagatgtagaacagtattttttagataatattgagaaataa

SEQ ID NO: 407420 - DNA, 345 bp, Staphylococcus aureus
atgatctgcggttgtttagatgccgagccattattagctgttggtgatgagtctcttacattcgctatatcagcgtttttattatctaccataacttttattctagattttgttactgttggtttagttatagaatttaataatttttctctgtttttaaatatattaaataatgccttttctaatgcttcgtatttatctttagggggaacaccgttgtcaatcatattccaattaacatgttccaacatcgaacgccaaatgctgtcgtctacttttaaattttcaatacttagaggtatctcatatttggccatcatatctacagctacaaccattgcgtga

SEQ ID NO: 407421 - DNA, 450 bp, Staphylococcus aureus
atgatgccgaaatatcgagtgtgggacaaatatacaggaagaatacacgatgttgtaggattcgacttcattgagactgaagttcactatgaaaactacgcggaagcagaagctttaatacatgcaagagattttaaagatgtagaacttatgcaaagtacaggacttaaagacaaaaacaacaacgaaatatatgcgggagatatagttgagtttgaagatgaaatattagagatgccagacgatgaatctgtaataggaacaattaatagagcagtaatatctattgatgttgtaaatggtattcaattaaaagattttatgtttgagggcgcagtctccgaaaatgattactttgagtatatagacataaaatccttccttagatatgactgtgaggttaaaggcaacatatttgaatcatcacatttattggaggtaacagaatga

SEQ ID NO: 407422 - DNA, 243 bp, Staphylococcus aureus
atgacagataacgcacgcaaagaatacctaaatcaattctttggatttaagagatatctgtatcaggataacgaacgagtggcacatattcatgtagtaaacggcacttattactttcatgggcatatcgtgccaggttggcaaagcgttaaaaagacatttgatactgctgaagagctcgaaatatatataaagcaacatggtttggaatacgaggaacagaagcaactaactttattttag

SEQ ID NO: 407423 - DNA, 147 bp, Staphylococcus aureus
atgaaaatgtacttaacttatatttgcttagtttcgttgttaacaattttattactagcaatatctaacatgtatgttgcttttagtgtgtacggcatgatggcaacttatggatttaatttaacaggaggattagaaaatgaataa

SEQ ID NO: 407424 - DNA, 210 bp, Staphylococcus aureus
atgaataataaacaaaaagaagtaatagaacacgtggtttatcaacttgagttaagtatcatgaataattttgaaagttatgaacacacggaatatgttgatggtattgaagtggtttcagagatcagtcgtgaaaagcacttagaattgataatgaaatggtgcgcacaagaattaaagaataattttcaattagaaaaaggagaataa

SEQ ID NO: 407425 - DNA, 300 bp, Staphylococcus aureus
atgtttggatttaccaaacgacatgaacaagattggcgtttaacgcgattagaagaaaatgataagactatgtttgaaaaattcgacagaatagaagatagtcttagagcgcaagaaaagatttatgacaaattagatagaaattttgaagaattaaagcgcgacaaggtagaagatgaaaagaataaagaaaagaatgccaagaatattagagacataaaaatgtggattctcggtttgatagggactatcttcagtacgattgccatagctttactaagaactatttttggtatttaa

SEQ ID NO: 407426 - DNA, 147 bp, Staphylococcus aureus
atgaacactaaaattttaactggaatgactggaagttctttagaacgaaaaatcaataattttattaatgataaccaaatcgaagtcattgatattaagttttcaagttctgtattttattttggggtaatgattatttataaataa

SEQ ID NO: 407427 - DNA, 189 bp, Staphylococcus aureus
atgttaagttatggtggattacttaaagaaaagcataaaattttaaacttagacgatgccgaagatggtaatttgattaatacaagtgatgaagataaaacgacagacgaagaagaaaaagcacattcgattacagcaatttggaatttcgaaaagcaaaattattatttaaaaaatttaaggagttaa

SEQ ID NO: 407428 - DNA, 195 bp, Staphylococcus aureus
atggaagatcaaaacaaaaaagtcatttattactactatgacgaagcaggtaatagacaactattatcaattggagatttgaatctctatttattaaaagatattaaatcaagatttggtttatataaaaaacaaatccctgatttagataatctgttcgttcaaatagacggtgttgaatttaaagtactataa

SEQ ID NO: 407429 - DNA, 390 bp, Staphylococcus aureus
gtgttgactgagtataagaaagaaaaagagcaaaacttacttttacaacaagaaattggagagctaaaacccaaagcagactatgtagatgaaatcttaaagtcaactggaacattagctacaactcaaatcgcggcagactacggtatatcagcacaaaagttaaacaaactactacacgaagctagattacaacgaaaagtgaataaacagtgggtgctttactcagaacacatgggcaagagttacacagaatcagacactataccaattgtacgctctgacggtagagaagacacagttttacaaactagatggacacaaaaaggtagattgaaaatacatgaaatcatgactgaattcggttatgaagctaacgtaactgcttaa

SEQ ID NO: 407430 - DNA, 333 bp, Staphylococcus aureus
atgatgaattgctttaaattcagttttatcaatgaaaataaagagcttatcctcgatagcgaatcaaatattttcttttcactaaaagattgcgctaacaaattagatttagttgttaaatttattcattgggttagcagatcttgtattgaaaatatgtctcctgaaagaacacaggtttttttacaaacaggtttcgaactttatattggcaaacatttaacaaaaaaggattacgaatacatgtatacatgctttggtaacggattaaatagtgatggcgcatatagttatgccagaagattattaaatattccggaggggatacaatga

SEQ ID NO: 407431 - DNA, 471 bp, Staphylococcus aureus
atgctaaacagaacaatattagttggtcgtttaactagagacccagaattaagaaccactcaaagtggtgtaaatgtagcatcattcacattagcagttaaccgcacatttacgaatgcacaaggagagcgcgaggcagactttattaatatcatcgtatttaaaaaacaagcagagaacgttaataaatacctatctaaaggatcgttggcgggcgtagatggtaggttacaaacgcggaactatgaaaataaggaaggtcaacgtgtatacgttacggaagttgttgccgatagtattcaatttttagaaccaaagaacacaaatgactctcaacaagatgtatatcaacaacaagtacaacaaacacgtgggcaatcgcaatatccatataacaaaccagtaaaagataatccgtttgcaaatgctaatggtccgattgaaatagatgacgatgatttaccattctaa

SEQ ID NO: 407432 - DNA, 471 bp, Staphylococcus aureus
atgctaaatagagttgtattagtaggtcgtttaacgaaagatccggaatacagaaccactccttcaggtgtgagtgtagcgacattcactcttgcagtaaatcgtacgttcacgaatgctcaaggggagcgcgaagcagattttgttaactgtgttgtttttagaagacaagcagataatgtaaataactatttatctaaaggtagtttagctggtgtagatggtcgcttacaatcccgtaattatgaaaatcaagaaggtcgtcgtgtgtttgttactgaagttgtgtgtgatagcgttcaatttttagaaccaaagaacacaaatgactctcaacaagatttatatcaacaacaagtacaacaaacacgtggacaatcgcaatattcaaataacaaaccagtaaaagataatccgttcgcaaatgcgaatgatcctattgaaatagatgacgatgatttaccattctaa

SEQ ID NO: 407433 - DNA, 189 bp, Staphylococcus aureus
ttgaataaagacacagtgttagataaaggttacgttatagcaactattttaaatgttttctttttacttggattaatttttatatctcattttgaaaatttatatatattaattctgtatgttattttgatgggaataaatgctatttatttggttgttaaggttttgaatttcaaaaagaataattag

SEQ ID NO: 407434 - DNA, 366 bp, Staphylococcus aureus
atgcttaaattcgaacgtgtcattgacattttcaataagaaaaacaacggagcatggaatttctgtccgcaaaacgccggttattgggaacatatccctaagaatattacaaaattatcagatttaaaaatcgttggtttagatttctatatcactactgaagaatcaaaacgatttactgattttcctaaagactttaaaggtattgcaggttggatattagaagtaaaatcgaatacaccaggtaacacaacacaagtattaagacgtaataacttcccgtctgcacatcaatttttagttagaaactttggtactggtggcgttggtaaatggagtttattcgagggaaaggtggttgaataa

SEQ ID NO: 407435 - DNA, 369 bp, Staphylococcus aureus
atggcgagaaaagcaaggattgtaacaataaatgataaaccttataggttcagtaaatttgaaatggaattaatagaaagtcacggtataaccgctggaatggtttctaagagagtaaaagacggttgggaactacatgaagcaatggacgcaccagaaggtacgcgtttaagcgagtacagagaaaagaaaacaatagaaagactggaacaagctagactcgaacgcaaattggaaagaaagcgaaagagagaggctgagctaagaagaaagaagccacatttgtttaatgtaccacagaaacatccaagaggacgttatgcgtgctacctgttggaaaacgacatattcgtgaaagttaagaagtag

SEQ ID NO: 407436 - DNA, 330 bp, Staphylococcus aureus
ttgcaacagattggctcaaaagttagtacagaagattttgagagattcaagcaatcattaaacagtttgtatgcagataaaaatcatagtcatacaatcaaacagattgaaggattagaaaatgctttatcaaaaaaatcagacataaatcacagtcatgatgaacgttatcttttatcatcaaatgcttttacaaaagaggaagcagataaactttatcaacctatcggttcttcgcagccgtcactgaatatttggacaggcagtgaaacagaatataattatttgtatcaaaaagaccctaatacactttacttaattaaggggtga

SEQ ID NO: 407437 - DNA, 201 bp, Staphylococcus aureus
atgccaaagaaaacggtaacgattgatgtagatgaaaacttattagtagtagctagtaatgaaatatcagaactattatatgaatatgacagtgagttaatgtcagctgatgaagatggcgataatagagatatcgaagaaaaaagagacgcattaaaacaagctatacaaattatcgataaattaacatggggtgtttag

SEQ ID NO: 407438 - DNA, 189 bp, Staphylococcus aureus
gtgacgcaatacttagtcacaacattcaaagattcaacaggacgaccacatgaacatattactgtggctagagataatcagacgtttacagttattgaggcagagagtaaagaagaagctgagcgcaaatacgaggcacaagttaagataaggagagatggagatgccaaagaaaacggtaacgattga

SEQ ID NO: 407439 - DNA, 222 bp, Staphylococcus aureus
atgatatttgatagacatgctaacttaaagtatagatatggaaatagaaagttttggtgtaaaggattttatgtggatacagtaggtagaaataaaaaagtgattgaaaattatattcgtaatcaattacaagaggatatcgttgcagaccaaatctcaatggaagaatatttagatcctttcactggagagaaaaataaaaaaagaaagaaaaaagagtaa

SEQ ID NO: 407440 - DNA, 174 bp, Staphylococcus aureus
atgaagatgatttatccaacttttaaagacattaaaactttttatgtttggggttactataaaaacgagcaaattaagtggtacgtagacaagggtttaatcgataaagaagaatacgctttaatcactggagaaaaatatccagaaacaaaagatgaaaagtcacaggtgtaa

SEQ ID NO: 407441 - DNA, 135 bp, Staphylococcus aureus
atggttgcgagtatgcaaatgcaggtggcacaagtaaacgtattaacaatggaattagctcaacaaaacgctatgttaacacaacagttgactgaactgaaaactaacaaaacaagtactgagggggacgtttaa

SEQ ID NO: 407442 - DNA, 147 bp, Staphylococcus aureus; identical to SEQ ID NO: 407426

SEQ ID NO: 407443 - DNA, 1125 bp, Staphylococcus aureus
atgaacttcaataaattaaagtttggtgcgactattggcattattggtggtggtcagcttggaaagatgatggcacaatcagctcaaaaaatgggttataaagtggctgtattggatcctactgaagattgtccatgtagatacgttgcacacgaatttatacaagccaagtatgacgatgaaaaggcactcaatcaattaggacaaaaatgtgatgtgattacttatgaatttgaaaacatttcagcccaacaattaaaactattatgtgaaaagtacaatattccgcaaggttaccaagctatacagttattacaagaccgcttaactgaaaaagaaacattaaaaagtgctggtaccaaagttgtcccattcatttcagtaaaagaatctacagatattgacaaagcaattgaaacattaggatatccttttattgtaaaaactagatttggtggctacgatggcaaaggtcaagttttaattaacaacgaaaaagacttacaagaaggttttaaattaattgaaactagtgaatgcgtagctgaaaaatatttgaatatcaagaaagaagtatcacttactgttacaagaggagacaacaatcaaatcacttatttcccattacaagaaaatgagcatagaaatcaaatacttttcaaaacaattgttccagcgagaatagataaaacagctgaggcgaaagagcaagttaataaaattatccaatcgattcatttcattggaacatttacagttgaattttttatagatagtaacaaccaattgtatgtgaacgagattgcaccaaggcctcacaattccggacattattcaattgaagcgtgtgattattcacaatttgatactcatattttagcagttaccggacaatcattaccaaattcaattgaattattaaagcctgcagtcatgatgaacttactaggtaaagacttagatttattggaaaatgaatttaatgaacatccagagtggcacttacatatttatggtaagtctgagcgtaaagataacagaaaaatgggtcatatgactgtactaacgaatgatgtaaaccaaactgaacaagatatgtacgctaaatttgaggggagtaattaa

SEQ ID NO: 407444 - DNA, 1140 bp, Staphylococcus aureus
atgaaaagcgttggcttaatcacagaatataatccctttcataatgggcatcaatatcatattaatcaatctaaaaaacttacaaatgctgacgttactattgcaataatgagtggtaactttgtcatgcgtggcgaaccagcaatctataataagtttactcgtgcaaaaatggcattatcaacagcagatttagttatcgaactaccagcaactgccagtttatcatctggcgatcattttgccgaactagcagttaaagtcgcagattatatgagtgtcgatacaattgcatttggtagtgaaaataatgatatcaaaacattaaagcaattagctcacagcattaatgaaattgaacaatccgaatccttttcacaaaaagtaaaagaaggtaaaagctaccctcgtatcattagcgaattattagggcatcatgaagcactagcaagtcctaacaacatacttggtattagttatctgaaagcaattgctaaacatgctaaaaacatcaatgcaatttctattaaacgagaaaatgctcaacatcatgattcattaattcaacaccatcagtttgcaagtggtacatctattagaacatcaatcattagtcaagatgatcattggcatcatgtggtacctaaagatattcaacacctgtacgtaacacctcatataacattaaatcaaatattcccatatttgaaatatcaaatcatagctatgactacagagtcattaaagaatatttatactgttactgaaggttttgaaaatcgtttaaaatctaacattaatgaagcaactgattttcatcattttgtaaaatcactaaaaacaaagcgttatacatatacgcatattcaaagactgttaatgaatgtattattaaacattaaacttacagatgttacgagaaacattcacgcagttaaagtattagcaatgaacgaccgtggcagacaatatttaaagcatttaaaaacagcgttcccagaaagacaatatataaccaatattaacaaaagcaatgcacattacttcacaaatgaaatcaaagcaacacatatatacaatgcaataagcgggcaacaacaaacagatttcaacacgcctgtcatacagcaatatcgttaa

SEQ ID NO: 407445 - DNA, 405 bp, Staphylococcus aureus
atgaaaaaaaatattacaaaagtaattattgcatctacagtcatcgctacaggtcttctaactcattcaaatgatgctaaagctttctttagttatgaatggaaaggtttagaaatagctaaaaaattagcagatgaagctaaaaaagatgatgaacgtattgataagttaatgaaagaagctgataaaaatcaaaaaccttacaaaggtgaaactgttaatgatctttatctcatcgtcaaaaaattaagccaaggcgatgtgaagaaagcagtcgttaaaatcaaagatggtggttctaacggttattatacatttgatcttactcacccattagaaaagaatagaaaaaatattaaagtagtcgctgacggcgaaatcgagtcaattacttgggatcaataa

SEQ ID NO: 407446 - DNA, 507 bp, Staphylococcus aureus
atgataattaaaattttaacaattctatttctactttgtatattgagttatttggttacaaacagaaagaagcctttcttgtttttaaaaacactcttgatgggtgtcgtattcatattcattggatatatttcgttagctatctctgcagttatcatttatggaatagctcaatttattaccattgattttggtagctttttcttaatggggattattttaattttgatttcaagtatattccaattatttatagttagattactgtttcgaaaaaagaatgtcgatttgacagaggttgtcgttttagaacatttaattcaatggttcttagtttactttgcgatatatcaagcagtaaatgaaaaaatggatattaatgatattaatatcgacaatttccaatctgtattttttgacgtatctaatttgaacttagttatactgccaacgttgattattagctgggttacaatatttaactatagaatgagaagttacaaataa

SEQ ID NO: 407447 - DNA, 498 bp, Staphylococcus aureus
atgaaaaataaattaatagcaaaatcattattaggtatagcggtaattggtatgactgcaacaacacttgcatcaactgctgatgcgagcgaaggatacggtccaagagaaaagaaaccagtgagtattaatcacaatatcgtagagtacaatgatggtacttttaagtatcaatcaagaccaaaatttaatacaacacctcaatatattaagtttagacatgattataacattgtggaatataatgacggtacatttggatatggtccacgtccgcattttaataaaccagctgaaaaatctgatgcgacaataaaaaaagaacaaaaattgattcaagcccaaaatctagtgaaagaatttgaaaagacccatactgtaagcgcacatagaaaagcacaaaaggcagtcaacctagtatcatttgaatacaatgttaagaaaatgatattgcaagagcgaattgatcaagtattaaagcaaggattagtgagataa

SEQ ID NO: 407448 - DNA, 156 bp, Staphylococcus aureus
atgaaatttaaaaaatatatagtagcaggaacattagcagtactattatcaacaacagcagtatcaacattagatgggaacaaagcagatgcaagtagtcatgacaattatttaactcaaagtaaatatcatgataaaaaattgctgaagaattga

SEQ ID NO: 407449 - DNA, 198 bp, Staphylococcus aureus
ttgaaatcattacttagacaatcgaacgtatatgacttggctgcaggtagcttaaatcgatattacaaacgtacgattatgatgaatgaatatagagcaaaagcagcactaaagaaaaatgatttcaaatcaatggctgaagctaaagtagcattagaaaatatttacaaagaaattgatgaaattataaatagataa

SEQ ID NO: 407450 - DNA, 186 bp, Staphylococcus aureus
atgaataaacatataaataaaaagaccacaaagcatcttgaagattataaaaaggttcaacaaagaaattcggaggaaacaaatagaggttgtttaaaaagcgccgccatgcttattgtcttatttctattcattatatttggcatcgtggcatgttcgacacacgttaactttttcttccaataa

SEQ ID NO: 407451 - DNA, 234 bp, Staphylococcus aureus
atggtttttaaagattgggaaattaatgttgtttactcagggaaacatgaagtagttacaaacgaaaatagtttatttgttattgatgaagattatgatgtcgcaatcgcaatcaattatttagataataaattaaaagttagtcatgttaactatggctctgaatttacaattgacgcatctaacaaagtacttgagttgatgattcataatccaaatattgacgataattaa

SEQ ID NO: 407452 - DNA, 147 bp, Staphylococcus aureus
atgaaactattttatatcgcatttctaattattttatggctgaatatatttttaggaaatgaagtcattcatacactgactgttttaataacaacattgtatatcgttaatagaagaaagagggttaaaaatgacacagttgaatga

SEQ ID NO: 407453 - DNA, 726 bp, Staphylococcus aureus
atgaaaaacaacctcacaaaaaaaatcattttatcaatagcattgactatgataggcacagctacaattcaatccccacactcacctattagtatgtcatctaatgcaaaagcttattatattgaccaagaggaaacaaatgtaagtgaattgactaaatattacacacaacgccatttaactttttcaaataaatggttgtggcaaaaggaaaatggtacaatccatgcaacattgttacagttatcatggtttagtcatattcaagtgttcggtcctgaaagttggggtaatattaatcaattaagaaataaatatgtagatatttttgctttaaaagattatgaaacttggcacacttatatgttagctcaagaaacatttactggtggtgttacaccagcagcgaaacctagcgataaacattataaattgaacctaacatataaagataaatcaggaacatttattggcgaacatccattttacacaggtaataaacccgtattaactttaaaagaagttgatttccgaatccgtcaaacattaattaaaaacaaaaaattatatcatggtaattataataaaggccacattaagattacaggtggcagcaacaactatacaatagatttaaacaaaagattaaaatcaactgatgcaaatagatatgttaaaaaccctcaaactgcacacatcgaaatcctccttgaaaaatctaactaa

SEQ ID NO: 407454 - DNA, 1002 bp, Staphylococcus aureus
atgaaaaatttacgaaacagaagttttttaactttattagacttttcacgacaagaggtagaattcttattaacactctccgaggatttaaaacgtgctaaatatattggcactgaaaagcctatgttaaaaaataaaaatattgcactgttatttgaaaaagattctacaagaacgcgatgtgcatttgaagttgcagcgcatgatcaaggtgctaatgtaacttatttaggcccaactggatcacaaatgggtaaaaaagaaacaactaaagatactgcacgtgtgcttggtggaatgtatgatggcattgaataccgtggtttttcacaaagaacagtagaaactttagctgaatattcaggcgtaccagtgtggaatggtttaactgatgaagatcatcctactcaagttcttgctgatttcttaacagcaaaagaagttttaaaaaaagattatgcagatattaactttacatatgttggagatggacgtaataacgttgcaaatgcattaatgcaaggtgctgccattatgggtatgaacttccatttagtttgtccaaaagaattaaatccaacagatgaattattaaatcgctgtaaaaatattgccgctgaaaatggtggcaacatattaatcacagatgatattgaccaaggtgtaaagggttcggatgtaatttacactgacgtttgggtatcaatgggtgaacctgatgaagtatggaaagaacgacttgaattattgaaaccttatcaagtaaataaagaaatgatggataaaactggtaatccaaatgttatttttgagcattgcttaccatctttccacaatgctgatacgaaaattggacaacaaatttttgaaaaatatggtattcgagaaatggaagttacagatgaagtattcgaaagtaaagcttcagttgtattccaagaagctgagaacagaatgcatacaatcaaagcagtcatggttgctacattgggtgaattttaa

SEQ ID NO: 407455 - DNA, 798 bp, Staphylococcus aureus
atgtatcataacagtaacgcaaactttgtaaatggtatcactttaaatgtgagagataagaatgaattaaagccattttatgaggacgtattaggattaaatattataaatgagacattaacatcgatacaatatgaagtaggtcaaaataatcatgtcattacacttgttgaattacaaaatggacgtgaacctttaatgtcagaagcgggactgtttcatatcgcaattaaactacctcaaattagtgatttagctaatttgctaattcatttaagcgaatatgatattccagttaacggaggtatacagcctgcttcgttatcattattttttgaagacccggaaggaaacggttttaaattttatgttgataaagacgaagcgcaatggacgaggcaaaatgatttagtaaaaattgatattagaccattaaatgtaccgagattagtgagtcatgcaacaaaattgttatggttaggtattccagatgacgctattataggtgcattgcatattaagacaattcatttatcagaggtaaaagactactacctcgattattttggattagagcaatcggcatatatggatgattattcaatatttttagcatcgaatggctattatcaacatttggccatgaatgattgggtatcagcaacgaaacgtgtagaaaattttgatacgtatggattagcaattgttgactttcattatcctgaaacaacacatttaaatttacaaggtccggatggtatctattatcgatttaatcatatcgaagttgaagattag

SEQ ID NO: 407456 - DNA, 882 bp, Staphylococcus aureus
atgaatcatttattatcaatggaacatttatctacagatcaaatatacaaacttatccaaaaagcaagtcaatttaaatctggtgaacgtcaactaccaaactttgaagggaaatatgtcgcaaatttattctttgaaaattctactcgaacaaaatgtagttttgaaatggcagaacttaagctagggttaaaaacgattagctttgaaacatcaacatcatctgtttcaaaaggtgaatctttatatgacacatgtaaaactttagaaagtattggctgtgatttattagtcattagacatccgtataataactactatgaaaaattagcgaatattaacatcccaattgcgaatgctggtgatggtagtggacaacatccaacacaaagtttgcttgatttaatgacgatatatgaagaatatggatattttgaaggcttgaatgtattgatttgtggagacattaaaaattcacgtgtcgcacgtagtaattaccatagtttaaaagcattaggtgcaaacgtaatgtttaatagcccaaatgcttggattgatgattctttagaagcaccttatgtaaatatagatgatgttattgaaacagtagatatagttatgttattaagaattcaacatgaaagacatgggcttgcagaagaaactagatttgcagcagatgattatcatcaaaagcatggcttaaatgaagtacgctataacaaattacaagaacatgcaattgttatgcatccggcacctgtgaatagaggagtagaaatacaaagcgatttagtagaagcttcaaaatcaagaatttttaagcaaatggaaaatggcgtttacttaagaatggcagtcattgatgaattattaaaatag

SEQ ID NO: 407457 - DNA, 186 bp, Staphylococcus aureus
atgaaaaagacactgggatgtttacttttaattatgcttttagtcgtagcaggttgttcttttggtgggaatcataaattatcatcaaagaaatcagaagaatcaaaacaagaaactgtaaaaaaagaatcggaagaagagaaggacccaaaagttgcacactataaaaaaataaggaaaaaatag

SEQ ID NO: 407458 - DNA, 723 bp, Staphylococcus aureus
atgaatagcacaggtatgcaagggtggaaagattataagtctttaatgaatcaagtgaagttagcagattataattttacaaaagagtctaaaggtgcttcaatggaagatgttgataagttttttaaaaataaaaaaggtgtaaaacgtaaagaagttactacttatgatggtttgaaacaagttaactattggtatgtagataaaagtggtaaaaaaattggtggttcagacacacctgttttttatgctgaaattttaacgaaatataaagatggaaagttgatttatgcatcagttgaacctggatcatattcatattcaaataagaatgcggtaaatctagataaagttgaagaacttgatgatttaagtatgttctctaatctgaaagatcctaaaccagtaccatatagtgttgctcaaatggaaatatcaagcgtcccagttacaagtgtatctttcgtaacaaagggagggaatcataaagatactaatccagagaaagaacaagttgatatgccacaactagcttatttaactgtttcaccacagctataccatgataaagagcatccagatccgcatataattggattagttgccttgccatacttaaatgcatctagagattttgggaacgcgcattactctgttttaaataatctttcaaaagaaatgaaagagaaattagcgagtcgttcattggaccttaataaatag

SEQ ID NO: 407459 - DNA, 1308 bp, Staphylococcus aureus
atgatagaaaacgtgagaagtcttgcttttgacacgattcaagatatattaaatgaaggtgcgtatagtaacttgcgtatcaatgaagtgttgtcagaaaatgaattaaatgcaatggataaagctttatttacagaaattgtctacggaaccgttaaaagaaaatatacgttagatttttatttaaagccttttgtgaaaacaaagattaagccatgggttaggcaattattatggatgagtatttatcaatatgtttatttagataaagttccaaatcacgccatcattaatgaagcagttgaaatagcaaaagaacgaggtggctatcacaacggaaatgtcgtaaatggcattttacgaacaatgatgcgtagtgacttacctgattttaataaaattgcagatcctaaaaaaagaatggcaatcgagtatagtatgccgaagtggattatagatcattgggcaacacattatggtctcgaaggaactgaaacaattttacagtcatttttagaaacgacatcaacaactgtgcgtgccaacctgacgcgagcatcattagatgatattattgaaaagttgcaagacgaaggttatgacgttgaaaaagatcatgacttaccttattgtctccatataggaggacaaccaattattcattctcgttcatttaaagatggattcgtttcaattcaagataaaagctcaatgtttgttgcacacattatgaatgtagaccgacatgatcacgtattagatgcatgtagtgcacctggcggtaaggcttgtcacattgctgaagttttaatgccagaagggcaagttgacgcttcagatatacatgatcacaaaatagacttaattaattttaatataaaaaaattacgattaacaaatattaaagcttttcaacatgatgcgacaaaaccttatgataaaacatacgataagatacttgttgatgcaccatgtagcggattaggtgttatgagacacaagccagagattaaatatactcaaagcaaacaacatattgagtcactagttgatttacagcttgaaatattggaaaacgtaaaaaacaatgtaaaaataggtggcgaaatcgtctattcaacatgtacaatagagcaactagaaaatgaaaacgtgatttatacgtttttgaaaaataataaaaacttcgaatttgaaccgtttcaacatccgataactggagagttggtcaaaacgttacaaatcatgccgcaagactttaattcagatggattctttatcactaagataaaaagaaaggacaattag

SEQ ID NO: 407460 - DNA, 498 bp, Staphylococcus aureus
ttgactgcaaatgccgactcaaaagaacaagcacaatcattgattcaacctgttaagcaagaaattctttatcgtattggagaatattattatggttcagatgacacattaattgagcaagctgtaataaagaaaattcatgaaccttttgtaatatatgatggtattactaatggtgctttatatcatcgattgaaagaagtggatttaaacgatgttctaaagggtatgattaatcacaatgaaaactttgttgatattaataaacctattgagcagcaattaaaagatgcagtgcaatttgttaataaattatttaatgtgtcatcagcaattattctattagagtatgatggtgtagtccatataggctatgataataacttagaatttaaaactgaacaatttaaaatgtctaaatctagaaatttattaaagaacagaagtcaaaattatgcgctcataagattattaaattggcttagaactacaaattaa

SEQ ID NO: 407461 - DNA, 1239 bp, Staphylococcus aureus
atggctcagcaacaaattcatgatactaaaaataaactagaaaaagctgtcttagtcggtgtacatgctcaagatgataagcaatttaattttgagtcaacgatggaagaattatcatcattatcagaaacttgccaacttgaagtgttgggtcaaattactcaaaacagagatcgtgtagatcgaaaatattatgttggtaaaggtaaaattgaagaaattcaagcatttattgagttcaaagatattgatgtagtcatcacaaatgatgaattaacgactgctcaatccaaatcactaaatgaagctttaggtgtaaaaatcattgatagaacccagttgattcttgaaatatttgcattaagagcaagaagtaaagaaggtaaattgcaagtagagctagcacaacttgattatttattacctagattccaaggccatggtaaaagtctttctcgtttaggtggcggtattggaactagaggccctggtgaaacgaagttagagatggatcgtagacatattcgaactcgtatgaatgaaattaaacatcaattgcgaacggtagaagaacatcgcgaaagatatcgaaataaaagaaatcaaaatcaggtgtttcaagtagctttagttggttatacaaatgctggtaaatcatcatggtttaatgttttagcaaatgaagagacgtatgaaaaagatcaattatttgcaacgttagatcctaaaacacgacaaattcaaataaatgatggatttaatttaattatttcagatactgttggttttatacagaaactacctacgacgctaattgcagcttttaaatcaactttagaagaggctaaaggtgcagatttattagtacatgtcgtagatagtagccatcctgaataccgtacgcagtatgacacagttaatgatttaatcaaacaattagatatgagtcatatttctcaaatagttatttttaataaaaaggacttatgtgatcatgcatcaaatcgtccagcaagtgatttgcctaatgtttttgtttcatctaaaaatgatggtgataaattacttgttaagactttatttattgatgaaatcaaaaggcaattaacttattatgatgaggcaattgcgacgaataatgcagatcgattatattttctaaaacaacatacattagtgactgaacttaaatatgatgaaattgaaaatgtttatcgtataaaagggtttaaaaaataa

SEQ ID NO: 407462 - DNA, 708 bp, Staphylococcus aureus
atggcatctataagaaaacgaggtaataaatatcaagctagagttaattattatgatttatatacacacgagcgaaaaccaataactaaaacattcaatactaaatcagaggctaggaaatgggctgctagtgtagaagcagacacagaaaactttgtattacttgataataatattacactagaagcatggattgaactttatttagctacttttagattaaacaatattgcatatagcacatatcagaatgaaatatatacaaaaagaaggataataaagttttttaaaaacgtttatattaaagatataacaccgataatgtatcaacaatttctaaattggatgaaatcagaaaattattctagaagtacagcaaaacaaacacgccaattgctaaataacgttatagaaaaagctgttttacaaggcgcattatctaataatccatgtctaatttgtaatattcctgattacaaaccgccaaagtcaatagaatggttagaagctcatgaagttaaagaatttttacaattaattaaaaagagaaacatatatcaatatttcgtttgttatacagcgatagagcttggttgtagagttggagaagccttggctttacgtatttctgattttgatttaaaaaatcaaactgtgcacatatataaatcatatgaccaaaaaagagctaaagcgaaattgctctag

SEQ ID NO: 407463 - DNA, 696 bp, Staphylococcus aureus
atgcaacaagaatcaacatcatggtacaaacaagagtggtgtattgttttatcacttttattcctatttcctttaggcttatttttaatgtggaaattcagcaaatggccgtctttagttaggacaattattactgtagttatagtggttattgctttagctagtataacttatattggacaagttcagatgattaaaccttatgtagcgaatttagattcaagtagtgaaagcgataaatctgacagtatcactgataaagatgaagagaatcacgaaaaagcaaaagaacaaacaaatggtaattatcaagaatggtttgacacgattacaaaaggaacatctgatagttcaactacaagctctagttctagcatagatgacagtataacacgtgaccaaaaagcagctttaaaaaaagctgagttttattcagaatacttacattcatcaaagaaaaacatatatcatcaattaacatcagaatacggaaacaaattttctaaagatgatgcgcaatacgcaatagatcatttaaaagctgactataataaaaacgcattagaaagtgctaaatcatatgccaaaagtttgaatatgtctactagagaaatttatgatcaattaatttcagaatacggaggacgatttacaccttcagaagcacaatacgcaatcgaccacttagacaaataa

SEQ ID NO: 407464 - DNA, 384 bp, Staphylococcus aureus
atgcatcaatacaaggagttgatggatgatataaagattaaatatattgagatgccggataaattagaatgtctgattataggtaatgatttatatattaataagaatttatcatcatctacatcaccgagtgaaattaaagaacccatgtctttgtatcactgtcattgtcatgattttgaattattaatccccttaaatcaaattaaacaagcgatatatctacatgactgcaaaactatacctcagttaagcgcttattttaaagtgcctgtaacagacatcttactaacaatatacttctataaagttaagtactcagatttacattttctcaatatgttcaaaaccgatgtgttaagtattcatcaagaaattatttag

SEQ ID NO: 407465 - DNA, 366 bp, Staphylococcus aureus
gtgaacagtttcaaagaaagattacgtgaagctataattgccaagaatatgtcacaatcagaactttcaagattaacaggtattggaagaaattcaataagtgattatcttaagggcaagtatgaagccaaacaagataaaatttacattattgccaaagttctaaatgttagtgaagcttggctattaggttatgatgtttcatctgaacgtcctactgatgaggaacgtcatttaaatcaaaatgaacaaatcatcgcagcacatataaaagatgatgtcacagatgaagagatgaaagaaattgtgaacttcatcgaatatattaaaagtaaaagaaatacaaattcaaatagcgataaataa

SEQ ID NO: 407466 - DNA, 282 bp, Staphylococcus aureus
atgaaaaatatatgtattgaaataaataatgattatttaaacggattagtacaaaagaaagttgatgaaatcttaagtacatacaagaggcaagttgcaactgtagatattaaagatttagtggagattacaggtttaagtaaagcaacgctaatacagaagatagtctatgaacctgaaattgtagcagtgacaagacgagtaggcactagagtgttatacctttatccgcaagtattagatgcttatcaaacgttaatcaatcgaattggaggacattaa

SEQ ID NO: 407467 - DNA, 174 bp, Staphylococcus aureus
atgagtaatagtcaattattcaaaaacgaaacagaacgagctgattgtatgaaaaaaattctaaatgatcaactgaaaataaaactagagaacgagaaagttatacaaattaaggatttaaaaagaattttaaaaacacataatcgacgactgagggaggatgcgaatgtctaa

SEQ ID NO: 407468 - DNA, 162 bp, Staphylococcus aureus
atgtctaacacatataaaagttacatcatagcagtaatgtgtataacaattttagcaatttgtttaatgccatttttgtacttcacaacagcatgggtaattgctgcaagtactggcattgcaatattcattttctatgatgagtatttttttagagaataa

SEQ ID NO: 407469 - DNA, 318 bp, Staphylococcus aureus
atgaaaaatgaatttaaaaacatgagcagacaagaattaagagatttattggctaaaaagaatggagaattgtttgaattagtgaatgaaatcaataaagaaactgaatttgacgttttacttttttcaactgtaggggttagtaatggacatactacatcatcgtcacattgtgcgcttggggatattgcaggtcttgctaatttattgaataacgaaaatgattaccacgatatcgcaaatgttatcgaaatgtataaattaaaaaaatttttaggtatagatgacgacaaggatgatgacaacaatgaagaatga

SEQ ID NO: 407470 - DNA, 267 bp, Staphylococcus aureus
atgaagaatgatgctaatgaaaagatgtttgttctatatcaacaattatttgatgagtttaagaaaacaaatgaaaactgcttgttggaaatcgaacagacatcaacctcacagattattattaattttttagattatcacgatagttataaaacaaataataagttgttacagatattagaagtatatccagagtcacatgaacggatgaagaactatattatatcggtaatgcgtgggcagatattagttaagaaaggtgtttag

SEQ ID NO: 407471 - DNA, 537 bp, Staphylococcus aureus
atgaatgaattacaagcacgagaactagaaacatttgaacaagatgaccggtttcaagtcacagatttaaatagcgctaactgggtttttaaaaagttagacgcaattacaacaaaagagaatgaagttaaggaactggcaaacagtgaaatcgaacgtataaatttatggcgcgataaagaaattgagaaattacaaagtaataaggaataccttcaaagtcttgtgattgagtatttcagaattgaaaaagagaaagataaaaaatttaagttaaatacgccatatggcaaagtaacctctcgaaaaggggcaaaagtgatacaagttagtaacgaaaacaaagttattgaacagcttgaacaacgtggactgaatgactatgtaaaattgacaaaaaaacttagtcaatcagagattaagaaagatttcaatgtaactgaaaatggcacgttgattgatgtgaatggcgagattttagagggcgttagaattatcgaaaaaccaacatcttacacagttaaggtgggagaatag

SEQ ID NO: 407472 - DNA, 780 bp, Staphylococcus aureus
atggctgaaaaaactattcaagacgtcgatattttaaggcaactaggtgtgaaagatatcagcaaacaaaatgctaataagttttataaattcgctatttacggaagattcgggactggtaaaactacatttttaaccaaagataataatgctttagtactagatataaacgaagatgggacaacggtaactgaggatggtgcagttgtacaaatcaaaaactatgagcattttaggacagtaattcaattgttaccaaaagttatagaacagtttagggaaaatggcaaacaaatcgatgttgtagtaatagagactattcagaagttgagagatattacgattgagaatgtcatgaaaggtaagattaaaaaaccgacatttaatgattggggcgagtgtgcttcgcgaattgtaagtatttatcgatatatttctaaattacaagaacagtaccaatttcatcttgctataagcgggcatgagggcatcaataaggataaagatgatgagggtagcactatcaatccaacaatcacgatagaggcacaagatcaaattagaaaagcaattattagccaatctgacgtgttagcaagaatgacaattgaagagaatgaacaagacggcgaaaaatcctatcaatatgtacttaacgcagaaccatcagatttatttgagactaagataagacatgctagcaatataacaatttcaagtaaaaaattcgttaatcctagtattaatgatgtagttcaagcaatcagaaatggaaactag

SEQ ID NO: 407473 - DNA, 549 bp, Staphylococcus aureus
atgaaaattagaggtagagcactatacattcaagaaactaatcaagaggcattcatgaaaggcggggagtttttaggagctggagaattcacagttaaagttgcaaatgtcgagtttaacgacagagaaaacagatacttcacaattatttttgaaaacaacgaaggtaaacaatacaaacacaaccaatttgtcccaccattccaacaagattttcaagaaaaacaatatatcgagttacttagtagattaggaattaaattgaacttacctgatttaacttttgacactaatcaattaattaacaaaatcggaactatagtgttgaaaaataagtttaacgaggaacaaggtaaatactttgtaagactttcatatgtaaaagtttggaataagggcgatgaagtagttaataaaccagaacctaaaactgatgagatgaaacaaatagaacagcaagtaaatgggaaacagacgccaatgagccagcaatccaatccattcgttaatgcacctatagaaattaatgacgatgatttaccgttctaa

SEQ ID NO: 407474 - DNA, 915 bp, Staphylococcus aureus
atggctggctggataaaaatacatcgtaaaattatagaccattggatttggacagattctaagagactaaaatggtggatggatttattactattaaccaatcattcagataaaaaggtaatgttaggtgggaaattagttgttttaaagcgtggttcttttcatacatcagaattaaaattatctgaacgatggaacgtatctagaaacacagttagaaattatttgaatgcgttagaaaaagacaccatgataaccactaaaaagacaaaaaacggaacaactataatagtgcataactacggtatttatcaagataatgatgattataaaaaacaacagactgaacaactaagtgaacaacagtgtgaacaaaagaatgaacaacagagtgaacaaaagaaagacaatagactgaacagaacactgaacaagactaaagaattaaagaatataaagaatgataagaatgtgaagaatatgaagaaggagaagaagaattataaagtcttcgacttctttcaagaaaatggatttggatttatcactcagtatattcttgaagacataaattattatctagatgctttttgtcaagattcggatgaaattttgattgctgcactgaagatagctaaagacagaaataaagttaattggggttacgctaaaagtattttaaattcttggttacaaatgaatttaagcaactacgatcaaattaaagcttatgaagctcaatataaagccacgaaaaaaatgcagaataagcaaaaacaaaattataagtctaaagaaaaaacgccaagttggttaaccaatcaaaatcaaaatacagctgtccaagttgatgaagaatttgaaaaagacagggctgaatttttaaaaaaattaaatgctcattggggtgattag

SEQ ID NO: 407475 - DNA, 291 bp, Staphylococcus aureus
gtgttaagactaaataatatttgtggcgatgcatcagcaaatcgacaatatacgcttagaaaaaataaaagtctgattaaacaatttttcgacagcaaacaatatttataccaagcagatagaaaagttgctcatgttcatgtagtgaatgacatatatcttattcacgggcatcacaaaacgatgtttaaaggcgtgaaaaagacattcaataataaattagaatttgctaactacattgaaagtaacgaattgtatttcgaaaaggcaaaacaactcagtttgttttaa

SEQ ID NO: 407476 - DNA, 159 bp, Staphylococcus aureus
atgaaaaaatttaatattcaaatcacatacactggcatgattgaagagactatcgaggctgaaagtttagacgaagcagaaaatgaggcgcatgatattgcgagaatggaagtaccatttgattgtgatgaatatgaaattaatgtagaggaggaatag

SEQ ID NO: 407477 - DNA, 312 bp, Staphylococcus aureus
atgaaaacatatccagcattagcatttgaacataaagacgaatcaggcgtatacattggtgaatttgatgggtggtgccaagctttagatgaggcaatactatttgcaaataaagacggaagtaaaccggataaaaagatagctaaagaaatctttttgagggaagaaaaaaatttgagtgatatcttaaaggaacgttacggagaagatgcaattcaaaattacagaccgagtgaatggtttaaaacatgtaatttagtagatgttgaaattagtgaagaaaaatttaaggagttgcttaataatgactaa

SEQ ID NO: 407478 - DNA, 531 bp, Staphylococcus aureus
atgactaattcattaactattgatgaattaattggaaaagtagaacaatggagtgttgaccgtaatataaatcatgcaagtcccttaaagcagtttgataagttgatcgaagaacatggagaactagtacgaggattaaataaacaagatatgcaattaattaaagatagtataggtgacatgtttgttgtattaataatcatgatgcaacaaattaaaggcaatattaaattagcgttaagcctatctgatttcggtgaaggtgaggttaatactttaaattatattaaatcactattttacttaggtgaaaaactagaagattttatgtctgataataataatggcaatttgtttagtgaaattcaaactttgattacaaacattacctatttacttaaagaaacggcatataaaaatagttccgatttaagaacatgtttagcacttgcctatgatgaaatcaaaaacaggaaaggcaaaatgattgatggtaaattcgtaaaagactcagatttaaaatgcgattaa

SEQ ID NO: 407479 - DNA, 465 bp, Staphylococcus aureus
gtgaaatcaatagcaaccttagaagcggaacagtatttatatgattcactgatcatagacaaaatgggagtgtgtggatgtcatgaggtagtcattgggcgaaagcctctcacacatgggcatgaaatcgtggactttttaacctatgatactaaaaatatttttagagcatacgaaattaaagtatcaaaagcagatttaaagagttcagctaaattgtcttttgtaggtcattataattatttagttttaccgagaaacctatatgaagaagtaaaatacacagatttgagttcaattctaaaacaagaaaatgtaggcattgtcattataggtgagggcattatacgtaaatccggtagaaaaacattaacaatgggagataacgttatgctcatggatagtttgaactgcgcgttaaatagagagaatgtaaagattagaagaggaaagaggttatcatga

SEQ ID NO: 407480 - DNA, 234 bp, Staphylococcus aureus
atgattttattgaacttaacatttatgattttgacaataattttattttatacatgcaaatatatcgttaataaatatatcagaatgattgcaattctattatttactgtttgtttaagtctcgcaatcacattaggatttggatttaattttatcgagtatatattaacaatatttttaataattatatttatcgaattaatagaactcgatatttatttaaaacgtaattag

SEQ ID NO: 407481 - DNA, 489 bp, Staphylococcus aureus
atgaaagacttgctaattgaatataggaaaacgagactttgcgtactcaataaaataaaatcacttgaatataaagtagatgaagaggataaattaagtatttacaaagatatattaaaagacattgattatacaattgaatggttaacatgtggacacgaaccaggcaattataacgcaatagatagaagtcaatgctatttagtagataatgatgtgatcaataaggcttttagtgaatcaatgtataaaaagaattcagatattgaatacaaagatataattaatgatgttaataataaagtgagctacgcactgatgaagttaacacctaaagaactagagtgttttattatggtcaaatgtgaggggcttacttataaagaatctgcttgtttattaaatttgaaaataggtagtgtgcaaaactatattaaaagagctgaaattaaaataaaaaatgaacttgaaacaaatttatttatatag

SEQ ID NO: 407482 - DNA, 429 bp, Staphylococcus aureus
ttggctagaatagaactttatgaaaagttggatatagtaaataaattaggtttagtagaaggttggaagcgcgatggtttaacagatgagcaaattgctagaaatttaggtgtttccaaacatactttaattaaatggaaaaagaatataccagactttctagacgccataaaaaagggcaaagaggtatcagattatgaattagagaatgcacttcataaaagagcggttggctattattacgaagaagaaacagttactaataaaggcgaagtagtaaaaatcaagaaatatgaacatgctaatcctacatcactaatatttgctctcaaaaatagattaccccataaatatagagataaggttgaacaagaaattacaaatcgcaatatcgaaataaacataggtgactacgttgacgacgattaa

SEQ ID NO: 407483 - DNA, 1275 bp, Staphylococcus aureus
ttgacgacgattaagattaatattaaggaaccaaataaggtatttaataaaaatatatttgaaattatcaatgattactcacattttactgaagttcattatggtggtggatccagtggtaagtcacatggagttgtacaaaaagtagtattaaaagcattaaaaaaatggaaatatcctaggaaagtattatggcttagaaaagtacaagcaactattactgatagcttatttgaagatgtgagaagttgtttgatttccttcaaaatatgggacttatgcaaatggaataaaaccgacaataaagtagtactaccaaatggcgctacttttttatttaaaggtttagataatcctgagaaaataaagtccattaaagctgtttcagatattgtgatggaagaagcatctgaatttacattagatgattatacacaattaacattacgtttaagggaacgtaaacatgagagtaaacaaatatttttgatgtttaaccctgtttctaaattaaattgggtttataaatacttttttgcaaatggtgtgcaaatggagggggtcttgattaggcaatcaagttataaggataataaatttttggacaaaatgactaagaataatctagaagaattagcgaacagaaatccagcctattacaaaatatatgcgttaggagagttcgctacattagataagttagtttttccaaaatatgaaaaacgaatcattaatactgataaaattaggcacttaccatcttattttggtttagattttgggtacattaatgatcctagtgcattgatacatttgaaaattgatattgaaaataagaagctctatattatttcagaatatgtgaaaaaaggaatgttgaacgatgaaatagctaaacttattaaaaatttaggatttagtaaagaagtgataagtgctgattcagctgaacaaaaaagtatagctgagattagaaagcatggtataggaagaattaaacctgcaatcaaaggtaaagatagcattatggccggaattcaatttattagtcaatttgaaattatagttgatgaacgatgttttaaaactattgaagaattagataactatacatggaaaaaagataaaaataccggcgaatactataacgaacctgtagatacatataatcattgcatagatgcgattcgctattctgtatgtaatttaatttttaaagataagaaaactgaaaataaaatagatgatttaacaaggattagaaacatgttctaa

SEQ ID NO: 407484 - DNA, 1449 bp, Staphylococcus aureus
atgacgatttacacccaagaaattaacaacacaaagttctctaaaacagcaaataatgattttttaatcagtaatgtagaacagttattaaaagaagaagtattacttagtttgataagtaagcataaaactgaacaagtaccaagattagaaatgttagaagattattatttgaataggaatacagatattttaactgataaccgaagaataaatgattatagtgataaagctgaccatagagcagtacataattatgctaagtatgtcacacgctttatagtcggttatttaactggtaatcctataacaattacacataaagacgaaatcacaaatgaaaaattagttgaccttaataaaatcaatgatgcagatgctacaaatagtgatttagctttaaatctatctatttatggtcgagcgtatgaaattgtttatagagatactgatgataaagatacattcaaattattagatagtaaaagtacatttgttgtatatgacacttcactagataaaaatatgatagcaggtgttagatactttaatgttaaagattttgacaatacaccaatacagaaaattgaaatatatacaacaaataaaatttattacatcgaagtaagaggcggttctttcaattctatcgatgaaatacctcattactataatgatgtgccaatcattgaatatttaaacgatcaatttaaacaaggtgactttgaaaatgtcatttctttaattgatttgtatgatcaagcacaatcagatactgctaattatatgaccgatttaaatgatgccatgttagctatcgttggaaatattgaaatagatggtgatgaagctaagaagtttcgacaagctaatatggttcatgtcaaaccaagtatcaatgtcaatggttcagaaggtaatgcagatgttaagtacatttataaacaatatgatgttaatggctcagaagcatataaaactagattacaaaaagatattcacaaatatacgaatacgcctgatttaagtgatgagaatttcagtggagttcaatctggtgaatcaatgaaatataaattgtttggtttagagcaagtgagagctattaaagaacgtctgtttaaaaaaggtttaatgaaacgttataaactattattccatattcttaatttaactggtgtacataagtatgattattcaaccattgatattacttttactcctaatttacctaagtctttaaatgaatcaattgaagcttttaattcattaaatggtggagtatctgaacaaaccagattgaaattgctaccaattattgataatccatttgaagaaatcaagaaaatggaagatgaacagaataaggtaaaaaaaattagtgataattcatcatttaaggcaccatttagccacgaaaatgaaatgactgatataaatgtcagataa

SEQ ID NO: 407485 - DNA, 1482 bp, Staphylococcus aureus
atgtcagataatttaaaatattggctagaacgtgctaaaaacgtcatggacgctgaatctttagttgatgcacaagcaataattgaaattgaacgtatcattctattgatgtacgctgaaattacaaaagaattattagccttttatgcaaaatatgccaaagatactggactgaatattcaagaagttaagaaaatggctgattcatttgatgtactagcatttagtaacaaagcgaaacaatttgttgagcgtaaagatttcagtgaagaggcgaatcaatcgctcaaacaatacaacttaacgatgaaaatctctagagaaaaactgttaaagcagcagctagatttgattgtgaaagatactagtttaaaccttcaaaataaaattgaggataagttaagtgacgcagttaatagagaagtaaagagacaagcacatattctaggtgaacatgttcaaattgatgacactgaagtgaaagcagttgttaatagtaatttcaaaggtgctaaatggtctactagattatggaatgatatggaacttgttcaaaaggaagttgagagggtaacaagtcatgtcgttattcgaggtcgacatcctaatgaatttgtttctgagtttaaaaagcaaaccaattctacttcttataacgccagtagattgttagtaaccgaatcagcacgtgtacaaacagaatcacaaaagatagcttatcttaaagatttaggcgaagatggcgaatataaatatgttgcaaaaatagatagtaaaacatctaaattatgtcattcacttaacggaaaaatatttaaagttaaagatatgataccaggtgtgaatgcgccacctatgcatccttggtgtagaagtaccacagtgccacatgtcggcaattggcgagacaagttctttaaagagcgcgaaggtaaatatcaagtagaagatgacacaaccaaagatgaattacaacaagctaaagtattaggaaagaaaatatatattactgatcaagcaattgataaagtcagatatgttgatattccaacacataccaaagaagaaaatcaatttatacaagaacaacataaagccttgcttaaagatgccaaagaaaacaatgatagcaatgaagtagcttatttattaaaagatggtaaagttacaaaagtatatggtgatcaagatagtgtatcttttgcaccaggggaaaaagcaacagaattgttatttaacagtaaacctaatacaattattatgttacataatcatcctgggcagtctagtttttctcttacagacttgtatttatttatatttaataattctattaaaacactgacaattgttacaaataaaggtcaaacaaagtacttaactaagacaaaagaatattgcaaatcaacttgtattgattgtattaaaaaatataataaaaataagaatataaaaaattcaatcataaggatattgatatga

SEQ ID NO: 407486 - DNA, 123 bp, Staphylococcus aureus
atgtattttgcacagttagatggtgaaataactaataaacagtcacaagaattattggataaagaatacaagaaagcaatagaattagaaaataagaataaagaacaaaaattagaaaaatag

SEQ ID NO: 407487 - DNA, 555 bp, Staphylococcus aureus
atggaaaaaaatgaaagtaatattaccgatgtaactcagaacgaagagcaactagacaacagtgatgaacaatcacaacggaatgagaaaacattttctcaagaggaagtatcacaattgattaaagagcgtatagctagagaacgcaaaaaatcagatgaacgtattaaagatgccaaagaaaacaataatagcaatgaagtaggttatttattaaaagatggtaaagttataaaagtatatggcgatcaagataatgtatcttttgtgccaggggaaaaagcaaccgaattgttacttgacagtaaaccgaattcaattgttatgttacataaccatcctggacagtcaggattttcattgaatgacttagagatgtttattgaaaataaatctatccgaacattgactattgttactaactatactgtagtaaaatatataagtaaaactccattatataatcagtctcaagtttataaaataatgaaagatataaaacaatctataactataagaaataatgaagcgatagttgataatattctaaagtaa

SEQ ID NO: 407488 - DNA, 123 bp, Staphylococcus aureus
atgtcaattcaacatttagatggttacatttctatagaagatttttttaagcatatggaagaattatcgaagaaagaagaattagaaaaagagattaatcaatcaaagtctaaatatcaatag

SEQ ID NO: 407489 - DNA, 1026 bp, Staphylococcus aureus
gtgatttcattcgaaaatgattatttagaaggtgctcatgaaaaagtattaaaacgattagtagatacaaatcttgtacaagcttccggatatggctttgatcaattcacagctcaggcaattgagaagattaaagatacaattgactgtccaaatgctacaattcgttttttagtaggtggaacacaaaccaatcaggttgttattaattcaatgttagaaagttacgaaggggtcatttcagcagacactggtcatgttgctgtgcatgagggcggtgcaattgaatatagtggacataaagtaattactataccctctaaggaaggaaaagtaagtgcttcagatgttgaaacttacatggagacatttaaaagtgattttaaaaaggaccatatggtattcccaggaatggtatatatttctcatcctacagaatatggcactttatactctaaatcagaattggaagagttatgcaaagtatgtaagcaatatcaacttccattatttatggatggtgcacgattagggtatggattgatgagtgatcaatcagatatgactattaaagacatcgctaaatattgtgatgtattttatataggtggtacgaagataggtgcattatgcggagaagcaattgtttttacaaagaataatgaaccgaaacaatttaccactcgaatcaaacatcacggtgcacttttagcaaaaggacggttaacaggcatacaatttttagaattatttacggataatttatattttaatataagcagacatgctatcgaaatggcaaataagatgaaagacgggtttataaataaaggctatcgtctttactttgattctccaaccaatcaacaattttttattttaagtaacgagaaaatagcagagttagaacaaaaagttaaatttgctgtttgggaaaaatacgatgatcaacatcgtgttgttagattcgcaaccagttgggcgacaaccgaagaaaatttaaataaactattagaattaatttaa

SEQ ID NO: 407490 - DNA, 198 bp, Staphylococcus aureus
atggaacaaattaaacttaaaacttttacagctgagactttagaattattagaatcaaatatcaacgaatttttaggctctgaagaagctgcaaatttgaaattagtaaatattacaataaaagaaattgaggaaagaacatttccaaataatgaagaagagtttaatgcaatattaactctatctgtaaataaataa

SEQ ID NO: 407491 - DNA, 1482 bp, Staphylococcus aureus
atgcaattttcattttcaaatgatttaggaacactttttaccattattttagcaattgcctttatcattaatttggttctagcgtttattattatttttttagaaagaaatagacgtacagccagttcaacatgggcgtggttatttgtactttttgtattaccattaattggttttatcctttatctattttttggaagaacggtttctgcgcgtaaactaaataaaaataatgggaacgtgttaacagattttgatgcgcttttaaagcagcaaattgaaagctttgataaaggtaattatggtacagataataaacaagttcaaaagcaccatgatttggtacgtatgttgttaatggatcaagatggctttttaactgaaaataataaaattgatcattttattgatggaaatgatttatatgatcaagttttacaagatattaaaaatgctaaagaatacatccatttagagtattatacattcgctctagatggcttaggccaaagaattttaaaagcgttagaagagaaattgaaacaaggtctagaagtgaaaattttatatgatgacgttggttcaaagaaagttaagatggctaattttgatcattttaaatcgttaggtggagaagttgaagcattttttgcttctaaattaccgttattgaatttcagaatgaataatagaaatcatagaaaaatcatcgtaatcgatggtcaactaggttatgtcggaggatttaacattggtgatgaatatctaggtttaggaaaattagggtattggagagatacgcatttacgtatacaaggggatgcggttgatgcactgcagttgcgatttattttagactggaattcgcaagcacatcgacctcaatttgaatatgatgaaaaatattttcctaaaaagaataaatcattcggtaatgcgccaatccagattgctgcaagtggtcccgccagtgactggcatcaaattgaatatggttatacaaaaatgattatgagcgctaagaagtcggtatatttgcaatcgccttatttcattccggataactcatatgtaaatgccattaaaattgcagctaaatcaggggtagatgttcatctaatgattccatgtaagccagatcatcctttagtttattgggcgacattttcaaatgcttctgacttattatccagtggtgttaaaatttatacgtatgaaaatggatttattcattctaaaatgtgtttaattgatgatgaaatcgtatcagtgggcacagcaaatatggactttagaagttttgaattaaattttgaggtaaatgcctttgtatatgatgaaaatcttgctaaagatttaagagcggcttatgaacatgatattacaaaatcaaaacaacttactgaagaatcttatgctaatagaccattgtctgttaagtttaaagaatcgttagctaaattagtttcgccaattttataa

SEQ ID NO: 407492 - DNA, 177 bp, Staphylococcus aureus
ttggttcaaaatgacatttgtcacttcaatagttcacataatattattatagtaattaattatagaaataaaaaaagcctcattaaaatgagacttgaaattattctttataaaattggcgaaactaatttagctaacgattctttaaacttaacagacaatggtctattagcataa

SEQ ID NO: 407493 - DNA, 894 bp, Staphylococcus aureus
ttgattcaaatatctaatattaataaatcatttaagaaaaagcgtgttttaaaaaacatttcatttgatattgaaaaaggtacatgtatcgcattaatcggaaaaaatggtgctggaaaatcaacattagttgatattttaagcaataaaataattgctgatgatggcgtgattttggataaagacaaattattgcaaagtgaaaatcgcagtataatgtttcaaaaaacgatgttttcagatcaattgaaggtaattgaaattatcaaattatatcaatcattttatgaaaatccattaacattggacgtaataatagaactaacaaagtttaattctaatcaattgaatcaatttgcaaataaattatctggaggtcaacaacgattacttgattttgtaatatctttaataggacaaccacagcttattttgttagatgaaccaacgtcaaatatggatattgaaatgagagaatatttttggtcaataatagctaagttaaaagaagaaaatcggacgattctttatacatcgcactatatagaagaagtagagcgcatgtccgacaaaattattttgatagaaaatggagaaatcaaactaaatgatgatacgtcacatattaaagtaaatcagcaatctgagattaccctatcgggtgagtatctatcaaagttaaaacaagaagcaaatgaattaaaaatactaaagaatcataatggtacgattaaaattcttacttcaaatgtaaatgatactattttatatctactgcaacatcatattaatttaaatgatattgaaatacataaagtatctattatcgatacttactttaacaataaaaagcaaaggggttctatatatggtcctaaattacttgaaatttga

SEQ ID NO: 407494 - DNA, 732 bp, Staphylococcus aureus
atggtcctaaattacttgaaatttgagtttaaagttttgtttcgtaaaaaaactgctttatttttatcaatatttttcccagcaatattttatatcttgtttacttcaatattagatttaccaagcgatgtcaaacttagattctataaagaatacatgtatagtatgacggtttatagtttgataagttttagtttaatggcgtttccaatagatattattaatgaaaaacaaaatggatggcgtcaaaaattaatggcgacaccattaacacctgctagttactatatttctaaaatagttaaaacaatggcacaatttgcaattgcaattatagtgatttttatgataggacatttttataaaggtgttacactaagtataagtcaatggatagaatcaggtgtattgttatggctaggtgcatcattattgataacttttggtgtattattttcgttgattaatgatattcagaaagcaagtgctttaggtaatatcgtgacaatcggattagcggtgctgggcggattatggtttccagttaatacatttccaaattggcttcaacatattgctcatgttttaccaagttatcatttgcgcaagttaggtttagacattgtttcaaatcatcatattgatttaagatcatttggcatactaattttatatgctgtaggtagtttaatagtggtatattgtattagacattttaaaagggcggaataa

SEQ ID NO: 407495 - DNA, 1092 bp, Staphylococcus aureus
atgaaatttttaaaagatacttcaattgctgaaatatcgtctatactttatctgatttttcctattgccggtatattttttaatgaagtgtatggtcccaaatggttgtatattatatcagtcattgtcttttcgttgtcgtatcttatattagttatagtaaataaaagacttaatacattaatgttttacattttgttgattattcattattttattatttgttattttgttttcagtgtacatccaatgctaagtttgtttttcttttatagtgcttttgccattccatttacttttaaaaataatgttaaaaaaatggcaactaatcttttcatattaacgatgattatatgtttaacaattacttacttagtacataacgactattttgttgcaatgacgatttattatgttgttattttgttaatcgtgtttgataatttaaaaaaagtgaaagatcgtgaatataaaaaagaaatagaagaaaaaaatcgatatattaatacgttaataactgaacaagagcgtcatagaataggtcaagatttacatgatacgcttggtcatgtgtttgcaagtttatcattaaaatcagaattagcttataaaattattgattctgatactgaaaatgcaaaagctgaattgttagcgattaataagttgtcgcgggaatcattaaacaaagttcgcgaaattatcgatgatataagattaccatcatttattgaagaaattgagagtatctgtaaaattttaaaagatgctgacattcagtttacgtttgaaaataaagaattggcacaattattgagtcctacaaaacaatccattttagtaatgattgctcgtgaagcgataaacaatgtgattaagcatgcaaatgcttcaaaagttcatggtcaattacgagctatgaatgaacataaattacagttcattatacaggataatggagaaggtattgacagcggctgtgaaataaagagtatttcacaacgagtacaacatttaaatggaacattagaagttgaatcgaataaaggtactaaattaattatcgaaatgcctacagggggaatagcatga

SEQ ID NO: 407496 - DNA, 768 bp, Staphylococcus aureus
atgaaatttgtatttgatattgatggtacactttgttttaatggtaaatcaattgatccatcaatcgttgatgcattgttacaattacaaaattctggtcatgaacttatatttgcatctgcgcggccgattcgtgatttgttaccagttttaccagaagtctttcatcaacatacattaattggcgcaaatggcgctatgttttcacagcaatcaaatatttcggttatcaagccaattcaagcttatacatatcatcatatcttacgaataatacaaaaatatgaattagattatattatcgatgatgattggaattatgctgctaaattagacgctgagaacgcgatttttgagcgcttagatccacataagctggctagttgtattgatgttgcaaatattgacacaccaatcaaaataattttattaaatatagaaccgtcacaaattacaagcattttaaatgaactaaatgaatatcatcaagaactagaaatcattcatcattcaaatgagtttaacattgatattacagcgcaaaatattaataaatatacagcgctacaatacatatatggtaaagatgttgaatatatagcatttggtaatgatcacaatgatattgtcatgctacaatatgctactaatggctatattgtagggccatcagaagataatacacatacaatattgaaattgaatcatgtaacacatatagatagtcatgcccaagctatttgcagttcattaaatttatatgaataa

SEQ ID NO: 407497 - DNA, 702 bp, Staphylococcus aureus
atgattgagctaaaacatgtgacatttggctataataaaagacaggcagtgttagaagacatcaatactaaaatacatgatggtgaaaatgtcggcattttaggagaaagtggtagtggtaaaagtactttggcagcattgttattaggattgcttaagccgattaatgggagcatttatatgagtgatgatactgtattaccaattttccaacatgcattatcaagttttaatcctgattggacaattgaagactcattaaaagaagcgctaaaatattatcgtaggttaaaagccgatgacaatcaactggaattattattacaacatttatcaaactttgatttagattcacaactgttatctaattatcctaatgaagtaagtggtggacaattacaaagatttaatgttatgcgttcattattagcgcaacctcgtgttttaatatgtgatgaaatcacgtcaaatctagatgttatagctgagcaaaacgtaataagcattttaaaggagcaaaccattgcgaatttaaatcatttagttgtcatatcacatgacttatcggtactacaacgcttagttaatcgaattattgtcattaaggatggtgcaatcgttgatgattttgaaacggttgaattattcaattcagatagacatccttatacaaaagaattaacacaagcatttacattttaa

SEQ ID NO: 407498 - DNA, 774 bp, Staphylococcus aureus
atgagtctcattgatatacaaaatttaattatcaagaatcaaaaaggtaaatctttaataaatggcatcaatttgaaaatttatcaacaaaaggttaacgctttaattggagaaagtggtgctggtaagagtttaacggtaaaagctttgctaaattttttaccatctgatttaaattgtcagtatgatcattattacttcaataataaaaacgtaaacaacatgcaacaattttatggtcgcactgttggatatatttcacaaaattatgctgaaagttttaatgatcactcgaaattaggaaaacaattgattgcaatttatcgtactcattttaaagttagtaaagaagcagcattatctcaaattgataaagcattgtcgtgggttaacttaagtagcgaagaaatattaaagaaatacagttttcaactttctggtggtcaacttgaacgcgtatatattgcaagtgttttaatgttagaacctgagttaattattgcagatgaaccagtagcatcattagatgttattaacggctataaaattatggatttacttcaacacattgtaaaagaacacggtcaaacattatttataatcactcataacttaagtcacgttttaaagtattgtgactatattaatgttataaaagacggtgacattgttgagcgcggtgacataaagcactttaagtacgatacattacaaccttataccgaatttttaattaaatatcgaacacaattaaagagggatcataatgattga

SEQ ID NO: 407499 - DNA, 987 bp, Staphylococcus aureus
atgttcataataaggtctattttgtacagactaattcaaatggtagttgttttatttgttatttcaacactaactttcattttgatgaaattatctccaggaaatcctgttgataaaatacttcaccttgatgtgtcacatgtgtcggcagaacaaataaatgcaactgaagaaaaattgggtttaaagaattcaatcatatcgcaatggtggcaatggatgcaacaattgcttcaattaaatttaggacgtagtttcgaaactaaagaaccagttacacagtcactatttgagtatgcaccaccaactttgcttatatctttttcaacattagttttgtcattagcgatatcgataccactaggtgtgctttcagcaagacactatcacaaactgactgataaagtgattagaactgtatcaacattgtcaattagcttgcctgcgtttttcatcggcattattttattattcattttcaccaatttattaaatattgatagtgccttatggaatcagattgtattacctgtttttacattgtcattaggtatgtgtgcgtatattattcgattaattcgttcaaatttactttcgctatatcaaagcaatatcgttaaatcatcacgattacgcggtatgagcgaacgatatattttgatgcatgatttattgaaaccaacgcttttacctattattccattgttaggtatttctctaggtagtcttattggcggtacagttgttattgaaaatttatttgatatacctggcattggttacttattgatggatagtattaaatctcgggattatccaatcatacaagggtgtgtattgtttataggattttttgtggtgttaatcaattcaattgctgacttactggctctattgtttgatccaaaacaacgtttacattttaaaaatcaaaaaaataattcaaacgtatcatcaatcttagaaagtggtgatctacgtgcttag

SEQ ID NO: 407500 - DNA, 984 bp, Staphylococcus aureus
atgaaaaaatggcaatttgttggtactacagctttaggtgcaacactattattaggtgcttgtggtggcggtaatggtggcagtggtaatagtgatttaaaaggggaagcaaaaggtgatggctcatcaacagtagcaccaattgtggagaaattaaatgaaaaatgggctcaagatcactctgatgctaaaatctcagcaggacaagctggtacaggtgctggtttccaaaaattcattgcaggagatatagacttcgctgatgcttctagaccaattaaagatgaagagaagcaaaaattacaagataagaatatcaaatacaaagaattcaaaattgcgcaagatggtgtaacagttgctgtaaataaagaaaatgattttgtagatgaattagacaaacagcaattaaaagcaatttattctggaaaagctaaaacatggaaagatgttaatagtaagtggccagataaaaaaataaatgctgtatcaccaaactcaagtcatggtacttatgacttctttgaaaatgaagtaatgaataaagaagatattaaagcagaaaaaaatgctgatacaaatgctatcgtttcttctgtaacgaaaaacaaagagggaatcggatactttggatataacttctacgtacaaaataaagataaattaaaagaagttaaaatcaaagatgaaaatggtaaagcaacagagcctacgaaaaaaacaattcaagataactcttatgcattaagtagaccattattcatttatgtaaatgaaaaagcattgaaagataataaagtaatgtcagaatttatcaaattcgtcttagaagataaaggtaaagcagctgaagaagctggatatgtagcagcaccagagaaaacatacaaatcacaattagatgatttaaaagcatttattgataaaaatcaaaaatcagacgacaagaaatctgatgataaaaagtctgaagacaaaaaataa

SEQ ID NO: 407501 - DNA, 1206 bp, Staphylococcus aureus
atggtaacaagaagtgtgttgaaatttggcggatcatccgtcagtgattttacaaaaataaaaaggatcgctgaaatgttaaaggagcgggtcaatcaagatgaacaattaattgtcgttgtaagtgctatgggtaacacaacagatcaattaatgacgaatgtatcgacattgactaaaacaccaaaacaacaagaacttgcattattattgacaaccggagagcaacaaactgtatcttatttatcaatggtattaaatgatatcggtgtgaatgccaaagcaatgactggctatcaagcgggtattaaaaccattggccatcatttaaaaagtaaaattgctcaaattaatcctcaaacatttgaacaagcctttcaagaaaacgatattttagtagttgctggatttcaaggcatcaatgaacatcaggaattaacaactttaggcagaggtggttctgatacgaccgctgtggcacttgctgttagtaatcaaataccttgtgaaatttataccgacgttgatggtgtgtatgccactgacccaagacttttaccaaaagctaaacgactagacatcgtctcatatgaagaaatgatggaaatgagcgctttaggtgctggtgtacttgaaacaagaagtgttgaattagctaaaaactataatatccctttatatttaggaaaaactttatcgaacgtgaaaggaacatggattatgtcaaatgaagaaatattagagaaaaaagcagttactggtgtggctttggataaacatatgatgcatgtaacaattagttatcccctacctgacaatcagctacttacacaactatttacggaacttgaagaaggtgctgtaaatgttgatatgatttcacaaatcgtcaacttggatggactacaactatccttcacgattaaagatagtgattttcatcaaatttctatgattcttgaaacattaaagaatcaatatgaagcattagcttataaaatcaatgagcattatgtcaaaatttcattaattggctcaggcatgcgtgatatgtcaggtgtggcatcaaaagcatttttgacattaattgaaaataatatacctttctaccaaacaacaacatctgaaataagtatttcatacgtcattgatgattttaatgggcaacaagcggtagaaaaactatatgacgcatttaacatttaa

SEQ ID NO: 407502 - DNA, 1266 bp, Staphylococcus aureus
atgactgttaaatataatcaaaacggtgaattaacaatggacggcataagtttaaaaacgattgcgcaaagcttcggtacacctaccattgtttatgatgaattacaaattagagaacaaatgcgtcgttatcatcacgcatttaaagaaagtggcttaaaatataatatctcatatgcttcaaaagcatttacttgccttcaaatggtcaaacttgtagctgaagaagatttacaactagatgttgtttccgaaggcgaattatacacggcattagaagcaggctttgaaccaagtcgtattcattttcacggtaacaataaaacaaagcatgaaattagatatgctttagaaaataaaatcggatattttgtgattgattctttagaagaaattgatttaattgatcgatatgccaatgatacggttcaagtagttatacgtgtgaacccaggggttgaagcacatacacatgaatttatacaaactggacaagaagatagtaagtttggattatcaattcaatatggcttagccaaaacagcaattgaaaaagtcctacaatccaaacatttaaaattaaaaggtgttcattgtcatattggttcacaaattgaaggaacagaggcatttatcgaaactgctaaaatcgtattacattggttaaaagaacacaacattcaagtcgatttattgaatcttggtggcggctttggtattaaatatgtcgaaggtgatgaaagtttccctatcgaaaaaggtattaaagaaattacagatgcgattaaatctgaagtacagcttcttgatattgaacccccagaattaggtattgaaccaggtcgttcaattgttggtgaagccggtgtcactttatatgaagtcggaacaataaaagaaattcctggagttaataaatacgtttcaattgatggtggtatgagtgaccatatcagaactgcactttatgatgcgaaatatcaggcattattagttaacagaaacgaagattcagatgatacggttactattgcaggaaaattatgtgaatctggagatatcattattaaagacgctaaattaccttcatcagtcaaacgtggagactatcttgctatattatcaactggtgcatatcattactctatggcatccaattacaaccaaatgcagaagccatccgttttcttcttgaaagacggtaaggcacgtgaagtcgtaaaacgtcagtcgttaagacaacttatcattaacgatacgaaataa

SEQ ID NO: 407503 - DNA, 618 bp, Staphylococcus aureus
atgtatatacccaagttctttcaagtaaatgattttaaagaaatcgagcaatttatacaaagcaattcttttggaatgattgtaactgaggatcaaggaaagccattagctactcatttaccattaatttttcagaaaaatggtgatgattattatattagtggacatattgccaaaggaaatccgcaatggaagactttaaacgggaacggcaatgtgttgattatatatcaaggcgcacatgcttatgtttcatcatcatggtatgaaaaggaaaatgtaccaacttggaactatcaggcagttcatttgtatggggaagcaaccgtattgaacgaacaagaaacgatagatggtttgaaaacgttactaacaaagtatgaacaaaatcgtgaaaatccagttttatgggataatcttgcagaaaatacgcaaatgcaggccaaggcaatcgttggatttaaagtcaaaataaaaaagatagaagctgcatacaaaatgagtcaaaatcgaaatgaacaagattacaacaacattattaaaaatctcgaagatgagcataattcaagtagtaaagcagtagctgacgtaatgaaagaaatttatccttatttataa

SEQ ID NO: 407504 - DNA, 624 bp, Staphylococcus aureus
gtgagatataatatttctcatatatttggggtgttagtgggaattcctgtagcgtttttaacaagcatatttgggatgattgcacttgatgtatcttttttaattgatatgtctattggtattgttggctttttaatgacatacctaccgatacaaaaactcacttcacgcaaatatttaaacgaaattggtttgactagaaaagactatcgctatattcgaaatcagttaaatcatacacaccaaaaacttagaggtattttaaaaacgtatgtcaatataagatcaattaaagattttaggcatattaatgatatataccaaatttcacgttctatttatacgacagttagacagagacctgcatcattttataaagttgaagggtttttttattctcatattgataatgctttaaatttggttgatgcatatacacgtctagcaaaaatgcccaaaaaatcaattaatgaacagcaaaaattagaacaaacacgaattactttggatgaggtcaaacgaacattaatcgctgatttaaagcgtctcaacgaagatgattatgaacgtttagatattgaaatggaattaaataagttacatcaaaagcatcatcaagattga

SEQ ID NO: 407505 - DNA, 1344 bp, Staphylococcus aureus
atgaataaaaatacatgggtcattgggtttacgctcttcgctatgttttttggcgcaggcaatctaatttttcctcctaatctcggattggatagtggtcaatttttctggcccgccattttagcgtttgttctaactgggattggtttaccattattaggtgtgattgtaggtgcacttgataaagaaggatatattggcgcattaaataaaatttcacctaaattttcaatattgttcttaatcatcatttatttgactatagggccacttttcgcaatacctagaactgcatctacatcttttgaaatgacaattacaccaattatacatagcaatagtagtatcgctttatttatatttacgattatctacttcatagtcgttttgtatatttgtttaaatccatctaagttaatcgatcgtattggttcattattaacaccattattattgattactattttagcgatgattattaaaggatacttagactttagcggtaatagtgctggaaagggcaatgaagcactatatcattctaatttttcaagttttgctgaaggctttacacaaggctatttaacaatggatgccattgcagcaattgctttttcaatgattgttgttaatgcagtaaaactaacaggtattactaaaacaaatcaaatattcaaacaaactttgactgctggtttaattgcagctgttgctttaattttcatatatatttcattaggttatattggtaatcatatgccagtaagtgacattacgttagatcaattgaaatccaaagatcgaaacattgggacatatttattaacgacaatggcttcaacaggatttggttcattcggaaagtatttattgggcatcattgtagcgctggcatgtctaactacagcatgtgggcttattgttgcagtttctgaatatttccatagaatcgtacctaaagtatcatacaaagcatttgtattagttttcattttaatgagttttattattgctaaccaaggtttaaatgctgttatctcaatgtcaattccggtattaagtattgtatacccagtagcaataactgttgtattattaattttaattgccaaattcataccgacaaaacgcatttcacaacaaattccagttattatcgtatttatattgtcaattttcagtgttattagtaagttaggttggctgaaaattaactttatagaatcattgcctctaagagcgtattctttagagtggttcccagtagcaattattgcaacgatattaggctatctagtcggcatatttgtaaaacaagatccaattaaatatcaacaggaataa

SEQ ID NO: 407506 - DNA, 810 bp, Staphylococcus aureus
atgtgtggacttagaagtataacattaggtacaacaaatatagaacagacaaaacatttcatggttgacatattaggattaaattgtgaagaacttcttgaaaactcaattcgtttcggcgatgcagatataagcccaggaacaagacttcaatttatacaagttccaagtgagcaattagaagaatctcactttgtgggtattggattacgtacaccaaccgactcaggtttagaggagtatgcggaaatattatcgagtaaggatattccatttacaacagttaaagaattaaatggcaataaatatttcagtctcgaagataacaatggtcatattttctcaatatattcaaacgagaataattatggtgttggtttaggtatgccttctttcgaaagtgcggtcaatccgttacatcaagttcaaggtttagggccagtgattcttaaagtgaatcatgtagatattacaggtcaaattttaacaaacatattcggacttgaaatatttgcagaataccaacccttcgacaatgctgactatcatgtccaagtattcaaaattggaacgggtggtctaggtggcgaaatacatttaatgcctgtagaaaccgaaatgacaatgccggaatatggcgcagtcgatcaagttgagtttgaaacgaaagatgtagatttctttaatcaagcgaaatcgcgcttagatgaagtggaaataccatatcaaacacttgaacaagacgatattgaatcaattagaattactgaaaacagtggattatcttttatattcactttacaaaaataa

SEQ ID NO: 407507 - DNA, 240 bp, Staphylococcus aureus
ttgacaacaacaggtactaagccagaacttgttaaacgcatagatgataattatctcatatttaataatttagctttgtcatatgtatatataccaactaaaaaaggtgaggaaattttaaaagaaacaaaatacttaacgttatttgtgaataatccttatatttgtgttggacgtgcgtattatatagcagaaaattatatagtcacaaattttgatgataagtttgctgaaatataa

SEQ ID NO: 407508 - DNA, 174 bp, Staphylococcus aureus
atgagatggattgattatttattgacagttaagattattatgaggagaaaaagtttaatgaatgtaagttcatatgatttattagttttacataaaaatgtatatagggttgtagttaaagaaatattacccaataattatcttgattacaatggtgttagaattatgcactag

SEQ ID NO: 407509 - DNA, 807 bp, Staphylococcus aureus
ttgataaaattaattaatttaatagagggacatattaataaaaaattaactactgacaacgacatagaagagtttaaagaaaattatctttttttatctgtttacgaaattgttcattcattttatcttaactatatagatataaataattgtataactataagcagtactcggacattagttagaaaatcatacgaattattacttcaattaaaatacattttggaatatcaagaagagtctaatattagggctaaaaggtattttttatataaaaattatcaaaaaatcgatttattaatatcaaatggaaaagacagtacatttgatgaacaaactttaaataagttaaaaatggaaaagaagcatattgagaagtcatatgtagatagttttataaattctaatataaaagtaaacaaattcaaggacataaaagcttggtatatggaaaaatctaatgattgtacaaaaactggaaatttatacgaattatcagaatacttgaatatgaattatcaatataaacatatttataaaaacttttgtaaagatgtgcattcaactgacagtataattaatgatactataagattttttggtaaaaatattgctattagaaatggagaaatagaagaactactaaatgaagaacctttaacgagtgaaatagaaatttcttcttttacaaactatatagttagtgagttcttgaaatgtagtagtttatttttaaatgataaaaaattgtgggaagattactcggcggaatttgaaaaatattataatcaaaaatggtattcatag

SEQ ID NO: 407510 - DNA, 2799 bp, Staphylococcus aureus
atgactaacgaaagaaaagaagtttcagaggctcctgtaaacttcggtgcgaatttaggtctaatgttagatctatatgatgactttttacaagatccatcgtctgtaccagaagatttacaagtcttattcagcacaattaagaatgatgactcaattgtaccagctttaaaaagtacaagtagtcaaaatagtgacggcacaattaagcgtgtcatgcgtttaattgataatattcgccaatacgggcatcttaaagccgatatttatcctgtaaatcctccgaaaaggaaacatgtacctaaattagagattgaagactttgatttagatcaacagactttggaaggtatatcagcaggaattgtttcagatcactttgccgacatttatgataatgcttatgaagcaattttaagaatggaaaaacgttacaaaggaccaattgcatttgagtatacacatattaataacaataccgaacgtggttggttaaaaagaagaattgaaacgccatataaagtaacgttaaataataacgaaaaaagggcactattcaaacaattagcgtatgttgaagggtttgaaaaatatcttcataaaaacttcgttggtgctaagcgtttttcaattgaaggggtagacgcacttgtaccgatgttacaacgtactattacgattgctgcgaaagaaggtattaaaaatatacaaataggcatggctcaccgtggacgtttaaacgttttaacgcatgtcttagaaaaaccgtacgaaatgatgatttcagaatttatgcatacagatccaatgaaattcttacctgaagatggtagcttgcaattaactgctggatggactggtgatgtgaaatatcaccttggtggcattaaaactactgattcatacggtacaatgcagcgtattgcactggctaacaatccaagtcacttggaaattgttgcacctgttgttgaagggcgtacgagagcagcacaagatgatacacaacgtgctggcgctccgacgactgatcaccataaagcaatgccaattattatacatggcgatgctgcttatcctggtcaaggaattaacttcgaaacaatgaacttaggaaacttgaaaggctattctacgggtggttcattgcatattattactaacaatagaattggatttactacagaaccaattgatgcacgttcaacaacttattctacagatgtggctaaaggttatgatgtgccaatattccatgtcaatgcagatgacgttgaagctactattgaagcaattgatattgcaatggaatttagaaaagagtttcataaagacgtcgttattgatttagtaggttatcgtcgtttcggacataacgaaatggatgaaccatcaattactaatccagttccttatcagaatattcgcaaacatgactctgttgaatatgtgtttggtaaaaagcttgttaatgaaggtatcatttcagaagatgaaatgcattcatttatagaacaagtccaaaaggaactaagacaagcacatgataaaattaataaagctgataaaatggataatccagatatggaaaaacctgcagaacttgcattaccgttacaagcagacgaacaatcatttacgtttgatcatttgaaagaaataaatgatgcattgttaacatatccggatggctttaacattttgaaaaagttaaacaaagttcttgagaagcgtcatgagccatttaataaagaagatggtttagttgattgggcacaagcagaacaacttgcatttgcgacaattttacaagatggtacaccgattcgcttaactggtcaagatagtgaacgtggtacattcagtcataggcatgccgtgttacatgatgaacaaacaggtgaaacatatacacctttacatcatgttcctgatcaaaaagcgacatttgatatacacaattctccgctttcagaagcagcagtagtaggttttgaatacggctataatgtggaaaacaaaaaaagcttcaatatttgggaagcgcaatatggtgattttgcaaatatgtcacaaatgatttttgacaacttcttattcagttctcgctcaaaatggggagaacgttcaggattaacattattcttacctcatgcatatgagggtcaagggcctgaacattcttcagcaagattagagagatttttacaattagctgctgaaaataattgcacagttgtcaacttatctagttcaagtaattatttccacttattgcgtgcacaagcagctagtttagattctgaacaaatgcgaccattggttgttatgtcaccaaaaagcttactgagaaataaaacagttgcaaaaccaattgatgaatttacttctggtggatttgagccaattttgacagagtcatatcaagcggataaagttacaaaagttattttggcaactggtaaaatgttcattgatttaaaagaagcattagccaaaaatccagacgaatcagtattactcgttgcgattgaaagattgtatccattcccagaggaagagattgaagcattactagcacaattgccaaaccttgaagaagtgtcatgggtacaagaagaacctaaaaaccaaggtgcatggttatatgtttatccatatgttaaagtgctagttgcagataaatatgatttaagttatcatggcagaattcaaagggctgctccagctgaaggcgatggagaaattcataaacttgttcaaaataaaattatagaaaatgcattaaaaaataactag

SEQ ID NO: 407511 - DNA, 1356 bp, Staphylococcus aureus
atgacaaaacgtaaattgcgcaataactggattattgttaccacgatgattacgtttgtcacgatatttttgttttgcttaattattatctttttcttgaaagatacactgcataatagtgagcttgatgatgcagaaagaagctcaagcgatattaataatttatttcattctaagcctgttaaagatatatctgcattagacttgaatgcatctttaggtaattttcaagagattattatttatgatgagcataataataaattatttgagacatcgaatgataacacagtgagagttgaaccaggttatgaacaccggtattttgaccgcgtaataaaaaaacgttataaaggcattgattatttaattattaaagaaccaatcacaacgcaagatttcaaagggtatagcttgttaattcattcactagaaaattatgataacatcgtaaaatcattgtatatcattgcgcttgcatttggagtgattgcaacaattataactgctacaatcagttatgtattttcaactcaaattactaaaccgcttgtcagtttatcaaataaaatgattgagattcgacgagatggttttcaaaataaattgcaattaaatacaaattatgaagaaatagataatttagcaaatacgtttaatgagatgatgagtcaaattgaagaatcatttaatcaacaaagacaatttgttgaagatgcgtcacatgaattacgaacaccattacaaattattcaaggtcatttaaatttgattcagcgatggggaaaaaaagacccagcagtattagaagaatcgttaaatatttctattgaagaaatgaatcgtatcataaaattagtcgaagaattacttgaattgactaaaggagatgtaaatgacatttcttctgaagcgcagaccgtgcatattaatgatgaaattcgctcgcgaatacactcattaaaacaattgcatccagattatcaatttgatacggatctgacatctaaaaatctagaaattaaaatgaaacctcatcaattcgaacaattatttttaatctttattgataatgcaatcaaatatgatgtgaagaataagaaaattaaagttaagacaaggttaaaaaataagcaaaaaataattgaaattacagatcatggaattggtattccagaggaagatcaagatttcatttttgatcgcttttatcgagtggataaatctcgttcaagaagtcaaggcggtaatggactcggattatctattgcgcaaaaaatcattcaattaaacggtggatcgattaaaattaaaagtgaaattaacaaaggaacaacgtttaaaatcatattttaa

SEQ ID NO: 407512 - DNA, 1491 bp, Staphylococcus aureus
atggatgataagcaacacacatcttcatccgatgatgaacgcactgaaattgcaacaagcaatcaagaccaacaaactaattcatcgaaacgcgttcacttaaaacgttggcatttcatatcaattttaattggtacaatcctaataacagctgtcatcacagttgttgcatatatttttataaatcaaaaaataagtggtttaaacaaaactgatcaagcaaacttaaataaaattgaaaatgtgtataaaatcttaaatagtgattattataaaaaacagaactctgacaagttgagtaaagctgcaattgatggcatggtcaaagaattaaaagatccttattctgaatatttaacaaaagaacaaacgaaatcctttaatgaaggtgtttcaggtgattttgtaggtattggtgcagaaatgcaaaagaaaaatgatcaaattatggttactagccctatgaagggttctccagcagaacgtgctggcattcgtcctaaagatgtcattactaaagtaaatggaaaatcaattaaaggaaaagcattagacgaagttgtcaaagacgttcgcggtaaagaaaacactgaagtaactttaactgttcaaagaggcagtgaagaaaaagacgttaagattaaacgtgaaaaaattcatgttaaaagcgttgagtataagaaaaaaggtaaggttggcgttattactattaataaattccagaatgatacatcaggtgaattgaaagatgcagttcttaaagctcacaaagatggtttgaaaaagattgttttagatttaagaaataatccaggtggactactagatgaagctgttaaaatggcaaatatttttatcgataaaggaaaaactgttgttaaactagaaaaaggtaaagatactgaagcaattcaaacttctaatgatgcgttaaaagaagcgaaagacatggatatatccatcttagtgaatgaaggttcagctagcgcttctgaagtgtttacgggtgcgctaaaggactataataaagctaaagtttatgggtcaaaaacattcggcaaaggtgtcgttcaaactacaagagagtttaaagatggttcgttgttaaaatatactgaaatgaaatggttaacgccagatggtcattatattcacggtaaaggcattaaaccagacgttcctattgacacacctaaatatcaatctttaaatgtcattcctaatacgaaaacatttaaagttggagacgatgataaaaatattaaaactattaaaattggtttatcagctttaggttataaagttgataatgaatcaacgcaatttgatcaagcattagaaaatcaagttaaagctttccaacaagcgaataaactcgaggtaactggtgaatttaataaagaaacgaataataaatttactgagttattagttgaaaaagctaataaacatgatgatgttctcgataaattgattaatattttaaaatag

SEQ ID NO: 407513 - DNA, 969 bp, Staphylococcus aureus
atgaaacatctacttgttattcatactggtggcaccattagtatgtcacaagaccaatctaataaagtagtaacaaatgatatcaaccctatttcaatgcatcaagatgtcataaatcaatatgcacaaatagatgaattaaatccttttaatgtaccttcacctcatatgacaatccaacatgttaaacaattaaaggatattattttagaagcagtatcaaataaatattatgatggtttcgttatcacgcatggtaccgatacgttagaagaaactgcctttttacttgatttaatattaggtatcgagcaacctgttgttattactggcgcaatgcgctcgtctaatgaaattggttctgacggattatataattatatttccgctattcgcgttgcctctgatgaaaaggcccgtcataaaggcgtgatggttgtatttaatgatgaaattcatacggcgcgtaatgttaccaaaacacatacgtctaatacaaacacatttcaaagtccaaatcatggtccgctaggtgtattgacaaaggatcgtgtgcaattccatcatatgccatatcgccaacaagcattggaaaatgtcaatgacaaactaaatgtaccattagtaaaagcatatatgggtatgccaggtgacatttttagtttttatagtcgtgaaggtatcgatggtatggttattgaagcgttaggacaaggtaacatacctccaagcgcattagatggcattcaacaattagtatctttaaatatacctattgtgctagtttcacgttcctttaatggcattgtgagtccaacttacgcatacgatggtggtggttaccaactcgcacaacaaggttttattttttctaacggtttgaatggtccaaaagcaagattaaaattattagtcgcgttaagcaacaatttagataaagctgaaatcaaatcatattttgaattataa

SEQ ID NO: 407514 - DNA, 1380 bp, Staphylococcus aureus
atgttgcatgatattttacgaaacaaatttggtttcgagagttttaaaccgggacaacaggaaattatagaaagtataatgtctcaacaacacactctaggtattcttccaactggaagcggaaagagtttgtgttatcaaatacctacgtatttatcaggtaagccgacattaattatctcaccgttaatatctttaatggatgaccaagttatgcagttgaaaataaatggagaaaaacgtgtaacatgtattcactctggtatggatgaaattgagaaaaagcataatattaaatgtttacgacatagccgcttcatctttctaagtccagaatttctcctgcaaccgtcaaattttaaattaatatctatgatagactttggcatgattgttctagatgaagcacattgcctatctgaatggggatatgatttcagaccacattatgctctaataggaaaagtaacaaagcattttaaagaagcggtagtcttagcattgacagcaactgcaccaccgcatttacaagatgatttgacggaaatgttagcaattcaattcaacgttattaaaactacaatgaatcgcccaaacataagctttaagcatcttaattttcatgatgatgaagataaaattgagtggttgctaccgtttctacaacagtcgggaccaacgattatttatgtctcatcgaaaaagatgtgtctgaatttagcgcaacttatttatgattcaggttttctcactggcatttatcatggtgatatgaattatcaagagcgacacacagttcaacaacaatttttaaataatgatattccgattatagtcgcaacgagtgcttttggtatgggaattaataaaaaagatattcgcacaatcattcactttcatctttcaacaagtccttctaactacattcaagaaattggccgtgcgggtcgcgatggtgaactaagtcaggcaattagtttatttcaaccggacgataaatatattttagaaacgttattatttgcagatatgataacagaagaagatgtacaaaaattcgaaataggagaatttttagcatccgataaacaagacgttttgacaacgttgcattcattctatagtatcggcgccttgaaacagatatttaagcaatcatttaaacgaaagcaattaggattctttcgcatgattggctattgcaaattggatcaatgtagacggaagtatttattagaatttttcggtgaatatccaccggcacaagatcgatgttgtgacaatgattctaatataactgatatcgtaattttaaataagaagaaggtaattagaagtattgggtttgatgaaaagttgcaaaatttatttctcagatag

SEQ ID NO: 407515 - DNA, 954 bp, Staphylococcus aureus
ttgcaacacattataaaaacagcattacaacaaacatttaactataaaacaaataaaagtatttacaatatcttagttggtaagaaatctcaccaaaccttttttgacgcttgtagtcaacaacagttgtcattatatcacagtttaccactattaaaatatccgtcttttgagctatttttagaaaatataactgaatttaatgctgaaatggaaattatgttgcatcctagatatacatttgaaagcctggggcaaacatttcaagcaattcaactattagtgcaaaccatgtctaatactatgcagcaagattttcgtttcgtaccaatctctcaaaataataagatacaagaaactgtaaaaattgtctataactatattaaagaaaaccaattacaaattgactttgaaaatgaactacataacttgtttaaagcaataactttaaaagggccatgttacttacattattatttgcaaggctatgatgaaccaatgtatacgagacagcaagttagtttaatagaaaaactatctcaacagcaattgtttgaatacgaaatgaataatttagtgacaatgatgtttgaattagaaagtggagaatatactattttatcaaaaataataatgaaacctacattattaaatcaaacctatattacttatacaagattgcttgaacaattcacgatggaagatatagcggctcaacaacaagttaaaatcaatactatcgaagatcatgtacttgaaatcttaatcaaaggttatatgtctaattacgatgattatgttgaacaagaagatcaactgcaatttttgaatttttatcaacagcatcgtggcgaacgattaaaattttacaaagaacaatttgacacgttatcatattttcaattaaaagtattaatcgttggatttgaaagaggtgatttgaatgttgcatga

SEQ ID NO: 407516 - DNA, 249 bp, Staphylococcus aureus
ttggcaaaatatacaatcgttgatatggatacttgtattgcatgtggtgcatgcggtgcagcagcgccagatatatatgattacgacgacgaaggtattgctttcgtaatccttgacgataaccaaggtactgcagaagtaccagaagaattatatgaagacatggaagatgcattagatggttgccctacagattctataaaaattgcagacgaatcatttgacggggacgctttaaaatatgaataa

SEQ ID NO: 407517 - DNA, 915 bp, Staphylococcus aureus
atgtttaaaagaactaaactaatcttaatagcaacgatactactatcaggatgttcaactaccaataacgaatccaacaatgaaacaaaatcagtaccagaagaaatggaagcttccaaatatgtaggacaaggcttccaaccacctgcagaaaaagatgcgattgaatttgcaaagaagcataaagataaaatagctaaacgtagtgaacaattttttatggataacttcggtctaaaagttaaagctaccaatgttgtaggtagtggcgacggcgtagaagtattcgtgcattgtgatgaccacgacatcgtatttaatgcgagtattccatttgacaaatcaattattgacagtaatagctcattaagaagtgaggacaaaggcgatgatatgagtactttagtaggtacagtgttgagtggctttgaatatcgagcacaaaaagaaaagtatgacaatttatataaatttttcaaagataatgaaaagaaatatcaatatacaggatttacaaaagaggcaattaacaagacacaaaatagtggatgtgaaaatgaatatttttatattacgactataccgtataatttaactgagtatagagactattttgaaccattattaaacaaaagtgacagtgaattttcaaaagaattgtcaaatgttaagaagcaattaaaagataagtctaaagtttcggtaactactactctatttagtaaaaaaaagaactatactaaaaaaagtaacagtgaaaatgtaataaaaatggcagaagaaataaaaaaagaaaaagagataccaaacggtatagatcttagtataaaattttcggacaataaaataaatacagttaaaccaaattataacggtaaaagcacttcagaatatggtgtgtttgatcaagaataa

SEQ ID NO: 407518 - DNA, 930 bp, Staphylococcus aureus
atgaaaaaattcattggatcagttttagctacgacattaattttagggggatgttccacgatggaaaatgaatcaaaaaaagacacaaaaacagaaacaaaatctgtaccagaagaaatggaagcttcaaaatatgtaggccaaggctttcaaccacttgcagaaaaagatgcgattgaatttgcgaagaagcataaagataaaattgccaaacgaggcgaacaattttttatggataacttcggtttaaaagttaaagctaccaatgttgtaggtagtggcgacggtgtagaagtattcgtgcattgtgatgaccacgacatcgtatttaatgcgagtattccattcgacaaatcaattattgacagtgatagctcattaagaagtgaggacaaaggtgatgatatgagtatgatggtgggtacagtactaagtggctttgaatatcgagcgcaaaaagaaaagtatgataacttatataaatttttcaaagataatgaagagaaataccaatatacaggctttacaaaagaagcaataaacaagacgcaaaatgtcggatataaaaatgaatatttttatatcacctactcgtcaagaagcttaaaagaatatcgtaagtattacgaaccattgattcataaaaatgataaagaatttaaagaaggaatggaacaagccagaaaagaagtgaattacgctgctaatacagatacagtaacaacattgtttagtacaaagaaaaattttactaaagataatacagttgatgatgtaattgaactgagtgataaattatataattttaaaaataagccagaaaaatctacaattacaattcaaataggaaagcctactattaatactaaaaaagccttttatgatgataatgatccaatagaatatggagtgtatcgtaaagatgaataa

SEQ ID NO: 407519 - DNA, 198 bp, Staphylococcus aureus
ttgagtatactaacaattattttaatagcactattagtcatcctcctttttagagttggactttctattttgcgatttttaatttatgtcggacttgttttattatgtatttacttaggatatcaaggtttaatttggttgctcgatttttttcaaataaatagtggatttttaccacactttcaatttaacaattaa

SEQ ID NO: 407520 - DNA, 591 bp, Staphylococcus aureus
atgaaagttaatcctaataatatagaattaatcattagtgcagtaaaggaagaacaatatccagaaacagaattgtctgaagttgcactgagcggtcgatctaatgtaggtaagtctacatttatcaatagtatgattggcagaaaaaatatggcacgtacatcacagcaacccggcaaaacgcaaacgttaaatttttataatatagatgaacaacttatttttgtggatgttccaggatatggatatgctaaagtaagtaaaacacaacgtgaaaaatttgggaaaatgattgaggaatatataactaagagagagaatttgcaattagttattcaattagttgatttaagacatgatccaacacaagatgatatcttaatgtacaattatttgaaacattttgatattcctactttagttatatgcactaaagaagacaaaattccaaaaggtaaagttcaaaagcatattaaaaatattaagacacaattagatatggatccagacgatacaattgtaagttattcatcaattcaaaataataaacaacaacaaatatggaatttaattgaaccgtatatttcataa

SEQ ID NO: 407521 - DNA, 1362 bp, Staphylococcus aureus
atggctgaaaaattacaaagggaactgagcaatcgccacattcaattaattgctattggtggcgcaattggtacagggctattcttaggcgctggtcaaacgattgcattaactggcccttctatattactaacatatatcattattggatttatgttatttatgtttatgcgaggtttaggtgaaatcatcattcaaaatactgaatttaaatctttcgcagatgtaaccaatacatacattgggccttttgcaggattcgtaaccggttggacatactggttctgttggattattacaggtatggctgaagtaacagctgtagcaaagtatgtaagcttctggttcccagaaattccaaactggattagtgcacttttttgcgtattgttattaatgtcttttaacttattgagtgcgagactatttggagagttagaattttggttctctatcattaaaatagcaacaatcattggtttaattgtcgtaggtttcgttatgattctatttgcatataaaactcaatttggacatgcgagtttcacgaatctatacgagcacggtgtattccctaaaggagcatctggattctttatgtcattccaaatggccttattctcattcgtgggaatcgaaatgattggtgttacggcaggtgaaacgaaagatcctgttaaaacaataccaaaagcgattaatagtgttcctattagaattttaatattttatgtcggtgctctagcggttatcatgtcgattattccttggcaacaagttgatcctgataacagtccattcgtaaaattattcgcattaattggaattccatttgctgcaggcttgattaattttgtagtactaactgctgctgcttcatcatgtaacagtggtattttctcgaatagtcgtatgctgttcggtttatcaagtcaacaacaagcaccaccgaatttctctaagacgaataagtatggcgttccacatgtagcgatctttgcttcatcagcattgttactcgtggcagcattattaaactatattttccctgatgctactaaagtatttacgtatgtgacaacaatctctacagtattattcttagttgtttggggactgattatcatcgcttatatcaattatagtcgtaaaaatccagaccttcataaaaaggctacgtataaattgtttggcggaaaatatatgggctatctcatttttgtattctttatatttgtgtttggcctattgtttatcaatgttgaaacaagacgtgcgatatactttattccgatttggtttatactattaggatttatgtacttaagatataaacgtatcgctgctaaatcaaataactaa

SEQ ID NO: 407522 - DNA, 1299 bp, Staphylococcus aureus
atgacaaaacatgaacaaattttagattatattgaatcgttatctataggctctaaaatttcggtgcgtaaaatcgctaaatttttaaacgtatctgaagggacagcatatcgtgcaattaaagatgctgataaaatgggcatggtcgcaacgatagatcgtgttggtacggttcgaatcgaaaaacgtaatcgtaatgaaattgaacatttaacttttaatgaaattgtcaatattattgatggccaagtgttaggtggcaacaaaggtatcactaagatggtatctaaatttgcaattggagcaatggaactcaaagatattttaaagtatattggtccaaagacattattgatcgtcggaaatcgcgaagatgtgcagattgaagctttaaaaagaggcacggctatattaattactggtggatttaagccatctaataaagttattaattttgcgaatgaacatgatttacctgttctatcatcaagttatgatacattcctagttgcaaatattatcaacaaagcactttttaatcagaaaatacgaaaagatatcttaatagttcaagatataatgacgccattagatgatttatctgtgctgtttgatacgatgaaaatagcagattataagcgtatggcgaatcgaactggccatacaagatttccggtagtcaatgagtcttataaattagtaggtattgtaacaagtcgagagatgattaatacaaaggacgacgacgaaatagataaagtgatgacgcgaaatcctatttatgtaaatgctatgagtacagtagcaagttgtgcgcatatgatgatttgggaaggtattgaattgattcctgtcgtttcgagtaataaaaagacagtgggtgtgattaatagacaagatgttttaaagtccatgcaacttttaggaagacagcctcaaatgggtgaaacaattaacgatcaaatcgccaaatatataacaatgaatcaagatggaattacagtagaagtttcaccactgttaatcaatcactacggaacagtaagtaaagcggcatttgtaagtattatagaagaaacaatacaatatgaaatgcgtaaatttaaaaaaggtaatgtcatgatagagaacttaaatatcgtgtatattaaaacagtacctattgaatcacatataacagtgcgctttggcatactagacgtcggaagaaacttcgccaaaatagaagtgaacatgcatagtcaaaacgacaaagtagcgagtgctctcgtgatatgccaaatgtttgacgaagtatag

SEQ ID NO: 407523 - DNA, 345 bp, Staphylococcus aureus
atgattatgactgtggttctggattttttatattattcactatctaaccaacaacttgcatcaaacaaaaccattacgaaccaaaaacataatcaatatcataacccaccaagagttgactatggggccccaacatgtagaatttcgaaaagaaattctacagacaatgcaagttgggctgaggccccaacatggaagctgacgaaaaagtcagcttactataatgtgcaagttggggtgggccccaacatggagaatttcgaaaagaaattctacagactatgcaagttgggctggggtcccaacatggaagctgacgaaaaagtcaacttccaatatcagtag

SEQ ID NO: 407524 - DNA, 1182 bp, Staphylococcus aureus
atgcaattcgataatattgacagtgctttaatggctttaaaaaatggagaaacaattattgtagtagatgatgagaatcgtgaaaatgaaggtgatttagtagcggtcactgaatggatgaacgataataccattaattttatggcgaaagaagcaaggggattaatatgcgcaccagtgtctaaagatattgcacaacgtttggatttggtacaaatggttgatgataactcagacatctttggtacgcaatttacagtgagtattgatcatgtagatacaacaacaggaattagcgcttatgaacgtacattgactgccaaaaagctcattgatcttagtagtgaagctaaagattttaatcgtcctggtcatttatttccattagtagcacaagataaaggcgtattagctagaaatggacacacagaagcggctgttgatttagctaaacttactggtgccaagcccgctggtgtcatttgtgagattatgaatgatgacggcacgatggcgaaaggacaagatttacaaaagtttaaagaaaaacatcaattaaagataattacgattgatgatttaattgaatatcgtaaaaaattagaaccagaaattgaatttaaggcaaaagtgaaaatgcctacagatttcggaacatttgatatgtatggttttaaagcgacttatacagatgaagagatagttgtactgacaaaaggtgcaattcgacaacatgaaaatgtacgcttacattctgcgtgccttacaggcgatattttccatagtcaacgttgtgattgtggtgctcaacttgaatcgtctatgaagtatatcaatgaacatggtggcatgattatttatctacctcaagaaggtcgtggcataggattgttaaacaaattacgcgcatatgaattaattgagcaaggatatgatacagtaactgcaaatttagcattaggttttgatgaagatttgcgagattatcatattgctgcacagattttaaaatattttaacatcgaacatatcaatttattaagtaataatccaagtaaatttgaaggattaaaacaatatggcattgatattgcagaaagaattgaagttatcgtaccagaaacggtacataatcatgattatatggaaacgaaaaaaataaaaatgggtcatttaatatag

SEQ ID NO: 407525 - DNA, 1503 bp, Staphylococcus aureus
atgcgtgtagcaataataggcatgggaactgctggtgtaagtgtattgagagagttagttaagcacccaaaatttaatcaattagatatagatttatacgatgataaagtaaatatgggacagggcgtaccatttcaaaatgatagttctgagctgctaattaatatgccttcgaaaaagatgagtttaaatttagatgatgagactgaattttggaagtggtataaacagcaaactgattttaattttgatgaacctgcatatttaccgagatttgtattcggacattatatgaaatcttatttatctatgttcacgaaaaaatatccaaatatatcaactatttataataaagttcaagagatttatacaaattctaatattgatgaaacgaatttaacttattacatatgtactacaaattcagaacaatcatggcaagcgtacgattatgtatttttaacatgtggtacatttgcctaccatgatccatataacttaaagggtaaaaaaggatatatcgctacgccttatccaacatataatacgttagacgaagtaaatgaacaggacgatattgcgattattggtacaggccttgccagtttagatgttgttcgttatgttgctgctcatcatccgaaattaccaattactatgacgagtcgttctgcaaatttaccaagtgtaagaggtacaatgattgacgtgtcattcaagtacttaactaaagacaaattaaatgacattaaaaaacatcatttcggcaatgcaccgcttgatactttagtttctttatttttaaaagaatgtgctgaatatgacattgattttaaaaaattagtacatagacgtacaggaaatcatattgcagatttgaagtatgatttagcgcgtccaacagaaatgggcattttccaaagtatgattgaacatttgaaagagaatttaaattggatatggaatagcttaagtattgaagaccaacatcaatttaatcaaaaatactcaaaaatgattcaattaaattcaaatccaatgcctccaagaactgctgaactaattattgaattaatagaaaataagtctttaattttgaaaaaagatttagaagatgtgaaacatgatggcaagttgtattatttttcatacaaaaaccaagaatcagtagacatatataatgttgtcattaacgcgacaggtgcaaaaagtcatttaaatgaattagatcaagatgatcaattaattaaaaatcttgaaaatagacaaattgtacaagcacatccaatgggaggcatacaaatcataccggaaaccaatcaagttattagtccaaggtttggaacattaacaaatatgattgcgataggtcaaatgacaaacggtgttaataaactacgaaatggtgtgaaaatgatagtagaacaagttgcgcatacagtatctcaattatatgatgctttagaatcgaatgagcaacaacagcgcagtgacaatcaataa

SEQ ID NO: 407526 - DNA, 471 bp, Staphylococcus aureus
ttgaaatttaatgacgtatacaacaaacaccacaaaatcatacaccatcttttaaaaaaatataatattagctataattatgatgagtattatcaactactcttgataaaaatgtggcaattgagtcagatatataaaccctcaaacaatcaatctttatcctcttttttattcatgcgactaaacttttaccttatcgatctattcagacaacaaaaacgtttaaatgatatcattttatgtgaaaatcattcaccaatacttactgaacagccaacatactttaatgaatatgaccttcgtttacaagatgtttgtgccctactaaaccacagggaacgacagtggcttatgctttatcttgaaggctataagcaatatgaaattgctgatagtatgtcattatcaacttcaacaattaaattaataaaggcatcagttaagcgtaaatgccaacggttttttgaatag

SEQ ID NO: 407527 - DNA, 444 bp, Staphylococcus aureus
ttgcaagacatttctacaaaacacctactttatatccaaaccgcaacttcgaaccatcttgagacaaaatgtgtctttctgtaccatgaatacaatctcgaattccctattactaaagccattccttattatgctaaattgcattttacatcagcatcaattttaatcgatgcggcaaaaagcatactcaacattaacaagctggtgcctatttaccttaatccaaaaacgattcttttcccaataaaacaaaagcgtgcaccgatacaaacatatatcaatgcacactatataattggtatgacggaaatgggcaattcgactatgctccatttcaaaaatggtaaaacattagaagtcgatgaacccatgtctcttatttccaaaaaatgctatgaaagtttagcattgaagcatttcattgaaaatactaatgaccattaa

SEQ ID NO: 407528 - DNA, 444 bp, Staphylococcus aureus
atgaataaagcatcgttcgataaaaaggttaaaaagcaattatggtttttgaacaaaaaggaaaaacaggcattagatcaacggttgtctagtattactgacaaggacaatgtgaactttaataagccaatcacctttgctaatggttacttaagagaaaatgtatttcgtagtaaagaaactaaaagttatagcgtctttgtaacattagtagtgatgatgtttgcatacgttgctttattaggtttgtttttatttggattaattacaagtctatctggtgtgcaatttttcgttaaccctaaagtagaattgtcgacaacggttgttattttaacaatcattggggcgattttattaatgttagttagtatctatttaataaaaatcacaacatcatattttacaaagaaactgttagaacataaatttaatggtcattag

SEQ ID NO: 407529 - DNA, 636 bp, Staphylococcus aureus
atgcagaaattcaaggatttgttttacgatgatttatcagttgcacgtggaaattattttctaactttattatccgcattctttattactattattctactaattggcttcgttgtcagtgatacacacatactttatggcgtgtttatagtgctcatcggtatcgtgttattacggttattcaaaattaatttactctcatttaaaaaattaacattgtcacaagtgatttatatcatcggtggtgcattgctaatttatgggttagattatctttatttacattttcatgacgtaccgacaaatgaacaagaattagatcgagaattacaacatacgcctttgtatatgtctattgtcacaattgctattatccctgccattgtagaagaaatcgtttttcgaggcatgataataagagttgtatttagaaagcatttatttattggattagttgtgtctagtctagtgtttgcatcattgcatgaatcggatacttggattgggtacttaccttatttatattctggagtgatttttggcctaatatatttaaaaacaaagcgattagaagtcgttattttaatccactttataaataacctatcctcattactcattctgatatggggataa

SEQ ID NO: 407530 - DNA, 621 bp, Staphylococcus aureus
atgttttcgaggaataacaatatttttgttgatgatttgtctgtaacaaaggacaattatttaattgcagttttaaaaatgttggtcatttttttagtaattaattatggaacagacgtcagttatgaccatgagtatgttgggctatttattatattactaggtgttgtacttcttaaagttttaaatatcaatttattatctttcaaaaaattaaaattcactcatatgctttatattatatttggatttttgttgatgtatggattagattacttatatgatatgttcgcaccgcctacattaaatgaaatattgatagatgaagagtctgaagatgcaccttaccacttagctctgcttagtaatgctatcattccaccaattacagaagaaatcatctgtcgtggattgattatacgaattttatttagaaatcatcttttcttaggttttattgtttcaactgtattcttcacgctaatacatgaatcagacacgctgattggttatcttccgtatttttattcaggtttaatttttggctatacttacttaaaaacaaaacgattagaggtaccgattttaatacattttatcaataacctcttagccatgtaa

SEQ ID NO: 407531 - DNA, 1371 bp, Staphylococcus aureus
atgagtagtgataatatgtggttaacagtaatggggctcattattattatttcaatagtaggtttactcattgccaaaaagataaatccagttgtaggtatgacaatcataccttgcttaggggcaatgattttaggatatagtgtgacagatttggttggattttttgctaaagggttagatcaagtcatcaacgttgttattatgtttatcttcgccattattttctttggcatcatgaacgatagtggtttattcaagccgcttgtcaaacgcttaatattaatgacacgaggcaatgtcgttatagtctgtgcaatgacagctttaattggcacaatagcccaattagatggtgccggtgcggtaacatttttgctttctattcctgcattattacctttatataaagcgttaaatatgaataaatatttattgattctactattagcattaagcgcggcgattatgaacatggtaccttggggaggtccaatggcacgtgtagctgcagtgttaaaagccaaaagtgtcaatgaattatggtatggattaattcctattcaaataataggattcattcttgttatgttgtttgcggtatatcttggatttaaagaacaaaaacgaatcaaaaaagcaattgctagcaatgaattgacgcaaacacaagatatagatgtacataaattggtcgaagcatatgaacgagatcaagatataaaattccctgtaaaagggcgtgcacgaacaaatccatggataaagtggatgaatattgttttaactttagctgttattctagcgatgttaataaatattgcgccacctgaatttgcattcatgataggtgtttcattggcgcttgttattaattttaaatcagtggatgaacaaatggagcgattaagagcgcatgcgccaaacgcattaatgatggcggcagtcattattgcagcaggtatgtttttgggtgtgctcaacgagacagggatgcttaaggcaattgcgacagacttaattaaagtgattccggcagaagtagggccgtacttacatattatcgttggattgcttggtgtaccattagatttattaacgagtacagacgcttattattttgctgtgttaccgatcgtcgaacaaacagcagggcaatttggtgtaccgtctttatcaacagcttattcaatggtcatagggaatattataggcacatttgtcagcccattttcaccagccttatggttggcaattggtttagcagaggcaaacatgggcacgtatattaagtatgcattcttttggatttggggattcgccatcgtgatgttagtaattgcgatgttaatgggcattgtgacaatttaa

SEQ ID NO: 407532 - DNA, 1617 bp, Staphylococcus aureus
atgtatgaaaggaagttagttatgcaaaagtcagctctattcgcgcctgaaaaatataacattatttcggaaatcgaaaaatatagccacataccagataaaaaggcaattttatatcataatactgaaggtgaagatatatcagtcacttaccaacagctcattgaacagtctaataaagtaggtaatgttttagcatcgcacggtttatctaaaggcgataaagtactcattatgatgccacgatctattgcgacgtatgaattatatattgctgctttaaaattaggtgtcgcaatcattccatgttctgagatgctaagaactaaagatttacaataccgtatcacacacggtgaaataaatgcagtcattgcattagagccattcacagttgaatttgaaaaaattaaagaatatgatgcgttaactaaatttgttatcgctggtcataaagatggatggatttcactcgaatctgagaaggaaaatgcaagcaacaaactagaaatggcagatacgacgcgagatgatacagcgattttgtcatatacatctggtacaactggcaatcctaaagccgttacacattgtcatggatggggatttgcacatttacaaatggcaccaaaacattggttatgtattaatgaagatgacttagtttgggcaacagcagcaccaggttggcaaaaatgggtatggagtcctttcttatctgtattaggttcaggtgcaactgcttttgtatttaatggaagattcagccctgaaacatacttagaattgcttcaaaaatatcaaattaatgttttatgttgtacaccgacagaatatcgtatgatggctaaattacagaacttaaatgattatgacttaacgcatttacatagtgccgtttctgcaggtgagccactaaatcgagaagtagttgaacaattcaagaaatactttaatttaactgtaagagatggatatggccagactgaaagtaccttgcttataggctttttaaaagatacaccacaaaggattggatcaatgggtaaaggcattccgggtagttcggtcactgtagtagatgatgacgggaatagcgtacctgctaatacgaaagggaatattgcagtaccacttgatttgccagcacttttcaaagggtattataaagagccagaacgtacggcgaaagcgcaaacaggtaaatactacatcactggtgacttagctcatgtagatgatgatggttatttctggtttgaaggacgtcgagatgacattattattagttcaggctatacgattgggccttttgaagttgaagatgcgttaacgaatcatccagccgttaaagaatgtgctgtagtagcaaaacctcatgatatacgagggaatattgttaaagcattcgttattttacaggaccatactgcgggtgatgatacgctagttaaagaactacaacaatttgttaaaaatgaagttgcaccatataaatatccgagagagattgaattcgttgacgacttaccaaaaacaaattcaggtaaaattcgtcgtgttgaactacgagatgctgaaatagaaaagtgggaaaaacaaaaagataacaattaa

SEQ ID NO: 407533 - DNA, 249 bp, Staphylococcus aureus
atgcatccaagaaatacatcacaattacctttaatattgaaaattattttgaatcttgcacttataggcattgtaattatcgttctaacacatactgagtttcaacttaatgccggtgatagacatgtatttttattaacatgggatattcgaggtttgaaatcttatattttctcattcttaatagtggttgcgcttgtttctaaactaattttaatatttataactagacgacaaagaacatcataa

SEQ ID NO: 407534 - DNA, 1338 bp, Staphylococcus aureus
atgagtaaagcacatcaattaattcaagaggatgaacattattttgcgaaatcaggacgtattaaatattatccgttggtgattgatcatggatatggagcaacattggttgatattgaggggaagacatatatcgatttgttatcgagtgcgagttctcaaaacgtaggtcatgcacctagagaagtaacagaagcgataaaggcacaagttgataaatttattcattatacaccagcatatatgtatcatgaaccgttggtacgtttagctaagaagctttgtgagattgcacctggagattttgaaaaaagagtgaccttcggattaaccggatcagacgcaaatgatggcatcattaaatttgccagagcatatacagggcgtccttatatcattagtttcactaatgcatatcatggttcaacttttggctcgttgtctatgtcagctattagtttaaatatgcgcaaacattatggtccgttattgaatggtttttatcatattccgtttccagataaatatcgtggtatgtacgagcagccacaagctaattcagtagaagaatatttagcacccctaaaagaaatgtttgcgaaatatgtacctgctgacgaagtagcatgtattgttattgaaacgatacaaggcgatggtggacttttagaaccagttccagggtattttgaagcgttagaaaagatttgtcgtgaacatggtattttaatcgctgtcgatgatattcaacaaggttttgggcgaacaggtaaatggagttcagtctcgcattttaattttacgcctgatttaatcactttcggaaaatctttagcaggtggtatgcccatgtcagcaattgttggacgcaaagagattatgaattgtttagaagcaccagcacatttatttacaacaggtgctaatccagttagttgtgaagctgcattagccacaattcaaatgattgaagatcagtcgcttcttcatgctagtgcggaaaaaggggaatatgttaggaaacgaatggatcaatgggtatctaaatacaatagtgttggcgatgttagaggtaaaggtctgagcattggtattgatattgtttccgacaaaaacctcaaaacacgtgatgctactgcggcacttaaaatctgtaattactgctttgagcatggcgtagttattatagctgtagcaggaaatgtgttacgattccaaccgccattggtgataacatatgagcaattagacacggcgttaaacactatagaagatgcactgactgctttggaagcaggtgacttagatcaatatgacatatctggacaaggttggtaa

SEQ ID NO: 407535 - DNA, 1683 bp, Staphylococcus aureus
atgaaccaacatttactaggaaatccaaaattaactgtaactaatgtcaatgaagtgaaagccggtattaaccacatcgttgtcgacagtgttcaatatggaaatcaagaaatgattatggaaaaagatgtcactgtggaaatgcgcgatggcgaaaaattatatattaatattttcagaccaaataaagatggcaaattccctgtagttatgtctgcagatacttacggtaaagataataagcctaaaatcacaaatatgggtgccctttggccaacattaggcgccattccgacatctagttttacacctgaagaatcaccagacccaggattttgggtgccaaatgattatgttgtagttaaagttgcattacgcggtagtgacaaatcaaaaggcgtcttatctccatggtcaaaaagagaagcggaagattattacgaagtgattgaatgggcagcgaatcagtcatggagtaatggaaacatcgggacaaatggcgtttcttatcttgcggtgactcaatggtgggtcgcatcattaaatccaccacatttaaaagcaatgattccttgggaaggcttaaatgatatgtatagagaagtagcctttcacggaggtataccggatactggcttttatcgtttctggactcaaggtatttttgcgagatggacagataatccaaatatcgaagatttgattcaagcacaacaagaacaccctttgttcgatgatttttggaaacagcgtcaagtgccattatcacaaattaaaacacctctactaacatgtgcgagttggtctacacaaggtttgcacaaccgtggctcttttgaaggatttaaacaagctgcatcagaagaaaaatggctatatgtgcatggacgtaaagagtgggaaagttactacgctagagaaaatctcgaacgccaaaaatcattctttgatttttaccttaaagaagaaaataacgattggaaagatacgcctcatgtcatttatgaagttagagatcaattttataaaggcgaattcaaatcagcgtcagcgttccctttacctaacacagaatatacaccattgtatttgaatgctgaaaatcacacattgaatcatgcaaagatcagtagcgcgcatgtcgcacaatatgactctgaagataaacgacaagatgtaagttttaaatatacgtttgacaaagatactgagttagttggaaacatgaaattaaaactatgggtaagcactaaagactcagacgatatggatttatttgcaggtattaaaaagttagatcgtcgtggtaatgaagttaacttccctgattttaatcatattgaaaatggtcaagtagctactggttggttacgcgtatcacatcgtgaattagatcaagaaaaatccacaattgcgcaaccttggcataaacatgaaacagaattaaagttgtcacaagttgatattgtacctgttgaaatcgaattgttaccttcaggcacgctatttaaacaaggcgaaacattggaagttgttgtaaaaggtagtgaaattgtaattggtaatagtacccctggcatgaaaacacgttatgaacatgaagaaaccgtaaataaaggcatgcacatgatttatactggtggtaaatatgattcacaattaatcattcctatcgttaattga

SEQ ID NO: 407536 - DNA, 210 bp, Staphylococcus aureus
atgtgtcatttgcaacgttataaaaatgaaaatgatcaaattaatggtataccattttcctatttcatgagttatgtttcaggtgcgggattgtctctgataagacattgggtagaagatccaaaccgtatagacaaagttgacttaataaggcattttaatacgattgtcaatcaagggccagcaacgataattaaaaatatacaataa

SEQ ID NO: 407537 - DNA, 2490 bp, Staphylococcus aureus
ttggcaaaatttttatataagatggtgacattcatcgcaaaacataaatggtccgcggtcattgcatggatagtgattgtagctgcaatattgataccacttgctacaaatgcaccgaaatttgacaatgatattaaaatgacaggattagagtcgttagatacgaataaaaagattgaaaaacattttaatcaagatagtgaaaaggcacaaatacgtgttgtctttaagacgactaaagatgatggaattctacaaccgagtattactaaagatattaagaaaacgttagatgatattaaaaaagatgacaagcacattgataaaatatcagatccttatgaaaataagcaaattagtaaagataaaacaacagcatttgcagatatcacatatgacgttagtcaaacatctttaaaagatgactctagagataatgttaaaagtcatttgaaagacttacgtgacaatcataatgtacagacagaattaacaggaacaggtatgacctctacagatataggtggtaattctgaattagttggtattattgttgcctttgttgtgttattaatcacatttggttcagttattgctgcaggtttaccaattataagtgcattaattggtttagcttctggtgtaggcattatcagtttgttaacttatgcatttgatataccaaatgtcacactgacattagccgtaatgattgggctcgctgttggtatcgattatgcattatttattttgtttagatatcgacaagtaatgaaaactgaaacagactatgttaaaggtatcggacttgcagtgggaacagcaggtagcgcagtcatcttcgctggtgtgacagttgtgattgctgtatgcggtttatcgctagttggtatagatttcttagcagtgatggggtttgcttcggcaattagtgttatatttgctgtattcagtgcactgactttattacctgcgttaattagcattttccataaacgcattaaagtgaacaaattgcagtctaattttaaaaaagatattgatacgccgtggtctaaatttattactggtaatgcacttgcagcagtattattaggtttaattatattagttgcagcggctattccagttagtcatatgcgtcttggcattccagatgacggtgttaaaccagcagattctacacagaaaaaagcttacgatattatctcggataaatttggcgaaggatttaatggccaaataccgatgttgataaatgtgaaagataaaaaggatgatccacaaggattacaacaagatttacagtctgtatataaagatattaaagataagaaaaatgtagatattgttacgccaccacaaatgagtaaagataatgattatgcattgatggttgtgatacctaaacatggacctaatgcagaaagtacaaatgacttagtacatgatttacgagattataataaagatgcgcaagataattatggatttaaaacggaaatttcaggacaaagtgtcattaatattgatatgtctaaaaagttaaatgaggcgatacctttatttgcaacagtaattgttgtattggcatttttcttattaatgattgtcttccgttcaattctaataccgttaaaagcagttttaggatttgtcttgtcattaatggcaacactaggttttacaacctttgtgatgcaagatggctttatgaaaggattattcggtatagaaacgacaggaccaatgctagccttcttgccggttattacaattggtatactattcggcttagcaatggattacgaagtcttccttatgtcgcgaattcatgaagaatatagtaaaacaggggataatgattattctatcaaagtaggattgaaagaaagtggtcctgttattgtagcagctgcattaatcatgtttagtgtcttctttgcgtttgtattccaagaagatgtcatgattaaatcaatgggtatggcattagcgtttggtgtactctttgatgccttcgtagtcagaatgatgttaattcctgcattaactaaattgtttggaaaaggttcgtggtatttaccagcatggttgaatcgtattattccacgagttgatattgaaggacatgcacttgaaaaatataaaacggttgaatcacaggaatctgaagctaaagatagtaaagaaacatacgacacaacctttaaagtatatccacaaggtgcaacaaatgtatcgaaacatcaagatgtacatggacaagatgatgcacgttcaatagtactagatgataaaacgatggcattgtaccaagaagtgaaacagcaatcagcaagttcattgttcttatatgatgctttaatggattatcaaaacaaacatcaactaaattcaaagcaacaagccacgaatatagaacagttgaataaaaatattgaaaagctcaatcaattgttagaaaaaaacttaagaaataaatcataa

SEQ ID NO: 407538 - DNA, 2109 bp, Staphylococcus aureus
atgaataacaattttttcaatagtgatttcgattctattttacgaagaatgatgcaagacatgcaaaactcaaatcagactagtaacaagaaatactatattaatggtaaagaagtttcaccggaagaattatcacaatttacgcaacaagatgataatcattctgccgaacaaagtgcgcaagcttttcaacaagcagcactaagacaacaaggtcaacaaagtggcaatggcaattatttagaacaaattggtcgtaacttaacgcaagaggctcgtgacagattattagatccagtcatcggtcgtgataaagaaatccaagaaactgcagaagtcttaagtagacgcactaaaaacaatcctatcctagtcggagaagctggagttggtaaaactgcgattgtcgaaggtttagcgcaagcaatcgttgaagggaatgtacctgcagcaatcaaagataaagaaattatatctatagatatttcatctcttgaagctggaacgcaatatcgtggcgcctttgaagaaaacatccaaaagttagttgaaggcgttaaatcatcacaaaatgctgtgctcttctttgacgaaattcaccaaatcatcggttccggcgcaacaggaagtgattccggtagtaaagggttatctgatattttaaaaccagcattaagtcgtggtgaaatttcaattataggtgcaacgactcaagatgaatatcgcaataatatcatgaaagacgctgcattaacacgtcgttttaacgaggtactggttaacgaaccaagcgcaaaagatacggttgaaattttaaaaggaattcgtgaaaaatttgaaacacaccatcaagtcaaattacctaatgacgtattaaaggcatgtgtagacttatccattcaatatattccacaacgcctattaccagataaagcaatcgatgtgttagatattacagcagcacatttatctgcgcaaagtccagctgtcgataaagttgaaactgaaaaacgaatttctgaattagaaaatgataaacgtaaagcagtaagtgctgaagaatataaaaaagctgacgacattcaaaatgaaatcaaatcattacaagataaattagaaaacagtaatggtgaacatactgctgttgctacagttcatgatatttcagatactattcaacgattaactggtattccagtttctcaaatggatgataacgatattgaacgtttaaaaaatatttctaatcgtttaagaagtaaaatcatcggtcaagaccaagctgtagagatggtttcacgtgcaattcgccgtaatcgtgctggattcgatgacggcaaccgtccaattggtagcttcctatttgtcggtcctactggtgttggtaaaacagagcttgccaaacagttagccattgatttatttggtaataaagaggcactgattcgacttgatatgagtgaatatagtgatactactgctgtttctaaaatgattggtacaactgctggttatgtcggttatgacgataattcaaatacattaactgaaaaagtacgacgcaatccatattcagtcattctatttgatgaaattgaaaaggctaatccacaaatattaacattattacttcaagtgatggatgatggtaatttaacagatggtcaaggtaacgtcatcaactttaaaaacacaatcgttatttgtacgtcaaacgctggttttggtaacggtacagaccaagaatacgatgacattatgcaagaaatgaaaaaattcttccgtcctgaattccttaaccgcttcaatggtattgtggaattcttacacctagataaagaatcacttcaagaaatcattaatttattgttggatgatgtccaagtaacactagataaaaaaggtattacgatgaatgtctctcaagatgcaaaagattggttaattgaagagggatatgatgaagagttaggcgcacgcccattaagacgtattgttgaacaacaagtgcgtaacaaaataacagattattatttagatcatacagacgttaaacatgtggatttagatatcgaagacaatgaattagtcgtcaaaggtaaatcatga

SEQ ID NO: 407539 - DNA, 522 bp, Staphylococcus aureus
atggtatataaaagttactatgattcgcctgtaggacgattggaacttgtgagtgatggggtaagtctgaccgctgttttgtttgaaaatcaacaagatgatggtactagggaagaaaatacgtctttagcgatatttaaagaggcgacacagtggttagacgcgtattttaaaggtgacaatcctgaaatcacaatacctttaaagccaacaggtagtcattttcaacagtgtgtttggaatgaattaagacagattccttatgggacgttaacaacgtatggtgctattgccaaaaaagtaggcaaggtgcttgataagccaaaaatgtcagcccaagcggttggaggtgcagtcggaagtaatccattatctattatcgtgccatgtcatcgtgttgtcggtaaaacgggtagcttaacaggattcggtggaacgattaataataaaattaagctgttagagttggagaatatcgatatgtcaaagctttatgtaccaaaacatagcacgaagccgtaa

SEQ ID NO: 407540 - DNA, 1167 bp, Staphylococcus aureus
atgacaataggtatcgacaaaataaacttttacgttccaaagtactatgtagacatggctaaattagcagaagcacgccaagtagacccaaacaaatttttaattggaattggtcaaactgaaatggctgttagtcctgtaaatcaagacatcgtttcaatgggcgctaacgctgctaaggacattataacagacgaagataaaaagaaaattggtatggtaattgtggcaactgaatcagcagttgatgctgctaaagcagccgctgttcaaattcacaacttattaggtattcaaccttttgcacgttgctttgaaatgaaagaagcttgttatgctgcaacaccagcaattcaattagctaaagattatttagcaactagaccgaatgaaaaagtattagttattgctacagatacagcacgttatggattgaattcaggcggcgagccaacacaaggtgctggcgcagttgcgatggttattgcacataatccaagcattttggcattaaatgaagatgctgttgcttacactgaagacgtttatgatttctggcgtccaactggacataaatatccattagttgatggtgcattatctaaagatgcttatatccgctcattccaacaaagctggaatgaatacgcaaaacgtcaaggtaagtcgctagctgacttcgcatcactatgcttccatgttccatttacaaaaatgggtaaaaaggcattagagtcaatcattgataacgctgatgaaacaactcaagagcgtttacgttcaggatatgaagatgctgtagattataaccgttatgtcggtaatatttatactggatcattatatttaagcctaatatcattacttgaaaatcgtgatttacaagctggtgaaacaatcggtttattcagttatggctcaggttcagttggtgaattttatagtgcgacattagttgaaggctacaaagatcatttagatcaggctgcgcacaaaacattattaaataaccgtactgaagtatctgttgatgcatatgaaacattcttcaaacgttttgatgacgtagactttgacgaacaacaagatgctgttcatgaagatcgtcatattttctacttatcaaatattgaaaataacgttcgcgaatatcacagaccagagtaa

SEQ ID NO: 407541 - DNA, 432 bp, Staphylococcus aureus
atgaaatataaaaagatactttttcgtttactaattgcctttgcagtccttttctcagcagatttcacttatcaatccgtcgaacaaacgcatcaatcgcatgccgcagttaattattacagtaaaaaccaatgtacatggtgggcatttaaacgtcgcgcacaagtcggcaaacctgtttctaatagatggggtaatgctaaaaattggtattacaatgcacgtaaatcaaaatatgcgactggtcgtacaccaagaaaatttgctgtcatgcaatcaactgcaggatattatggacatgtcgcagttgttgaacaagtatataaaaacggtagtattaaagtttcagaatacaacttttatcgcccattaaaatacaatacacgtgtactaagcaaaaaggcagcacgtaactttaactatatttactaa

SEQ ID NO: 407542 - DNA, 219 bp, Staphylococcus aureus; identical to SEQ ID NO: 404860

SEQ ID NO: 407543 - DNA, 594 bp, Staphylococcus aureus
atggaacatatttttagagaaggagaaaatggtgcgccaacgctaatattattgcatggtacaggtggtgatgagttcgatttattaccattaggcgaagcattgaatggaaattatcacttgttaagtattagaggacaagtttcagaaaatgggatgaaccggtatttcaaacgtcttggtgaaggtgtttatgatgaagaagatttggcatttcgtggacaagaattgttagcgttcattaaagaagctgctgaacgttatgattttgatattgaaaaagctgtgcttgttggattttcaaatggatcaaatatagcgattaacttaatgttgcgttcagaagcaccatttaaaaaagcattgttatatgcaccgttatatccaattgaagtaacgtcaacaaagaatttatcagatgtcagtgtgttgctttctatgggcaaacatgatccaattgtgccattagctgcaagtgaacaagtcattaacttgtttaagacacgtggggcacaagtcgaagaagtttgggtgaatggtcatgaaattacagaaactggattaacggctggtcaacaaatacttgggaaataa

SEQ ID NO: 407544 - DNA, 1080 bp, Staphylococcus aureus
atgcgtatcttaaaagagtccattattgtggcatttgcctttgtgggtgttgtcgttggtgccggctttgctactggtcaagaaattttccagtttttcacaagtcatggcgcatatagcatttcaggcattattgtgacaggactattgattactttaggtggaatgattgtcatgcatacaggtcatcatctaaagtctagaaatcattctgattcaattaactatttcttatacccctctattgcaagaggttttgatattattttgacgatgtttatgttgtctctagctattattatgactgcaggtggtgcttcaaccattcatcaaagtttcaacttaccgtattggctgagcgcactcatattagtcgcctttattttagcaacactgtttctaaaattcgatcgtttaattgctgtgcttggaggtgttaccccatttttaattgcgattgtcattatgattgcggtctactatttcacaacgagtcatcttgattttactgccgctaataatgatgctcagattcataagcagaaatcattatcacctggatggtggtttgatgcgattaactatgcaagcttgcaaattgctgctgccttcagcttcttatcagtgatgggtagtaaagttaagtatcgtgactcaacgttatacgggggcttgattggcggtttaatcattacatttttactcatgatgattaacctaggtttaatttctcaattcgataaaattaaacacgtcgatttacctacattaaaattagcgacacaaatgtctccgtcaatcggtattattatgtctgtcattatgatacttgtcatctacaatactgttgttggattaatgtatgcatttgcgtcacgtttcagcgttccatttagcagacgttacttcatcattattattacaatggctgtcatcacttatattagtacatttatcggtttcatttcattaattggaaaagtattccctattatgggattgttcggtttcatcttactcatacctgtactctataaaggtttaattaagcgtattaccggcaaatctcatatcgattaa

SEQ ID NO: 407545 - DNA, 204 bp, Staphylococcus aureus
atgaaggaaaacttagagaaatatattagaagtttgcctcttataggtctaattataagtatttttttaattattttatacttcttaatttatcgagtagaaggaaatttttgtgtaatcattttgtactgcttactgccattatttgtaaatacgtcactatatatattatacgtaatcatctttcgatattttaagaaatga

SEQ ID NO: 407546 - DNA, 1824 bp, Staphylococcus aureus
atgattattcctgcaatcatcggttacttatgtggtaatttccaatttggattattagttgcaaccggaactctagcacatatctacgtttttaaaggtccgtcgcgatctaagctgcgaactgtaataatttgtaatttagcgtttgcaatatgcatgatacttggtacgctaacagccacaacgccgctcgtttttggaatgacattattaattgttacggttataccattttatatatttaccgccttgaaaattgctggaccgtcatcgacattcttcattgtgacattcagtttacccattaacttacctatagcacctgaagaagcattatatagaggctttgcgattttagtaggtggtgtacttgccactatgatggtactcatcacaatcttattgtctaaaaacaaagctgaagaacaagccattcaaaacgattttaaactcatatctaagttattgcatgcttacaatgataaatctgcattttcacaagtagcaaaaacagcggtggatagttttaaagcgtcggataaactactcatcacttctacttcaagtaacgataaattaagtagacgtttccaaaaattattattattacacacatctgcccaagggatttattctgaactgttagagttgaacgctaaacaaattagaccattgccagatgagttaattgaaatgatggatcatatcattgcacaactagataatagtgatgaaaatgtaagatattggcgaaaagaagtgacagtatcagaagaatttcaaaatttattcaaccatatcttgaaaattgacgaaatggtgcatgcaaatgaagcgcgtattgcgtatgaagcagacatgcgaaaacctttatatagtaagcgtatttatcaaaatttaacattagattcaatcgtgtttagaaatacattgaggtatgcagcgattatgatgatagcgatatttatcgcgttaatgttcgattttgaaaaagcatactggatacctttatccgcacatacagtattattaggaacatcaactatacatgcaattgagagaggtatggcacgtggattaggcaccattttaggtgtgctagtactttcagttatattgttgttttcaataccaacacctgttgcagtaattttaatgggcattgcagcattatttactgaagcgttggtgggagcaaattatacaattgcagtagtttttattacaatccaagttattttaatgaacggattagcatcacagaacttaacaattaacattgcgtttccaagagttattgacgttgcaatggggattgtgattgcaatcataggtttatttgtccttgggcaacgtaccgcatccgcattgcttccttatgtaatggctgaagttgttcgtaaagaagcaacgctcttccattatttattttctgaaaaccaatataaagatgatgtatatcaaaaaaacacagctatgaacctatctgtgaaattaaataacatgacgcaagtttataatgcagctaatggtgaattatttagtgataagacattgattcaaaattattatcctagcttattcgcattagaagaaattagttttatgttaaatagagccatggctaatgaagatagacttacaataaatgaacaattaatgggcgagtatttagcaacatttgaaaacatcgctaagcatttagaattaaatacagaattagaaataaagatattaccagatttaccacagtataattatattcaatcagcaatgatgaatattcaacacaatggttttcgtgagagagacaagaacgtttaa

SEQ ID NO: 407547 - DNA, 678 bp, Staphylococcus aureus
atgtatggatatccagaaaaatggttggaaggtatgacaactggagaaggaatcgcagcagaattacgcttaggcattgtgaatggtcacatagctgaaggtacgttactcacagaaaatcaaatggcaaagcaatttaatgtgagtcgttcgccaattcgagatgcatttaaattattgcaacaaaatcaactcatccaattagaaagaatgggtgcacatgtgttgctgtttggggaacaagaaaagaaagaaatgtacgatttgcgactgatgctagagtcttttgcattttcaagagttaaaaatcaagagcgactacctatcgtaaaagaaatgaagaaacaacttgaaatgatgaaagtggcagtaaaatttgaggatgcagaatcatttacgaagcatgactttgaatttcatgaaacattaatcaaagcatctaatcatcaatatttaaactcattttggagtcatttaaaaccagtaatgatggcactcgttttaacatccatgcgacaacgtatgcaacaaaacccgcaagattttgaacgcatacatcataatcatcaagtgtttattgatgcagtggaacaatacgacagtcaaattttgaaagaagcgtttcatttaaatttcgacgatgttggtaaagatattgaaggattttggttgaattaa

SEQ ID NO: 407548 - DNA, 867 bp, Staphylococcus aureus
ttgaaaaaaataaaaaaggcaatcattcccgctgctggtttagggactagatttttaccagcaactaaagcgatgccaaaggaaatgcttcctatcttagataaacccacaatacaatatatcgttgaagaagctgcaagagctggaattgaagatattattatagtgacaggtcgccacaaacgcgcgattgaagatcattttgatagtcaaaaagaattagaaatggttttaaaagaaaaaggtaaatctgagttactagaaaaagttcagtattcaacggaacttgcgaatattttttatgtaaggcagaaagaacaaaaaggtttagggcatgcgattagttctgcgcgtcaatttatcggcaatgaaccatttgcggtattattaggtgacgatattgttgaatctgaagtgccagcagtgaaacagttgattgacgtttatgaagaaacggggcactcagttataggtgtccaagaagttccggaagcagatactcatcgttatggaattattgatccattaactaaaaatggacgtcagtatgaagtgaaaaagtttgttgaaaagccagcacaaggtacggcaccatcaaacctagctattatggggcgatatgtattaacgcctgaaattttcgattatttaaaaacgcaaaaagaaggcgcaggtaacgaaattcagttaacagatgcgattgagcgtatgaataatgataaccaagtgtatgcatatgacttcgaaggcgaacgttatgacgttggagaaaaattaggcttcgttaaaactaccatagaatatgcattgaaagatgacagtatgcgagaagaattaacacgatttattaaagaattaggtttataa

SEQ ID NO: 407549 - DNA, 309 bp, Staphylococcus aureus
atgaccgtcaacatcgtatttagtatcgtattctgcataagtatggttatattaggcatttatgtcgcaataactaaagatttcacactaatttcttatataaatcaaacgaccattgcagataaacacaagaaccaaattgcatatatatttgcgttatgtatcagtttgagtgcagtatttttaatgtctgcaattctatgcttcgaatatgattttattgcattgtcattcttatttttaacgatagcattattacttatcgcattattctacgtttgcttttataaaattacaaaatatccataa

SEQ ID NO: 407550 - DNA, 1638 bp, Staphylococcus aureus
atgaataaagaattatggatagaaagagctaatgatagtttagttaaacatttttatgagcagcaatctgacattgaacagcgagaaggttttgaaagtaaattaacgtttggtactgcgggtatacgcggaaaattcggtcttggtgaaggtcgacttaataagtttactattgaaaaattggcattaggtttagcgcgttatttaaatgcccaaacaaacaatcccacaatagtcattcattatgatattagacatctttcagctgaattcgcccaaattattgctaatgtattagcaaaccatcaaataacagtttatttacctgatacatataaaacgacaccggaattatcgttcgcggtgcgcaatcttaatactacttctggcattatgattacagcaagtcataatccgaaagactataacggcattaaagtatatggttctgatggcgcgcaactatcaacagatgcatcagaacttgtaagtcgctatattgaagacgttggcgatccattacagattgatataccaatttcaaaacaaaatacatcttatatcaagccatttccgaaatctgtaactgatgactatatgaaacacattcaaaatatgattggctatattcctaaatctgatttacaagttgtgttcactagtttgcatggtacaagtgttccgattgtacctaagttattaaaatctttgaatttcaatcaatttaatcttgtagaagcacaatgtaaacctgacccaaattttagttcagttcaaagtgctaatcctgaagaccatcgtgcttttgatcaagcagtcgagctagcgcataaaaatgatgctgatttattaatatgtactgatcctgatgcagatcgccttggaatcgctgtgcgtgatgtccatggtcaaattacatattttaatggtaaccaaattggcgcgctgttacttaattatcgtattcaacaaacgtctcaattacgtcatcgcttaatgattcaatccatcgtaagcagtgacttaacaaagtcattagcacgctataataatgttgaatacaaagaggtgctgacgggctttaaatttattgctcaggaaataagacaactggatgattatcaaaatatgattttcgcctttgaagagagttacggttttctatcagatccttttgtacgtgataaagatgccgtacaaattgtgccactcattataaaatacgcttctgagttaaaattatatggcaaaacattgaaagatgaattagaacagatttatcaaactgttggtagacatgaggatacattattctcgcatacgctagaaggattagaagggaaaaagaaaattaatgcaataatgaccaaattccgttcaaatccaccgcaagagattcaagggctgaaagtgaaagcaattgaagattatttaactagcgaggtttatcagttggataaagatacaacgtcacagattaattctcctaaatcaaatgttattcgcgtcttatttgacgaaggatttatcgctttacgtccttctggtactgaacctaaaattaaattatatgtgtcgttaaaatgtccgaattttgatgatgtagctcaaaaaattaatgcgatgatttttagctaa

SEQ ID NO: 407551 - DNA, 393 bp, Staphylococcus aureus
atgaaaaaagtaatcaatgtagtaggagctattattttttctgataacaaaattctttgtgcacagagaagtgaagaaatgagtctacctttaatgtgggaatttcctggcggtaagattgaaaagaatgaaactgaaaaagacgctttgattagagaaattagagaagaaatgaaatgtgatctaattgttggagacaaagttataactacagaacatgaatatgattttggaattgttaggttaacaacatacaaatgtactttaaacaaagagttaccaactctaactgaacataagagtattgaatggttgtcaataaacgaacttgataaattaaattgggccccagcggatataccagccgttaataaaattatgactgagggataa

SEQ ID NO: 407552 - DNA, 2862 bp, Staphylococcus aureus
atgagtagattactaaatgatttcaatcaatctttacataaagggtttatagacaaagatatttctcataaaggtaattatacaccgaagcttttagtaaataataaaaatgaaaaagttctttcaacaattatagatgaacttcaaaaatgtgaaacgttctatttttctgtggcttttataacagaaagcggtttagccagcttaaaggctcaactattagatttaagcaataagggtgttaaagggaaaatattaacatctaattacttagggtttaatagtcctaaaatgtatggagaattacttaaattaaaaaatgtagaggtaagattaaccgatattgctggattccatgccaaaggatatatttttgaacataaggattatagttctatggtaataggaagctctaatttaacatctaatgcgttaaaggttaattatgagcataatgttttactgtctactatgaaaaatggggatttggttgatagtgtaaaaaatgaatttgacttgttatggcaaaacagtaccccactgactcagcaatggattaattcatataaagaatcatttgagtaccgctccttagaaaaattagcggaggttgaacaaactcaaatgctgatagctgataaggtgaaaaaatcagtggaaattgtaccgaatttaatgcaagcagaagcattaaggtcattaaaagctataagggataaagccaaagataaggcgttaataatatctgcaactggtacaggcaaaacgattttatgtgcattagatgttagagaagtaaaccctaataaatttttatttattgtccataatgaggggattttaaatagagctaaggaagaatttaaaaaagtattacctataaaaaatgatagtgattttggattgttgacaggaaaacatagagatgtcaatgccaaatatttatttgcgaccattcaaacattatctagagatgataattttaagcaatttgatgaaaaagaatttgattatattgtttttgatgaagcacatcgttctgctgcatctacttatcaacgagtatttaattacttcaaacctaagtttatgctcggaatgactgcaacaccagaaagatcagatgaattaagtatatttgaactatttgattataatattgcgtatgaaatacggttacaagctgcattagaaagtgatattttatgtccatttcattattttggtgtgactgattatgtacatcaaggtataaaagaagatgatgtaactaaattgagatatttaacttccgatgaaagagttaattatattattcaaaaaacagattactatggatattcaggtgaaattttacaaggattaatttttgtaagtagcaaaaaagaagcttatgatttagcggataaactaagttcaaaagggattaaaagtgttgctttaacaggagatgatagtgttaattatcgccaaattgtaatagaaaaattaaaagaaggtaagattaactatattataactgtagatctttttaacgaaggtattgatattccagaagtcaatcaagttgtaatgttgagaccaacagagtctagtattatattcattcagcaacttggtagaggattaagaaaaagttcaaacaaagagtatgttacagtaattgattttattggtaattataagacaaattatttaattccgattgcgctttctggggatcaatcgcaaaataaagataattataagaagtttttaacgaataacgattcgattaatggagtatctacaattaattttgaagaaattgctaaaaaacagatttacaattcattggatgcagtatcattgaatcaaaataaattaatattaaaagcttatgaagaagttgaaaatagattgggacacatgccgttactaatggattttatacaacaacattctatagatccaagcgttatattttctaaatttagtaattattacgagtttttagtaaggtataaaaaaatagatgctttattgacggaaaatgaatctaaaaatctggttttcttttcaaggcaaatagcacctggattgaaaagaatcgatagtttagttttagaagaacttttaaaaaatgaattaacatatgatgaattaaaaaataaaatgctgaacgaagttaaggatataacagaaaatgatatagatacttcattaagaattttagatttctcattttacaacgcaggaattgaaaaaatctatggaagtcccattatagaacgtaatgaaagaatgataagactaagcgatgcatttactaatgctctaagtaatcaaacatttaaaatatttttagaagatcttattgaattatcaaagtataacaatgaaaaataccaaaaaggtaaaaatggactgattttatataataaatattcaagagaagattttagcaaaatatttaattggaataaaaatggttcgtctgtaatcatgggatacatgataagaagccaagaaatgccaatatttatcacttatgataagcatgaagatataagtgatagcacaaaatatgaagatgaatttttaagtcaagatgaattaaaatggtttactaaatctaatagaacgctaaaaacaaaagaagttcagaaaattttgtcccatagagcaaaaggaattaaaatgtatatttttgtacagaaaaaagatgatgatggtatatatttttattatttaggaactgctggatatatagaaggttcagagaagcaagataaaatgctgaatggttcaaacgtagtaacgatggatttagcactcgataaagctgtaagagatgatatatatcgctatctaacaaattaa

SEQ ID NO: 407553 - DNA, 762 bp, Staphylococcus aureus
atgatgattcactcaagaaagttgaggatttggctgtatttagtattattagctgtttttattagcgcgtgtaacgtgaaagaagataaacaaattaaagaaaatttcaacaaaacgttgagcttgtatccaactaaaaatcttgaagacttttacgataaggaaggttttcgcgatcaagaatttgataaaagagataaggggacttggattattaattctggaatgaacatccaattaaaaggaggagccttaaaatccagagcgatggtactttacatcaatcgtaacactagaacagctaagggatattttttaataagtgagataacagaagacaaaaaaggatacgtccataataaagaaaaaaaataccctgtcaagatggaacataatcgaattattccaacgaagcccataacggatgataagttaaaaaaagagattgaaaactttaagttctttgtacaatatggcaactttaaagattttaaagattataaagatggggatatttcatacaatcctaacgtaccaagttattccgcaaactatcaattgaataatgatgattataatgtccaacaattaagaaaacgatatgatatatcaaccaaaagggctccggaattaaaattgagaggatctggcgatttaaaaggctcatccgtaggttctaaagaactagaatttaactttataagaaataaagaagaaaatgtgtatttttctgatagtattaatttcaaacctactgaatag

SEQ ID NO: 407554 - DNA, 774 bp, Staphylococcus aureus
atgattcattcaaaaagggtaaaattgtgtctatgcttgataatactatctgtttttataggggcttgcggaatgaaaaaggaagaaagcagtaaagataaacaaattaaagaaaatttcaacaaaacgttgagcttgtatccaactaaaaatcttgaagatttttacgataaagaaggctttcgagatcaagaatttgataaaagagataaagggacttggattattaattctggaatgaacatccaattaaaagaaggagccttaaaatccagagagatgatactttatatcaatcgtaacactagaacaacgaaaggatattttatagtaggtgagataactaaagataaaaagggatacgtccatgataaagataaaaaataccctgtcaagatggaacataatcaaattatcccaacaaaacctataaaagacgagaagttaaaaaaagaaattgaaaacttcaagttttttgtacaatatggcaactttaaagattttaaagattacaaaaatgggaatatttcatacaatccaaacgtaccaagttattcggcaaaatatcaattaagtaatgatgattataatgtccgacaattaagaagaagatatgatataccaacgaaacaagcaccagaactattgttgaaaggtgatggcgatttaaaaggctcatccgtaggttctaaagaacttgaatttaactttataagaaataaagaagaaaatgtttattttacggatagtattaatttcaaacctactgaatag

SEQ ID NO: 407555 - DNA, 1044 bp, Staphylococcus aureus
atgagtcaaacggaatatcaaataaaatctggcaatataaaaggtaactctgaagaaacaagtacagtatctaatataagttatgaaatagaaaacgcaaataacagtggtttaaaacaaaataaaattgataaacaaattaaaaagttacaagaaaaaaataaattccctaaaaatctttcatatcttaaaagttatacggaccccaaaacaggtacgactacaagcgcctttttaaataaagacactggcaaagttactttaggtatgacaggtactaatgtacacaaagacgcaatattaaaacaaacatttggtgttccttcttatcaaggatatatagatgcgagtgaaacgctaaaggatattggggccgatgtcaatattggccttcattccgtcacagataaagatccacattataaaaatacccaagactttatcaaaaatatcaaaaaagactatgatattgatattattaccggacattcgctgggcggtagagatgcgatgattttaggtatgagtaatgatattaaacatatcgttgtgtataatccagctccattagcgatcaaagatgtgagcggcctttatgccgatcaagaagaacttaaaaaattgattgaaaagtacgatggtcacattgtaagatttgtgtctgatgaagacgaattagatgcaggtgtccgcaatcatttatatgaaactgctggagaaaaaatagtacttaaaaatggagaaggccatgcaatgagtggtattttaatgagcagaacacaggctataatcttagctgaattaaacaaagttaaaggctaccaagacgaaaataataaagcattaaaatccgttcgtaaacaaacgaggcatagattacataaagtagagacgttaagagcgaattggattcaaataacaggtggacccctctcttcctcccaacaacaattattagaagctttaacagcactaaccattgccgaaggattaaatcaattagtgaatgaagaaagccaacatttgaaaaaatgtatcatgtga

SEQ ID NO: 407556 - DNA, 282 bp, Staphylococcus aureus
atggcgcataaatttggagacaactggaaaaaagcgcaaaaagttggaaatgaaattggtgaaaaattgacctctgcagaggttatagatgaattaagaaaaggtggcgcgtatgaaagtaaacttgaaacagatcctaaaagaaaaattgatgataagataaagaaattaaatgatgtttataaaaattgtaatggctatatcgcaaaaattaaacagagtatcgaagcaattgtttctaatgaccaaatgttagcgagccagattgatgggatgatgtaa

SEQ ID NO: 407557 - DNA, 786 bp, Staphylococcus aureus
atgattcattcaaaaaggttaaaattgtgtctatgcttgatgatactatctgtttttattagcgcttgcggaatgaaaaaagaagaaagtagtaaagataaacaaattaaagaaaacttcaacaaaacgttgagcttgtatccaaccaaaaatcttgaagacttttatgataaagaaggatttcgtgacgaagagtttgaaaaaggagataaaggcacttggataattcactctaaaatgattattgagacaaataatagcaatatggaatctagaggaatggtgctttatataaatcgtaatactagaacaacgaaaggtaattttgttgttagagaaataaccgaggatagtaaagggtattcacataataaagatacaaaatatccagtgaaaatggaacataatagaatcattccaaccaaaccgatagctgatgataaattaagaaaagaaattgaagactttaagttttttgtacaatacggtgactttaaagatattaatgattataaagatggtgacattgcatataatccaaatgtacctagttattcagcagaatatcaattgagtaacaatgactacaatgtgaagcaacttcgaaaaagatataatattccaaccaacaaagctccgaaactattattgaaaggtgatggagatttaaaaggttcatccgtaggttctagaagtcttgaatttacctttgtcgaaaataaagaagaaaatatcttttttacagattcggtacaatttactccaagtgagggtaatgaatcatga

SEQ ID NO: 407558 - DNA, 423 bp, Staphylococcus aureus
atgaacaaaaaacatgtttttataattattggtgttattttatgtatatgtatagttgctacagtcatttatttaaaagtgaaatatgacgaaaaagaaaaacaaaaagcaatttactataaagaacaacaggagcgtattacactttatctcaagcataatactaaagaaccaaacacgattaaatctgtgcatttcacaagtttaaaaagaggacctatgggcgatgccgtaattgaaggttacatcaatgaaaacaaaaaagctgattttgttgcatatgggtcaccagaacatcattatcaatttggtggaagtttgatcaaaagtaaaaatttaagcacgttattaaaaccagcacatcaaaccaaaacacctgatgagataaaaaaggaattagagtctaaaaagaacgaccgctaa

SEQ ID NO: 407559 - DNA, 426 bp, Staphylococcus aureus
atgtcgaaaaagaaaattttaatattaactagtattatgttaatcatattaattagtgttgcaggtatctatttaaaagtgaaatatgacgaaaaagaaaaacaaaaatcaatttattataaagaacaacaagagcgtattacactctatctcaagcataacactaaagaaccgaacacgatcaaatctgtacatttcacaagtttaaagacaggacctatgggcgatgccgtaattgaaggttacatcaatgaaaacaaaaaagctgattttgttgcatatgggtcaccagaacatcattatcaattcactggaggattgacaggaagtaatgaagttttaggaaaattaaagaacgctgaaaatttaaaatctcctgaaaaaattaaagaagaaataaacaaaaagaaaaacactaaacagtga

SEQ ID NO: 407560 - DNA, 420 bp, Staphylococcus aureus
atgtcgaaaaagaaaattttaatattaactagtattatattaatcatattaattaatgttgctggtatccattttaaaatgaaatatgatgaaaaagaaaaacaaaaagcaatatactataaagaacaacaagagcgcattacactttatctcaagcataataccaaagagccaaacacaatcaaaactgtacatttcactaactttgaaacaagtcctatgggtagtgctgtgattgaaggctacatcaatgaaaacaaaaaagctgattttactgcttatgctacaccagaacataattatcaatttggtggtgctatgatagaaagtcaaaaattaagcgagttactaaagccagcacaggaattaaaatcgcctgatgatataaaaaaagagctaaacaaaaagaagagtcactaa

SEQ ID NO: 407561 - DNA, 420 bp, Staphylococcus aureus
atgtccaaaaaacatgtttttgtaattattggtgttgttttatgcgtatgtatagtcgctacggtcatacattttaaaatgaaatatgacgaaaaagaaaaacaaaaatcaatttattataaagaacaacaagcgcgcattacactttatctcaagcataacactaaagaaccgaacacgatgaaatctgtacatttcacaagtttgaagacaggacctatgggcgatgccgtaattgaaggttacatcaatgaaaacaaaaaagatgattttgttgcatatgggtctccagaacataattatcaatttggtggagatatgatagaaagtgaaaaattaagtgaattactaaaaccagcaaatcaattaaaatcacctgacgaaatcaaagaagaattagataaaaaagaaggccactag

SEQ ID NO: 407562 - DNA, 1539 bp, Staphylococcus aureus
atgacatctaaagaaagacaaaaaggctctatcgtcaatagtttcttaaatagtgttgaaaaaattggaaataaattaccagatccaagtgtattattctttttaatgtgtgtaggtctagcaattttgacatggcttgtctcactatttaatgtatccgttaagcatccaggtacacatcaaactatccatgttaaaaatattttaagccatgatggttctgcgatgattatgaatgataccataaaaaatttctcagaatttcctgcattaggtttagtacttgctgttatgattggcattggtgtcgcagagaaaacaggatacttcgacaagttaatgatttctgttgtgaatcgcgcaccacgtttcttaattttaccgactattattttaattggcattttaggaagtacagctggtgatgctgcgacaattatcttgccaccgcttgcagcaatgctttttattaaaattggctatcaccctattgctgggttaacgatggcatatgcttccgctgttggaggatttgcagcaaatatagttgtttgtatgcaagatgctttagtctattcatttacagatccagcaacacgtatcgtttcagagtctattaaaacaaacgttgctatgaactggtactttatcgcaacgagtgtcgttgtattacttcctacgatattgctagttacaactaaactgattattcctaggttaggtcaatatgatgatcgtttaatgcatgatgatcatgaagaaacgtcttcacatattactgacaaagaagcacatgctttaaaatgggcaaatatcagtttcatagtcacaattattttattaattattacagccattcctgaacatagctttttaagaaatgctaaaacaggtagcttactagacgatgcgccattaattaacggtgtcggattaattattcttgttgtatttttagtacctggattagtttatgggattttaagcaaagaaattaaaaatacaaaagacttagggaaaatgtttggagaagctgtaggatcaatgggtacatttatcgttatcgttttctttgcagcacagctactcgcgtttttaaaatggagtaatttaggcattattgctgctgttaaaggcgctaaattgttagaacatcaaaatgggattgtactaattttaggaattattattctaagtgcattagtaaatttattaattggtagtgcatctgctaaatggggaattttagcacccattttcgttccaatgctcattattgtaggatttcatcccgcatttacacaagtcatttaccgtgtaggcgactcgattaccaatccaattacaccgatgatgccgtatttacctttattattaacttatgcacaaaaatacgataaacgcatgaagttaggtgctttactttctagtttaatgccgtattcaattgcgctaagtattgtgtggacagtatttgtcattatttggttcttattaggtatccctgttggaccaggtggaccgatattcgttaaatag

SEQ ID NO: 407563 - DNA, 768 bp, Staphylococcus aureus
atgaatattagacatataagaaatgccacggccgtgattgagtatggaggtaaacgcattttgattgatccaatgttaagtgacaaaggcgcatttgaaccatttccaaattcaccgagacaagaagaaaacaatccacttgtagaactacctatggcaattgaagacattgtaaatgacatcgatttagtgattttaacgcatttgcatattgatcattttgatccgaaagcaattgaagtattgccgaaagatattaaaatttacgcacaaaatgaagaagatgctagtgaagtagagagttatgggtttacaaacgtttctgtatttaatgatgtgacacacattggagaaattgagttggttaaaacagatgctcaacatggtcatggtgaaattttgaaaatgacaggacatgttcacggtatgattttaaaacattctgaagagccgacattatacttagcagcagatacagtttggtttgaaggggttgaaaaagcattaaaaacatatcaaccagatgttgttgttcttaatggtggtgcaaatcaattctttgaaggtggtccattagttatggatgaacatgatgtgttaaaagttgctcatacattgccgcttgctcaaatagttgttgtgcatatggaagcggtcaatcattggcatttatctcgtaaagagctgaatgaatttataaattctaacgacttaggtaatagagttgttgtaccaaatgacggggaattattaacctttgaaaaataa

SEQ ID NO: 407564 - DNA, 663 bp, Staphylococcus aureus
atgttgttagagataaaagatttagtgtatgaggcaagtgatagagtcatactaaatcatattaatttaaaagtagataaaggtgaaaccattgcaattattggtccttcaggtagtggtaaaagtacatttcaaaaattaatatgtaatttaattagcccaaccagtggaacgctttactttaaaggtaaaccatatgatgattacgaaccagaaatactacgtcgacacattagctatttaatgcaacaaagcgatttgtttggtgaaacgattgaagacaatatgatttttccgtctcttgcgcgtaatgataaatttgataaaaaacgtgctaagcaattaattaaagatgtaggattaggacactatcaattaagttctaaaatagaacatatgtcaggtggcgagcgtcaaaggatcgcgattgcacgccaattaatgtataccccagacatccttctattagatgaatcaacaagtgcgttagatattaataataaagaaaaaatagaaaatatcatttttaaattagcagatcaaggcgtggccattatgtggattacccacagcgatgaccaaagtatgcgacactttcaaaagcgtataaccattgttgatggtcaaatttctaatacagaggagttgaaccaacatgagtaa

SEQ ID NO: 407565 - DNA, 1353 bp, Staphylococcus aureus
atgaagattaatactacaggtggtcaaattcatggtattacacaagatggtttagatatcttcttaggcattccttatgcagaaccaccagttcatgacaatcgctttaaacattctacgttaaaaacacaatggtcagagccaattgatgcaactgaaatacaacccatcccaccgcaaccagacaacaaattagaagattttttctcctcacaatctgcaacttttactgaacatgaagactgtttatatttaaatgtttggaaacaacataatgatcagacgaagaaacctgtcatcatttatttttatggtggtagttttgaaaatggtcatggtacaactgaactctatcaaccggcacatttagtacaaaataacgacattatcgttattacatgcaattatcgtttaggcgcattaggatatttagactggtcatattttaataaagattttcattccaataatggactttcagatcaaatcaatgtcataaaatgggtgcatcaatttattgaatccttcggtggcgacgctaataacattactttaatgggtcagtctgcaggcagtatgagcattttgactttacttaaaatacctgacattgagccatacttccataaagtcattctgctaagtggcgcactacgattagacacccttgagagtgcacgcaataaagcacaacatttccaaaaaatgatgcgcgattatttagatacagatgatgttacgtcattatcgacagatgatattcttatgctgatggcgaagctaaaacaatctcgaggaccttctaaagggcttgatttaatatatgcacctattaaaacagattatatacaaaataattatccaacaacgaaaccaatttttgcatgttatacaaaagatgaaggcgatatttatattactagtgaacagaaaaaattatcgccgcaacgctttatcgacattatggaattaaatgatattcctttaaaatacgaagatgttcagacggcgaagcaacaatctttagcgattacacattgttatttcaaacagccgatgaagcaatttttacaacaactcaatatacaagattcaaacgcacaactatggcttgctgaatttgcatggcatgatacttctagcacacactatcgcagtgcttaccatattctagatatggtattttggttcggaaacttacaaatattagcagcacatcaatatccaacaactactcaccttaaatttttaagtcgacaaatgcaaaatgatttagctaattttgctaaaagcggtaaaatgccttggccgatgtatcataatgaacgtcgctattatcgcacatatcaataa

SEQ ID NO: 407566 - DNA, 741 bp, Staphylococcus aureus
ttggcatacacatacactttaaaagatattattgaaattacaggtgtaactaaacgaactttacattattacgatgaaataggattattagttccagataaaaatgataaaaattatcgcgtttataaacagcaagacttagaaaaattacaaaaaattttaatactcaagtcttttgattttgatatcgctaaaataaaacaatacatttcatatgataatgaacaaatgcgccagttattatcagagcaagtaagcaagttagataaaaagatttctgaattacaattaattagacgctctgtatgtgaatttattaaaggacactctctaatagatagcagcattttaaacaagtcactacagacacagtatgataaagaagcatctataaagtatggtcatacgaaggcatatcaatcatttattaaccgtcaagataacttacaatcacaggatatcagacagaaattgacaacgatcttcaatcaattcaatcaaatgtctttgagtcactttcctatccaaaactgtaatgatatcgtggcagaatggaaatcttttatgaacacaatcgctgattttgatgatgaaacattatgctgtattgctaaaacatatgaaaatgatacgcgtttcaaagattactttaattcatatgataatcaaaatttagcatcatatatttcagaagctgttaattattttttgagcaatgagaataagaaagacaatttttaa

SEQ ID NO: 407567 - DNA, 177 bp, Staphylococcus aureus
atgaaaatcgatacattaagacaagctataatatattattttgttgcacttgtgttatcagctttaatgatctatttatttttaacaaatattgagagagttattttgtatagttgtgtattcacagtcgtttattgggtaatttatgcctttgatgtatatagaaagagaaattaa

SEQ ID NO: 407568 - DNA, 1005 bp, Staphylococcus aureus
gtgacagaaacatttaaagcgtttgtaattgataaagatgagagcggtaaagtgacaccaactttcaaacaattatcgactactgatttacctaaaggagatgtgctgattaaagtacattactctggtataaattataaagatgctttagcgagtcaagatcataatgcagtcgtaaaatcgtatcctatgattccaggaatagatttagctggtacaattgttgaatccgaagcaccaggctttgaaaaaggagaacaagtaattgtaacgagttatgacctaggtgtcagccattatggcggttttagtgaatatgcgcgtgtaaaatcagaatggattatcaagcttcctgatactttaacattagaagaatcaatgatatatggcacagctggttatactgccggtttagcaattgaaagacttgaaaaagttggaatgaatattgaagatggtcctgtactcgttcgcggtgcttcaggtggtgtcggtactttagcagtactcatgcttaatgaacttggttataaagttatcgcaagtacaggtaaacaagatgttagcgatcaattacttgatcttggtgccaaagaagttatcgatcgacttcctgttgaagttgatcataaaaagccactcgcatcatcaacttggcaagcttgtgtagaccctgttggtggcgaaggtattaattatgttacaaagcgtttaaatcatagtggatcaattgcagttattggtatgactgccggtaatacttatactaattctgtattccctcacattttaagaggcgtaaacattttgggaattgactcagtatttactgctataaaattaagacagcgcgtttggcgtcgtctcgcaaaagatttaaagcctgaaaatttacatgagatcaagcaagttattacatttgatgaacttccagaacaacttaacaaagtaattaaacatgaaaataaaggccgcattgttatcgatttcggtgtagataaatag

SEQ ID NO: 407569 - DNA, 516 bp, Staphylococcus aureus
atggctgggataatcaaagaaatttcaaaacaagatgctagtgaattagttgaattagcaactagaacattttatgacacgtttggttcttactatgatgacaaagattttgatcaattttttaaagataattatactgtagaaaaatttacacaagagattaaccatgtagattcatttcattatttttatcaagaagatggtgcgaatgttggttatataaagatgaatattaatagtgctcaaactgaagaaatgggggagacctatttagaagtgcagcgcatatattttttgaaagactttcaaggtggcggaagaggttcacaattgatagaattggccgaaaaaattgcacaagaacataataaacataaaatttggctaggagtttgggagcataatcctcgtgctcaagcattttataaacgtcatggatttaaagtggttggtgaacatcattttcaaacaggtgatgtaacggatacagatttaattatggaaaaagagttataa

SEQ ID NO: 407570 - DNA, 630 bp, Staphylococcus aureus
atgaaaagattagttacagggttactagcattatcattatttttagctgcatgtggtcaagatagtgaccaacaaaaagacagtaataaagaaaaagatgataaagcgaaaactgaacaacaagataaaaaaacaaatgattcatctaaagataagaaagacaataaagatgatagtaaagacgtaaacaaagataataaagataatagtgcaaacgataaccagcaacaatctaattcaaatgcaacaaacaatgaccaaaaccaaacaaataataaccaatcaagtaataatcaagcgaataacaatcaaaaatcaagttacgttgcaccatattatggacaaaacgcagcgccagtggctcgtcaaatttatccatttaatggtaataaatcacaagcattacaacaattgcctaatttccaaacagctttaaatgcagctaacaacgaagcaaataaatttggtaatggtcataaagtttataatgattattcaattgaagaacataatggtaactataagtatgtgtttagttttaaagacccaaacgtaaatggaaaatattcaattgtaacggttgattatactggacaagcaatggttactgatccaaactaccaacaataa

SEQ ID NO: 407571 - DNA, 1674 bp, Staphylococcus aureus
atgattaaacagataaatgtttctaatatgcaaaagtttgaatctcaattaatgaaagctcagtctgaaggttatacacatgtcgttccatatgccaatgagataatgatttatcaatctatgttagatgcggttcaattatatcctaagtctatcgtggttgattatactgtggatggacaatacaaaaatgattgtcactatttcggtcaatcatcgattaacattgccgattgggctcaaaacaataattattatcctaacctaatatatgcgattcaacagactcttgatttaatacattattactctgtagaaacgattttcgatttagctttattgacacttctgaaaggtgatttatcaatcgatggtcatgtcgtttttgattttaaagcccctttagcaacaagtgcttcaatattggaaactattaaaactattgaagattttgatatgatgtctcagttttatttgaataaaatggcttatattgatcatcatcctataccttttcgcaacctttttatcgaggattcagaacaacttaattcgccagacaattggttgtattctaccaagtttatgctacctaaatggttatataaaatagcaaagcaacgtgctgataacaaacaattacaaaacttcggcttgtatacgaagcaaccaaacgttttaaaagatcacatcgtttttatcggtgatcatcatcaatatataggtaattcaaaatatttatttacttacttcgttaaacataacccaatgactgcctgttattttgttactgacgatcgtcgcggaccacatttcatatcacctaagtctgaaaaagctgacgaattaattaacagcgcacgcgtagttttagttgaaaatgatatacctgaaacgttacaaccaaacggtactttaattcaattacatcaaggcacaccaataatgcaattatttttagatagtaaagaacctattaaaaatatagaaacacctttttatcgtgctaaaaggtataatcgctggttgcaattcgattatgttatacattctgctgatgatattagccacttttatcaaacggcttttcctagtcaccaagcaaatgtattggcttatggtaatcctaaacaccaatacttactacaaaagcgtaacgaaagtactactcaacaacagtataagaaatcgtttaaaataaatgatcaaaaaccagttttattatacgcacctattggattagtgagtgcgcaacaattaccactatcagatgctttattcaaagcctatcatgttgtggttcagggggttgacgaagcgatgttaccagaagaggcgcttgttgcaccaaagtatcttagtgctcaagacttaattctaatgtctgatgtcgttatcactgattactcaaatataatatttgatgcgatggctatagacaaaacagtagcattatatactccaaatcacagtcaatatattgagtctcaaggtgttaacgaagatatttggcgtcatctatcaaaaatttggtatacagaccgacaattattaattaataatttaatttcccaggcaataccagtgattaaatatccacaaatacaacataaagaacaaccattagaatctatttcacaacttatattgtctaagatgacatctaatcaatag

SEQ ID NO: 407572 - DNA, 1083 bp, Staphylococcus aureus
atgaaaattttagctattgttagacgagtattaaaagaaatgttacgtgataaacgtacacttgcgctaatgtttctagcaccaattttaatattgacgcttatgtattttatttttaacggtgatgaaaacgatttaaaaatcggtatcgatacatctgtttcatcaaatataacaaaacaattgccatcatccgacataaaaactcaaacgttccattctcatgaaaatatcaaatctaaaatcgagaaaaatcatcttgatggttatatttaccaagaaaatcaaacattacatgtcatttacacaaatgaagatcctaacaaatctaatatgatcaaacaaatgattggcaaagctttacaacaagataaaataagcagtataaagcatctaattgaaaaagcacctccgaccatgaaagcaccaaacaaacaagatattaagatttcacattcctatttatacggtaattctgatagtacttatttcgataaaatgtttccaatactaatgggcttctttgtatttttatttgtatttctaatatcaggtatagctttattacgtgaacgtacaacaggtacgttagaacgtgtattatcaacttcaattcgtcgaagtgaaatcgtccttggttatctgattggctatggtatattcgcaatcattcaaacattaatcatagtcctattttcaatatatttattgaacattaatttagcaggtagcttatggtatgtaattttgattaatatttgtttagctattacagcattatctatgggaattttcatttcaacgtttgctaattctgagtttcaaatgattcaatttattccactagttgctgtacctcaggtattcttttcaggaattttcccacttgaaaatatgcctgattggctaggtaacattggctatatcttccccctcagatatgctggtgatgctttaaccaatgttatgattaaggggcaaggttggagtaatatatggttcgatttactaattctaatgatttttatcatggtctttattatcttaaatatagttggtttaaaacgatacagacaggtataa

SEQ ID NO: 407573 - DNA, 729 bp, Staphylococcus aureus
atggacgcaactatcgcgaagttggataaagttgtaaaaacgtataacaagcatcacgtattaaacgaaattagtatgtcaatcaataaaggtgaactgctagggttaataggtcctagtggttctggtaaaacaacaacaataaagtgtttactaggtatggaaaagatagattctggatctgcagaaattttcgctcataagatgcctaatcgcaaagctttaaatcgattaggctatatggggcaaactgatgcattatacgaaaacttaactgcttatgaaaacctagagttttacggtcgtttgtcaggactaaaaggaaatttattaaaagataatattgaaaaacatatcgttctagtgaatttagagcaagcgttaaataaaaaagttgcacagttttcaggaggcatgaaacgccgattatctttagcaataacattgttggccgaaccagaattaatcatattagatgaaccaactgtaggcattgaccctaaattgcgccaacaaatatggcaacaattcaagcaaatgaccaaagacggaaagagtgtcgtcatcacaacacatgttatggatgaggcggaacgttgcgataaagttggacttattgtcgacggaagaatatttgctatagatacgccaaccaatttaaaacaaagatttaatgtagatacaattgaagcggtatttattaaagctgaggaggttcgtcaatcatga

SEQ ID NO: 407574 - DNA, 564 bp, Staphylococcus aureus
atggatcaaacagcttttacggatagtcgtgtaacgaaaacgataaatcgcatacatgatggaatgataaatctattaaaaacgaaggcatataatgatataactgttaaagatatatgtgaaaagagtcaaataagtcggacaaccttttatacacattacaaaactaaagatgattttatatacagctatcttaatacattgttaaaagaagcaaaaaagaaatttcttaaaagtgaaactctgacacaagcaatatttttaaaaaagatgatttatttttggctaagcgaaggtcaactcattttaatgttattaggtgatgagagtgcttataaattacatcaagtcataaaaaaatcactacaacaacgtatcgaaattaatgttgtaccagtattaaatacaaaaatgttaacgacgaaggaaaagtattttttacttatttttatgagtaatgcaatcattggtgtgttacaagattgggtcaaacgaggatataaagagagtcctaaagaagtagcagaaattatgaataaaatatttgaaaatgcatttcgttag

SEQ ID NO: 407575 - DNA, 969 bp, Staphylococcus aureus
atgttattgaatttattattaatatttatacttatcgttatttgtccgttaattttcaactatactctgacgttaaatttaacatgctacatcttagttgtcatatcgatatttttgtcactcatctatagcatcatgacctatactttcccttggtctatgtttgtaacatttataataatcagtattatcatgctattcaaacatagatatttattttctcatacttctagtcgcttatttattaaaaaattattatctttttcatataaatttgtactctacacatcagcacttctatttataagtacgattcagtcacctattgtgaaaggtttgtctatgtggttagctatattatgtctttccctgttactaacctttatttgttatctcgtttggacagtatcatatagacatagatcatacaacaaagaagttgatatcataattgtgttaggtgctggtatttttaccgaatttgtcacaccaatgcttgcagcgcgtttagaccgtgcacttgatatctatcaacaacaagcatcagcaacaaagatcattgtatctggcggacaaggaccagacgaaccaattcctgaagctttagctatgcaacgttatttgattgcacatggtgttgataaaacagatatactaatggaatctcactctataaatacatacacaaactttttatattctaaacaaatcatcaacaatttgtatcatgaagcagttaaaattgtttgtgtaacaagtcagtttcatgtattacgcgccttacgactagcccaaaaattaggtttatctatcgatggtgtcggaagccatacaccatatcactttttcttacatgtgctcattaaagattatctaggcgtaatgtatcagtatagattgttattaacgttatattgttcaagtagttggtttatatgtctttacgccgcttttatttatcatagttaa

SEQ ID NO: 407576 - DNA, 1209 bp, Staphylococcus aureus
atgaatgatttaacgcattttaacaagcgttcaccgatatttattattattttaggatctttgactgccattggagcattatcaatagatatgtttttgcctggattaccagatattagacatgattttcaaacaacgacgtctaacgcacaattaacattatcgatgtttatgattggtttagcgttcggtaatttgtttgctggtccaatttcggattctactgggcgcagaaagccgcttattatagctatgattatttttacattagcaagtttaggtattgtttttgtacataatatttggctgatggttgcattaagatttcttcaaggagtgacaggtggagcagcagcagttatttcaagagctatagcaagtgatatgtatagtggtaatgaactaactaagtttatggcattattgatgcttgttaatggtattgcaccagttgttgcgccaacaatagggggcataattttaaattattctgtctggcgtatggtctttgtcattctgactatctttggcttcgtcatggtcataggttctttattaaaagtacctgaatcattaacagtgacaaatcgtgagtcaagtagtggattaaagacaatgtttaaaaacttcaaaatattattgaagacgccacgttttgtattaccaatgctcattcaaggtatgacatttgtaatattatttacttatatttctgcgtctccgtttattattcaaaaaatttatggcatgactgcaatacaatttagttggatgtttgcaggaattggtattacgctcattatatcaagtcaacttactgggtaccttgttgattttatagactcacaaaaattgatgagaggcatgacgatgattcagattatcggtgtaattttagtgacgattgtattgcttaatcattggaacttttggattttagcgataggatttatcattttaatagcaccagtgacaggtgttgcgacacttggttttacaatagctatggatgaaagtagtagtggtagagggagttcatcaagtttattaggtttagtgcagtttttatttggtggtgttgcttcgccattagtgggggtaaaaggtgaagataatcctataccttacataattattataatagctacagcagttatattaattattttacagatttataatatgaaggtatttaaaacaaatcgatga

SEQ ID NO: 407577 - DNA, 609 bp, Staphylococcus aureus
atggatttcgttaataatgatacaagacaaattgctaaaaacttattaggtgtcaaagtgatttatcaggataccactcaaacgtatacaggctacatcgtggaaacggaagcatacttaggtttgaatgatcgtgcggctcatggctatggtggtaaaataacacctaaagttacgtcattatataaacgtggtggtacaatttatgcacatgtcatgcatacgcatttactcattaattttgtaacaaaatctgaaggtatacctgaaggcgtacttatccgtgcaattgaaccagaagacggtttatccgctatgttccgtaacagaggtaagaaaggctacgaggtaacgaatggcccaggaaaatggactaaggcatttaacattccacgggctatcgatggcgctacgttaaatgactgtagattgtctattgatactaagaatcgtaaatatcctaaagatattattgctagtccacgaatcggtattccaaataaaggtgattggacacataaatctttacgttacacagtgaaaggtaatccatttgtgtctcgcatgcgtaaatcagattgtatgtttcccgaagatacttggaaataa

SEQ ID NO: 407578 - DNA, 621 bp, Staphylococcus aureus
atggaacaattacctcaagtaggttttatgaaatcattcgtattattttggaaaaattatgtaaattttaaggggagatcaagacgtagtgaatattggtatatgatgttgtggcatttaatatttatacttcctgctttcttcgtgttctttatgggagcagtatttgtgggtataggtgatgaaatagatgctaaagtattatctatgtttggtgtgatgatattaatacttacagttatatatatgcttctttattctttagcaacctttattcccaatttggcattaagcgtccgaagattccacgatatatcaagaacaatggtattgcctattataatgtgtgcatatagtattgtattctctatagtggtgcagtttatcgaatcatattatgataatgattttatgtttatgccaattggaattgttattttgttagtacttctatatcttatttattttggacttacagttacaatgatagtattcctatgctttgacagtaagccggcaaataaatatggcgaaagcccaaaatacccatcttcaattaaaaatcaaccagtgacatctgaaacaccgaaaaaaccggaagaaacagataatcaattgtaa

SEQ ID NO: 407579 - DNA, 1020 bp, Staphylococcus aureus
atgatagttgaagttgagcaccaaagacaaggtgtagatttaatcaaaattgataatgatgaaactaaaattatttttacgaattatggagcaagagtagtgtcttggaaatatcatgataataatattgttcttggaaatgttgttgaagcggatgaattttatcatagtaatccttttaaatttggtgcttctataggaagatatagcggtagaattgataatgctaaatttaagttgaaaggtaaagaatatcagttagaaaaaaacaacggcgaacatcatttacatggtggatgtcatggtttggacaataagttatttgattatgaaattagaaatgaaattgctcaaattaaagtgatatttaagacggtgttgaaatcagctgatgatcatttcccgggtgatatcgatgtgacgattacacatatttatgatgcggatcaccaatggtcgattgaatacgaagcagttgcatcagaagacacattgtttagtcctacgaatcatgtgtacttcaatttgaatcgagataataatgtcgttgataatcatcgcatttcaagtaatcaattagatatgtatgtattagatgagcgaaatattgttacaggtgatattctagatttacatgaagtgtttgaagataacaagataaaattgagtgatatttttacatcacaacatgcgcaattaagccaacaaatgacacgttttggtggtctcgatcacccatttacagttggtgaacataaaatgtatgttgaaaatcatgaatttatgttagaggtcgatacagatatgcctcatgttgtattctttacttttaatcagcctgatgagtgggatagtccatttaatatttataaaccacattctggttttacattagaaacacaatttttaccaaatgatattaatttatatggtgaaaaagcaccgtcaattttaaaagctggtgaagtgttcaattcgaaaacaagtttccgtatcgaagaaaaagtagaaaatgattaa

SEQ ID NO: 407580 - DNA, 1260 bp, Staphylococcus aureus
atgaaaaacaataaaatttctggttttcaatgggcaatgacgatcttcgtctttttcgttattacaatggcgttatccattatgcttagagatttccagtctgtcattggtgtcaaacactttatatttgaagttacagatttagcaccattaatagctgcaatcatttgtatagttattttcaaatataaaaaggttcagcttgctggtttaaagttctcaatcagcttaaaagtcatcgaacgtattttactcgctctgattttacctttaatcattttaattataggtatgtacagctttaatacatttgctgatagttttatcttattacaatcaacgggcttatcagtacccattacacatatcttaattggtcatattttaatggcattcgtcgtagaatttggtttccgttcatatttacaaaacattgtcgaaacgaaaatgaatacgttcttcgcaagcatagttgttggtttaatgtactctgtattttcagcaaatacaacttacggtacagaatttgcagcttataatttcctttacacattctcattctcaatgattctaggtgagttaattagagctacaaaaggacgtacgatttacatcgcaacaacattccatgcttcaatgacatttggccttattttcttgtttagcgaagaaatcggcgatctattttcaatcaaagtcatcgccatttcaacagcaatcgttgcagtaggatacattggtttaagcttaattattcgaggtattgcttatttaacaactagacgaaaccttgaagaacttgagcctaataattatttagaccatgtcaatgacgatgaagaaactaatcatactgaggctgaaaaatcttcttcaaatattaaagatgttgaaaaaacaggtgtagctactgcatcaacgatcggtattgctaaaaatgatactgaaaatacagtggctgacgaaccaagcattcatgaaggtactgaaaaaacagaatctcaacatcacatagataatcaaactgaatctaatcatgatgaagatcatgacatcacttcggagtcagtagaatcagtagaatcagttaaacatgcaccacaaagtgacgatttaacaaacgattcaaacgaagatgaaacagagcaatcattaaaagaacctgcgacttataaagaagacagacgttcatcagttgtaatcgatgcagaaaaacatatcgaaaaaactgaagaacaatcttcagataaaaacaaataa

SEQ ID NO: 407581 - DNA, 3039 bp, Staphylococcus aureus
gtgtggggcatcgtttttttaggtggatatgagcaatttattaaaagtcatttacggaaaaaatatatagacggggtgagtaatatgcaagaacatttggtggttacacttgatggaaaagattatcttgtagaacctggtacgaatttacttgaatttattaaatcgcaagatacttttgtgccttcaatttgttataacgagtcgatgggaccaattcaaacatgtgatacatgtactgttgaaattgacggtaaaattgaacgttcatgtagtacggtgattgatcgtccaatgactgtaaatactgtgaacaatgatgtgaaagatgctcaaaaagaagcgcttgaccgcattttagaaaagcatatgttgtattgtacagtgtgtgattataataatggtgattgtgaaattcataacacaatggatgcgtggggacttcagcatcaaacgtatgaatataaagagaagccatacgaaaaagattatggcccattttatcgctatgatccaaatcaatgtatcttatgtggccgttgtgtagaagcatgtcaagatattgaagtaaatgaaacaattagaattgattgggatcgtgagcatccacgtgtcatttgggataatgatgtaccgattaatgaatcgtcatgtgtatcttgtggtcaatgcgcaactgtatgcccatgtaatgcgatgatggaagttaacatggaaggtaatgcgggttatatgactgatacggaacctggttcattagcggcaatgattgatttaactaaaaaagcagaacctggttatggtccactatttgcaatctcagattcagaagcagaaatgcgtatagagcgtattaagaaaactaaaacagtgtgtacatattgtggtgtgggctgttcatttgaagtttggactaaagatagagaaattttaaaagtacaaccatcacatgattctccagcaaataaaattgcgacttgtgttaaaggtaagttttcatggggacatattaattcagatcaacgcttaactaaaccattagtaaggaaaaatggtgagttccatgaagtagagtgggatgaagcattaaacgtcattgctgataactttacatctattaaagaaaagcatggcccagatgcattatcattcatttcttcttctaaagcgacgaatgaagaatcgtatttaatgcaaaaattagcaagacaagttattggcacaaataacgttgataactgttcaagatattgccaagcacctgcaacaaaaggcttatttagaacggttggacacggcggtgactcaggtagtattgaagatttagaaaaagcagcaatgtctgtattgattggtacgaatacagccgaagcacatccggttattgcatcacgcatgaagcgtgctcaaaaattatttggacaaaaaatacatgtgtttgatattagaaaacatgaaatggctgaacgcgcagatcgtttttatcaaccgaaaccaggtacagatttggcttggttaagcgcagtgacgaaatatatcattgatcatgacttacacgataaagcctttatcgaagagtgggttgaagattttgatgaatattacaagtcattagaaacatttacaatggcattcgctgaagaggctactggtattccagaagcagagttgattaagttcgctgaagaatgtgccaaagctgagtccgttgtcatttgttgggcaatgggtatcacacaacaagacattggtagtgactcaagtacagcgatttcaaacttattattagtaacaggtaattatcgtcgtcctggtactggtgcgtatccattacgtggacataataatgttcaaggatgtagtgatatgggaagtatgcctgataagattactggttaccaaagtattgaagcggatgatattcgcgctaaattcgaaaaagaatatggcgttaaattgaatccaaaagctggtaaagataatcatgaaatggttgaaggtatccatgatgggcaaattcactcattgtacttatatggagaagatactggaattgtagattcaaatattaactttgtacaagctgcatttgaaaaattagatttcatggtagtccaagatgaatttttaacatttacagcaacatatgcagatgttgtattgccagcaagtccttcattagaaaaagatggtacgtttacgaatacagagcgacgtattcaacgtttataccaagcattgaaaccattaggtgattctaaacctgactggaaaatattccaagcaattgctaataaattaggcttcgattggaattacaagcatccaagcgaaattatggatgaaattgctagactaacaccattatatgctggcgtaagctacgaacgtttagaaggatttaatagtttacaatggcctgtgcatccagatggtacagatgaaccaatactttatttagaaggatttaatttcgataatggtaaagcaaaattattcccattatcatttgataattactttaagcaagatgaagtatatgatattcatgtaaacaatggtagattgttagagcacttccatgaaggtaatatgacttatcaaacaccaatgattaaatacaaagtgccacgtgcatttgttgaaatttctccagaacttgctgaagatagaggcattcatgaaggtgcagaagttaagttgatatctgaaacaggagaagcggtattacaagttcacgtgacagatcgtgttaaaggtaaagaaatctatattccattaaataatgatgcgatggaaaatggagatctaggcgcaattaacttattaactaatagtgatgttgatcaatacacggatacaccatcttataaacgtacaagctgtcgtttggaggtaattacgaaacgtggtaagtcaccgttgaaccctaataatttccgtgtcaataaaaaacgtcatccgcagtacagtgttcaagtacagaaaaaatgggaacgtccagattatgttttcccgggaaatcaggtggataaataa

SEQ ID NO: 407582 - DNA, 1140 bp, Staphylococcus aureus
atgaatcaagcagtcatagttgcagctaaacgaactgcatttgggaaatatggtggcactttaaaacatttagagccagaacaattgctcaaacctttattccaacattttaaagagaagtatccagaggtaatatctaaaatagatgatgtagttttaggtaatgttgttgggaatggtggcaatattgcaagaaaagcattgcttgaagcggggcttaaagattcaatacctggcgtcacaatcgatcggcaatgtgggtctggacttgaaagtgttcaatatgcatgtcgcatgattcaagccggagctggcaaggtatatattgcaggcggtgttgaaagtacaagtcgagcaccttggaaaatcaaacgaccgcattctgtgtacgaaaccgcattacctgagttttatgagcgtgcatcatttgcacctgaaatgagcgacccatcaatgattcaaggtgctgaaaatgtggccaagatgtatgatgtttcaagagaattacaagatgaatttgcttatcgaagtcatcaactgacagcggaaaatgtaaagaatggaaatatttctcaggaaatattacctataaccgttaaaggagaaatattcaacactgatgaaagtctaaaatcacatattccgaaagataactttggtcgatttaagcccgtgatcaaaggtgggaccgttaccgctgcgaatagttgtatgaaaaatgatggtgcagttttattgcttattatggaaaaagatatggcatacgaattaggtttcgagcatggtttattatttaaagatggtgttacggtaggtgttgattctaattttcctggcattggtccagtaccagccatttccaacttactaaaaagaaatcaattaacgatagaaaatattgaagtcattgaaattaacgaagcgttcagtgcacaggtggttgcctgccaacaagctttaaatatttcaaatacgcaattaaatatatggggtggtgcattagcatcaggtcatccatacggtgcaagcggtgcccaattagtgacgcgattattttatatgtttgacaaagagtctatgattgcatctatggggattgggggaggtctaggaaatgcagcattatttactcgattctaa

SEQ ID NO: 407583 - DNA, 624 bp, Staphylococcus aureus
gtgttgatttgtgaatcaaaaaatataaataagaacccgagatataaaattataaaatataagaacgagtttttaatggttgatgtaactagttcttggattttcttcttcattccaatgcttaattggggtgtacctaagaaatatgcgaagattagtcaaagtgagtttgaagaattaaatacatttacaccgaaaaatagtagctcagctggatggatagcaggtgggggatcagttttattggcagtattgacgagaaaatatatacagttgttaaatatacaagttaatcaaattgctgtgaatattttatgctgtctcgtacttttgggggttttcctttcagctttatatattaattcgaaatctaaattaaatgtttatgatagaaataactgtgatgaaaagataattttaataccaacttttaaaaatttatacttaatgctcctttcgtatattatttttggtggtttaagcatacttgctttttatatgtttatcacagaaggtattcaaaacatcattttatttattacttggattatgcttgtaataatgttcttacttagtaatgtagctttggtagtcaataaaaaagtatatgttataaaaaggtag

SEQ ID NO: 407584 - DNA, 558 bp, Staphylococcus aureus
atggttgatttagtaagtacttggattgcttattttttgcccatgattaattggtttattcccaaaaagtacgcgaaaattagtagagaagaatttgaaagtttaaatattgtcaaacccgctaaaaataatactttctggcctgttgcaggatttgcagtgttattaacaaccttaacaagaaaatatatttatttgcttaatatccatttagaaaaagaattagttatattaacatgctgtatgatacttctaggtgttttcgcattgtttatatatataaatacaaaattgaagttacatatttttgataaaaataaaagtaataacgaaaagatcatattaatacctacatttaaaaatatttgtttatccttatttgcttatatattatttggtggattgtcaacaatggctctgagtatgttagtaactttatcccctcaaaatataatagaatttcttgctttaattggcatgactgcatgcttctttctactgaatatgtcatcggttttagataaaaatattcatgttattttaaaaacaaataagtag

SEQ ID NO: 407585 - DNA, 630 bp, Staphylococcus aureus
ttgctttgcgaggtaatagctatatacaaaaatcccaaatatagaattattaaatataatgatgaatatttgatggtgaatataataaataattggttagttttatttattccattgcttaattggttgacaccaaaaagatacatcaagatcagtcaagaagaattagaaaatttaaacactttcaaacctgctaaaaacaatgcattttggccagcattaggcagttcagttttatttagtgtgacttttagaaagtatatgcctttatttaatgttagattggaaaaaacaatagtaatagccatattttttgttgtatttcttggtattttatttttctacctaaatttaaatcgtaggttagcattaagtgtttttactatgaataaagaaaaaagtcagaaaatgatattgctacctaatttaaaacattttttctttataatatttgcatatttatatttcggtggtttttcatttttcactttatatgccctgataactatagatgttcaaaatataattatatttatctgttggggtgcagtaactatgtttttcttttttataaacattgttcccattggcattaaaaaagctcatgtaatacttcttaaaaaaagctga

SEQ ID NO: 407586 - DNA, 561 bp, Staphylococcus aureus
atgaacaaggtagaagtaattaaatgcaatgatgatattaataaaatgtatgacgcgctcaaagctcgatctgatagggattatttgttttttaaattagctatacatagtggtatgaaaattacagaattattaacaattaccgttgaagatactaaacgactgattgaaaaggggacactaagcgaattgtgtaaagcccattatcactcattgattaaaattagattgccagaaacattatctaatgagttacttcattatattgaaaacaaaagtctgtcaaatgaagatgtattatttcaatcattgagaactaatcaagtattatctaggcaacaagcctatcgtattattcatcaagcagcaattaaggctggcatagagaatgtaggactaacgacattgcgtaagacatttgcgtatcatgcatatcaaaagggcatacctattcctgtcattcaaaagtatttagggcatcaatcagctatagaaacattgaattttatcggtttagaaaatgaatgtgaacacagtatttatatttcattacaattataa

SEQ ID NO: 407587 - DNA, 645 bp, Staphylococcus aureus
gtgaaagtaaagtatatagataaacgtcactggcgtcgcctaattgatagggaatacacagaggtaaaagttaataataataggtttaaaggtattataggcttagtcacgatgaaaaaggttcgtgatcctttagaggtgacggtagttggacaaaatatcattgtcgcagatgacaattataaatggttgcaaatactacctgaaaaaaaacgttatagtattactgtaatgtttgataataaaggcaatccattagaatattattttgatataaatatcaaaaatataacgcaaaaaggtaatgcgcgtacagtagatttatgtttagatgttttagcattaccaagtggtgaatatgagttggtagatgaagatgatttaatgtttgcattagaaagtgagcaaattacaaaaaagcaatttcatgaagcatatatgattgcacatcaaattatggcagagttagaaaatgattttaaaggattccaaaagaaaattatgtactgctttaataaaattaatgcaaaggctcaaaaaaatcgtcaaaagccacaaaataaaactaattttgaaaaaagtaaacaaataaaacctaagcaatataatcaaactaaaaatcaccaacaacaaaagaaaaactaa

SEQ ID NO: 407588 - DNA, 1221 bp, Staphylococcus aureus
atggatatgtttgcagcgttattacaaataaagaattataaactctttgttgctaatatgtttctactaggtatgggtattgcggttacggtcccatatcttgttctttttgcaactaaagatttaggtatgacaacaaatcagtatggattacttctagcatctgcagcgattagccagtttacagtaaattcaattatcgctagattttcggatacgcatcactttaatagaaaaattattattattctcgcattattaatgggtgcgcttggtttttcaatatacttttttgtagatacaatctggttattcatattactatatgcgattttccaaggattatttgcaccagcaatgccccaactttacgcatctgctagagaatctatcaatgtttcaagctctaaagatagagcccaatttgccaatacagtattacgttcaatgttctcattgggctttttatttggtccatttattggtgcgcaattaatcggattaaaaggctatgctggattgtttggtggaacaataagtatcattttatttactttagtacttcaagtgtttttctataaggatttaaacattaaacaccctattagtacgcaacaacatgttgaaaaaattgctcctaatatgtttaaagacaaaacgcttttattaccatttattgcatttattttattacacattggacaatggatgtatacgatgaatatgcctttatttgttactgattatttaaaagaaaatgagcaacatgtcggttatttagctagtttatgtgctggtttagaagtgccatttatgatcattcttggcgttttatcatctagattacagactcgaacgttgttgatttatggagcgatttttggaggtttattctacttcagcattggggtatttaaaaacttctatatgatgttagcaggacaggtgtttttagctattttcttagcggttcttttaggaattggtattagttatttccaagatatcttaccagatttcccaggatacgcctcaacactattttctaatgcaatggttattggacagttaggcggtaacttattaggtggtgctatgagtcactgggtaggtttggaaaatgtattttttgtatcagcagcatcaatcatgttaggtatgatacttatattctttactaaaaatcaaaaaattacaaaagaggatgtgatatcaacatga

SEQ ID NO: 407589 - DNA, 177 bp, Staphylococcus aureus
atgacaattattttatggctacttatcatcgctgccttcatgttagcatttgttgggttgattaagccgattattccttctgttttagtattatgggttggctttctaatctatcaatttggctttcataatatcagcatttatcatgggtgttttatgtatctatggcattgctaa

SEQ ID NO: 407590 - DNA, 690 bp, Staphylococcus aureus
atgaaaagtactgcgcaattaacaaaagaaaataatgttaaatcattaagattaagcaatactgatagagaaatcttcgagaattatatgacttatatgcgctctgactttcgcgtcaatcctcatgatacagagttaattattaaccgtatacttaaacaattattaagcgcagaacaacatggtttattagccttagattttttcaatcatgaccctaaagcacatgcaataaaagaactaaaagcgatgcctaatgaaacatttaaaaatatttttaaatatatatatcagcacatcgttctattaattggtattgttagttttctcaaaggatttttaggatttttcatggaaaaaagtggaagtaatttatattttgtttcattcccgttttcagtagtcgttggattctttattgtctttttatttatatggtttagttttaaaacaattcaactgcagtgttttaacaattcaaattggatatggatattcacctatttagcaatcattctactaattgtaggatttttctatgtattctttattccacaatcattacttgcctttggaccatatattcaggtaagcaattgggtatttattatattttcatttatagttatgcctattggattacgcattgaaagaaatatttcgaaaaaacattctcatacatttttataa

SEQ ID NO: 407591 - DNA, 549 bp, Staphylococcus aureus
atgacccgtaaatcaatcgcgattgatatggatgaagtattggcagatacattaggagaaatcattgatgctgtcaattttagagcggatttaggtattaaaatggaagctttgaatggtcaaaaacttaaacatgttattcctgaacatgatggattaattacagaagtattgagagaaccaggcttcttcagacatcttaaagtgatgccgcatgcacaagaagttgtgaaaaaattaactgaacattatgatgtatatattgctacagcagcaatggatgtaccaacatcatttagtgataaatatgaatggttactagagttctttccatttttagatccacagcattttgttttttgtggtagaaaaaacatcgttaaagctgattatttaatagatgacaatcctagacagcttgaaatttttactggtacaccgattatgtttacagcagtgcataatattaatgatgatcgatttgaacgcgtaaatagctggaaagatgtagaacagtattttttagataatattgagaaagaaaaataa

SEQ ID NO: 407592 - DNA, 918 bp, Staphylococcus aureus
atggaaaataaatatacacatggtgtcctcttttaccatgaacacagtggattaaaaaatattaatcaaggtattggggaagttacaacagcattaagttcaatttgtaagcatctttctattcaattgagtgaaaacgaaggtgacattattaaatattgccaagaaatcaaaactaaaaactatgcaaaagatgtagatatattatttattcttggcggtgatggcacggttaacgaacttataaatggtgttatgacacatgaccttcaactccctattggaattttaccaggcggtacttttaatgattttacaaaaacgctaaatatagcacctaatcataaacaagctagtgaacaaatgatttctgcacaagttggtacatacgatgtaattaaaataaataatcaatatgcactcaactttgttggcttaggtctaattgttcaaaacgctgaaaacgtacaagatggttcaaaagatatatttggtaaattgagttatattggatcaactgtcaaaacactgctaaatccaacacaatttaattatcaattaacaattgatgataagacatattctggcgaaacgaccatgatactatcagcaaatggtccattcattggtggtagtcgtataccattgactgatttgtctcctcaagatggtgaactgaacactttcatttttaatgaacaaagtttcagtattttaaatgatatttttaaaaagcgtgatagcatgaattggaatgaaattactcaaggtattgagcatatacctggtaaaaagatttcacttacaacagatccagcaatgaaagttgatattgatggcgaaatttcattagaaacacctattgatattgaggttataccaaatgccattcagttacttactgtcaatgatttgtaa

SEQ ID NO: 407593 - DNA, 501 bp, Staphylococcus aureus
atggcacatggccgtcaacaagatgaattacaagatataactttattaggaaatcaagacaatacttacaattttgactatcgtcctgatgtattagaatcgtttgataataaacatcaaggtcgtgactatttcgtaaaattcaactgtccagaattcacatcattatgtccgattactgggcaaccagattttgcaactatctatatttcatatattccaaatgttaaaatggtcgaatcaaaatctttgaaattatacttgtttagtttcagaaatcacggtgatttccacgaagattgtatgaatatcattatgaatgacttgatagagcttatggacccacattatattgaagtttggggcaagttcacaccacgtggtggaatttctattgatccttatacaaactatggacgtccaaattctaaatatgaaaaaatggctgagcatcgtttaatgaatcatgatttatatcccgaaaaaatagataaccgttaa

SEQ ID NO: 407594 - DNA, 1635 bp, Staphylococcus aureus
atgaaaggcattgaattacttaacaatccatttttaaacaaaggtacagcttttactaacgaagaaagaaaacagttagggcttgaaggtttattacctgcgaatgttcgaactttagaacaacaagcagaacaatgttatgaacaattcaaggcgaaacaaaccgattttgagaaacgtttatttttaatggcaatttttaatcgtaatcgtacattgttttacaaattgacttcagagcatttagttgaatttatgccaattatttatgaccctgttattgcacaatcgattgaacaatataatgagaatttcagcagaccccaagatgcagtatttttatctgttgatagacaagaccaaattgaacaagaattgcgcaacgttgcaaatgacagagatattcgattaatcgtagtgacagatgcggaaggtatattaggtatcggcgattggggcgttgatggtgtagatattgcaataggaaaattaatagtatatacaggggcagctggaataaatccttctcaagtattacctgtatctttagatgttggtactaataatgaacaattattgaatgatgacctttatttaggaaatcgtcataaacgtgtcgatgatgagacatattacgcatttgtagataaatttgtgagtgcagtgcgtaaagaatatcctaatgcactattacattgggaagattttggtagagggcataccaaaaatattttagataaatatgaagatacgttaccaacttttaatgatgatattcaaggtacaggtatagttacattagctggcgtactaggtgcattaaatatttctaaagtagattatacgaatcagacgtttttagtttatggtggtggtacagctggtatgggtattaccaatattttaaaagatgaactaattaaacagggtgtttcagaagaaaaagcaaatcagcatttctatattatggataaacaaggattgctgtttgatgatatggatgatttaactgaagcgcaacaagtatttgctaaaaataggaatgaattttcaaatacagtaaactggaaaaatttaaatgaagtaattgaaaatatcaagcctactgttttaatcggtacatcaactcaaacaggtgcatttacagaagatgcagtaaaagagatgtttaaacatacagaacgtccggtgattttcccattgtctaatcctacaaaattatcagaagcaactgcacaagatttattaaaatggactaacggaaaagcattaattggaactggtataccatataatgacattgaatacaatggtgtgaattacagtattggtcaagcaaataatgcattgatgtatcctggtttaggtttgggtcttattgcgtcaaatgcgaagaaagtaaatcaacagattctatcagctgcgagtcatgcacttggtggcatggtcaatccagatgaaccaggtgctgcagtcttaccacctgttgagaaaatacatcaatgttctcgtgccatagccaaagcggttgcacaaagtgtcattgatcaaggattaaacgctgaaactattgatgatattgacaaagcaattgaagctgaaatttggtatcctaaatacaaatcatacatttaa

SEQ ID NO: 407595 - DNA, 1107 bp, Staphylococcus aureus
atgacacataacttaaacctatcccataacatatataaagacactaaacgcggtacttattatttccgtatcacttactatgacaagagcaatactcgtaagtacataacacgtaaggggtttaaacaacgtaaagacgcagttaagaaatgtaacgaaatgatggacgaattagagggagtcggacaccttaatagattaccttttgacaagctcgttgaagaatatatagactggtattcagcacgtcgaaagacatcaagtgtaaaagcattaaaaacacatacaaataaccacttgctaccttattttaaatctatggatgtatttaaaatgactacacaagatgtgatgaaatttcagaataagaagttaaaagaggggcattctggagactacttaaagaagatgcatgtatatttagtatcattactgaatcatgcaatgaagtttcatgagttaaaacaaaatgttgcatctcttgtagggaattttgaaatagaatcacagaaacgattgaattattggacattagaacaattcaatcaattttatggtgcgctagtgacacaacaacaaaagttattctttaaactattgttctactctggagcacgcaaaggcgaaatcagagcgctcacatggcgcgatattaactttgatgatgattttatccatataaacaaaacggactatcacggtgaagtgacagcccctaaaacgaaatcagccatacgcgatatatatttgcctactcacatgatggatgacatcaaaggttatttaaattggtataaagagaataacatatttaaagatgattatgtattatttggtacattctataaagcttacagcgagtctaccattgatcgttggtttactaacgcattaaaagtgttggatgagcaattaccaaatggacaaaatttccctagaatcgttatacacgagttaagacatagtcatgcatctatgttagttaatctaggggccagtgtaatgattatagctcagcgtttaggtcacagcgatacgactgaagtatataaccgatatggtcatttatatcctagtacacagaaagaaatagttaaatacttataa

SEQ ID NO: 407596 - DNA, 804 bp, Staphylococcus aureus
atggataaaaaaacagatattggtttacgcatcaaaagtatcagacttgctaaaggattgaatttaagagaatttggcgaagaaatatcaaaattaacaaaagaaaaaaaatatatttcggatagtatagttagtcgatgggaaaaaggggtgtcaatccccaatgccaaaaggttaaaagctattgcagaatatggtaatgtgtctattaattttttactatatggaaatgagatttcatacgaagatatttatcaaaacataaaatcagtgaatatgaaaaacaatattcaagacaagttaattgattttatcgttaattatatgccctctagtgagcaaaatacttattattttaaagtagctagtttaattacaattattaatgatcatacagattcaaatatagattgtataatagaacaaatgtattcattcatctcaaatgagaacatgacattttaccatcacggtgtttatttattgctaaacgaagatttcaaaaaattacctgtacaattatatctcactgaatttatttatcatttattaatccaaatttcattaaaatatcctgaagtctactttttaaacttgttgtcgcaatttgacgacctcaaaagtaatatacaagaaatttcaactaagcatgaaatattacacaatcatactagaagaagtaaaatagcagaatttatagactctaaagaataccaaaaattaatgaataaaatcgatgttatgaaagaaaagttactcaataaaaatattttaaaaaaacaaggcgatactcatgacacataa

SEQ ID NO: 407597 - DNA, 204 bp, Staphylococcus aureus
gtgaataaagtactgggttataggaaaatgttgaacttcacacaacaacaaatggcaaaagagcttaaaatatcagaacagtcatacagaaataaagaaaaaggaaaaacggaatttaagaaagaagaaatgttaacttttaaaaacatacttatttcaaagggaatgaccaatataactttagatgatattttttttaattaa

SEQ ID NO: 407598 - DNA, 219 bp, Staphylococcus aureus
atgacaaaactagcttatccaatgttatacattactagaaaagaaaaaggtgacacacaaaagaaagttgctagcaaacttggtattagtccacaacgttaccagttaaaggaaagtggtaaagcaatatttaatttaaatgagtgtcagattctttcagaaatgtatgatatgccaattgatgagttattttcatcaaaaattaaagtaggagaatag

SEQ ID NO: 407599 - DNA, 147 bp, Staphylococcus aureus
atgaaaatgtacttaacttatatctgcttagtttcattgttaacaattttattactagcaatatctaacatgtatgttgcttttagcgtttatgcttggctaataactttaggatgtaatttaacaggaggattagaaaatgaataa

SEQ ID NO: 407600 - DNA, 210 bp, Staphylococcus aureus
atgaataatgaacaaaaagaagtaatagaacacgtggtttatcaacttgagttaagtgtcatgaataacttggaaagttatgaacacacagaatatgttaatagtattgaagtggtttcagagatcagtcgtgaaaagcacttagaattgataatgaaatggtgcgcacaagaattaaagaataattttcaattagagaaaggagaataa

SEQ ID NO: 407601 - DNA, 318 bp, Staphylococcus aureus
atgaattgggaaattaaagatttaatgtgtgacattgaagtgataaaacaaaaaattaatgatgtagctaccaaacatgcttggtttgttgaagatagatttgtaaaaaatgaattagaaacaaaacgggaacatattaatttttctgctagctatttagaacatcgtatacaaaatgaacatacagttgagttattacatgtgtacttaaaagaattcggtgaacttatacaaaaatttcatgaaatagaaaaagcatcatctgagaactttggcgaggtatcagatgacgcacaaaaattaaaaatcacagagtaa

SEQ ID NO: 407602 - DNA, 642 bp, Staphylococcus aureus
atgaacatagaaactgtagtaaatgaatttgaaacacgagcaggcacgttactaaggtactacactggattattagaacatagtaaagtacaaccgtattgctttaagttatacaatgatccgtttgatatggtttatgtgatgatgaacgggaagttattcggtcatgtatatattaaagattgtaaagtaaggcaatcatttgaattagcgtcacctaagcacactgaggggcttataagaagtatagaaggtcattatgtaggttatgaattacatgacggtaaacagctttctattagtgatatgatggccagtcaattatttgaagatgagtattttatgtatggattacaaacatatgcagaatcaaataatagtgatgtgtttgagtacctagaaaatggatttgataccgatacacttgagggcattcaatcgagtaatactgatgtgatatcgaatattgaaatgttgtatcagatagctacgggaatcaatgaaccagcaccagagttagttgaggggttgagattagtaactgagtttgtacaagatgagaaggctgcacaagaggattacacggggttagaacgtaaattgaatgatctaaaagcgtcttattatagtataagtaaataa

SEQ ID NO: 407603 - DNA, 345 bp, Staphylococcus aureus
atgagtgaatttgaagtaaaagaaaagacgtacaacttaccgaatgaacaccgccaagtactcaatgtgataagaaatacgtctaataaatatattactaaaacaaagctgcttaatcaattgggatatgaagtgaataaggctaacaatagatggttaacacaagtcattacaagcttaatcattaattatcattatcctatcggatatagctataaaaaagatactagaggctattacatcattaaaacacaagctgataagatagaagctatcaaaagtattaagggcttaattgagggcagtcagaaccgtttaaaagccctagaagaaattgaagtgtaa

SEQ ID NO: 407604 - DNA, 579 bp, Staphylococcus aureus
atgaaaacaaatcatttatttgaaaaatattccgatgaagtaaaaggctacaaagaagaaattaataatttagaatctaaaattgaaaatactacaaaaactattgaagatctatcttccaaatataaagagtatataaaagttggcaacgataatgaggctgataagacgtttaataagatttcaaaattagaagatgagaaagcaaaagataataaaagatttgaaattaaaaaggaattatttaacagtattaagcgcgaaaaactcatagacttattgttgaataggaagaatattcctgagttatatcaagaggaagcacaaattttagcgcgtgaattagaaggtacaatcaaacagtttaataatgttattgataaaatcaacaatatgaatgaagaatatcgagaagatatgtataagttcgattccttgatagatcaaaatgaaatgaaaaaagataatttatttagacaacgatatggcgaagtgattgtactttacctcaacaactttcttattaatacaaaatcaattcgtttcaatgaacacaaaaaattggaggttaagaaataa

SEQ ID NO: 407605 - DNA, 177 bp, Staphylococcus aureus
atgcaatttagtaaaacattagaagcaataaacaatgctgaattagatgaaaaccaacgcttatctattttagaagcacttaaagaagatgtgaacgatgaggaaaaaagaaacgtaagagatgttccaactatttcagatttagctgataaagtaaatattagaaaaaacaaatag

SEQ ID NO: 407606 - DNA, 528 bp, Staphylococcus aureus
atgaaactgagtaaatctaagaacgttttatattatcgtaatgtcgacaataaactatctgagtatcaactattaacgcaatttaacccagcatttattaataaaaaaattaagatgtgtgaattccaaattgaaagtatgtaccatatgagtgcgtcgaccacaacatgtgatgaaataatgggggtcgtgtctgtctcatatccgattgaaaaattagttatcaaaattattgaaacaaaagcagggttacaaaactataaaaatagatctataaataatatggcgttgttgaaaaaggtactaaatcattatacagaaaaagagcagaagcaagttgtaaaatatatgcgttcaaatggacgatataagccctacaacgtcattgaacgcttacaagttgatttgtatcaagcaagtattaaacaacgttcagaacgtcaaaaacaaagaaatacagcaattgaaaacagtaagattgcacgagtaaatgaatatcaccaatcttcatatgtaaaagtggtgtaa

SEQ ID NO: 407607 - DNA, 342 bp, Staphylococcus aureus
atggataaaaagcaaataaaagacttcgtttgtgattatcataagcgaactagaagtgatgtgttgatagatgatgaaataaataccgatgaattcttttcaataggtgatgaaaattctaatgaatggatggcagacgataacattgatgatcatattgtaaagaatcacttagaaatgattgttgaccgagtagctaatgataaagagttttatattttcgattctttaatacaaggacgtagttttaaagatattagcaatgtcttagagtgttcagagcaatctgtaagattatggtatgaaaccttattagataaaattgtggaggtgatagaatga

SEQ ID NO: 407608 - DNA, 369 bp, Staphylococcus aureus
atgagtgagttaacggcaaaacaagcgcgttttgtgaatgaatacattagaacacttaatgtgacacaaagtgccgtaaaagcaggttatagctcaaatagtgcacacgtaacgggtagtagactattgcgcaatgagaaagtaaaagactatattcaaagcaagaaagatgagattatagacgatactatattaactgcaaaagaaacattatatttacttacgaaatcagctgttggtgatgagacagaaacaaaagagtttgtagttaagaaaagttcgtttgagcgcaacctagatacaggacgtatgaatcttgtatacaatgagcatgttgaaacggtggaagtacctataaagccaagttag

SEQ ID NO: 407609 - DNA, 522 bp, Staphylococcus aureus
atgaaaaggaaagtgctagtactaacaatgggtgtaatttgtgcaactcaattgtggcattctaatcacgcaaacgcattagtgacagaaagtgttgaaactaattttgttgtaaaagattcggataataaaaattttttacaaacccatactgaaattactactgaggagaaattttcaatagtagaaaagagtcaattaaatacactaaaatcactatctaatgacaactacatagaatatgatttacatactaatcaaactggtagtaaaaaaggttggttatatggctatagtgaaattgactcatcacatttcacagaccgtgacaaacgcgctatcagacgtgatcatgttaaagaagcacaaaacttgattaatgattataaatatacacaaaaatatgaagactttgctaaagctactgcaaaggtaagtacacttagtctgtctcatcaaaattatttaaataaacaaattgataaagtgaataataagatagagaaaactgaaaaaccctaa

SEQ ID NO: 407610 - DNA, 570 bp, Staphylococcus aureus
gtgaactatattaaacgaacgataattgtacttatattattcgttgtcgtatcccctataaactcaccaaaaacaattgcagataataagtattcagaaattcaagatgacaaattccaattacaacctggtgatattattattacaaaagggcctgtcatgtggggattttttggtcattgtagtatcgcgattgatgataaaacgattttgcaaattgaggggcctggcgacaaaccaactacacaatccttcgaatcttttaaatataattatgcaagtggcaaaaatgattggatgaaagtttatcgttgcagctatcctggtgcaggtaaaaaagcggctgactgggttaagaaaaactatgaaaatacaaatcatcgttatctagttacattaaatttgaacagcaaaaaatttacgtattgtactaaaattatctatcaagcttataaatttggtgtaagtgaaaaatcagttaaaagttatggactacatattatttcaccctatgcaattaaagataattttatagatccatataaactaaggcttgttaaagcttattaa

SEQ ID NO: 407611 - DNA, 852 bp, Staphylococcus aureus
atgcaacaatttaaatggattaatattctaaaaggttttgctatgggaacgagtgacttggtacctggtgttagcggtggtactatcgcattgttgttaggtatatacaatcaatttatcgcttcaattagcggcattttctcccgacgtttttggccaagttttacttttttaatccccattataattggaatgttactggcaatgggatcactaagtaatctctttaattatttattaagccaacaccatattccaactatgtttttctttggtggattaatcattggtatccttccatatttattgaaaatttctaactataaaacgtcatttacaactaaacattacatgatggttatagctggtatcgctatcttaattgttattacattaatgaataatggcgataaacatgctggagaaacacttactctatcaactggtcttattattaaatactttattgcaggtatgtgtgcatcaagtgctatgttactcccaggtatttcagggtcatttatgttattagtatttggcgtctatggcacagtcatgctagccatatctgaagttgttaaacttaactttatcggtcttcctatattacttgcagtcggatttggcgtgcttgctggattcattatttcaagcaaaattatccagtatttcctaacacatcataaactaatgacttttgcattaatcattggttttgttgttggctccctctttgcagtatttccaggtttaccaactaatatcgtgatgtggttcgtttcattagtagtatttatcatcggttttattgtaagtttgactttaggtcgaattaccgctgaaaatgaataa

SEQ ID NO: 407612 - DNA, 825 bp, Staphylococcus aureus
atgcaaccacatttaatatgtctagacttagacggaacattattaaacgataacaaagaaatttcatcatatactaaacaagtattaaatgaattacaacaacgtggacaccaaattatgattgcgactggcagaccttatcgtgcaagtcaaatgtattatcatgaattaaatttaacgacaccaattgttaattttaatggcgcttacgtacatcaccctaaagataaaaacttcaaaacttgccatgaaattttagatttaggcatcgcacaaaatattattcaaggattacaacaatatcaagtatcgaatattattgcagaagtaaaagattatgttttcattaacaatcatgatccaagattatttgaaggtttttcaatgggtaatccaagaattcaaactggtaatttacttgtccacttgaaagaatcccctacctcaattttaattgaagccgaagaaagtaaaatacctgaaatcaaaaatatgcttactcatttttatgccgatcatattgagcatcgacgctggggcgcaccattccctgtcattgaaattgtaaaacttggaattaataaagcgagaggtattgaacaagttagacaatttttaaatattgaccgaaataatattattgcattcggtgatgaagataatgatatagaaatgattgagtacgcgcgtcacggtgttgctatggaaaatggtttgcaagaacttaaagatgtagcgaacaatattacattcaacaataatgaagatggcattggtcgatatttgaatgatttctttaatttaaatattagatattactgttaa

SEQ ID NO: 407613 - DNA, 1815 bp, Staphylococcus aureus
atgaacaaaacaaagggttttacaaaatataagaaaatgagatatatgccagggctcgatggtttgagggcaatcgctgttctaggaattattatttaccacttaaataagcaatggttgacaggtggctttttaggtgtggatacattttttgtgatctctggttatttaattacaagcttattactcaaagagtatgatgacacaggtatcattaaattgaaaagcttttggatacgtcgtttaaaacgtttattaccagcagtcatagttttattaatggttgtagggacagcaaccttattattaaaatcagataatatcattagggttaaacatgatattattgctgcgatattttatgtatcaaactggtggtatatagcaaaagatgttaattattttgagcaattttcatttatgccattaaagcatttatggtctttagcaattgaagaacagttttacatatttttcccagttattttggttacattattgttaacaattaaaaagcgatacaaaataggatttattttttggggagtatctataatttctttagggttaatgatgtttatctacagtattaatggggatcattcacgagtgtattttggaacagatacaagattacagacattgttactgggtgttattttagcttttttatggccaccgtttaaattgaaaaatgatccacctaaagttgtaaaatatgttattgatagcataggtagtttatcatttatagtacttatattattatttttcattattaatgatgagacgaattggatatatgatggtggtttctatttaatatccatattaacgttatttattattgccagtgtcgttcatccatctacatggatagcgaaaatattttcaaatccagtgttagtatttatcgggaaaaggtcttacagtctatatttatggcattttgcagtaattagtttcgtacatagttactatgtagacggacagatacctgtatatgtgtactttatagatataagtttaacaattatatttgcagagctatcatatcgctttatagaaactccatttagaaaagaaggtattaaagctttaaattggcgaccttcttatataccacaatttataagaatggcaattgtagtaaccttgttaattccatttatgttgattttagtaggtgcattcaataaatatggtaaagacattataggagaaaaagcgaatagctttgataccactattgaagataattatttaatgcggatagcaccaattgataacattcacattgatggcttagtaagtgagaagaaaaaggaatcttccgacgtatataataatattaaacctcttttaatcggtgattcagtaatggttgatatcggtgagtcatttaagtcatcagttcctaagtctagaattgatggaaaagtagggcgtcaattgtatcaaaccttacctttagttaaagcgaattattcacaatataaaaaatcatctgatcaagtcgtattagaattaggtacaaatggcgactttactgtcaaacagctcgacgatttacttaatcaatttggaaaagccaagatttatttagttaatacacgtgttccaagaatttatgaggcaaatgtaaatcgattattagctgacgcggcgaaacgaaagtccaatgtcacattaattgattggtataagcgatcacaaggacatagtgaatattttgcaccagacggtgtacatttagagtacaaaggagttctagctttaaaagatgaaatattaaaagcacttaaaaagaaataa

SEQ ID NO: 407614 - DNA, 2610 bp, Staphylococcus aureus
atggatataaataaaatgacatatgctgttcaaagtgctttacaacaagcagttgaactgagtcagcaacataaattacaaaatatagaaattgaggcaattttaagcgctgccttaaatgaaagtgaaagcttatataaaagtattttagaacgagcaaatattgaggtagatcaattaaacaaagcttatgtagacaaactaaacacgtatgcatctgtagaaggtgacaatatacaatatggtcaatatattagccaacaagcaaaccaattgataactaaggctgaatcatacatgaaagaatatgaagatgaatatatttcaatggagcatattttacgttcggcaatggacattgatcaaacaacaaaacattatataaataataaagtagaagttatcaaagaaattattaaaaaagtaagagggggaaatcacgtgacatcacaaaatccagaagttaattacgaagcattagctaaatatggccgcgacttagtagaagaagttagacaaggtaaaatggatcctgttataggaagagatgaagaaattcgaaatacgattcgtattttaagtcgtaaaactaaaaacaaccctgtgctcattggtgaaccaggtgttggtaaaactgcaattgttgaaggattagcgcaacgtatagttaagaaagatgtgccagaatcattattagataaaactgtttttgagttagatttaagcgcattagtagcgggcgctaaatatcgtggtgaatttgaagagagattaaaagcagtcctaaaagaagttaaagagtctgatggtagaattatattatttattgatgaaatccatatgcttgtaggtgctggtaaaacagatggtgccatggatgcaggcaacatgctaaaaccaatgttagcacgaggagagttacattgtattggtgcaacaactttaaatgaatatcgagaatatattgaaaaagattcggcattagagcgtcgtttccaaaaagtagcagttagtgagcctgatgttgaagatacaatttcaattttacgtggtttaaaagaacgatatgaagtgtatcatggtgtgcgtattcaagatagagccttagttgctgccgctgaattgtctgatcgttacatcactgatcgttttttaccagataaagcgattgatttagttgaccaagcatgtgcaacaattcgtacggaaatgggatcaaatccaactgaattggatcaagttaatagacgtgtcatgcaattagaaattgaagaaagcgcacttaaaaatgaatctgacaatgcgagcaaacagagattacaagaactacaagaagagcttgccaatgaaaaagagaaacaagcagcacttcaatctcgtgtagaatcagaaaaagaaaaaatagcaaatttacaagaaaaacgtgcgcaactagatgaaagtagacaagcgttggaagatgcacaaacaaataacaatttagaaaaagctgctgaactacaatatggaacaattcctcaattggaaaaagaacttagagaattagaggataatttccaagatgagcaaggtgaagatacagatcgaatgattcgtgaagttgtaacagacgaagaaattggcgatattgtcagccaatggacaggcataccagtttcaaaattagttgaaacagaacgtgaaaaattacttcacttaagtgatatcttgcataaacgtgttgtaggtcaagataaagcggttgacctggtttcagatgcagtagttagagctagagcaggtattaaagatccaaacagacctattggtagtttcttattcctaggtccaactggggtaggtaaaactgaattagctaaatcattagctgcatcattatttgattctgaaaaacatatgattcgtatcgatatgagtgaatatatggaaaaacatgcagtatcaagattgataggggcacctccaggatatattggacatgatgaagggggtcaattaactgaagcggttcgtcgtaatccatactcagttattttattagatgaggttgaaaaagcgcatactgacgtctttaatgtattattgcaaattttagatgaaggccgtttaactgattctaaaggacgtagcgttgattttaaaaatactattattattatgacaagtaatattggatctcaggttttattagaaaacgtaaaagagactggtgaaattacagaatcaacagaaaaagctgttatgacaagtttaaacgcatatttcaaaccagaaattttgaatcgtatggatgacatcgtattatttaaacctttatctattgatgatatgagtatgattgtagacaaaatattaacgcaattaaatataagattactagaacaacgaatctcaattgaagtttctgatgatgctaaagcttggctaggtcaagaagcttatgaacctcaatacggtgcaagaccattaaaacgttttgtacaacgccaaattgaaacaccattagcacgtatgatgattaaagaaggattcccagaaggtacaactattaaagttaatttaaattcagacaataacttaacgtttaatgttgaaaaaattcatgaataa

SEQ ID NO: 407615 - DNA, 1656 bp, Staphylococcus aureus
atgacaagaaagttgaaagcgctaattttaatattggttgccacaattgcattaagtggttgtgctaatgatgatggtatttattcagataaagggcaagtattcagaaaaattttgtcatcagacttaacatcccttgatacatcattaataacggatgaaatatcttctgaagtgacagcgcaaacattcgaaggtttatacacattaggaaaaggtgacaaaccggtgttaggtgttgcgaaagcttttcctgaaaagagtaaagatggtaaaacgttaaaggttaaattaagaagcgatgctaaatggagcaatggtgacaaagtgactgcacaagactttgtttatgcttggagaaaaacagttgaccctaaaacaggttctgaatttgcatacattatgggggacattaaaaatgcgagtgatattagtactggtaagaaacctgtagagcaattaggtatcaaagcattagatgatgaaacattacaaattgaattagaaaagccggttccatatattaatcaattattagcacttaatacatttgcacctcaaaatgaaaaagttgccaaaaaatatggtaaaaattacggtacggcagctgatagagcggtatacaatggtccatttaaagttgatgattggaaacaagaagataaaacgttactatctaaaaatcagtattattgggataaaaagaaagtaaaattagataaagtgaattataaagttattaaagacttacaagcaggtgcatcattgtatgatactgaatcagtagatgacgcagttattacagcagatcaagtaaataaatataaagataataaaggattaaactttgtgttaacgactgggacattttttgtaaaaatgaatgaaaaacaatatcctgattttaaaaacaaaaatttaagactggctatcgcacaagcaatagataaaaaaggatacgttgattcagtgaaaaacaatggttcaatcccttccgatacactaacagccaaaggcattgcgaaagcacctaatggcaaagattatgcgagtaccatgaattcacctctaaaatataatcctaaagaagcaagagcacactgggacaaagctaaaaaagagttaggtaaaaatgaattgacattttcaatgaacacagaagatacaccagatgcaaaaatatctgctgaatatatcaaatcgcaagttgagaaaaatttaccaggagttactttgaaaattaagcaattaccatttaaacaaagagtatcactagaactgagtaacaattttgaagcatcgcttagtggttggtctgcagattaccctgatcctatggcttatttagaaacaatgaccacaggtagcgcacaaaataatacagactggggtaataaagaatacgatcaattacttaaagtagcaagaaccgaattggcgcttcaaccgaacgaacgatatgaaaacttgaaaaaagcagaagaaatgttcctaggagatgcaccggtagcaccaatttatcaaaaaggtgttgcacatttaacaaatcctcaagtaaaaggattaatttaccataaatttggtccaaataactcacttaaacatgtatatattgataaatcgatagataaagaaacaggtaaaaagaaaaaataa

SEQ ID NO: 407616 - DNA, 963 bp, Staphylococcus aureus
atgattaaattaatacttaaaaggttagggttaatgatcccgttactaattttaatctcaatagttgtattttcattagcaatcatacaaccaggagatccattttcagatttacaaaacggtaaaataaaacaagaagcaataaatgcacaaagggaaaaattaggtctcaacgactcaataccacatcaatacattagatgggtcaatcatgttatacacggtgatttaggggagtcaatcaaatataaaaggccggtaattgatgttattgaggaaagaattccaaatacaatattactcggtgctatgtcattaattattacttatattatctcatttgctttaggaataacgtcaggtagatattcttacagtttgacggattatactgtgcaaatatttaattatttgatgttagccattccatcttttattgcgggagtatttgcaatttttattttttcttttgaattacaatggttcccgtttcaaggttctgttgatattaaccttaaagaaggtacctttgaatattatatgagtaaaatttatcatacatttttacctgcattaactttaggattattatctactgctggttatattcaatatttacgtaatgatattattgaaaattctaaaaaagattatgtattgacggcaaggtcaaaaggattatctatgaataaaatttataataaacatatattgagaaattctctaatacctattattacatttttaggtgctgatattgtcagtattttaggtggagctgtgattactgagacgattttttcatataacggtatcggtaaattatttttagaatcggtaataggtcaagactatccattaatgatggcattaacgttatttttctcatttttaggtttactgggtaatttgatttctgatattacttatggatttatagatccaagaattagaagtaactag

SEQ ID NO: 407617 - DNA, 882 bp, Staphylococcus aureus
atgcaaaataagtcaaaatcgccttttaaaattgcattgtctaaatttattcataataaaattgcaatgttatcgattatttttttattaatcataactattgtatcaattatagcgccattaatagctccttttccagtgaaccaacaagatttattaaatataaaaggtgaaatgacagcacaaaacattcttggtacagactctggtggtagggataactttagtcgtttgttatatgcaggtcgtatttcattatccattggaattacatctacaataggaatgcttttgattggaattacagttggagtgatttctggttattttggaggtattgttgatacattattaatgagaataaccgaatttgttatgttatttccatttttaatatttgcaattgtattaaatgctgcacttggagataaaattaaaaatccttatggatctgccataattcttgttctagttattatcgtattaagttggggaggtattgcaagacttgttcgtggtaaagtacttcaagaaaaagaaaatgaatactttttagcagcaaaatcaattggtacacctacatataaagttattttgaaacatcttttgccgaatatattaagtgtagttatcgtacaagcaacattgttatttgccggtatgattgtagtggaatcaggattgagctttttaggattcggaataagtaaagcaatcccatcttggggtaatatgttgagtgatgctcaagaaggggatgttataagtggtaaaccgtggatatggatgccacctgctataatgattacattaactatattaagtataaactttgtaggggaagggcttaaagatgcttttaatcctagaggtagacgttaa

SEQ ID NO: 407618 - DNA, 720 bp, Staphylococcus aureus
atgagaatagaacgagtagatgatacaactgtaaaattgtttataacatatagcgatatcgaggcccgtggatttagtcgtgaagatttatggacaaatcgcaaacgtggcgaagaattcttttggtcaatgatggatgaaattaacgaagaagaagattttgttgtagaaggtccattatggattcaagtacatgcctttgaaaaaggtgtcgaagtcacaatttctaaatctaaaaatgaagatatgatgaatatgtctgatgatgatgcaactgatcaatttgatgaacaagttcaagaattgttagctcaaacattagaaggtgaagatcaattagaagaattattcgagcaacgaacaaaagaaaaagaagctcaaggttctaaacgtcaaaagtcttcagcacgtaaaaatacaagaacaattattgtgaaatttaacgatttagaagatgttattaattatgcatatcatagcaatccaataactacagagtttgaagatttgttatatatggttgatggtacttattattatgctgtacattttgatagtcatgttgatcaagaggtcattaatgatagttacagtcaattgcttgaatttgcttatccaacagacagaacagaagtttatttaaatgactatgctaaaataattatgagtcataatgtaacagctcaagttcgacgttattttccagagacaactgaataa

SEQ ID NO: 407619 - DNA, 1965 bp, Staphylococcus aureus
atgaaatggttcaaattaatacttgatgttacaatcttcattctaattgctatattgttatttgtttatacatataaagaaaacgaagaaatattgcctgatactaaataccctatagcggtaactgactggaataaaaaatataataaaaatgagatttataaacatataaatcaattcgctaaaaatgagaacgtagcaatctataaatcaacttcaaattatacaaacaaaaacgtagataaagatatatatgtatttaataaatcaaaagcaacaactatcactccttttaatgctaaatataacattcattatttaagtgacgacgaattattaaaaaaagatatcaaagggagttattttgtaaaagacaaaaattttgacgtgtctaaattcataaattttttaaaagaatatggtgttactgctgaatcattcaaaatagatcatatgatgattgccgttggtgtcattaaacaaatgaatatagtagtgccattatccgcacttttaatcgtttattttatttattatattttcgaaaagaacattaatttcaaagcgtatgcgattaagtatttaaatggttttacattaagaaaaataatttttgaaaatttttcaaagaaatgcacgtattgggtaacgttaatcataactcaaattcttttaactacaagtgtactttggatattaaattacacgggtaatttagatttattcatattaagattagttctactttcatgtctttttattttaacgattagtgttattaatttatggactttcttaatgttactaaatttaaatattgccaatatgattaaaggtaagcagcactttaaaacgattcgttttattaatacagtttgtaaaagtattctcttagtactaatagctagtgtaatgatagaaaatactagtgttattaaagatttgaataaaataaaggaaactgagaaatattggaatgtattagatgattattacacgattgaatttgcaccttatcacgaaacaaaacaaagtttgattgataatatgctgcgatcagaacaattagtaaagactagtgaagcagaaaataatacgattttattcaaaccaaagggtgactccgttgacaatgacaacttttcgcctgatgaggggaatgtaatattagtaaataatcagttctggtcgatttatcacaagcagtttcaacctgatattccgataaaaaatcaaaaaaataatgtcgaagtaattattccacaaaagtttcatgcaatgcgtaatgaaatcaatcaagcatatcattcatggtttgaatttgtacaaaataaaaataataaagagaataagttatctatacagtttatcaacaaaaatgattatcgaatttttacatttgatgcacgagatagtcgtcatttgtcatttatagaggcgccaatcattgtgaatgttcaggcatcagatttatcgaatgatttttattatgccatgatcagtcaaggcggctatttattcaaaaattatgacgcgctagtaaaaaatattgaaaagtatcatcttgatggggaaatcagtggaataaccaattataaagatagcgtgatggaaatatatcatgaaaacaatttgaaattaactgtactcaacttttcacaaatcattatcgtaatcatcttagtaattattattttatttgatgtgaaatattattttgaacagcatcgaaaattactcgtaatcaaaaagctatatggttattcaacattaagagccaattaccaatacttattaataaataatatagttgttgtttttattggaatattgacgaatgtaattttacattatcactatataatgatgatatttgcaacgattattgtcgttcaaatattattgcagatttgcagcctatactatcatggccgacgttttaatgaagttatcaaggagttttaa

SEQ ID NO: 407620 - DNA, 642 bp, Staphylococcus aureus
atgatagaattaaaagatttaaccatacaaaaaggtaatacacatattttgaagaaacttaatttgaaatttcaatgtggaaaatcatatgcacttataggtaaaagtggatgcggtaaatctatactattaaatactattgctggacttgaaaaaatggggaaacaacatgtctattttaatggtcaattagaacgatttaaatctaatttttacagagataaattagggtatttatttcaaaattatggattaatcgataatctcacagtaaatgaaaatttagatattggattagcatataaaaaaataagtaagaaagaaaaagaacaattaaagatacgttatatagaacagtttggtctgtcaaacagtttaaaaagaaaagttcatactctaagtggaggtgaacaacaacgtgtcgctttaattagaatgatgttaaaagatccgattgttatgttagctgatgaaccaacgggtgcgttagatcctaaaacaggacagatgattattcaatcattatttgatttggtcaatgaaaataaagtgctaattttagcaacacatgatatggctattgcaaatcaatgtgacgaaataatagatttagaacagtatagaaaagtagcatctatgtga

SEQ ID NO: 407621 - DNA, 960 bp, Staphylococcus aureus
gtgaataggaatatcattaaactaattatgtttatgctaattttagttgtagcagtagcgggttgtggtcaaaaagatactgaagagaaaactgaaatgacgacaataaaagatgaattaggaactgaaaaaattaagaaaaatcctaaacgtgttgttgtattagaatatagttttgctgattatttagcagcattagatatgaaacctgttggtattgcagatgatggaagcagtaaaaatataacaaagtcagtaagagataagattggggagtatgaatcggttgggtctagaccacaaccgaatatggaagtgataagtaaattaaaaccggatttgattattgcagatgtcagcagacataagaaaatcaaatcagaattgagcaaaattgcgccgacaattatgttagtcagtggtacgggagattacaatgcaaatattgaagcatttaaaacagtctctaaagcagttggcaaagagaaagaaggcgaaaagcgtctggaaaagcatgataaaatattagcggagattagaaagaaaattgaacagagtacgttaaaatctgcatttgcatttggtatctcaagagcaggtatgtttattaataatgaagatacatttatgggacaattcttaattaaaatgggtattcaacctgaagtcacaaaagacaaaactgtgcatgttggtgaacgcaagggtggcccttatatttatttaaataatgaagagcttgccaatatcaatccaaaagttatgattttagctacgaatggaaaaacagataaaaatagaacgaaattcattgatcctgcagtttggaaatcattaaaagctgtgaaagataataaagtttatgacgttgaccgaaataagtggttgcaatcaagaggtattatcgcaagtgaaagtatggcagaagatttagaaaaaattgcagaaaaagcaaaataa

SEQ ID NO: 407622 - DNA, 402 bp, Staphylococcus aureus
ttggggtgtgggccccaacaaagagaatttcgaaaagaaattctacaggcaatgcaagttggggtgtgggccccaacaaagagaatttcgaaaagaaattctacaggcaatgcaagttggggtgtggggcccaacacagaagctgacgaaaagtcagcttacaataatgtgcaagttggggatgggccccaacaaagagaaattggattcccaatttctacagacaatgcaagtcggcgaggccccaacacagaagctgtgactaatgataaaatactactacataataaatcattagtggttctttatcattattgcctcccttttcttattgttatgatgcacaacaatttaagttcaaactgtcgaataaagttatatttgatttcaaattatccttga

SEQ ID NO: 407623 - DNA, 915 bp, Staphylococcus aureus
atgaaacaatcagttaattttaaaagtaaaacaaatttattagcagcgaatttatatacaccagaacaatttgatgaaagcaaaaaatatccagcaattacagtttgtcacccaggtggcggtgttaaagaacaaactgcaggtatgtatgcagagaaacttgcggaattcggctacgttacggttgtatatgatgcatcacatcaaggtgaaagtgaaggttctcctagatatttagaagatccatttgcgagaacagaagacgttagagcttcagttgattatcttacaacattagactttgtggataatgacagaattggtgcgcttggcgtttgtgccggtggtggatatacagtaagtgcagcaagaacagaacgtcgtattaaaacattagctactgtaagtatggtagatattggtgctttattccgtaaaggtcctggcgatgtagtatcaattaatgaccaattggcatttatgacacaagttgcagatcaacgtacagctgaagcaaatggtgcagattatggtatcactggctatgtgcctgaagaaattgatgattctatgcctgaaaattcaacaatggtacaagggcatgattattatttaactgaacgtggtcaacataaaaacgcaccaaataaactattattaagaagtttttcagaagtattaacatttgcgcctttcacatatattgatgaattgttgacacaaccattcttagcaatcgcaggtacagaagcagacacgattgaatatagcgttgatgctgttgaaaaagcagcaggcgacaacaacgaactatataaaattgaaggtgcatcacacgtagatttatatgatattccagaatacgtaaatcaagtgttaccaaaacttgaatcattctataaagaaactctataa

SEQ ID NO: 407624 - DNA, 555 bp, Staphylococcus aureus
atgaatgttggggatttacgtgttgttaaaacgagagctagtattaaaaaggcatttatgaacttactttttgaaaaagattttgatactatttcgattaaagaaattactgaatttgcgcaaattgggagaaaaacattttatctacattatattgataaatatgatttactagatcaaatagtatcggaaaaattgatagaacttgagcaaatttctgaagccaaaaagagtctcggtatccaagaaggtacacagttatggtttgagtttttcgaaaataatagaacgttttttatgaaaatttttaatatcaacaacgcttcaaattataagaaaaaactgcttcattttattgaagaagaatttaagaaaaaagttccgacacgtgttgctactgaaaaaggcttagactacgacttatatattaattttattagtaacggtattatcggactacttgatatctatctaaacagcagtgaaaatacagaagaacaagaaaaaataacattgcaggtgtcgcgcctgctatctttgtacgatttaatttaa

SEQ ID NO: 407625 - DNA, 738 bp, Staphylococcus aureus
atgttcatgcaaaatagaaatgattttatagaaaaactattagacagagctcaaattgaagaaggcatgcgtgtactggatataggttgtgcgactggtgaggtcactcaattaattgcaaaacgtgtgggggcgaatggtgaagtcgtcggtgttgatgtgaatgaatcattacttaaaattgcaaatgaaaccaatcaatataacaatgtatcatatcaatcttctgatatatatcaattgccagaaactatggggcattttgatgcgattgttggtagaagagtattaatgtacttaccggatgctgaaaagtgtttacaaattttgaaatcaattttaaaacctgagggtatattatgttttcaagaaagtgatgctattaatgcaggtgttggtgcagatgtactatctttacatcaatcagcaattcaatggatttgggaaacagtgaagcaagaaggtggcaatattcatattggtcaaaatttatataatttgtttaataataatggaatgcatgttgtagattattttgcagaggcagtgattcaaacgtcaatggataatgatttagcatggcttgtaggtgtaatgctacaaagaatgaaagcacatggtgtcattaatgatgatttttcactagatgagtttaaatcaaaccttgaacacgaagcaataaacaatcagtgcgcatttatacgtgacatggcgtttggtattatcggaaaagcctag

SEQ ID NO: 407626 - DNA, 483 bp, Staphylococcus aureus
atgaagaaatttaacaactggatattaaatgcaataagtggatctcaaacagacaagaatggaacaactaaagaattaaaaggggcaaaatttatcattttatatgcatattcaatgctcgttttgcttgcgttagtaatttctaacatattcattcacattttggagcctaaactatcaatcaccactcaaatcatcatcgttttaattttaattgaagcaataattggactgcgtttcttgaaagagtacgatgttaagcgtgacaaagataaagaaaataagagaaatagtaaggatttcgttaaactaaaatcaattttactagcaattttatttacatcattggcgctgacagcaggcactgtagctgatatatacggtttcactgacttaggaaatactagaagtgatttaatcgtttggagcataggtggtattatatttggcctcgtatgttacacaatggaagataaaagataa

SEQ ID NO: 407627 - DNA, 564 bp, Staphylococcus aureus
atgatgaaacgattaaacaaattagtgctaagtattagttttctgtatttaatcattagtttcactgctggttgtggcatgggtaaagaagcggaaattaagaaaagttttgaaaagacattgagtatgtatccaattaaaaatctagaagatttatacgataaagaaggttatcgtgatgatcagtttgataaaaaggataaagggacgtggattattcgttctgaaatggcaattcagaaaaagggagaagccttaaatataaaaggtatggttttgaagttaaatagaaatacaagaagtgcaaaaggattttactatgttaatgcgataaagaaggatgaaaatggcagacctctggataatcaaatagaatatcccgttaaaatggtagacaataaaatcattccaactaaaggtatcaaagacgaaaacataaaaaagaaatcgagaattttaagttcttcgcgcaatatggcagctttaaagatttgtcgaagtacaaagacggcgatatatcatacaatccagaggtgccgagttattcagcaaaatatcaattaa

SEQ ID NO: 407628 - DNA, 237 bp, Staphylococcus aureus
gtgccgagttattcagcaaaatatcaattaactaatgatgactataatgtaaaacaattacgaaaaagatataatataccaacgaataaagcaccaaagttattgttgaaaggtacaggtaatttaaaaggctcatcagttggatataaagatattgaatttacgtttgtagagaaaaaaggagaaaatatttactttagtgatagcctacatcttgaaccgagtgaggataaataa

SEQ ID NO: 407629 - DNA, 2238 bp, Staphylococcus aureus
atgcaacgtgattatttaattcgagtagaaactgagagtatgtcagatttcaaaaggctcaatggtttaatgattggttttgttattaaaggtgaggcacatatttatgatgaaaataatatgacgcaatgcaacagtggcgacattttcatcattaaccaccgcgacttgtatcgatttcaacttcaacaagatggcatcatatgttatatccaattccaaatgaaatatttagcagacaagtttgatgatgtgcattgtctatattttcacttaacagatgcgaccacaacaaaaaatatacatcaactgagaaatataatggcaagactggtttcaacacatattcgacataatgagttgtctaaattgactgagcaacaacttgtgattcagttgcttatgcatatgattcattatgtcccgcgtacatatcattcgaaccaaagtatcttaaatgatgataaagtgaatcaagtatgcgactatatcgagttacattttcatgaagacttaagcctttcggaattaagcgaatatgttgggtggtcagagagccatctgtctaaaaagtttgcagaatcgctaggtgtaggattccagcatttcttaaatacgacgcgaattgagcatgcgaaactcgatttgacatacacagatgaaacgattactgatattgcattgcaaaatggcttttcaagtgcagcgagctttgcgagaacatttaaacactttacgcatcaaacgcctaaacaatatcgaggtgatcgtccagcaatcactgaaaatcaacaatcggcacaacataattatcacgaccgtgaattgatattacttttaaatgactacattgaagaaatgaatcattttattgaagatattgaaaagatgaactataaagagattgcctttcaaccaaccaatcaccaactaaatcaatttaatcatattattcaagtaggctatttgaggaatttgctcaatacacagtatcaatcacagttgcttacatgtcatcatgattttcaagtcaatgaagtattagcatatgatgtgatgccatatatcatgaaaaagctcaatgcgccattcacgtatgatgcagaaatttcgaatatattttatgatatcgatttgtgtttagactttttattagataataactttagtttgaccatgcatttggatcattatgactcacgtgattatatcgatgcatttaaaatttttatccatcacgttgccctgcatgtcagtcatagaaaagatttgaagttcaacttgtatgtgacgacattgcacaattctttgattgaaatgattgattattttaaagcattattccctaatggtggcttgtacatccacttagatcaagctacggaaagacagctaccattgttgaaacgacttgagccacacatcgaccattttgtatttgatgctaattcaaatgatgctgttgattttaataaaatgaatgatgatgaatttaaaaccgcaagtcaaatgattattaataaaacgaattaccttatcgacttaatgcatcgtcatcacctaaagcgtccactcattttactcaattggaatacattgacgggtgatacatttattacaaacggcgaatattttagaggtggtatcatcattgagcaattattaaagttaagctcaaaggtagaaggcatagggtattggttgaattatgatttgcacgtcagtcattgtagaaatgaacgggattatatgaattctattgaactgtttcatcaatataatggaaaacgtccggtctatttcacggcattgctatttaataaattaacaagcaatattttatattctgatgatacatgtattgtcacgggaactgattcaaattttcaaatattgttatatgatgcaaagcattttaatccgtacttagcgttggacaatcaaatgaatatgcgtgcaacggaaatgattcatttgaacattaatgccctggaagacggtatgtataagattaaacattttaccttagataaagaaaatggtgcattatttaatctttggcgcaaacatcatacgatacatggtatggacaaggactctatagattacgttaatcgaatgagttttccaaaattagaagtgtacgatatagatgtgacggatacgctgacattaaacattaaaatgattacgaatgggattcacttaattgaagtaaaacgttacccaagttcataa

SEQ ID NO: 407630 - DNA, 1389 bp, Staphylococcus aureus
atgaatgaaacgtatcgcgggggcaacaagttaatcttaggtattgtattaggtgttattacattttggttgtttgcacaatcacttgtaaatgttgtaccaaatttacaacaaagttttggtgcagacatgggaacaattagtattgcggtaagtctaaccgcactattttcaggcatgtttgttgttggagcaggcggcctagcagataaaattggacgcgtgaaaatgacgaatatcggcttattattaagtattattggttcagcattaattattattacaaatttaccagcattgttaatcttaggtcgtattatacaaggcgtatcagcagcgtgtattatgccttccacattggccattatgaaaacttattatgagggagctgaacgtcagcgtgccttaagctactggtctatcggttcttggggtggaagtggtatctgttcactcttcggtggtgcagttgcgacaactatgggttggagatggattttcatcttctcaattatcgttgccgtactttcaatgttactcatcaaagggacgcctgaaacgaaatcagaagttaccaatacacataaatttgacgttgcaggtctaattgttctagtagttatgttgctaagtttaaacgttgtcattactaaaggtgcagcacttggttatacatcattatggttctttggtttgattgcggtcgttgttgtagcattctttattttcttaaatgttgagaaaaaagtagataatccgcttattgactttaaattatttgaaaataaaccatatacaggtgcaacgatttcgaacttcttattaaacggtgttgcaggtacattaattgtagcgaatacattcgtgcaacaaggtttaggttatacagcattgcaggcaggatacttatcaatcacttatttaatcatggtgttattgatgattagagttggtgaaaaattattacaaaaaatgggttctaagcgaccaatgttattaggtacattcattgtgatcattggtattgcacttatttcattagtattcttaccaggcatattttatgttatcagttgtgtcgtaggatatttatgtttcggactaggcttaggtatttatgcaacaccttctacagatacagctatttcaaatgcaccgttagataaagttggcgttgcttcaggtatttataaaatggcttcatcacttggtggtgcattcggtgtcgcaattagtggtgcagtatatgccggtgcagttgctgcaacgagcattcatacaggtgcgatgattgcactttgggttaacgtattaatgggaatcatggcatttatcgcaattttattcgcgattcctaatgatgataaacgtgtcaaagatgcggaataa

SEQ ID NO: 407631 - DNA, 1203 bp, Staphylococcus aureus
atgcgtatagttcaacctgttattgaacaattaaaagcacaatctcatccagtttgtcattatatctatgatttagatgagctgaaaagtcacttgcaacatattacatcgtcattgcctagtaattgtcagatgtactatgcaatgaaagcaaatagtgaacgaacaatcctagatacaattagtcagtatgttgaaggattcgaagttgcatctcaaggtgaaatagcaaaaggtcttgcttttaaaccagcaaatcatattatttttggtggccctggtaagacagacgaggaactaagatatgcagtaagtgaaggtgttcagcgtattcatgttgaaagtatgcatgaattacaacggctaaatgccatcttagaagatgaagataagacacaacacattttattgcgtgttaatttagcaggaccatttcccaatgcaacgttgcatatggcaggacgcccaacacaatttggtatttctgaagacgaagttgatgatgtcattgaagctgcgctagcaatgtcaaatattcatctagatggatttcattttcattctatttctaacaatttagactcgaatttacatgtcgatgtagtgaaactttattttaaaaaagcaaaggcatggtctgaaaaacatcaatttcctctcaaacatatcaatcttggtggtggcataggcgttaactatgcagatttaactagccaatttgagtgggataattttgtagaaaattttaaaacacttatcgttgagcaagaaatgggagatgtgacattgaactttgaatgtgggcgctttattgtggcacatattggttactatgtgacagaagtgctagatatcaagaaagtacatggtgcttggtatgccattttaagaggaggtacgcaacaatttagactgccggtatcttggcagcataaccatccttttgaaatttatcgctataaggacaatccatattcatttgaaaaagtttcaatttcgagacaggacacaacattagtcggacagttatgtacaccgaaagatgtctttgctagagaagtacagatagatgcaatcagtacaggcgacgttattgttttcaaatatgcaggtgcatacggatggtctatttcacatcacgatttcttaagccatccacatcctgaatttatttatttaacgcaaacaaaggaggatgaataa

SEQ ID NO: 407632 - DNA, 765 bp, Staphylococcus aureus
ttgaatcatattcatgaacatttaaaattggtaccagtagataagattgatcttcacgaaacattcgaacctttaagattggaaaagacgaaaagtagtattgaagcagatgattttatacgtcatcctattttagtgacagcgatgcaacatggtagatatatggttatagatggtgtgcatcggtatacaagtttgaaggcgttaggatgtaagaaagttccagtgcaagaaatccatgaaacacaatattcaattagtacatggcaacataaagttccatttggtgtgtggtgggaaacgttacaacaagaacatcgcttgccatggactactgagacaagacaagaagcgccatttattacgatgtgtcatggtgatacagaacaatatttgtatacaaaagatttaggcgaagcacattttcaagtatgggaaaaggttgtcgcaagttatagtggttgttgttctgtagagagaattgcacaaggtacatatccttgtctttctcaacaagatgtactcatgaagtatcagccattgagttataaggaaattgaagcggttgttcataaaggggaaactgtgccagcaggtgtgacacgctttaatatttcaggacgatgtcttaatcttcaagtaccgctggcattacttaaacaagatgatgatgttgaacaactgcgcaattggaagcagtttttagcagataagtttgccaatatgagatgctatactgaaaaagtatacttggtggagcaatag

SEQ ID NO: 407633 - DNA, 423 bp, Staphylococcus aureus
atgaatttaattataggaaaaatcgctatttggataggcatcgtagttcaaatatgttatagcgtcgttattgttagtataacaaccttcatcctttttataaatgctaaaggagcaagcccggaaatagctgttttaatagcattagtaatcattcttatcttaactttaccacctatcctaaccgcgattaacttagagaataaaatggaagtaaaaggtacgctttttattgtttatgcgattgtggcattttgtatgtttaattacctttcatcaattttatgggtggtttgcggcatttttcttatttggactaaatattcaaaagatgggtcaacaggtaagaatgaaaataaaaaagttgatattgaaagtacagagaatcaatttgaatctaaagataaaaccactaaagaataa

SEQ ID NO: 407634 - DNA, 639 bp, Staphylococcus aureus
atgaggaatagacatggaaaaaatgtagaaaaatcaattataaagatagatttgtattttcaaatagcttatatagtactcatggctataactttatgtgggtttgtaatttgctatggattaattttcggccttttctatttattatcaggtagcacagctgattatttaatagtaacaatagttatatcggcaataatttctatatttgtaattatactttcaatcgtacctgtcatcgtattggcatctgacttatttaaagaaaggatttcaaaaggtgtcatattaattgtattggctattatcgctttagtattatgcaactttgtatctgcaatactctggtttgtttcagccatatctattttaggtagaaaaaaattagtatctacagcagatactaccactattcaaaaaagtaaagggaacgcaaatcaagcatcacataaagacgcgtgtaaaaaggaacttgatagtcaagacatgatggaacatcctgagtttaaaaatcccacgactaaaaaccttgaaggattaaacgaagaaatacataaagatgaagctacaactaaagttgacagtgataacacggatccgccgattgaatcaaaagaccatgtctcgaaaaaagattga

SEQ ID NO: 407635 - DNA, 777 bp, Staphylococcus aureus
atgacaaacaacaaagtagcattagtaactggcggagcacaagggattggttttaaaattgcagaacgtttagtggaagatggtttcaaagtagcagttgttgatttcaatgaagaaggggcaaaagcagctgcacttaaattatcaagtgatggtacaaaagctattgctatcaaagcagatgtatcaaaccgtgatgatgtatttaatgcagtaagacaaactgccgcgcaatttggcgatttccatgtcatagttaacaatgccggccttggaccaacaacaccaatagatacaattactgaagaacagtttaaaacagtatatggcgtgaacgttgcaggtgtgctatggggtattcaagccgcacatgaacaatttaaaaaattcaatcatggcggtaaaattatcaatgcaacatctcaagcaggcgttgagggtaacccaggtttgtctttatattgcagtacaaaattcgcagtgcgaggtttaacacaagtagccgcacaagatttagcgtctgaaggtattactgtgaatgcctttgcacctggtatcgttcaaacaccaatgatggaaagtatcgcagtggcaacagccgaagaagcgggtaaacctgaagcatggggttgggaacaatttacaagtcagattgctttgggcagagtttcacaacccgaagatgtttcaaatgtagtgagcttcttagctggtaaagactctgattacattactggacaaacaattattgtagatggtggtatgagattccgttaa

SEQ ID NO: 407636 - DNA, 972 bp, Staphylococcus aureus
ttggaaaaagttttgataactggtggggcaggatttatagggtctcatttagtagattttttgagccaagactatgatgtttatgtgctggataattatagaacaggaaagcgtgaaaatattaaaaatttagctgatgatcatgtgtttgaactagatattcgtgagtatgatgcggttgagcaaatcatgaaaaagtatcagtttgaatatatcattcatttagcagcattagtaagtgttgctgagtcggttgagaagcctattttatctcaagaaattaatgttgtagcaacattaagattgttagaaaccattaaaaaatataacagtcatataaaacgattcatctttgcatcatctgcagccgtttatggtgatttacctgatttacctaaaagtgatcaatcattaattctaccattatcaccatatgcaatagataaatattacggcgaacgtacgacattaaattattgctcgctatataacattccaacagctgttgttaaattctttaatgtatttgggccaaggcaagatcctaagtctcaatattcaggtgtgatttcaaaaatgttcgattcatttgaacataacaagccttttacattttttggcgatggtctgcaaacgagagactttgtttatgtttatgatgttgttcaatctgtgcgtttaattatggagcataaagatgcggttggacatggttataacattggtacgggtacatttacgaatttgctagaggtttatcgcattattggtgaattatatggaaaatcagtcgagcatgattttaaagaagcaagaaagggagatattaagcattcttatgcagatatttctaatttaaaagcattaggatttgttcctaaatatactgtagaaacaggcttaaaggattactttaattttgaggtagataatattgaagaagttacagcgaaagaagtggaaatgtcgtga

SEQ ID NO: 407637 - DNA, 693 bp, Staphylococcus aureus
ttgaagaagttacagcgaaagaagtggaaatgtcgtgaaaatgatattgaagctgtccataataataaggattacgcctatcaaagaaaattagtcgcactagaagaagtaaaaaagggctattttccaatcaaacgtgcgattgatttaattttaagcattgttttattatttttaactttaccgattatggttatattcgcaatcgctatcgtcatagattcgccaggaaaccctatttatagtcaggttagagttgggaagatgggtaaattaattaaaatatacaaattacgttcgatgtgtaaaaacgcagagaaaaacggtgcgcaatgggctgataaagatgatgatcgtataacaaatgtcgggaagtttattcgtaaaacacgcattgatgaattaccacaactaattaatgttgttaaaggggaaatgagttttattggaccacgcccggaacgtccggaatttgtagaattatttagttcggaagtgataggtttcgagcaaagatgtcttgttacaccaggattaacaggtcttgcacaaattcaaggtggatatgacttaacaccacaacaaaaattaaaatatgacatgaaatatatacataaaggtagtttaatgatggaactatatatatcaattagaacattgatggtagtgattacaggggagggctcaaggtag

SEQ ID NO: 407638 - DNA, 1080 bp, Staphylococcus aureus
atgaggatagcgattcttggcgctacaaacattaagcatatgtcattattatcacattatttaaaccatattgatttgaacattaatgaagtggacattatatatactgacaaatatgatatcgaagaacatatccaaggcattaataattactataaatatagagtagatattaaagaagattggtcttttatcaaaaaagctattgcttactatcgatttagaccatatgccaagaaaattcttgaagaaaatcattatgattttgtcatagtatggggaagttacacaggccacttatttaaaaggtttctagaaagaagctacaaagataaatttattttaaatatcagagattatttttttgaaaataataaacttattaagtatagaatgaaaaagattgttgatgccagcaggctaacaacattatcttcagaaggttttcttaaatttttacctaaatctgaaaaatatagaattatttatagttataacatgaatattattagagaaagtaatgtgagcgaagaattcaaaaaacgatggccaattaatataggttttataggcaatgttagatttaacgagataaatcaaaagttgataaaggaactggcaaatgattcaaggttccatatgcaatattttggaacagggtctgaagaattagaagcctttgcacgagaaaattatattaataatgtaacgttttctggtgggtttgatttgaaagaaacaccgaaatatttaaatgaaattgatatacttaataatttgtttggtaatcaaaatattgctttagatactgctttatccataagaatgtattatgcgttgtttttaaataaacctattattacaacagatgatacattcaccgctacagaagctaataaattcggactgggttttagtattaatccagaaaatttaaaaggtattggtgatgaattgatggattggtataacaatttggatgtaattgacattaatcataaaagagaagcttatagaaatgatgtaattggaaataataaacagttctatcaagagataggcaggatatttaatgagtaa

SEQ ID NO: 407639 - DNA, 1395 bp, Staphylococcus aureus
atgagtaagatatacaatgtcacttcatatgttatcgccattttaatgtttccttgccttatgttaggtgataaacctttattatttttagcacctataagttatggagtaggaaagctctttataagcttctcgaataatccgaattttaaattttcgaaaattgtatacgatgttttaggttttcttagattagtatttatacctgctatgatagtgtttttccaggattcaactatagataatttaccattaggacaagcttattttaatcaagcagttatttatatgagtgtagagtttatcataggctcactatttatattaatactatctaaattattcaaacatgaagtgatatcaagaagtagctttacactttctggttcatcaatttattacattgtgtttggtcttgttatttgtgggatttttgtagcttttcctgaagtgcgtaaaaatatatcatttttaattattaaaacagatgcaatgggaagaggaaccgaagtaacaagtggtttaaatgtcctttttgtaatgctgtttcaacttgccttagcattattattcttaataatcgcatatgcttcatataaaaagtataaagagaatcctaaaattatttatgttgtaatgccgctagctatagggattttaaatattagtttaattgttggtgaaagaagaagttaccaactttatacgatggttgctgttttaacagtggtgtcactcttgttttctaagcacaaaagacgtatcaatatcgttattatttctgttggaattttcgtattagcattgatgacactatataaagaattgtatgtgtttaattatagttcatatagcgaggcgttaaatagtacaagtgtaagtaatcttaaaatagttgacacgttgcaatcatatttttatggacctagcaatattgcagcttctatagactatttgaattactataatggttcgttcaaacaatatttatttgataataccagagctgtttttggctttaatttcttcttagataaaaagcagttgattactagccaactttttaaccaattgatatatggtagtaaacaattgactggtcatcttatttcgagtgctggatatggaattatttattttggacccttattcttctatttgaatttaattgcaaatatcttttttgcatttctgagtgagtatattattcggaagagtcattcgttagaagtgatatttattggtacatatatttatatgagacttattacgagtatttttagtcacccgacaccattaatcacattgatttctatgattttagttgtatatgttatagctattatcccaggcattataataaaaaaatttactaaaaaagtagggatagaatga

SEQ ID NO: 407640 - DNA, 558 bp, Staphylococcus aureus
atgattgtaaaaacatttatgaaatcgaaaatatttagattaatgaatacaccactattattattttataagaaagaatatttaactggatattattttgaaaataaagtggctggatggttatgggcgtggaaagctgttccgttcaagctgttaggaataaatacgagcttgccatttcctgcagatataactgttagaatgcataaccctaataacattgtttttgataaaaatgatattcatattttccaatcgcccgggacgtattttaataatttttcagcagttatatatataggtagaggtgtttatatagcgccaaacgtaggtattattacagctaatcataatattaaaaatttgaagtcacatgcaccaggtgaagatgtcaaaatagggaattatagttggattggaatgaactcagttatattaccaggagtagaattgggggaacatacaattgtaggggctgggtcagttgtaacaaaaagttttccagaaggtaacgttgttataggtggcaatccagcgaaagtcatcaagaaaatctga

SEQ ID NO: 407641 - DNA, 1239 bp, Staphylococcus aureus
atgagattaaataaatttattggcgattcgttcttaatgattttaagtagtggcatcgctcaagtcatattaatcatcactaccccaattattacaagactatattcacctgcagaatttggtgagtttacaattttttcaaatatcgcaatgattttaataccaataataaatgcgagatacgatttattgattgtgaatgccaaaaatgaccgtagtgctaatatactttcacaaatcagttttttgatatcattgcttattttattaatactgataccaatacttgccattagtgcatggttgtacccaaactttatattagattttattttcattattattatgttgtttttggtaagtttaacaaacatatttacaaattatctaaataaggaacggaaatataaagtgttaagtttgatcaatgtgtttagagctggatcaatggctttacttcaaatcattttcggacttttatcattaggaagtctaggattaattattggtttttcattatcctatatcacaggcattacactaggatataaaacgtttaaaaagcactttaatattgtgagaaataaggaagaaactaaagcattatttttagaaaataaaaatcagttagtttattcaacaccatcaatattattaaatagtttgtctttctcagttgttgtgttctttataggtattttgtataccaatacagaagtaggtatttatggtatggctataagagtattaggtataccagtgacaattatttcactagggttatcaaaaatatttatgcaacaagctaatgactattatattgaacgtggtaacttccgaaatttattacttaaatttagttccacactagttatcgtttcgataattctttatgtgccactttatttatttagtgaagaattagtcaatatattattaggacacagttgggttgacgcaattacagttataaaaattgttatcccattatttgttataaggctgattgtatcaacggtatcactttctgtgattgtattacaaaaacaacagttagaattaatactacaagcgttatttttaataggtactactgtaacatttgttatatcaaaaatgcttaatctaacttttttaaactttgtatctattaatacagctgttttaatcgtatcttacatgatatttttcatagcactctattattttgctaaaaataaacagttcaaaaattcttag

SEQ ID NO: 407642 - DNA, 1035 bp, Staphylococcus aureus
atgatgattaaagtaggtatcgttggcggtagcggttatggcgcaattgaattaattcgattattacaaacacatcctcatgtaacgattgcacacatctactcacattcaaaagtagatgaaccgttgaaattaacatttccacatttacaacatattatgcaacatttcgaagcacttacagttgacaataatgactgtgatgtaattttctttgctacaccggcacccgtgagtaaaacatgtatccctcctttagtagaaaaaggaattcatgttattgatttatctggtgcattcagaattaaaaaccgtgaaatatatgaagcatattacaaagaaactgctgcatcacaagacgacttaaatcacgctatctatagcatttcagaatggcaatcgtttaataacaatggaacgaagctcatttctaatcctggctgtttccctacagcaacattattagcattacatccactcattagcgaaagaattgtagatttgtcatctattattattgatgctaagaccggcgtgtcaggtgctggacgttcattatcacaacgtgttcatttttcagaaatgaatgaaaatctaagcgcttatgcaatcggaaaccataaacacaaaccggaaatcgagcaatatttatctatcattgcgggtcaagatgtatcagtgatattcacaccacatctcgtaccaatgacacgtggcattttatcaacgatttatgtcaaattaacttctaaatatacaactgaatcattacataaattagtatcttcttattatgctgaccaaccttttgtcagaattagagatatcggaaatttcccgactaccaaagaagtactcggcagtaactactgcgatatcggtatctatgtagatgaaacaacgcaaacagcaattttagtatcagtgattgataaccttgtcaaaggggcaagtggtcaagccattcaaaacttaaatatattatatgattttgaagttacgactggcctaaaacaatcaccagtttatccataa

SEQ ID NO: 407643 - DNA, 558 bp, Staphylococcus aureus
atgattaattttgataaaaccgctttagtgttaatcgacctgcaacaaggtattcttaaaatggattatgcgccacatacagctgaaaatgttgttcaaaatgctaacaagttaattgaagcttttagaaaaaacaatggctttatcgcgtttgttcgcgtgaatttctatgatggtaaagatgcattgcaaccaaatgcaatgatctcattaccagcaaaagaaggcgatgactacagccatttccattatttactagacaaaagagatgacgattttgtcatagacaaacgacattttagtgcatttgtaggaacagatttagacttacaattgcgacgtcgaggaattgatacgattgttcttggtggtgtcgcaacgcatattggtgtagatacgacagcgcgagatgcctatcaattaaactacaatcagtattttgttacagatatgatgagcgctcaaaacgaaacgctacatcaattcccaatagattatgtattcccattgatgggacaaaccataaccacaaacgacttgctaaacatattgaactaa

SEQ ID NO: 407644 - DNA, 135 bp, Staphylococcus aureus
atgaagggggatttaattgatgatcttaaaattcaaaatttaaggggagagcgaactatcaatgatgctgcaaaacacaatagcaatgaaaaaacaggcgcgtcaccttatgaaggtatacgcacctgtttatag

SEQ ID NO: 407645 - DNA, 897 bp, Staphylococcus aureus
atggaaaatagtacgaccgaagcgtgtaatgaagcgacgatgcatcttgatgaaatgactgtggaagaggctttaattacgatgaataaagaagatcagcaagtcccgttagcagttcaaaaggcaataccacaattgacaaaagtaattaaaaaaacaattgcacagtataaaaaaggtggacgattgatctatatcggtgcaggtacaagtggacgattgggtgtcttagatgcagcggagtgtgtacctacattcaatactgatcctcatgaaattataggtattattgctggtggacaacatgctatgacgatggctgtagaaggtgcggaagatcacaaaaaattagcggaagaagatttgaaaaatatagatttaacatcaaaagatgtcgttataggaattgccgcgagtggcaaaacgccatatgttataggcggtttaacatttgctaacacaatcggtgctacaacagtatctatttcatgcaatgaacatgcagttataagtgaaattgcgcagtatccagtagaagttaaagttggtccagaagtattaactggttcaacgcgtttaaagtctggtacagcacaaaaattaattttaaatatgatttcaaccataacaatggttggtgtcggaaaagtttacgataacctcatgattgatgttaaagcaaccaatcaaaaactgatcgaccgttcagtgcgtattattcaagaaatatgtgctatcacatatgatgaagcaatggcgttatatcaggtatctgagcatgatgtgaaagttgcgacagttatgggtatgtgtggcatttctaaggaagaagcaacaagacggttattaaacaatggtgacattgttaaacgagcaatcagagatagacaaccttag

SEQ ID NO: 407646 - DNA, 2790 bp, Staphylococcus aureus
atggcataccaaagtgaatacgcattagaaaatgaaatgatgaatcaacttgaacaattgggttacgaaagggtatcgatacgtgataataagcaattgcttgataatttcagaacgattttaaatgagcgtcatgcggacaaattagaaggcaatcccttaacagataaagagtttcaacgtctgttaacgatgattgatgggaaaagtattttcgagagtgcccgtattttacgtgataaattaccacttagacgtgatgatgagtctgagatttatttgtcgtttttagatacgaaaagttggtgtaaaaataagtttcaagtgacgaatcaagtatctgtcgaagatacatataaagcacgttatgatgtaacgatattaatcaacggactaccccttgtccaagttgaattgaaacgtcgaggtattgatattaatgaggcgtttaaccaagtaaaacgttaccgtaaacaaaattacacaggcttattccgctacatacaaatgtttatcattagtaatggtgttgaaacgcgatacttttctaataatgatagcgaactattgaagagtcacatgttttattggagtgataaacagaataaccgaatcaatacattgcaatcgtttgctgagtcgtttatgagaccttgtcaattagctaagatgatatcgcgctatatgattattaatgaaacagatagaatactgatggcaatgcgcccgtatcaagtgtatgcggtagaagcactaattcaacaagcgactgagacagggaataatggatatgtatggcatacaactggaagtggtaagacattgacttcttttaaagcgagtcagattttatcacaacaagatgacattaagaaagttatctttttggttgaccgtaaagacttggatagtcaaacagaagaggaatttaataaatttgctaagggtgctgtcgacaaaacttttaatacctcgcaactggtacgccaactaaatgataaaagtttgccacttattgtaacgacaattcaaaaaatggctaaagcgattcaaggtaatgcccatttattagaacagtataaaacgaataaagttgtatttattattgatgagtgtcatcgcagtcaatttggtgacatgcatcgtctagttaaacaacatttcaaaaatgcccaatattttggattcactggtacgccacgtttcccagaaaatagtagtcaagatggtagaacaactgcagatattttcggtagatgcttacatacgtatttaattagagatgccattcatgatggtaatgtacttggtttctcagttgactatattaatacttttaaaaataaagctttaaaagcagaagataacagcatggttgaagcaattgatacggaagaagtatggttagcggataaacgtgtggaattagtaacacgacatatcatcaataatcatgataaatatacacgtaatcgtcaatattcaagtatatttacagttcaaagtattcacgcgcttattaaatattatgagacatttaagcgacttaacaaaaagttggaacaaccattaacggtagctggtatatttacttttaaacctaatgaagatgatcgtgatggtgaagtgccatatcattcacgtgaaaaattagagataatgattagtgattataataaaaagttcgagacgaatttttcaacagacacgactaatgagtattttaatcatatttcaaaaaacgttaaaaagggcgttaaagatagtaaaattgatatcttaatcgttgttaatatgttcttaactggttttgatagtaaagtactgaacactttatatgttgataagaatttaatgtatcatgatttaattcaagcgtattcacgtacaaatagggttgaaaaagaatcaaagccatttggtaaaattgtaaactatcgtgacttgaaaaaagagacagacgatgcactgagagtattctcacaaacaaatgatacggatacaattttaatgcgtagttatgaagagtataaaaaagaatttatggacgcttatcgtgagcttaaaatgattgtgccgacaccacacatggttgatgacattcaagatgaagaagagctaaagcgctttgttgaagcttatcgtttattagctaaaataatattacgtttaaaagcatttgatgagtttgagtttacaattgatgaaattggaatggatgaacaagagaatgaagactataaaagtaaatatttagccgtgtacgatcaagtaaaaagagcgacggctgagaaaaataaagtatccattttaaatgatattgatttcgaaatagaaatgatgcgtaatgatacgattaatgtgaattatattatgaatatattgagacaaattgatcttgaagacaaagcggaacaacgtcgtaaccaagaacaaattagacgtattttagatcatgcagatgatccgacattgaggttaaaacgagatttaattagagaattcatcgacaatgttgtaccttctttaaataaggatgatgatatcgatcaagaatatgttaatttcgaaagtattaaaaaagaagcggagttcaaaggctttgctggagagagatctatcgatgaacaagccctaaaaacaatttcaaatgactaccagtatagtggtgtagtaaacccacatcaccttaaaaaaatgattggtgatttgccattgagagaaaaacgtaaagcaagaaaagccattgaatctttcgtggcagaaacaactgaaaaatacggtgtgtaa

SEQ ID NO: 407647 - DNA, 1164 bp, Staphylococcus aureus
atggtaaaacttacaacaaagatagcttccttaaaactattcgcaagttatgctattgcaacttatattttagttatattaacgagtgcattaaatctttttaaaggttatgtggccgatacattctatattgctgaaacattgctaatcgttttaaccatcattttaattatcatcttaacaacggaacaaacatggaagcatcgtgacctatggcgacgtatcgtcgaagtgttgttattgttgatgacattaacaggcaacgtttttacattattaatgtttgtaagtattagacgttaccaacgtacatcgcaaatacatagttataacgggtgggaatcgtttatacgaaaaactactagacatcgtattgcgattatcgggttacttattttagtctacatgctgacattatcaattgtgtcacaatttacatttgatacgacattggctactaaaaatcagttcaatgcactgttacatggaccgagtctagcctatccgtttggtactgatgatttcggtagagatttatttacacgcgtagttgtcggaacgaaactgacattttcaatttcaattatttcagtagttattgcagttatttttggtgtgttactaggcactatcgcaggttattttaatcatattgataatttaataatgcgaattttagatgtagtgtttgcaattccatcattattgttagcggtggcaattattgcatcatttggagcaagtattccaaatttaattattgctttaagtatcggtaatataccatcatttgcacggacaatgcgtgccagtgttttagaaattaaacgcatggaatatgtagatgcagcacgtatcactggtgaaaacacttggaatatcatatggcgttatattttaccgaatgcgattgcgcctatgattgtacgtttttcattaaatataggtgtggttgtattaacaacaagtagtttaagtttcctaggacttggtgttgcacctgatgtagctgaatggggcaacattttacgtaccggtagtaactacttggaaacgcacagtaatttagctattgtacctggtatttgtattatgttcgtcgttttagcatttaattttataggtgatgcagtgcgtgatgcactagatccaagaattcattaa

SEQ ID NO: 407648 - DNA, 672 bp, Staphylococcus aureus
atgagagtcaatgttttacaacatacaccaaatgaaggtgttggatacataggtgagtgggcgaaggaaagcgggcacgaagtctatatttatcatccatatatgaatgatggtgtgctacctcttgcggaagaaacagatatgttagtgatacttggtgggccaatgaatccagacgatgagatgccttggattcaatcagaacgcgaattaattttagtattgatggcacaaaacaaacccatttatggtgcttgctttggtgcacaacagatttcgaaagcattaggttatgcggtgttaaaatcaccagtaaaggaagtaggttgggatgatgtttacttagaatcagaaatcattccgaatataccaagtcgattgaaggcactacattggcatgaggatatgtttcaaataccgcaacaagcagaattattattttcagggaaccatattaggaaccaaggatttatcatcgatcatcatgtgattggattacaatttcattttgagcctggtccagacgatgtcagagaaatggtactaaatgatgcccaatacatcaatcattctattttagagcaatcggcggaggacatattagcctttgaggtgcctaaacagaataggcaggccattttccgaatacttgattttattactcaagcgtaa

SEQ ID NO: 407649 - DNA, 1230 bp, Staphylococcus aureus
atggaaagtcttaatcatcgaagagacgaagaaaaagaatcggcaacgcaaacgcaatcagttgcacctaatacaagtgaagcggggatgtcatcagcaattacacaatcaactaagacgtccgatatacataatgaatctatcgataagcaaatggacgataaagcttatgaaacagcgcaaaatacagatttgaaacacgaagcaagaagtttatttgataatgcaaccaaatcaatcggtagactagcgggcaatgatgaaagcttaaatcttaatttaaaagatatgttttctgaagtatttaagccacatactaaaaacgaagcagatgaaatatttatagcgggtactgctaaaacgacgccagcaatttgtgacatatcagaagaatgggggaagccatggctcttttctcgagtattcatcgctttcacagtaacatttattggattatgggtcatggcagcatttttcaataatacaaatgcgattccgggtctcatttttataggggctttaacagtaccattatcaggtttattcttcttctatgaatcaaatgcgtttaaaaatattagcatttttgaagttattatcatgttctttattggcggcgtattttcattactaagtacgatggtattatatagatttgtcgtttttagtgatcaattcgaaaggtttggttcgttaacatttttcgatgcatttttagttggattggttgaagaaacaggtaaagcactcattattgtttatttcgtcaataaattgaaaacgaataaaattttgaatggtttattaatcggtgctgctattggtgccgggtttgcagtttttgaatcggcaggttatattttgaatttcgctttaggggaaaatgtcccattattagatattgtcttcacacgtgcatggactgcaattggtggtcatttagtgtggtcagccatagtcggagctgctattgttattgctaaagagcaacatggtttcgagtttaaagatattttagataaacgctttttaatattctttttatcagctgttgggttacatggcatttgggatacatcattaacgattcttggcagtgatacgttaaaaatattcattttaatcgtagtcgtatggatactcgtattcattttaatgggtgcaggtttgaaacaagttaatttactgcagaaagaatttaaagaccaacagaaaaaagtagacgaataa

SEQ ID NO: 407650 - DNA, 249 bp, Staphylococcus aureus
ttgaatgataagtttattaatatagggtacatattcacaaatgcagctggtggtcctatcgatttaaacaaaataaataacattattaaagggggggctatcaaagagacaactgagattagttctattaagaaacctgcaacgacgcatacattacatcattcgcatatatctacacttgctcaattaggaattaacttaaaagcaatgcaagagcatgtaggtcattcagattataaaaaaatctag

SEQ ID NO: 407651 - DNA, 387 bp, Staphylococcus aureus
atgaacagaaaaacacctaaaactactgatggtttaatgagacatataagagacaataaaggtatccaaataaatggtagcacggaaaaaaaccagttacgaaacatcggctattttcatggattcaaagggtataatttctttttaaacaaagaggaagaacttaattttgaaaaattcagcgaactacacgctttatacagttttgatacagaaattaaaaaccttttctataaacacgttatgttctgtgaaacggctattaaaaatagattgctagaaatagtttgtgtaaactctggctttgatttagatagtttatttcaaaaatcattaacatattataaaagttatagtcccggtagttcaaaatataaaaaacattaa

SEQ ID NO: 407652 - DNA, 585 bp, Staphylococcus aureus
atgatccatgaacattgtaattcaaaaccttacatttatcattacatacatcaagatagaaccgtgccactatatgccgtatttgaattattcactttaggaaatctggtgtttttcactcgttgcatgtcccaaaatttaaatatagaagctcaaaaacaactaaaattatactccccagcatttgatcaaagtaaagatatactaggtgacatcattgattgtatgaaaggcttaagaaatgctatagctcacaatgatgtactttatgactgtagatttaaaactggagagacaagtaatagattaaaagaatatttagcagtaaaaatggatatacacaatttagatttcgacagaataattgattatctcattttattaattctaatttgttctggtctctcttattctaaagcagaactccaaagaattataaggcaattcgaacaaaaccttgattttttacgatcaaagataagcgagtcgacttatgataaaattataggcgttcgagcaagacctaaattaagaagtttaaagaactttatcaataaccttgatttttatctaaaaacagattaa

SEQ ID NO: 407653 - DNA, 1713 bp, Staphylococcus aureus
gtgaaacattatttgactaaaattatagcaatgctaattactgctgctatggtgtgtaactttgggttactgaaaagtcaggcagcagaacaacaaagtattagtgatgtatatagtgtgataacggatgcgaaatctgcactttctaataattcgatatcgaatgacaataagcagaaagcaattgagcaagtggtaagtgcagttaagaaattatcgcttgaagataatagcgaaggtaatgctgtcaaatcaaatgtgagaaagcttgaagatgcaaaagcgaatgatgatcaaaaagatacactttcgcaattaacgaagtcattaattgcttatgaagagaaattggctagtaaagatgcgggttctaaaattaaattgttgcaacagcaagtcgatgccaaagatgcagcgatgacaaaagcgattaaagacaaaaataaagcggaattagaatctttgaacaatagtttgaatcagatttggactagtaatgaaacagtgattcgcaattatgacgcaaatcaatatggacaaattgaagtcgcattattacaacttagaattgcaattcataagtcaccattagatacggcaaaagtatcacatgcttggacaacttttaaatcaaatattgatcatgtcgataaaaaaagtgatacgtctgcaaatgatcaataccatgtatcacaattaaatgatgagttagagaaggcgattaaagctatcgacaacaatcaattgtcggatgctgatactgcgcttacacattttatagaaatttggccatatgttgaaggtcaaattcaaactaaagatggtgctttgtatacgaaaattgaagataaaataccatattatcaaagtgtattagacgaacataataaatcgcatgtgaaagatggcttagtagatttaaataaccaaattaaagaggttgttggccatagttatagctttgtcgatgtgatgattatctttttacgtgaaggtctagaagtgttattaattgtaatgacattgactactatgacgcgtaatgtcaaagataataagggtactgcaagtgttattggtggtgcaattgccggacttgtattgagtatcgttttagcaattacattcgtagaaacactaggaaatagcggtatgcttcgtgagagtatggaagcgggattaggtatcgttgcggtcatattaatgtttatcgttggtgtttggatgcataaacgttcgaatgcgaaacgctggaatgatatgattaaaaatatgtatgccaatgcgattagtaatggtaatttggtattgttagcgacgattggtttaatatctgtgttgcgtgaaggtgttgaggttatcattttctatatggggatgataggcgaattagcgaccaaagattttatcataggtattgccttagccatcatgatattaattatctttgcgctattatttagatttatcgtcagattgatacctattttctatatatttagagtattgtcgatttttatttttattatgggattcaaaatgcttggcgtaagtattcaaaagttacaattattaggtgcgatgccaagacatgttatcgaaggattcccaacagtgaactggttgggcttctatccaagttatgaaccattgatagcacaagctgcctatattatggtagttgctttcttaatctttaaatttaaaaaataa

SEQ ID NO: 407654 - DNA, 567 bp, Staphylococcus aureus
atgaatattgtattattgtcaggttctacagtaggttctaaaacgagaattgctatggatgatttaaaaaatgaactagaagtcatcaatgagggacaccaaatagaattgatggatttacgagatctcgaattagaatttagcgttggaaagaattatctagatactacaggagatgtatataaattaacgacgtcgttaatgcaggctgatgtgatttttattggttttccaatttttcaagcttccatccctggtgctttgaaaaatgtatttgatttacttccggtcaatgcgtttcgcgataaggtaataggacttgtagcgacagcaggttctagtaaacattatttaattcctgaaatgcatttaaaaccaatattgagttacatgaaagcacatacgatgcaaacgtatgtattcattgaagagagggacttttcaaatcaacaaattgtcaatgatgatgttgtatttcgtttaaaagcgttggcacaatccacaatgcgaactgctaaagtacaacaacaagtgcttgaagaagaaaacaaccaatacgacttttaa

SEQ ID NO: 407655 - DNA, 447 bp, Staphylococcus aureus
atgaattttcttaaacctgcaaagcatattaagcctttgccagaaaatcagatagatgatacctataaacgattacgtctccaagtatttcttggtattttcatcggttacgctgggtactatttattacgtaaaaacttttcattagcgatgccggcattgcaagagcaaggttttacaaaagcggaactaggttttgcactttctgctgtttccatcgcatatggatttagtaagttctttatgggtactgtaagtgatcggagcaatgctcggatattcttagttcttggattagtactcactgctatcgtcaatttgttaatgggatttgtaccgttctttacatcaggtatcggtattattgtttgtcctattattcttaaatggatggtttcaaggtatgggctggccaccttcaggccgtgttctcgttcactggtttag

SEQ ID NO: 407656 - DNA, 957 bp, Staphylococcus aureus
atgggctggccaccttcaggccgtgttctcgttcactggtttagtgtaagtgaacgcggaagtaagactgccctttggaacgttgcgcataatgttggtggaggtattatggctcctattgctgcttggggtattacaacaacagcatttatcaactttggttatttaaaaggtttcgaaggtgtattcatttaccctgcactcttagcacttatcattgccgcaatttcatacgtattgattagagacacacctcaatctcaaggtttacctccaatcgaaatttataaaaatgactttgctacaagcgataagaaaacattagaaacagaattaactacaaaagaaattttatttaaatatgtactgaacaataaatgggtatgggcaattgcctttgcaaatatatttgtttatttcgtgcgttatggtgtacttgattgggcgccggtctacttaagtgaagaaaaacatttcgacttaaaagcatcaggttgggcatacttcttatacgaatgggctggaattcctggtacattattatgtggttacatttctgataaattattcaaaggtcgccgtggacctgcaggtttcttctttatgttaggtgtcacagtatttgtattaatttattggttaaatcctccaggcaatgcttggttagacaatgtctcattaattgccattggtttcttaatatatggaccagttatgttaattggtttacaagcattagattatgttcctaaaaaagcagctggcacagcagctggattaacaggattatttggttatctgtttggtgctgtaatggccaacatcgtcttaggtgctgtagttgataaattcggatgggatgtcggttttattttattaacagcaatcagtgtgtttgcaatgttgagctttatcctcacttggaataaagtaggacaagaaaccgttcatcattaa

SEQ ID NO: 407657 - DNA, 306 bp, Staphylococcus aureus
atgtataaatctaaaatattgttgaaatatatttttagtgaagaatcagaagttaaagatttaactgaagaaaaatataatcaagattacgaagcattaacatttagctttaaagaggaaacatatcaaagtaggttagctaagaaaacaccgactaaaacaggatattttgttacatgttggacaaaagacgagaacaattgtaatcaaccatactcaaaagaggcatttgcagattacttaatgattatagttattgatgaagaattaagcggttatttcttatttcctaggaattattggtag

SEQ ID NO: 407658 - DNA, 1956 bp, Staphylococcus aureus
ttgttaagttatagacaaatcgaaattttgtatcttttaattcatgagcaaacgtttattccaataaataccattgctaatcaacttggtgtatcacctcgtaccattcaatatgatatagcatatattgagcaatatgctgaaacttatcattacaatgtcagccgtaataaagctgcaggcatcaaagtaacaacagctaacacaacgatattaaatgaattagagcacaatctaacgaatcaaattcatttttcaaaagatgagcgactcacacatatcgctttaaagttattcgaaacaactgatcctgtttcaacaaaacagcttgcccacgatgtcaatgtttctcgtcgcaccattgctgatgacattaagatgatacaggcccaactagatcaataccatttaaagttaaattatgtccacaataaaggattcaatattattggtgaggaagatcattatcgtaaagcgtatgcacactttatacatcaatatatgaaacaagctgcaccttttatagaggctgatatctttaattcagaatcaatcgcattagttcgccgtgccattattaagacattaaatagtgaaaattatcatttagttcagtcggctatcgatggcttaatctatcatatactcattgccattcagcgtctaaatgaaaatttttcgttcgatatacctatcaatgaaattgataaatggcgacatactaatcagtatgctattgcttcaaaaatgatagaaaacttagaacgcagttgtagtgtcacatttccagagtctgaaattatctttatcacgttacatttacttggttcaaaaatgactgattgcactatatctaccaatataaatgaacaacatgttttatcagaaaacatccaagaattcatcacttgtgttagccaagaattaggaattgatatgtcaaatgaccataaactgcataccagtttgcttacacatataaagccagctatacatcgaattaaatacgatatgatacaagctaatccattaaaacaagaagtgtataaacgctatcctcaagttgttgatgcaatcagtaaacatattagtacgatagaaaaagatacagctattagtttcaatgaagatgaattaacatttattgcaattcactttgcatcaagtatggaacgtggcgcaacaaataaacaattaatgattaaagttgtcttactttgtggatcaggtattggcacatctcaacttttaaaatcaaaattaaatcatctttatcccgaatttaatatttgggacgcctattctatctatcagttagatgaaaagcagttaattcaaaataacattgactatgtgatttcaaccgtaccgtgcgatatttcagtagtacccgttataaacgtcgattcgttcatcaatgagcaatcacgccaaaaattaaatcaactcattaatgatgctagagaaaagcgtgtaataaaaatggctactgaaggtaagtcattagctgatttactacccgaacaccgtatcagtgtaaacacacaatcactatcaattaatgaagcagttactgtatcagttcaacctttaataaaagatgatattgttggtcccaattatatagaagcaattttaaatcaatttgaacaattcgggtcatatatggtgattagtccacacatttcactaattcacgctggaactgaatatgtacacaatggtgtcggcttttcattaacttattttactgaaggtgttgaatttggtagcaaagcaaacgatcccgtataccttgtgattacattggcaacggatcatcccaatgcacatttaaaagcactaggacaactaagtgaactattaagtaacgagttatctcgacaagatttcttagatgggaaaatttgtaaaattaagcaacacattgctgtaactaagacaaaggaggtttaa

SEQ ID NO: 407659 - DNA, 1362 bp, Staphylococcus aureus
atgcatcatacagttttgtgtattcatttaaacaaaggggttgctttaatgaatcaatatcattctaatgcacaacaaccaagtgcatggcgtttttttgtctatagtttagtgggcatactatgtttctttattccttttacgattaatggtaacaacactattttcgtcgatcatgttcatctagccattcgctcaatcataggtccacttatgccctatgttgcactgattatgattttaattggtacagcgttaccaatagtgagacgtacttttatgacttcaatcacaaacttggtcattacattatttaaagttgcaggtgcaataatcggtataatgtatgtatttaaaatcggtccatcaatactatttaaagctaactatggtccgtttttgtttgaaaaattaatgatgccattaagtatcttaattccagtaggtgcaattgcgctttctttattagtaggctatggcttattagaatttgtcggtgtttatatggagccaattatgagacctatttttaaaacaccaggtaaatccgctgtcgatgcagtggcttcgtttgtcggcagttattccttaggattattgattactaatcgtgtctataagcaagggatgtacaacaaacgagaagccacgattattgcgactggcttttcaacagtttcagcaacttttatgattatcgttgctaaaactttaggattaatgccacattggaatttatacttttggataactttagtcatcacatttgtcgtgactgcaattactgcatggctaccgccaatcatcaatgaatcaacagaatattataacggacaagaaggagaacaagaagttgctattgaaggaagcagactgaaaactgcatatgcagaggcgatgagacaaaatgcattaacaccatccctcgtgaagaacgtttgggacaatttgaaagacggtttagaaatgactgttggtattttgccttctatattatcgattggttttttaggactgattgtagcgaactatacaccatttattgattggcttggttatatattctatccatttatttatattttcccaattgctgatcaggctgtacttgcaaaagcttcagcgatttctattgtagaaatgtttttaccatctttgttagtaactaaagctgcaatgagtactaaatttgtcgtcggtgtagtaagcgtatcagccattatctttttctcagcattagtgccatgtatactagcaactgaaattaaaatacctgtctggaaactcatcatcatttggtttttacgcgtggcattgtcgctattaatcactatccccgtcgctttacttatttttggataa

SEQ ID NO: 407660 - DNA, 861 bp, Staphylococcus aureus
gtgtattacatcgcaatcgatattggaggcactcaaattaaatcggcagttattgataagcaattgaatatgtttgactatcaacaaataccaacgccggacaataaaagtgagcttattactgacaaagtatatgagattgtaacagggtatatgaagcaatatcagttgatccaacctgtcataggtatttcatcagcaggcgttgttgatgaacaaaaaggcgaaattgtatacgcagggccaaccattccgaattataaaggtactaattttaagcgattattaaaatccctgtctccttatgtcaaagtaaaaaatgatgtaaacgctgcattactaggcgaattgaaattacatcaatatcaagcagaacggatcttttgtatgacgcttggtacaggcattgggggtgcgtacaaaaataatcaaggtcatattgataatggtgaacttcataaggcaaatgaagttggatatttattgtatcgtccaactgaaaatacaacgtttgagcaacgtgctgcaacgagtgcattgaaaaagcgcatgattgacggaggatttacgagaagcacacatgtgccagtattgtttgaagcagctgaagaaggtgatgatattgcaaaacaaatattgaatgagtgggcagaagatgtagcagaagggattgcccaaatacaagtcatgtatgatccagggcttatattaattggtggcggtatatctgaacaaggagacaatctcattaaatatatcgaaccgaaagttgcacactatttaccaaaagactatgtttatgcaccaatacaaacgactaagagtaaaaatgatgcagcattatatggctgtttgcaatga

SEQ ID NO: 407661 - DNA, 1533 bp, Staphylococcus aureus
atgaaagaagttggatttggcacactgaactgggttgccgttatcatttatctactagctatgttactcattggcgtttattttaccaagcgtgcgagccaaagtacgaatagtttctttaccgcaagtggtcgcttgccatcttgggtagttggcttttcaatttatgccactacattaagtgcaattacgtttatgtctacaccagagaaagcatttttaacagattggtcatatattgcaggtaacatcgctatcgtagcaattattccattactcatttatttctatgttccattctttaaaaagttaaaggtaacatctgcatatgaatatctagaagcacgtttcggacctagcattcgtgtcattggctctttactatttgtagtttatcatctagggcgtgtagcaatcgttatctacttaccaacattagcgattacatctgtatcagacatgaacccttatatcgttgcatcactcgttggtttactatgtattttatatacatttttaggtggtttcgaaggtgtggtttggagtgatttcattcaaggcgtcattctattaggcggtgctttagttatcatcattcttggtgttatgaacattaaaggcggttttggcactgtctttgcagatgcgattgagcacaaaaaattaattagtgcagacaattggaaactaaatactgcagcagctgccattccaattattttcctaggaaatatttttaataatttgtatcaatacacggcgagtcaagacgtcgtgcaacgttatcaagcttctgatagtttaaaagaaacaaataaatcgttatggacaaatggtatcctagctttaatttcagcacccttattttatggtatgggtacaatgttgtattcattttatgcacatgaagctgttttaccaaaaggatttaacacgtcatctgttgtgccatatttcattttgactgagatgccaccatttgtagcaggattacttattgcagccattttcgcagctgcacagtctaccatttcatctagtttaaattctatatctgcttgtatttcaatcgacattaagcaacgcttcttcggaaaaggtagcgagcgacacgaagttaactttgctcgtttggtcatcatcattgcaggtattttcggttttggaatgtcactatacttaattgcttctaattcaaatgacttatgggatttattcttgtttgtgactggattattcggcgttccattggctggtgtatttgcagttggtattttcactaaacgtacgaatacattcggtgttatttgtggattaatattgggtatcatctttgcttacgtctataatggtgttggcaaaggtaactcacctttctatgtatctaccatttcatttacagttgcttttgtctttgcttatatacttagcttcattgtcccttcaaaacataaaaaagatataacgggattaacaatttttgaaaaagataaaccatcaacatacatttcaaaaacggctacgaaaaagtag

SEQ ID NO: 407662 - DNA, 438 bp, Staphylococcus aureus
atgaatattttattcgctatcacagggatagcatttgcactatttgttgcgtttttattcagttttgatcgtaaaaacatagacttcaaaaagacgttaataatgatatttattcaagtgttgattgtgttatttatgatgaacacaacgattggtttaacaatcttaactgcattaggttcattttttgaagggttaataaatgttagtaaagcaggtataaactttgtttttggagatatacaaaataaaaatggctttacattctttttaaatgtgttgctgccattagtgttcatttctgtattaataggcatttttaattatattaaggtattaccatttattatcaaatatgtaggtatcgctattaataaaataactagaatggggcgcttagaaagttactttgctatttcaacagcaatattcggttag

SEQ ID NO: 407663 - DNA, 489 bp, Staphylococcus aureus
atgactttcgaagaaaaactaagtcaaatgtacaacgagattgcgaatgagatcagtgggatgatacctgtagagtgggaaaaggtatatacaattgcctatgtagatgatgaaggtggagaagtcgtttttaattatactaaaccaggtagcgatgaattgaattattacacggatatatctagagattataatatttcagaagaaatatttgatgatttatggatgaatctttattacttgtttatgaatttaagggatttatttaaagaagaagatttagaaccatggacatcatgcgaatttgactttacaagcgaaggtaaattaaacgtatcttttgattatatagattggattaaattaggttttggcccatcaggaaaggaaaactattatatgtataaaaagtttggtgttttaccagaaacggaatacgaaatggaagaaattcgagaagtagagaagtatgttaaagagcaagagtag

SEQ ID NO: 407664 - DNA, 501 bp, Staphylococcus aureus
atgactttcgaagaaaaattaagtcaaatgtataacgagattgcgaatgagatcagtgggatgataccagtagaatgggagcaagtatttacaatagcctacgtagatgatgaaggtggagaagtcgtttttaattatactaaaccaggtagcgaggaattgaattattacacatatatccctagagagtataatgtctctgaaaaagaattttatgatttgtggacagatttatatagattgtttaagaagttaagaaacgcatttaaagaagaagatttagaaccatggacatcatgtgaatttgattttacaagagagggtaatttgaaagtatcgtttgattatatagattggattaaattaggttttggtccatcaggaaaggaaaactactatatgtataaaaagtttggtgttttaccagaaacggaatatgaaattaataaagttaaagaaatcgagcaatatgttaaagagcaagaagaaactaacctttag

SEQ ID NO: 407665 - DNA, 501 bp, Staphylococcus aureus
atgactttcgaagagaagttaagtcaaatgtacaacgagattgcgaatgagatcagtggaatgataccggtagagtgggaaaaagtatatacaatggcttatatagatgatggaggaggtgaagtattctttaattatactaaaccaggaagtgaagatttgaattattacaccgatatacctaaggagtataatgtttctgtgcaagtatttgatgatttatggatggatttatatgatttgtttgaggaattaagaaatatatttaaagaagaaggacatgaaccatggacatcatgcgaatttgattttacaaaagaaggtgaattaaaagtttcatttgattatatagattggataaatacagagtttgatcaattgggccgtcaaaattattatatgtacaaaaaatttggggttataccagaaatgaaatatgaaatggaagaaattaaagaaatcgagcaatatattaaagagcaagatgaagctgaaatatag

SEQ ID NO: 407666 - DNA, 393 bp, Staphylococcus aureus
atgaaatatacttggtggatacttttaacaattgcagggattttaagtttaacaagtgtttatggatttattttatgtttaggtagctttggaatgttggcactgaatgtcatgtggctatttgtttatacaccgcataaaaattctaaagcacttgaatctatatcaaaaccaacgataattttatcaatcattgggacatatgcagtatttatatttatgcctatcttattttacttcgtaatgaaagctaggtttatggaaattggaataaaactttacggtgaatcttttaatatgtttggaataccattattcataattgctatcattttatttacaatcggtacagtattcgtttataaaatacagcaatcaagattaaagcaatag

SEQ ID NO: 407667 - DNA, 390 bp, Staphylococcus aureus
atggaaaaattaatcaaagtgacgtctttaattggaattattattcaaagttttttaacattgttatttttaatatttttaattttatcagcaacagggattatacagccagaattgaccacaactgttaatggtgaacaaactatacaaagcccagaaactgctcaagcaacattcgtgacaatatttgcaatattatttgttgtttctttagcttcagatttattaggcattatagctatgaaaaagttgtttgtgaataatagagcgagtggcattttgtatattattggtgcagtgatcagtgccaatttattaacatttattgcttggttaataagtgggatttctgttttaagatataacaaaataggaaaagaagtgtcatag

SEQ ID NO: 407668 - DNA, 375 bp, Staphylococcus aureus
atgaaaagattatgcataggattgttaattataatgatgagtataataaattatggttgtggtaatgagcaaaatgaaaataaatatcaaagtcaaattaataaagtaatgaaaattcaacaagaaactcataaagagatggttaaaaagagtaatgaagttaatcctgaatttaataaggataaagtaaatacttatgtatttaatgatggcaaattaattatcatcagctataagttatttaaagataaagatcaaatgttttacgcgacttacgagtttaaaaacgacaaaatttattataagagagatattaatcctaaaacatacgtgaaagaacaccaaccagattataaagatattaaagtaaaataa

SEQ ID NO: 407669 - DNA, 474 bp, Staphylococcus aureus
atggaaaaaataaagaaaataaacaaaatatttttatcatttgaagttattccatttgcaatgatgattttgctagcatttctaccagttattgcaggtataataaataatcgtttgcagtatggtagggattttggcgatagagtaagcttttattgttatatttcaattatggttgcatatgcaattaccatattgttagaaattattttttactttattttattgaaaaactatcaatatgatcaaagtaatattgaattagctaatagagtgaaagttacaaaagtactgtcgattttgtatatcattccaggattatatgcgattccattctattttagatttttacatgttcgctcatttagagaaaataaaaaatctggacagcctgcttaccacttttgggaattttttataaaacctaatcgcaaacccatagagttgaaagacttttttattaaaaatagataa

SEQ ID NO: 407670 - DNA, 492 bp, Staphylococcus aureus
atgactttcgaagaaaaactaagtcaaatgtataacgaaattgcgaatgagattagtgggatgatacctgtagaatgggagcaagtatttacaatagcttatgtaactgatcaagctggagaagtcatttttaattatactaaaccaggtagtgatgaattaaattattattcagacatacctaaagattgcaatgtctcaaaagatatttttaagaattcatggtttaaagtttatcgaatgtttgatgagttaagagaaacttttaaagaagaagggcttgaaccatggacatcatgcgaattcgattttacaagagatggcaaattgaatgtatcttttgattatttagattggataaatacagagtttgatcaattgggccgtgaaaattattatatgtacaaaaagtttggtgttttaccagaaacggaatatgaaatggaagaaattaaagaaatcgagcaatatattaaaagccaagaaagttaa

SEQ ID NO: 407671 - DNA, 501 bp, Staphylococcus aureus
atggctttcgaagaaaaattaagtgaaatgtataacgagattgcaaataagattagcagcatgataccagtagagtgggaaaaagtatatgcaattgcctacgtagatgatgaaggtggggaagtcatttttaattatactaaaccaggtagcgatgaattgaattattatacatatatccctagagagtataatatctctgaaaaagtattttatgatttgtggacggatttatatagattgtttaagaagttaagaagcgcatttaaagaagaagatttagaaccatggacatcatgcgaatttgactttacaagagacggcaaattgaatgtatcttttgattatattgattgggtgaattcagaatttggaccaatgggaagagaagattattacatgtataaaaagtttggaatttggcctgaaaaagaatatgcaataaatagggttaaaaaaatagaagattatattaaagaacaagaagaaactgaactatag

SEQ ID NO: 407672 - DNA, 684 bp, Staphylococcus aureus
atgactactaaggaaaatatagacattcttcgaaagccaggtgcacaagccttaagtttagcatctttatttatgatacttttttcatgtctaactttcttttttggtttagattatgaaaggtttcctaattatttaaagataacgacaattatagaattaataattatcataattagtttacttcaatggattagatttatagatttcgaaaaggaaagcgcacagaaatataaaaaaatatatgcccgatttttagtcgttataaatgtgctaactactatcactgcagtatttgcaacatgtaatctttactattttgttgctttacaaaatcattatgacctattcaattattggttgatgggcacgatttcaatcataattagctatttgttattagtaattggcggaatgttcacgttattaaaattacctaaagtaacaaaacgttggggtggtaaaactaaaacccattttggtttattattaaccgcgttgagcgcatttatatatattgaaagaattatcgaatatatgttggtgcccaatgttgtagaatccaagtttgtcataatggtaagtatcattattattgtttgtacacaatttgtagcctttcaatttattatgcaatacagtagattctatatttttgaattaaacactgaagatgatgactaa

SEQ ID NO: 407673 - DNA, 495 bp, Staphylococcus aureus
atgggatttgaaggtaagttaagtgaaatatacaacaagattgcgaatgagattgatggcatgataccagtagagtgggaaaaggtatatacgatagcctatgtaaatgatagaggaggggaggtcgtttttaattatactaaaccaggtagcgatgaattgaattattacacgaatatatctagagattataatgtttcagaggaaatatttgatgatttatggatgaatttgtattacttgtttaagaatttaaggaatttatttaaagaagaaggactagaaccatggacatcatgtgagtttgactttacaagagacggtaaattaaacgtatcttttgattatattgattggattaaattaggcttaggtccattagctagagaaaattactataaatataaaaaatttggaattatgccagaaatggattatgaaatggaagaaattcgagaagtagagaaatatgttaaagagcaagaagaagaatag

SEQ ID NO: 407674 - DNA, 903 bp, Staphylococcus aureus
ttgaaaaaagtaaattttaaaagtaataacttaaatgtagtagctaatatgtatttcccagaaaattttgatgaaaataatcaatatcctgcaattgtcgttaatcatccagcaggaggcgtgaaagaacaaacagctggtttatatgcagaacgactagcaactttaggttatgtcacgatggcttatgatgcaagttatcaaggtgaaagtgaaggacaaccacataatttagaaaatccatcatcacgtgtagaagatgtaagagctgctgtggattactttaatacacttgattttatagatgatagtcgtattggtgcacttggtatttgtgcaggtggtggctatacaattaaagcagcgcaaactgaaaaacgtattaaagctgtagtaggcattagtgctgctgacatcggtcaaaacttccgtaaaggttggacgggtaatcaagatgaaaaagacattaatcctttattagaacaagttgcagaacaaagaaaagcagaagcaaatggtgcaccacaaaagctagtaggttttgttccagaagaaccaactgaagatatggatcaagaaacaaaagatggatgggaatattatcgtacgccaagagcgcaacatgaacgttcaattaatcaatttccatttattagtttcgatcgtatcattgaatttactgcatttgatttagtagataaattattgacacaacctgtgctgtttatcgctggtagtgaagctggtacattatggcaaagtgaaaatgcatatgaacgtgcactagaaccgaaagatatccacattgtagaaggtgcgaatcattttgatatgtatgacaaagaaccatttgtaactgaagcggttgaaaaaatgaactcattttatggtcaatatttataa

SEQ ID NO: 407675 - DNA, 645 bp, Staphylococcus aureus
ttggaaaagaaaaatattttaatcataggtgcaagtggtcaaatttctcaagagttaattgacttattattagataaaacagaacatcatttaacactttacttaagaaataaagcgaaattgatgaatatagaagatggaaatcgcgtaacactaattgaagcagatgcaacagatgaagctgccttggaaaatgcattggatcaaattgatgttgtattcgctagtttagccggtaatatagatgaacaagctcaggcaattgtatcagcaatggaaaagaaaaatgtacaacgacttatttttgtaactgcattaggtatatatgatgaggtgcctggcgcatttggcaaatggaacaatgacaatattggaccgtatcttccaccatataagaaagcagcagatattattgaagcatctagtttagactatacagtattacgtcccgcatggttgacgaacaacgatgagattgaatatgaaacaacagttaaaggagaaaattttaaaggcacagaagtttcgcgtaaaagtgttgctgcattaggattagaaatcattgagaatccttcaatccacgttaaagaaagtttaggcgtaaataaaccaaatacagatggcgataagccacactggttataa

SEQ ID NO: 407676 - DNA, 552 bp, Staphylococcus aureus
atggataaacgtattaaaaaaacacaacggacattgaaacaaacaatgattacgttgttaaaagagcaacacatcgaagacatcacagtgacagatatatgtgataaatctgatatcgttagaagaaccttttacgcacatttcaatgataaatatgatttagttgaacgtattatgagcgattatatttcagattttgtagagatatgtcatttcaaagagcagataaattttaaacttggtaatattaagtggtttgaatatttatataacaataaagacattttcagtgttttattcaaaagttcaatttcagcactattcagtaaaaaactagagactgttatttacaaacaactagaaaataaaattgctaaaagcgtcattaatgaaggtataagtaaatcaacattattatgttttttaacttcagctgtactaggtgttatggtgaattttgcattaaacggtgattcagattatcaaaataaagctgatgaaaccttaatactattaaaaccttatttaaagaatgacatactcaactcgtaa

SEQ ID NO: 407677 - DNA, 489 bp, Staphylococcus aureus
ttgaaaaaatttcttattactgttgttatcatcttgttaattggtgcacttggattcgccatttatgctgcaataaatcattctacatcatcaattcataataatgagcaagataataaagctacccatcaaaagaaagatactgaagtaaatcatcaaaaagacgagaatacaaacaacacaaatgaaaatcaaaacaacaacaacggtgttactaatggcaatcaatcatctacgccatcaactgtccaaaataacggttcaacagcaccagcgaatacacaaccatctaatccgaatcaatcaaattcaaatcaatcaaattcaaatcaatcaagttcaaatcacggcggtagcagtcaaccttcaacgaataaccaaaatcataaacaacagaacacaccggccccaaacaaatctaataatgctaatacaaacgagtcttctaagcaggtatcaccatcacaaccgcaatcatctaaaaattaa

SEQ ID NO: 407678 - DNA, 1554 bp, Staphylococcus aureus
atgaaatactttattccagcttggtacgatgaccaacgatggtggcaagacacgactgtgccgtattatcaactacaaaataagacggaatttgacgatatgattagtttaatgggaatgcaccttgaaaatgacttagattatcgtctgattgttctcaatcatgcaccaaatttaagaacatttttacatcgatatgacttatatgagacaaagtattggtctgtgtttgatgaaatccaaggattcattcaccatgcgccacaagcgattaattatcatcacttaaaatggccggatgatgttgagtttgtgtacacgccgtatttattaaaatgtgtgacgagtgaacagacctatacaaatatttattttagtcaagaagggtattcaatttggtttgaagaatttgaaagagatcagttacaacggcgttatatttttgatgacagaggttatttatcagcgatacgttattttgatgatcagggagaggcttcttaccaagaatatttaacgattaatggagattgtgtacttcatgaagatttgaaaaatggcagagtcactgtttcaaaaagatatcaacatcactatcaacaaatagaatataacaatatggctcaactaattgaagaaaaatttcaagcaatgattgcacaacaaatacatgaagatgatcatgtgattgtggcttcagatgctaggcacaatcgacaaatagccaatcatattccagcgaaatcattaagttattcattttttaaaaatagaaatgaaactgtgtcggatgaggaatatcaatctatcgtaaagaatgcccatttaattgttgatagtgtgcaactagaacgtgatttaattagtcatcaagagaagtatcagcgagagaatacaatgattcgaatcacgccatttgaaacgagacaatcacctaatataagtagtcaattgatggaaacatttataggtgtatggatagatggtatgagtgacgctgatttgcaacaaatgatgcaacgacttgtggattatatcacacaagaagatgattaccgtttaattttattaacgcgccatcaaaatgacataccgatgtggcttcatgaatgtattacgtcggtaaatgaggaatatcagactaaacagaatgcggatgttaatgtttcagcattaatgacacctgaagatcaagatgacatcattgctgttaagacgatacatgctgaacatgatgttgtagaagtattgcggatgttgcgacttgtaatagatatgtcaaaagaacctgatttgtatttacaaattagtgcaattagcgctgggattccacaaattaatggtcaacaaacagattacgtctctgattatgacaatggccgtattataaatacagttgatgaattagatgatgcgttaaattattatttattttatttgaaaaattggaattatgcgtacgcctattccttaaaattaatagatgcatatgcttctaagaatattattaatcagctcgatgagttaatagaaggtgaaaatgatgccacgtaa

SEQ ID NO: 407679 - DNA, 1212 bp, Staphylococcus aureus
atgttaaaacttttacaacaatacgaatataaaattatatataaacgtatactttacacatgttttatcttgtttatttatatattaggtacaaacatttccatcgtttcctataacgatatgcaagtaaaacatgagtcattttttaaaatagctatttctaatatgggtggagacgttaatactttaaacattttcactttaggattaggtccgtggttaacatcaatgattatcttgatgctgatttcttatcggaatatggataaatacatgaaacaaacaagtcttgagaagcattataaagagcgcatcttaacattaattttaagtgttattcaaagttattttgtgattcatgaatatgtttcgaaagaacgtgttcatcaagacaatatttacttaacaatcttgattttggttactggaacgatgttattagtttggttagctgacaaaaatagtcgttacggcatcgcaggaccaatgccgattgtaatggttagcattattaaatcaatgatgcatcaaaaaatggaatatatagatgcaagtcatattgtgattgcgttgttaatcactcttgtgataatcacattgtttatcttattattcattgaattagtagaagtgagaataccatatatcgatttaatgaacgtttccgcaacaaatatgagatcttatttatcttggaaagttaaccctgcaggcagtattactttaatgatgagtatttcagcatttgttttcttgaaaagtggtattcattttattttatctatgtttaataaagacgtttcagatgatatgccaatgatgacatttgatagtccaattggtatttcggtgtatttagtgattcaaatgttattgggttattttttatcgagatttttaatcaatactaaacaaaaatccaaagatttcttaaagagtggcaattatttttcaggagttaaacctggtaagggtacagaacgttatttaaattatcaagcacgacgcgtatgttggtttggatcggcattagttacagtcattattggtataccgctttatttcacattgtttgtaccgcatttatctactgaaatttatttctcagtacaactgattgtattagtttacatcagtattaatattgcagaaacaattcgtacatatttatattttgataaatataagccatttttaaaccagtattggtaa

SEQ ID NO: 407680 - DNA, 6570 bp, Staphylococcus aureus
atgagtaaaagacagaaagaatttcatgacagcttagcaaacgaaaaaacaagagtaaggctttataaatctggaaaaaattgggtgaaatccggaattaaagaaatagaaatgttcaaaataatgggactaccatttattagtcatagtatagtgagtcaagataatcaaagcattagtaaaaaaatgacgggatacggactgaaaactacggcggttattggtggtgcattcacggtaaacatgttgcatgaccagcaagcttttgcggcttctgatgcaccattaacatctgaattaaatacacaaagtgaaacagtaggtaatcaaaactcaacgacaatcgaagcatcaacatcaacagccgattccacaagcgtaacgaaaaatagtagttcggtacaaacatcaaatagtgacacagtctcaagtgaaaagtctgaaaatgtcacttcgacaactaatagtacaagcaatcaacaagaaaaattgacatctacatcagaatcaacattctcaaagaatactacatcaagttctgatactaaatctgtagcttcaacttcaagtacagaacaaccaattaatacatcaacaaatcaaagtactgcatcaaataacacttcacaaagcacaacgccatcttcagccaacttaaacaaaactagcacaacgtcaactagcaccgcaccagtaaaaattcgaactttcagtcgcttagctatgtcaacatttgcgtcagcagcgacgacaagtgcagtaaccgctaatacgattacggttaataaagataacctcaaacaatatatgacaacgtcaggtaatgctacttatgatcaaagtaccggtattgtgacgttaacgcaggatgcatacagccaaaaaggtgctattacattaggaacacgtattgactctaataaaagttttcatttttctggaaaagtaaatttaggtaacaaatatgaagggcatggaaatggtggagatggtatcggttttgccttttcacctggtgtattgggagaaacagggttaaacggtgccgcagtaggtattggtggcttaagtaacgcatttggcttcaaattggatacgtatcacaatacatctacaccgaatgcatcagcaaaggcgaaagctgacccatctagtgttgctggtggaggtgcgtttggtgcctttgtaacaacagatagttatggtgttgcatcaacatatacatcaagttcagcagctgataatgctgcaaagttaaatgttcaaccaacaaataacgcatttcaagattttgatattaattataatggtgatacaaaagttatgactgtcacgtatgcaggtcaaacatggacacgtaatatttcagattggattgcaaaaagtggtacgaccaacttttcattatcaatgacagcctcaacaggtggcgcgacaaatttacaacaagtacaatttggaacattcgaatatacagaatctgctgttacacaagtgagatacgttgatgtaacaacaggtaaagatattattcccccaaaaacatattcaggaaatgttgatcaagtcgtgacaatcgataatcagcaatctgcattgactgctaaaggatataactacacatctgtcgatagttcatatgcgtcaacttataatgatacaaataaaactgtaaaaatgacgaatgctggacaatcagtgacatattattttactgatgtaaaagcaccaactgtaactgtaggcaatcaaaccattgaagtgggtaaaacaatgaatcctatagtgttgactacaacggataatggtactgggactgtgacaaatacagttacaggattaccaagcggattaagttatgatagtgcaacgaattcaatcattgggacaccaacaaaaattggtcaatcaacagtgacagtagtatctactgaccaagcaaataacaaatcgacgacaacttttacaataaatgttgtggatacgacagcaccaacagtgacaccaataggagatcaatcatcagaagtgtattcaccaatatccccgattaaaattgctacgcaagataatagtgggaatgcagtaacaaatacagtcacaggattgccgtctggattaacattcgatagcacaaataatactattagtggtacaccaacaaacattggtacaagtactataacaatcgtttctacagatgcgagcggtaacaaaacgacgacaacttttaaatatgaagtaacaagaaatagcatgagtgattccgtatcaacatcgggaagtacccaacaatcccaaagtgtctcaacgagtaaagctgactcacaaagtgcatcaacaagcacatcaggatcgattgtagtatctacatcagctagtacctcgaaatcgacaagtgtaagcctatctgattcagtgagtgcatctaagtcattaagcacatctgaaagtaatagtgtatcaagctcaacaagcacaagtttagtgaattcacaaagtgtatcatcaagcatgtcggattcagctagtaaatcaacatcattaagcgattcgatttcgaactctagcagtactgaaaaatccgaaagtctatcaacaagtacatctgattcattgcgtacatcaacatcactcagtgactcattaagtatgagtacatcaggaagcttgtctaagtcacaaagcttatcaacaagtacatctgattcggctagtacatcacaatcggtaagtgatagtacatcaaattcaattagtacatcagaatcattgagcgagtcagctagcacctcggactctatcagtatttcaaatagcatagccaactctcaaagtgcgtcaacaagcaaatcagattcacaaagtacatcaatatcattaagtacaagcgattctaaatcgatgagtacatcagaatcattaagcgattcaacgagtacaagtgattcagtatctggatcattaagtgtagcagggtcacaaagtgtctcaacaagcacatcagactcaatgagtacttcagagatagtcagtgactctatcagtacaagtgggtcattatctgcatcagacagtaaatcaatgtctgtaagtagttcaatgagcacgtctcagtcaggtagtacatcagaatcattaagtgattcacaaagtacatcagattctgatagtaagtcattatcactaagtacgagtcaatcaggttcaacaagcacatcaacatcaacaagtagttcagtacgtacgtcggaatcacaaagtacgtctggttcaatgagtacaagtcaatccgattcaacaagcatatcaacgtcgtttagtgattcaacgagtgatagcaaatcagcttcaactgcatcaagtgaatcaatatcacaaagtgtctcaacaagtacatctggttcggtgagcacttcgacatcgttaagtacaagtaattcagaacgtacatcaacatctatgagtgattccacaagcttaagtacatcggagtctgattcaacgagcgactcaacgtcgacgagcgattctatcagtgaagcgatatctggttcagagagtacgtctatatcattaagtgaatcaaatagtacaagtgattcagagtcgaaaagtgcatctgcttttttaagtgaatcattgagtgaaagcacatccgaatcaacatcagagtcattaagtggttcaacaagcgatagtacgtctttatcagatagtaattctgaatctggtagcacatcaacatcattaagcaattccacaagtggtagtacgtccatttcaacgtcaacaagtggtagcgcatcaacatcaacggttaagagcgagagtgtctcaacatcattgagcacatcaacgagtacaagtttgtctgactctacaagtttgtcaacatcattaagtgattccacaagtggtagcaagtccaattcactaagtgcatcaatgtcgacaagtgattcaatcagtacaagaaaatcagagtcattaagtgcatcgacatcattaagcggttcaacgagtgagagtgaatccggctcaacatcatcaagtgcaagtcaatccgattcaacatcaatgagcctgagcatgtcccaatcaatatcaggaagtacaagtacgtcaacgagtacaagtttgtctgactcaacgagtacatcattgtcactaagtgcctcaatgaatcaaagcggtgtagactcaaactcagcaagccaaagtgcctcaacctcaacaagtacaagcacgagcgaatccgattcacaaagcacatcatcatatacaagtcagtcaacaagccaaagtgaatccacatcgacatcaacgtcactaagcgattcaacaagtatgtctaaaagtacgagccaatcaggttcaacaagcacatcaacgtcattaagtaattcacaaagtacatcaacatcaatccgaatgtcgactattgtaagtgagtcagtatccgaaagtacatcagaatctggctcaacatcagaaagtacaagtgaatccgattcaacatcaacatcattaagcgattcacaaagcacatcaagaagtacaagtgcatctggatcggcaagtacatcaacatcaacaagtgactctcgtagtacatcagcttcaactagtacttcgatgcgtacaagtacgctggattcacaaagtatgtcgctttcaacaagtacatcaacaagtgtgagtgattcaacgtcattatctgatagtgtgagtgattcaacatcagactcaacaagtacgagtacatctggttcgatgagcgcgtctatatcgttaagtgattcgacaagcacatcaacatcggctagtgaagtaatgagcgcaagcatatctgattcacaaagtatgtcagaatctgtaaatgattcagaaagtgtaagtgaatctaattctgaaagtgactcaaaatcgatgagtggttcaacaagcgtaagtgattctggctcattgagcgtctcaacgtcattaagaaaatcagaaagtgtaagcgagtctagttcattgagtggctcacaatcgatgagcgattcagtaagcacaagcgattcgtcatcattaagtgtatcgatgtcactaagaagttcggaaagcgtgagtgaatctgattcattaagtgattcaaaatcgacaagtggttcgacttcaacaagtacatctggttcattgagtacatcaacatcattaagtggttcagaaagcgtaagcgagtctacctcgctaagtgattcaatatcaatgagtgattctactagtacaagtgactccgactcattaagtggatcaatatctttaagtggttccacaagccttagcacttcggattcattaagtgattcaaaatcattaagtagctcgcaaagtatgagtggatcagaatcaacgtcaacaagcgtgagtgattctcagtcaagctcaacaagtaatagtcaatttgactctatgagcatcagtgcatctgaaagtgactcagtgtctacaagtgattcgtctagcatcagtggatcaaattcaacgagtacttcactttcaacatctgactcaatgagcggaagcgtatcagtttcaacatcgacaagtttaagtgactcaatatcaggttcaataagtgtaagtgactcgagctcaacgagtacatcagagtcgctaagtgattctatggcacaaagccagtcaacaagtacaagtgcatctggttctttaagtacatcgatatcaacatcaatgtcaatgagtgcaagtacatcgacatcacaaagcacgtcggtgtcgacatcattatcaacatcagacagtatcagtgattctacttcaataagtatcagtggttcacaaagtgctgtagaatcagaatctacaagtgattcaacttctatcagtgactcagaatcattgagtacatcagattcagactcgacatcaacaagtacatctgtctcaacaagtggttcaacttcaacaagcgtatccgaatcattaagtacgtctggttcaggttcaacgagcgtatctgactcaacatcaatgagtgaatccgattcaacatctatcagtaactcagaatcagtgtcaacaagcacatcaacgtcattgagcacatccgattcgacaagcacatccgaatcgctgagtacatctatgtctggttcacaaagcatttctgactcaacatcaacaagtatgtctaactcgacttcaatgagcaattcaacatcaacaagtatgtccggctcaacaagtacatctgaatctaactcaatgcatccgtcagactcaatgagtatgcatcatacacacagcacgagcacatctatttcaacaagtgaagcaacaacgagcacgagtgagtctcagtctacattaagcgcaacatcagaagcgactaaacataatggcacacgagcgcaaagtgaagaaagattgccagatactggtgaatcaataaaacaaaatgggttactaggtggcattatgacattattagttggtttaggtttaatgaagagaaagaaaaagaaagatgaaaatgatcaagatgattctcaagcataa

SEQ ID NO: 407681 - DNA, 957 bp, Staphylococcus aureus
atgagaaaagtaactggctttgtattgtgtacatcacttattttaggaggctgttctttaatgcataaagatcaaacaaaagatattccaaagacggttagcgtcaaagattatgatggtcaatatattggtgaacataaaaaaagaaacgaagtatttctgaaaaaacataaaggtgaagcgataaaaaaatataaagactatgtgaaagacacctttggttatgattgtaaaatcaatttagttgatgcctatactaataaatctggatttagcgagaaaagtaaggtagatggtatctcagtggttggtactgtcaattatgacgttccttttcaactccaattgctttttgttgagtctggaaatggtataactatttcaacatttacacctggtcatataaatgaaacatcagcggccgtttcagccatgatgtacaaacgttatgaacatgaaattgaacaagctcgattaaaattcaaatcagaagttgagaaaaacggttactttgccatgaatgaaaaacttcaaaagaagcaagaattcaatggtgttactaaacaatttttgaatttcaacacagacagtatcgatgatctggataagttcaaaaaagaattcaaacctgttatgcacttaaaaggtgatgcattcaatcaacagttacaaaatttaattaataaatatcctgaaattaagaaaagcatgaaatctgactttattgcctattatgataagaaaagcacaaaaaatgttaataaatattcatgggatttacaaataccaacaaatgacacaatgagaaaaataccaggatcaaaaatgatgtatttttacaaagacagtgtttctccatctgaaattggagaagatggtaggttagaaaataaaactaataaaataactatgtctggtggaaattgggaaaaaatcaagaaagaaatcaagaaataa

SEQ ID NO: 407682 - DNA, 1251 bp, Staphylococcus aureus
atgcttaatgcacaacaatttttaaatcaattttcattagaagcaccattagatgagtctttgtatccaattattcgcgatatttgtcaggaagttaaggttcatggagataaagctttgaaaatgtataatctaacatttgatcatgcgaaaacggatcatttagaagtaagccatgaacaaattaaagcagcatttgacacgttagatgagaaaactaaacaagcattacaacaaagttatgaaagaattaaagcatatcaagaaagtattaagcagacgaatcaacagatagaagaatcgaaggagtgttatgaaatataccatccactagaaagtgtgggtatttatgtgccaggtggcaaagcaagttatccatcaacggttctaatgacagcgactttagcgcaagtagccggtgtagaaaatattgttgctgtgacaccacctcaacctaacggtatatctcaagaggtattagcagcatgttatattacgcaagttgatcaagtgtttcaagttggtggtgctcaaagtattgctgcattaacttatggaacagaaacgatacctaaagttgataagattgtaggtccaggtaaccaatttgttgcatatgccaaaaaatatttatttggacaggtaggtattgatcaaattgcaggaccaacagaaatagcactgattattgatgacaccgcagatttagatgccatcgtatatgatgttttcgcacaagctgaacatgatgaattggcgcgtacatatgtcattagtgaagatgcgaaagttcttaaagacttagaatcacgtattgctaaagcattgcctaatgtggacagatacgacattgtttctaaaagtatcgctaatcaacactaccttatccatgctagtaattttgatgaagcatgccatgtcatgaatacaatcgcgcctgaacatgcgtcgattcaaacagtaaatcctcaaccatatattgaaaaagtgaaatatgtgggcgcattgtttattggacattattcgccagaggtcataggagattacgttgcaggtccaagtcatgtattacctacaaatagaacagctagatttactaatgggttatcggtcaatgatttcttaacacggaacacggtcatccatttatcaaaagatacgtttgaacaaattgctgattcagcacaacatattgctcatgttgaagcattatacaatcaccaacagtctattttaatacgtcagtcttag

SEQ ID NO: 407683 - DNA, 975 bp, Staphylococcus aureus
atgatgtcacaacaagatttacctacattattttatagcgggaagtctaatagtgctgttccaattatatctgaaagtgaattacaaacaattacagctgaaccatggcttgaaatttccaaaaaaggattgcaattagaaggattgaactttgatcgacatggccaactatacttattagatgtgtttgaagggaatatttttaaagtaaatccagaaactaaagaaattaagcgaccttttgtaagccataaagcaaatccggcagcaattaaaatacataaagacggtcgattatttatttgttatttaggagattttaaatctacaggtggtatttttgcagcgacagaaaatggtgacaacatacaagatatcattgaagatctatcaacagaatattgtattgatgacatggtatttgattctaaaggtgggttttattttacagattttagaggatactctaccaacccgctaggaggcgtttattatgttacgccagactttaaaacagtaacacctattattcaaaatatcagtgtagctaatggtattgctttaagtactgatgaaaaagtactatgggtaactgaaacgaccgcaaatagattacatcgtattgcgcttgaagatgatggtgtgacgatacaaccatttggggcaacaattccgtactattttacggggcatgaaggtccagactcttgttgtattgatagtgatgataatttatatgtggctatgtatggtcaaggtcgagtattagtatttaataaaagaggttatccaataggacaaatattgataccaggtcgtgaagaaggtcatatgttacgttctacacatccacaatttatacctggtacaaatcaactcattatttgttccaatgatattgaaatgggcggaggatctgtgctttatacagttaatggctttgcaaaaggtcatcaaagttttcagtttcaataa

SEQ ID NO: 407684 - DNA, 2991 bp, Staphylococcus aureus
atgaacaaaaatgtgttgaagtttatggtctttataatgttattaaatatcatcacacctttatttaataaaaatgaagcatttgcagcacgagatatttcatcaacgaatgttacagatttaactgtatcaacgtctaagatagaagatggtggtaaaacgacagtaaaaatgacgttcgacgataaaaatggaaaaatacaaaatggtgacacgattaaagtggcatggccgacaagcggtacagtaaagatagagggttatagtaaaacagtaccattaactgttaaaggtgaacaggtgggtcaagcagttattacaccagacggtgcaacaattacattcaatgataaagtagaaaaattaagtgatgtttcgggatttgcagaatttgaagtacaaggaagaaatttaacgcaaacaaatacttcagatgacaaagtagctacgataacatctgggaataaatcaacgaatgttacggttcataaaagtgaagcgggaacaagtagtgttttctattataaaacgggagatatgctgccagaagatacgacacatgtacgatggtttttaaatattaataatgaaaaaagatatgtatcgaaagatattactataaaggatcagattcaaggtggacagcagttagatttaagcacattaaacattaatgtgacaggtacacatagcaattattatagtggacaaagtgcaattactgattttgaaaaagcctttccaggttctaagataactgttgataatacgaagaacacaattgatgtaacaattccacaaggctatgggtcatataatagtttttcaattaactacaaaaccaaaattacgaatgaacagcaaaaagagtttgttaataattcacaagcttggtatcaagagcatggtaaggaagaagtgaacgggaaatcatttaatcatactgtgcacaatattaatgctaatgccggtattgaaggtactgtaaaaggtgaattaaaagttttaaaacaggataaagataccaaggctcctatagctaatgtaaaatttaaactttctaaaaaagatggatcagttgtaaaggacaatcaaaaagaaattgagattataacagatgcaaacggtattgctaatattaaagcgttgcctagtggagactatattttaaaagaaatagaggcgccagcaccgtatacatttgataaggataaagaatatccgtttactatgaaagatacagataatcagggatattttacgactattgaaaatgcaaaagcgatagaaaaaacaaaagatgtttctgctcaaaaggtttgggaaggcactcaaaaagtgaaaccaacgatttatttcaagttgtacaaacaagatgacaatcaaaatacaacaccagtagacaaagcagagattaaaaaattagaagatggaacgacaaaagtgacatggtctaatcttccggaaaatgacaaaaatggcaaggctattaaatatttagttaaagaagtaaatgctcaaggtgaagatacaacaccagaaggatatactaaaaaagaaaatggtttagtggttactaatactgaaaaaccaatcgaaacaacatcaattagcggtgaaaaagtatgggacgacaaagacaatcaagatggtaagagaccagaaaaagtcagtgtaaatttattggctaacggagagaaagtaaaaacgttagacgtgacatctgaaacaaactggaagtacgaatttaaagacttaccgaagtatgatgaaggaaagaaaatagaatatacagtgaccgaagatcacgtaaaagactacacaacagacatcaacggtacgacaataacgaacaagtatacaccaggagagacatcggcaacagtaacaaaaaattgggatgacaataataaccaagacggaaaacgaccaactgaaatcaaagttgagctatatcaagatggaaaagcaacaggaaaaacggcaatattaaatgaatctaataactggacacatacgtggacaggattagatgaaaaagcaaaaggacaacaagtaaaatacacagtcgatgaattaacaaaagttaaaggttatacaacacatgtggataacaatgatatgggcaacttgattgtgacgaataaatatacgccagaaacaacatcaattagcggtgaaaaagtatgggacgacaaagacaatcaagatggtaagagaccagaaaaagtcagtgtaaatttattggctaacggagagaaagtaaaaacgttagacgtgacatctgaaacaaactggaagtacgaatttaaagacttaccgaagtatgatgaaggaaagaaaatagaatatacagtgaccgaagatcacgtaaaagactacacaacagacatcaacggtacgacaataacgaacaagtatacaccaggagagacatcggcaacagtaacaaaaaattgggatgacaataataaccaagacggaaaacgaccaactgaaatcaaagttgagctatatcaagatggaaaagcaacaggaaaaacggcaatattaaatgaatctaataactggacacatacgtggacaggattagatgaaaaagcaaaaggacaacaagtaaaatacacagtcgatgaattaacaaaagttaatggctatacaacgcatgtggataacaatgatatgggtaacttgattgtgacaaataaatatacgccagaaaaaccgaataaaccaatctatcctgaaaaaccaaaagacaaaacaccaccaactaaacctgatcattctaataaagttaaaccaactcccccagataagccatcaaaagtggataaggatgatcaacctaaagataataaaaccaaacctgaaaatcctctaaaagaattaccaaaaactggtatgaagattataacttcatggattacatgggtatttataggtatattgggactgtatttaattttaagaaaaagatttaactcataa

SEQ ID NO: 407685 - DNA, 909 bp, Staphylococcus aureus
gtgaattcagaatataaaaaaggtatatttttagcactcagtgcatacattctgtggggaatactacctatatattggcagttcgttgatgcaataggtgcatttgaaattttagcctttcgtattatattttcagtaatattcatgattttcatactcgcggttggacaaaaacaacgcaatgcatttcaacgagatatgaatcaattgttagccaagcccattcaattactagcaattgtcgtagcgggttatgttatcacattaaattggggtacatttatttgggctgtaacgaacggtcacgtactacaaacaagtttaggttattatataaatccacttgttagcattttgctcgcacttatctttttaaaagaaagattcaataaatttgaatggctagccattttattcgcattcatcggtgtattatatatgacgctcaagattggagaattcccaatcgtctctattatattagcgttatcctttggtacatacggattattgaaaaaagtagtacatattgatgccatcagcagtattacgattgaatgtattgttaccgcacctgctggactaatatacgttatttatttatggcagcaacatcagatgtcatttggattgaacatgtcatcattttggttgttattttctggtgctattacggcaataccactaatcctattctcagccggggcaaaacgtattccactttcgctaataggatttattcaatacgttggaccaacaataatgtttgtactcggcatatttgttttcaaagagccttttagtatagatcaattaattacgtttatatttatttggacaggtattgtgttatatagtctttctcaatacattaaattgaagaaacatccggtcgcaaaaaccctataa

SEQ ID NO: 407686 - DNA, 801 bp, Staphylococcus aureus
atgaatattgcaaagttagaagattatctacaaattgaaccaactcgttatgatcaaccgagtattgaagcattaaattattatgcgactcgctttatgttaacggtgcctttcgaaaatattgatgttcaaaatggtaaaccaatatctgtagatatcgatgcacttttcaataaaattgttcatgataaacgcggtggtttttgttatgagttaaacacatttttcaaagcatatttacaacaaaaaggatttaacccagaattaatgtcggctaccattcatacacccggtggcggtcgtagtcaaaacggttcacatgcatcacttgttgtttctattaataatgtcttttatgtaaccgatgtcggctttggagacttacctctaaatgccataccgattactttaccagatgatacacagcagatcactgatatcagtggtacattccgcgctattttcaacagtgaggataaggacattttctatgttcaaaaatatgaaaataatcattggcatacaaaatacgaagctgaattcaaggctagagaaatagaagaattcgatcaaaacattgaatataatcaaacacatcctgattcagtatttgtaaaacatttattaattacaatgccacaatcatttggacgtgctacaatgtctgaaaaccatttaactttaacaaaagatggaacgccagaaaagttagctatcacaaaagataactataaacaatttttaacaaaatattttggattaaatgtaacaattagtcgacttgaaaacagcgacaattaa

SEQ ID NO: 407687 - DNA, 192 bp, Staphylococcus aureus
atgaaatttagagaattagtaaaacaatcatacgaggatttgaaaaatttgactgtaacttggtataacgttattgctttagcaatgattgttattgtcttaagcgccgttacaacaccaattataggtattccagctggtttattaggtggcgcttattatttaaaacgccgcgaagaaaaaggtaaataa

SEQ ID NO: 407688 - DNA, 681 bp, Staphylococcus aureus
atgagaagacaaatgttagctttaaaaacgagaagtatattaacaattactaccatcattatgataggattaattacttttgtattatttcaatttacattattaaaagagttagataatatcattttcaattggtttaaatcaaattttggcaatccgcaattaaattttcaaggtggtttattaaatgattatttaactgtagtggctaaatatggagatgttgcaacgtggctatttgtagctatcatcattggcattattctacttagtaaaaagtcatacctactaggtatgtgggtcattcttacggtaggttcaggtggtatcgctggcattattatgaaaaaaatattacatcgagatagaccctatgatcatttaatacaagattctggtttttcatttccaagtggtcatgcactatcgagtacgatggttattatgattttgctatttttgattctacctcagctaacgcaatacgtacttagaataatacttcaaatagttattgttgttatttggttgagtattctagtttcgagactttacttccatgcacattattttacagacgtattaggtggtgtcacgttgggggtgctctggataatgataagtattcacatatatagagtaatacttaattttaaattggattctagaaagatgtcttaa

SEQ ID NO: 407689 - DNA, 1878 bp, Staphylococcus aureus
atgtcgaatataaaaacaacactagagacgtccgtaggactagaaaaagacaacgataagctatttgattatataactgaattagagattcaaaacacgcctgaaaaccgggaagcaaaagttgttattgaagaaaggttacataaagaatataaatatgaattagatcaaatgacaccagagtatggaatacaaaaaggcagtgttagaataggtcatgcagatgttgtaatatttcatgattctaaagataaatctcaagagaatattaaaataatagtagagtgtaaaagaaagaatcgcagggatggtattgaacaattaaaaacatatcttgcagggtgtgagtctgcagaatacggcgtttggtttaatggagaagatatagtatatataaaacgattgaaaaaagcaccacattggaaaacagtatttaatataccgagaaatggagagaacttaggactacctgaaaaaaattcactatctccggctacagaattagttaaaatatttgaaatttgccataatcatgtatatgcgaatgatggacatttaaaagataaagtttttaatgaaatgttaaagattctatttattaaattaatggatgaaaggaatcatacttcaagaattgctgatttcggtataactgaacaagaatatgatgaaatattaaaccataaagaaaatgattttaaagtgcgaataaataacttatttaacaaggctaagaataattaccaagacatttttaatcctaatgaaaaaataaatttaaagctatctacattggcttttgtagttggtcaaatgcagaactttgatttatcacattcatctagggacgttaaaggtttagcattccaaaaatttgtatatgctcatcaacgtggagatagaggtgagttcttcacaccggatcctatcattgagttagcagttaagatgattaatcccaaaattgatgaaacgattttagatccagcttgcggtacaggaggttttcttgtagcagccttaaaacacgtagaagaatcaataatagatttaaaagctgagagacctattgattttgaaaaagcaaaaacagattatgcacttcgaaaattgagaggtatagactttaatcctgacttagtaaaagtttctaaaatgagaatgattcttgaagatgatggtcatacaggaatttttcaagctaactcattagatactttgagagaaatagaaattcaagcattaaaatcaggagcaaataatattaatgagaattctgtcgacatcatcctaactaatccaccatttggacgtaaaggaactattacagataaagatattttacgacaatacgagttaggacatcaatgggtaaagaacaatgatagctatgaaaattcacataaggttctagatgatcaggtaccagatatactatttatagagcgatgctatcaattcttaaaaaacaaagggaaaatggcaattgtattgccggatagtgtgttaacaggtccgaaattacagtacgttagaaactatatcctgaaacgttttaaagtagtaggagtagtttctttaccatatgaaacgtttattccacatggtgccaatgttaaagcatcaatacttttacttcaaaaactagattctaaaacaatggaagaattaaatacagatggctacgaatctttcatggtagatatagagaaaattggttatcagggaaataagaatggtacattaatttataaaattgatgaaaaaggtcagtacatattggatgaaaatggaaataaaatattagatgaagaaataagtgaagcattagaaggatggactgagtacgaagcagtaaatgaggtgtggagttcatga

SEQ ID NO: 407690 - DNA, 1308 bp, Staphylococcus aureus
atgaagcaaggagttgtaagttctaagaaattatttagaagactcgatgttaaataccattttaatgaaaataaagagatagataattatgataaactttgtgatttaaaggaactcattgtaagagatccgaactgttatggtttccgttatagctcagtaggaatacctatgataagaataagtgatattggtaatccttttattaattatgataatgtggcttatgtaaatgagaggattcataataaatataaaaaaactcaattacaaaaatttgatattcttatgtcagttagaggagtaagtataggtaaaatcggtatttttatgggagaatattcagaagctaacattagtgcgaatttaataataattagattaaaaaatccatcgtatgctccttatgtagcaatgagtctcatatcttctgtcggacaaagccagataagtagaagtatcggtggtggatcgaaaccaacaattacctcaggatttattgatgaaatagagatccctacacctcctgaggaagtgcttaaaaatataaatcaacttttctttgaagcatttaatcaacgtgggttagctaaagaatctacagaaataatagattcagtttttgatgaattatttaagtatgaagataataaaaaatctgtaagttatactaaaaatattttagataataaccgatgggatagtcattaccataatcctaaatatataaatactagacgaaaagttgatgccgaaaatgcaaaatatttaaaaaatttagttactgaagtgacagagagcgtcgataaacttcacgaagataaagtaggttatatagaaatttctaatgttaataatcgtactggtagaatcaacgggataaaatttgattacattaataaactaccaaaaaacgggaaaataatattgaaggatgaagacatactaatatctaaagtccgtccatatagaggttccatagcaatttataaagagtatagtgctgaattatgcacagcatctaaaagtgcttttgtcgtgattagagcagaagaatttatgtatccttattatttaacagcttttctcagatatcgattaggtcttgatcagatagtcatgaatcaatctggaacaacttaccctactgtaaagccagaagagattatgaatgtcaaagtcattttgctagaagatatgaagatgaaagaaataaatgaaatttatcgtaaaaatatcgattcaaaatatcatgaagaaaaaaatatacaaagtattatagagctactagaatcgagtttctcataa

SEQ ID NO: 407691 - DNA, 195 bp, Staphylococcus aureus
atgttaagtaccgcttatttctatgtttcaattcaatattttacaaatcttagtgaggctgatgaactaaaaaaactgctgtttaaaatgaaaatcattgatcaaaatagagaatatctttacgacagagaaattgacgagctatctaaacatgatgtttctctagaactcagtgctgatggtacaattacttga

SEQ ID NO: 407692 - DNA, 1563 bp, Staphylococcus aureus
atgaaaaataaatctgtaagtcttgtgttttgggtatctttagcgatatgtacaatatttgtcgcttatggtgccatatttcccaagcagttagaaacactcacgcaaaacattacttcatttatagcgttgcatttttcatggtattatttgctgctcgttttagttattttatttgtctgtgtgtatatattattttcaagatacgcatctattacattaggtgaagaaggcgaagacccagaattctcattgccatcttggtttgctatgttatttagtgctggtatgggaataggacttgtgttctggacaacggcagaaccaatcagtcacgccttcaaattaacgcctattcataaagctggcacgcaatctgcaattaatgatgcaatgcagttttcatttttccattgggggattcatgcatgggcagtctatggtattgtcgcgcttgtgtttgcctattttagctttcataaaggatatcctggcttagtcagcgctacattaacgcctttattaggtgaaaaagcaatgcgtggccctttaggtggtgccattgatgtattggcagtcatagctacagtaacaggcgttgctgcaacattaggtttcggtgcattgcaaataaacgaaggtttacattttttatttaatgtaccgagtaacttcacgatgcaagtaatcttgattgtcattgcaaccatattatttacttggtcagcatggtcaggtatcgataaaggtatcaaaacgttgagtaatatcaacatgttacttgcttttgtagtacttattggtctttttattgttgggccaacgctttacattttaaatacatttacgaatggtctaggtaattatattgcaaatttctttagtatgagtttacgcattccgtctggcggtcaaaaattccaatggttacaaaattggacaatcttttactgggcatggtggatatcttgggcaccgtttgtaggtatctttatagcacgtgtgtcaaaaggacgtacgattaaagaatttattctaggtgtactttttgtcccggcggtagtttgcattatattctttgcggtattcggcgcgtcagcaatttacttacaagataatcatattgccgatattgctaaagctgcgacagaaacagcaacttttgcaacgctacaacattatccgctaggttttgtattaagcttaattactttacttgttattatgattttctttgttacatcagcggattcggcaacttatgttttaggtatgttgagttcaagtggtgatattaatccgaagtcatttgtcaaagtgagttggggtatcattatggcattatttgcaatcatcatgatttacacaggtggtactcaagcgattcaaaatttattaatcattgctgcgttaccattttccgtggtcattatagcgatgatatggtcgcttttaaaatctttgagtgaggagaaaccgagaaatagtaataaggttttaattaaacatcgtgacccagacgtattagaatatcgttcttcaaaacatattgacggaaattaa

SEQ ID NO: 407693 - DNA, 870 bp, Staphylococcus aureus
gtgaagaaaatttttgtaattagtacgacattgttagcggtcgctattattataggcactattattacggttgtgtttagtcaacgacaggcacaaacatttaaaatacaacaacagcaatttgttaaaaagccaattccgacattgttcttacatggatttggtggtagtgccaactctgaaaaatttatggtgaagcaagcagaaaaaagaggtgtcactaaagatattattacggcctatgtttcaaatgagggtgaggttacttttaaagggaagataagtaaaaatgctgtgaatcctattgtgaaaattgaacttgaaaataacagacaaggctatttggataagaatgctgcgtggtttaaaaatgtactgactaagcttcaatcagaatacaatttcgataaattcaactttgtcggtcactcaatgggaaacttaacatttgcacaatatatgatgacatatggtaacgacaaatcattaccacagttaaacaagcaagtgaatattgcgggtacatttaacggcgtcttaaatatgaatgaagatgtcaatgaaattacagttgataaagatggtaaaccaagtcgaatgaatcaaccttatcagcaactacgcgtgctaaaagatatttataaaggtaaaggtatcgaagtgctaaatatttatggagatttgaaagatggtacacattcagacggcagagtgtctaatagttcttcgaaatcattaaaatatttactgggaaatagtccaaaaagttatcgagaatctaaatatgaaggtgagtcagcacaacatagccagctacatgaaaacgaaaacgttgcgaatgagctaattgactttttatggaaaaaataa

SEQ ID NO: 407694 - DNA, 1413 bp, Staphylococcus aureus
atgactaaaacattacctgaagattttatttttggtggagcaacagcagcgtatcaagcagaaggtgcgacaaatacggatggtaaaggtcgcgtagcatgggatacgtatttagaagaaaactattggtacactgcagaaccagcgagtgatttttataacagatatccagtggatttagaattaagtgaaaaattcggtgttaatggtatccgtatttcaattgcatggtctcgtatcttcccgaatggctatggtgaagttaaccctaaaggtgttgagtattaccataagttatttgcagagtgtcataaacgccatgttgaaccatttgtaacattgcatcattttgatacaccagaagtgttacacaaagatggtgattttctaaatcgtaaaacgattgattacttcgtagattatgctgaattttgttttaaagaattcccagaagtaaaatattggactacattcaatgaaattggaccaattggtgatggccaatatttagtaggtaaattccctccaggtattaaatatgattttgaaaaagttttccaatctcatcataatatgatggttgctcatgcaagagcagtaaaattatttaaagatggcggctatcaaggagaaattggtgttgtacacgcattgccaacaaaatatccgttcgatccatcaaatcctgaagatgttcgtgcagcagaattagaagatatcatccataacaaattcatcttagatgcaacatatttaggtaagtattctcgtgaaacgatggaaggtgtgcaacatatcttatctgttaatggcggtaaattaaacattacagatgaagattatgccattttagatgcagccaaagatttaaacgacttcttaggtatcaattactacatgagtgactggatgagaggttacgatggagaatctgaaatcactcataatgcgacaggtgataaaggcggttctaaataccaacttaaaggtgtcggacaacgtgaatttgatgtcgacgtacctcgcacagactgggactggatgatctatcctcaaggtttatatgatcaaatcatgcgtgttgttaaagattatcctaactatcataagatttatattactgaaaatggtttaggatataaagatgaatttattgaatctgaaaaaacagttcatgatgatgcacgtattgattatgtaagacaacatttaaacgttattgcagatgctattaaagatggtgcaaatgttaaaggttactttatttggtcattaatggatgtgttctcttggtcaaatggttatgaaaaacgatatggtttattctatgtcgattttgagactcaagaacgctatcctaagaaaagtgcttattggtacaaagagttagccgaaacaaaagaaattaaataa

SEQ ID NO: 407695 - DNA, 933 bp, Staphylococcus aureus
atgattttaactttaacattaaatccatccgttgatatttcatacccattaacagcattgaaattagatgatgttaatcgtgttcaagaagtgagtaaaacagctggtggtaaaggtttaaatgtaacaagagtacttgcgcaagtaggtgagccagtccttgcgagtggttttattggcggtgaattaggtcaatttattgctaaaaaattagatcatgccgacatcaagcatgcattttataacattaagggtgaaacacgaaactgcattgcaattttacatgaaggacaacaaacagaaattttagagcagggaccggagattgataatcaagaggctgcaggatttattaaacattttgagcaattactagaaaaagttgaagcagttgctatttcaggtagcttaccaaaaggattaaatcaagattattatgcacaaatcattgaacgatgccaaaacaaaggtgtgcctgtgatattagactgctcgggtgcaactttgcaaacagtattagaaaacccttataagccaacagtcattaaaccaaacatttctgaattatatcagttgcttaaccagccacttgatgaaagtttagaaagtttgaaacaggcagtgtcacaacccttattcgaagggattgagtggattattgtgtctttaggtgcacaaggtgcatttgcaaagcacaataacacattctatagagtgaatattccgacaataagcgtgttaaatcctgttggatcaggtgattctacggttgctggaattacttcagcaattatcaatcatgaaaatgatcatgatttacttaaaaaagctaatacattaggcatgctgaatgcgcaagaagcacaaacaggatatgtcaatttaaataattatgatgatttattcaatcaaattgaagttttagaggtgtaa

SEQ ID NO: 407696 - DNA, 279 bp, Staphylococcus aureus
atgacatttaatgagtataattacaacaatgaattaatattaaagttaaacaagattgaagtacaaaaaaataacgaaaaaatttctgaggtttttaaggattatgaaatattaaagcccaaaattgtttttaatggctctaatccttatttagcattaaatcatattatagttgctgaaatagaaaattacagttctttagaaacgttctccaaaatatatgtagatgaagattactactataattacggagaattaattatcaagtgcaagaaatag

SEQ ID NO: 407697 - DNA, 1518 bp, Staphylococcus aureus
atgactacttatatgttaatgtattcaataccagaaaaagcaggtggtataacatcagttatgttaaatagatctaaacttttagctgaaaaaggctattcatgtgccttattaactttggatgacaaaaactatgatccattaagagctaagctaacaaattcaggacggttacataaagaagtaaaaattgttaacttatacgaagaattgaagatgctgtatgatgttgaaaatacagaaatcgaaaataaaaatatgcaaacatttgaaaaattaaatcttttaaatcaagaaggcttttatattcaaaaagacgaatatgaagaaaaaaagtatgccaggtactttaaagataacaattacataatgtataaaaaatggataaatggtcaattatcacatattgattattttcaaaatcgaaaacgcattaaaaggcatgtttttcaaaataaaatacttcgaaaagaaataactttcaacgataaaaataaaatgagtgaagttaaatatttatcaaatgacggcttttgttatttatcatattggtatggggataacgaaaatatagtcaatatattttattttgataaaaatagtaaagaagtattaaactttaaaaacaataaaatgttccactcatattggttggataaaaacttaacttcaaacgatgtattaatactagacggtataggcacttatcctaaagtagagaacatgcagaataatgatgtcaaaaaaatatttactatacatacgaatcatttcttgtccccttactcttatggcgctgagattaaaccagagttcagaaacatgttactaaaccttaaagagttagatactttagttgtattaactaaagaacaaaaagatgatattataaaacaatttggtgattacaataatataaaggttattcctaatgctgtatcttttgaagagaatttaacacaaaatattcgagaaaaaaattctattattgtattacaaagatttgtagctatgaaaaatatcacacatatcatttccgctataaatattgtaagaaaaaaagtaaaggatgttaagttgcacatatacggtaccggtacgcaaaaagaaaattacacaaaacttattaaaaaacttaaattgcaagataatgtgttcatccatgattacgcatttgacatacgtggtctttatacaaaagcctctctaagtgtactgacatcagattatgaaggtctccctatgagtttactagaggccatgagttacggtgttccagtaatttcatatcctattaattatggccctaaatctataatccaaaataatataaatggaataataacaaaaaagaaggataatattaatgaattggcaaaaaaaataattcatgtattaaaaaaagaaacattgatatctcagttttctgaaaatgccagaacaacaataaaaacaaacttttcttacgaagcggtatccaaaaaatggattgaattaatcgatgaaaaaagcaaatag

SEQ ID NO: 407698 - DNA, 201 bp, Staphylococcus aureus
atgtctttgagtttggtatttagtcgatggcggtttgaaattgtcgttttatggtggaatgaatttgtcgttttatggagatataaaaatgctgttttatggcagtttcaaaatggtgtttcgattaaaaagtcacagcaagacttagaactaactgtgacttatacatttcatacttatatttatcgattggttttatag

SEQ ID NO: 407699 - DNA, 1437 bp, Staphylococcus aureus
atgactagtagtaagtatattgaatatttgcaaactgaggttgaaggacagcttctagatcgaaagagggcatctataaatcctaaagatgttgctcaacacattagtgcgtttgcaaatgctgaaggtggcaaactggtaattggtattgaagataatggagaaatttcgggatttaatcattcaaaagcaaaaaagaaagaggtttatattgaagcacctttcgaacatttatatagaatacctaaatatacatatgaaataatagaagtgaagaaacgcgatggaactatggatgaaattcttgttttcgacattgaacccagttatgatgccataatcaccttaaaagatgattcagtatatttaaggattaacgataaaagtagaaaactgacacacaatcaaattacaaatctagaatacgaccgtggttcacgaagattcgaagaagaattagtagagtattctagtattgaagatgtgaatgaagaactagttgatgaatttaagcaattacttaatacaaacgtagataatgaaaaattattaaaagctagaggatttatgcgtgaaggtaaattgacagttgcaggtttgttattgtttagtaataacatcaatgtttatttaccaggcgctagaattcgatttatgaggtatgaaggtacaaaagaagaatctgggacaagacttaacattgtaaaagatattacttttgataaagctttgccagtagcaataagagaagcgagagcctttatcaatacacaattacgtgaatatacttttttaggtaaagagggaagatttgtaactttgccagaatatccagaatttgcttggtttgagggaatgataaattctattgtacatcgcagatatgataatcaaggcgatcatataagaataaaaatgtttgacgacagattagaaattagtagcccgggtgcactgcctgcttctgttacgttagagaatattaaagaagaaagatattcaaggaatccaaaattagctgcagcattaactcaatataaatgggtgagagaatcaaatgagggcgtgggacgtatatttgacgaaatgaaggaatattttttagatgatcctgtatactcagagcctaataatagttcagtacaactagctttgaagaataacataatagcaaggaaaaaaagagaaacagggagagtgagtaatataataacacctgaattatttgaaagtttaaatgagcaacaagaattaattgtgagacatttatataatcaaggcgaactaacagcatctaaaattgctaatattattcaaaggtctgttcctactgctagaaaaagattgaaagaattagaggaaatgaatattatatcgacacatggatcaagtaagaatgatccaaagagaacatattatttactcggattcgagtaa

SEQ ID NO: 407700 - DNA, 279 bp, Staphylococcus aureus
atggctcgtagtattaaaaaaggacctttcgtcgatgagcatttaatgaaaaaagttgaagctcaagaaggaagcgaaaagaaacaagtaatcaaaacatggtcacgtcgttctacaattttccctaatttcatcggacatacttttgcactatacgacggacgtaaacacgtacctgtatatgtaactgaagatatggtaggtcataaattaggtgagtttgctcctactcgtacattcaaaggacacgttgcagacgacaagaaaacaagaagataa

SEQ ID NO: 407701 - DNA, 495 bp, Staphylococcus aureus
atgactgagtttactcatattaatcaacaaggccacgccaaaatggtcgatgtatcagacaaacaaattacaaaaagaactgctgtcgctcattcaagcattactgtgaatgaaactatttataagcagatttctaataacaccaataccaaaggcaatgtattgaacactgctcaaatcgctggtattatggctgccaaaaatacatcaacaattattccgatgtgccatccattaccattgactggcatagatgttcacttcagctgggatgaaacaaatgcacccctttatactttaaacattcaaacaactgtctctacaactggcaaaaccggtgttgaaatggaagctttaaccgctgcatcagcaacggctttaaccatttacgacatgacgaaagcagttgataaaggtatgattattggcgaaacctaccttgaaagcaagtctggcggtaaatctggagattttcaacgccaattagatcaataa

SEQ ID NO: 407702 - DNA, 783 bp, Staphylococcus aureus
atgaaaatgaaacgttttatagctattgtaatggcattatttttagtattagctggttgttctaattctaatgataatcaagacaacaaaaaagatgcagcagacaatgggaaaaaacaagaaattcaagttgcagcggcagcaagtttaacagatgttacaaaaaaattagcatcagaatttaaaaaagaacataaaaatgctgatattaaatttaactatggtggatcaggagcattaagaaaacaaattgaatcaggcgcacctgttgacgtatttatgtctgcaaatactaaagatgtagatgcattaaaagacaagaataaagcacatgatacatataaatatgcgaaaaatagtctagtattaattggtgataaagattcaaattacacttcagtaaaagacttaaaaggaaatgataaattagcattaggtgaagtgaaaactgtaccagcaggaaaatatgcgaaacagtatttagataacaataacttatttaaagaggtcgaaagtaaaatcgtttatgctaaagatgtaaaacaagtattaaattatgttgaaaagggtaatgcgaaacaaggttttgtatataaaactgacttatataaacaaaataaaaaaattgatactgtaaaagtaattaaagaagtagaacttaagaaaccaatcacatataaagctggtgcgacatcagatagtaaattagctaaagagtggatggaattcttaaaatcagataaagctaaagaaatattaaaagaatatcactttacagcataa

SEQ ID NO: 407703 - DNA, 282 bp, Staphylococcus aureus
ttgttatgtgcgagacaatttttatggagtacagcaaaaggctatcaacaatataaagatgacagtcagataagaaattcaacaagtgcgagtaaagtgatggtaatgaatcaagggcttgaagtgattgatttagcgatgagaatagttggtgctaaaagcttagaaatgaatcgaccattacaacgttactatcgtgacatgcgtgcaggattacacaatccacctatggaagatgcagcatacacaaatattgctaagagtattacagatacattttaa

SEQ ID NO: 407704 - DNA, 1551 bp, Staphylococcus aureus
atgtcacaaactgaagagaaaaaaggtataggacgtcgtgttcaagcatttggctcattcttaagtagtatgattatgccaaacattggggctttcatcgcttggggttttatcgcggccatttttatagataatggttggttacctaataaagatttagctactttagctggaccaatgattacgtacttaatcccattattaatcgcatttagtggtggtcgtttaatttatgatttacgtggtggtatcatcgcagcaacggcaactatgggggtcatcgttgcattacctgatacaccaatgttacttggcgctatgattatgggtccacttgttggttggttaatgaaaaagacagaccaattgatccaacctagaacaccacaaggttttgaaatgctatttaataatttttcagctggtattttaggatttatcatgacaattgcaggatttaaaattttagcaccacttatgaaatttattatgcatattttatcagtggcagttgaagcattagtacatgctcacctacttccacttgtaagtattttagtagaacctgcaaaaattgtatttttaaacaatgcgattaaccatggtgtattcacaccacttggtgcagatcaagctgcaaaagctggtcaatctattttatacacaattgaatctaaccctggaccaggtttaggaattttacttgcttatatgatttttgggaaaggtactgcaaaagcaacgtcatatggtgctggaattatccacttcttcggtggtattcatgaaatttatttcccatatgtattaatgcgtcctttattattcatcgctgttattttaggcggaatgactggtgttgcaacttatcaagcaacaggatttggatttaaaagtccagcgtcaccaggttcatttattgtttactgtttaaatgcacctagaggtgagttcttgcacatgttactcggtgtattccttgctgcacttgtatcatttgtcgtagcagctttaattatgaagttcactaaagaacctaaacaagatttagaagctgcaactgctcaaatggaaactactaaaggtaaaaaatctagtgttgcatctaagttagtatcttctgataaagatgcagaagttgaagcgaatgcaagtactgaagcaaaaacgaatgcggatgtaacatctacattagaggatgatcctgaagcattattggataattacaatactgaagatgttgatgcacacaattacaataatatagaccatgttatatttgcctgcgatgcgggtatgggttctagtgcaatgggtgcaagtatgttacgcaacaaattcaaaaaagcaggcattaatgatattactgtaacaaatactgcgattaatcaattgccaaaagatgctcaattagttatcactcagaaaaaactaactgatcgtgctattaaacaaacaccaaatgccatccatatatcagtggataatttccttaattcaccaagatatgaagaacttttaaataatctaaaaaaagatgatcaagcataa

SEQ ID NO: 407705 - DNA, 858 bp, Staphylococcus aureus
atggataacgtaaaagcaatatttttggatatggatggtacaattttacatgaaaataatcaagcatcaacgtatacgaaagatgtcattaatcgattgatagagaaaggatataaagtatttttggcgactggacgttcgcattctgaaatacatcaacttgtaccacaagattttgcggtaaatggcatcattagttcaaatggaaccattggagaagtagatggagaaattatcttcaaacatggtttatcattggctcaagtgcaacaaattattaatttagctaagcgccaacaaatttattatgaggtatttccttttgaaggtaatagagtttctttaaaagaagatgaaacatggatgcgagatatgattcgtagtcaagatcctattaatggcgtaagtcatagtgaatggtcttcaagacaagatgcgcttgctggtaagatagattgggtaactaagtttcctgaaggtgaatattcaaaaatttatctattcagttcgaatttagaaaaaataacagcatttagaaatgaattaaagcaaaatcatgtgcaactacagattagtgtttcaaattcatcaagatttaatgcggaaacaatggcttatcaaactgataaaggtacaggcattaaagaaatgattgaacattttggcatcaatcaagaagaaacgttagttattggagatagcgacaatgatagagcaatgtttgaatttggacattacacagtcgcaatgaaaaatgcacgccctgaaatccaagcattaacttcagatgtaacggcatatacgaatgaagaggatggcgcagcaaaatatttagcaaagcattttttagctgattaa

SEQ ID NO: 407706 - DNA, 939 bp, Staphylococcus aureus
atgccattatttttacaaccaattttaaaaacaaaattatggggcggtcaacgtctaagtgagtttggatatcaattagacaatgatacaactggggaatgttggtgtgtgtcagcacatccaaatggtacgagcgagattattaatggaccatatcaaggtcaaacattagaccgtatttggtcagaacatcgtgaattgtttggtgatttcccaagcaaagattttccgcttctaactaaaatagtggatgcaagagaatcactttctattcatgtgcaccctgataattcttatgcttatgagcatgaaaatgggcaatatggcaaatctgaatgttggtatattatagatgcagaagaagatgcagaaatagttatagggacattagcagagtctagagaagaagttgcgaatcatgttcaacacggaacgatagagtcgatacttagatatattaaagtaaaacctggagaattctattttattccagcaggaacagtacatactatttcttcaggaatactagcatacgaaacgatgcaatcgtcagacattacatatagactttatgatttcaatcgtcaagataatcaatataatgatagaccgttaaatattgaaaaagctttagacgttattcagtacaatgcaccattacctaatattttgcctgaaagtgaaattattgaaaaccataagtgtacacacattgtatcgaatgatttctttacattggttaaatgggaaatttctggcacgttaaattatatgaagcctagagagttctgtttagttacagtgttggaaggtgaagggcaaatgattgtcgatggtgaaattttcaaactgactactggtacaaactttattttgacttctgaagatttggatagtgtctttgaaggtgatttcacattgatgattagctatgtgtaa

SEQ ID NO: 407707 - DNA, 696 bp, Staphylococcus aureus
atgcaatctaaaatattgataattgaagatgatcacgcaatcacacatttacttgatgttgcattaactttagattattacaatgtaactacagccgaaaatgccacacaagcacactttaaaattcaaattgataaaccagatgtcattttattagatttaggtttaccagataaagatggattatgtttgatttcagaaatcaggcaacatactgacattcctatcattgtaataagtgcaagacaagaagaacaaacaattattcaagctttagataacggtgcgaatgactatatgactaagccttttaatgttgatgagcttcgggcacgaattcgagtcatcgaaagaatcgctaagtcacatcaagaaactaacattgtatttactaacggtttgttaagcatcgactttggttccaaatctgttgttattaataatcaggaggtacatttgacgccaaatgaatttagcttgttagaactattgtcaaatcacaaaggaaaagtactcacttatgagatgatattaaaacgaatatatggctatgttaataagactgaaatgcctagtttaagagtgcatatgacatcattaagacaaaaactttcacaatgtcatgaggacgcaaaagatattattaaaacacatccacgtattggttatcaaatgttgcagtggaaagagaaataa

SEQ ID NO: 407708 - DNA, 354 bp, Staphylococcus aureus
gtgcttacgaatgcggcagtcggtgatgaaacagatacgaaagaagttgtagtaaagcgtggagaatataaagagaacccacaaagtggcaaagtacagttagtctataatgaacatgttgaactgatagaggtaccaattaagccaagtgatcgtttaaaagctcgtgatatgttggggaaataccataagttatttatagataagcatgatattaacgggaatgtgcctatattcattaacattggtgaatgggacggcgatgatgaggaattagataaggcagtgaaagatgtatctaacgctaatcctaatcatactgtgattgtggatgatattccgttagaggattaa

SEQ ID NO: 407709 - DNA, 264 bp, Staphylococcus aureus
atgttaaataccattattacatctatctttttattcatattttttctaccatttttctgtatgggattttttataatcactttgatcagggacttaacaagaaacttcaataatctcaaagtggtttacactacttccacatattatgagactggtaaaacgatacttgagttgcgatactttgtttgggaacgtagaaaacgaaagtattttatagaccttgttgagcaatctgaaattatttatttaaagggaaacaaataa

SEQ ID NO: 407710 - DNA, 390 bp, Staphylococcus aureus
atggacttgttcaaagatatacgtgatgcttcaaatgaaattggagaaagtatacatgatgctacagatgctatcaaaaaagaagctgaaaaagatgccaaaatcgcaatggagaaagcacgtttatttgctttaaagcatgaattgaaaaatgaaatacaaagtatgattagcgacgaaaaagaagatatagaaaattgcgtctcgagcttagatcaaattgaatcaattttaaaagatcaaagtagtaagttagaaggcgcatttgaaggtaaaactagtgatgctattgcttttaatttagccacagagcagtctaaattaatggatctcacagagtcttacgatgattgtaaaaaaagctgtaaaacatatgacggctggttttaa

SEQ ID NO: 407711 - DNA, 1212 bp, Staphylococcus aureus
atggacaatcttcatactaaagataacacatatcacgaactagctggtaatgtttataatacaaaatcctctgataaagaaacaaaaattgaagatgctaatggcgccttacacaattttaaaattcaagcttcacgcgtcgataaagttaatggcttccaagcaatggcggtgtctccaaaagacagtaaaggaaatgtagacaatgaaactgtgtattttgtttatgctgggacagataaatatgaacctgctgatattagtactgatatatatttaggtaccaatgacattaaaattgaaactaatccaaataaaattttaaatgcagctatctacagagacactagcttaaaagaaattaacccgagtacagttggtaataataaatggctagaaatggttgataaaaataatgcaaaagaagctgatcaatttaacgaagcttatctttggactcagtcagttttgaataaagggaattataaacatgtttatggtgctggccatagtcttggaggcacaattgcacaggtgatgacggtactatttaattttgataaaacaaaaactttttcagcacctaatggttacaatatattacctgataatgttaaagaaaacttagatttaagtaagtataatcaaactataactgattatgcacacccaaatgataaaataggtattgctacattgggatcttcaattttaggaacagaaatattagctgatgactctgagctttcgaaactctttttcaatcctatttccggtcatggaattgaaacttttgaaatcagtggtggaagtgtaaaaattaaagtggacggtaaaaaagctgatcaaatggctagagagatgaaagataagttacacaatatcgataaagcgataaaagcattagaaaaatatatggaaaatactaaaaaacaagcaaaacaaatcgaatcggaatacgttaataaattgttaagcggttctcatgaatttatttccccatcagatatagaaaactacgttgaagaattatcaaaaagtggccattatgacttttttgatgaagcgttatttgaagatacaattggagaattaaaatataccaaacaaagattgtcccaatttagcgaaaaaattattgatgcaactaaaaaatttgaagaccgtgacaaagaaatcagcgaaatatatcgttggtttgaggggggataa

SEQ ID NO: 407712 - DNA, 327 bp, Staphylococcus aureus
atgaaacatgatcaaaaacaaaaatattatgatgaacaaaaagaaagaataataatttatatgaagtataatgttaaaggttataaagaaataaattttgaggagcaaaaagaaaatcctttagatggatttgttattacaggttatataaataatgacaagactaataccttttcagcgcatatgtggtctaaagacgattatcaatttgaatatctttcaacttatagtggctatatagctaaaaatatgccagaaaaccctaaatcagtgtctgaaataaaaaaagaacaatctaataaagaagataaaaagaaagatgattaa

SEQ ID NO: 407713 - DNA, 492 bp, Staphylococcus aureus
atgtatgatgagttaaaaaataaaccggaacttagaaaatcaattactcatattacattaagtattacagtactaactataattgcagttataattagattgtttacaaaaaatcctccagaatcttgggtaagcgcccttaatattgctggaacaatttcgattgtatattatatgggagtattcaattcaaaatttacatacttaaagtggcttgcgatttctaaaaaatttagttataaaatctttctagtatttatagctatcattttttttgctttcccttttgtgctattgtttgtgcacaatttatctgagtatatatttcacactgaaaatgttttagtaaattatattagtaggattttcataataataattatgaactttacattcattttaatgcacgctatgtcatttaccatgattatactattgctaatggcagttttatcaagaagaattatgaaaaaagataaatcaaatatatag

SEQ ID NO: 407714 - DNA, 618 bp, Staphylococcus aureus
atggcttggattttgggggagttatcttggtggaatcataggaacactaggtgttcttgttgtggctcatcttcagcacaaagaacaaaaaaatttttaaaacagcaattacaagctgaaaaagcagagaatgatagatttttagaaatggataaattaaggaaagagattgattttgctaatttgtatcttgaaaaatttatatcatattatgatgaatatggaaatttgtatgaaaaagctattaataaactagatagattattatttataaaagatgaaaaacattacttaatagaaaatgacttcattcaagtatctgcaaccgcttatgaactagagaaagattacaatcaattaatgaatacatataacctattaaaaactatgattactaatttagatatcagtatagaaataaaaaaattaagcaaagattatttgaagcccctagaagaatatgaatttgaagaatttaaaagaaaatatagagaaaatctacgtatagatcttaatgaaccagaaatattatttagttatcagctttacttgacagaccattataataaaattgtagaacatgtaaaactattaaatgatcaatacagatctatttga

SEQ ID NO: 407715 - DNA, 306 bp, Staphylococcus aureus
atgaattcaacaaaaaaactgaaagattttataggtagcgataaacggatggctttagtaaagggttatattaacgagtataaattaacaaatgttttaagagctttaaataatttcgattacacaaaagggacgatacacactcgttcaataggcaacctaaaacaaatagtagataatcgaattattcctaaaaatataactcaaaacacaatcttcaaattgagtaatttaaccttagaggttaacctctatgaaagagaaacacaatttatcacggagactttgctatttactatcctgtaa

SEQ ID NO: 407716 - DNA, 705 bp, Staphylococcus aureus
atgtctaaaaatatcaatcaagcaaatagtaaattaaatacgtcaaacaaaaaactaaaacaagcttattcaaaatccgatagtaaaaacttgaaagttatatacatgcctcattggctagagttttattcaattgctatacatagcgatgttacaagcaataaaaaaagatattataaatcatatagcaggggaacagtggtatatgtaaaactagggagtaatattggtagtgagttttctggtaatcatttttgtgtaatattagataacaaagacaataaaggaaaagaaacagttacaatagttccactttcttccaaaggtaataaaaattatttgaagttaaacgaatcggtgctaaatctaacagcaacagatttaaaaaaacagattatcgatatcagtagtaaagtacaagcattagcccaaaaatatagagatattgacattaaacttagcacagaagataaaaagcttttgtctaacttaaatcaaaaagctaatgaactgtatagagtgataggtgtttattctaagcacaaagggaaagatacatacgttaatatatcagcaattacaacaataagcaaaagacgtataagcaaaataaatgattctgatcctactggaacgataataatttcagaagatgacatgaatgaaatcgaaaagcaattaaagataaagttcttttccaattga

SEQ ID NO: 407717 - DNA, 408 bp, Staphylococcus aureus
atggagctatctattttttacaatgggcaattttttgtagcattagtagaatataaaatggtaaataattctaaatttatccaatacacatttgggaatgaacctgatgatttagaggtattagattttattcatcatcaattaatgaaaagtattgatgatgtgcaaactattgtttgtactaaaaatatttcaaggaaagtaaatccgaaaaggctacaaagacaaattgctaaagagcaaaagaaacctaaatactctacccaagcacaaatagctattaagaaagaattagaactaaagaaaaaacaaaaacggaagcgctataaagaaaaacgtgatgcatttcaaaaaagaaaaagagaaattaaaaaggtcaaagccaaagagaagcataaggggcattag

SEQ ID NO: 407718 - DNA, 483 bp, Staphylococcus aureus
atgattttaattagttcgtgtttgataggcgataatgtaagatacgatggtggtaatcaattgaatgttagattgaaaaaattaatagacagcggaaaagctattcacgcatgtccagaattacttggtggattattaattcctagagaacctgcagaaattattggtggcgatggttttgatgtgtggaatgacgctgcaaaggttgttactatttcgaacaaagacgtaactgacgattataaacatggagcaatagttacattaaaaattttgaaaaaatatcaatgtgatacagttattttaaaagcaaatagcccatcatgtggatcacaagagatatatgatgggaattttacaggaaataagaaaaagggtgtaggtgtggcaactgctttactcattaatgaaggtataaaagtttatgatgaaaatacgttttttgaccaaaacatgattgaaacgatagtacatgaaaagtaa

SEQ ID NO: 407719 - DNA, 681 bp, Staphylococcus aureus
atgaaatttaaagcgatagcaaaagcaagtttagcattgggaatgttagcaacaggtgtaattacgtcgaatacacaatcagtacaagcgaaaacagaagtaaaacaacaaagtgaggctgatttaaaactttattatagtggaccaagttttgaatataaaaaagtaactggatatggatttattgaaggtaaagatagattcattgattttatatacaatggacaatataataaaatatctttagttggttctgataaagataaatataatgaagaagttaacccagatatagatgtgtttgttgttagagaaggaaacggtagacaagctgataatcattcgattggtggcgtaacaaaaactaatagaggagtgtattacgactatatacacacaccaattcttgaaatcaagaaaggtaaagaagaaccacaaaatagtctgtatcaaatttataaagaagacatttcgctaaaagaacttgattatagattaagagaacgtgcaattaagcaacacggcttgtattcaaatggtcttaaacaaggtcaaattacaattacaatgaaagatggcaaatcacatacaatcgatttaagtcaaaaacttgaaaaagaacgtatgggtgattctatcgacggcagacaaatacaaaaaattctagtagaaatgaaataa

SEQ ID NO: 407720 - DNA, 702 bp, Staphylococcus aureus
atgaaaatgaaatcaattgcaaaagtaagtttagtcttgggtattttagctacaggtgtaaatactgtaacggaacaaccggtgcatgccgaaaataaacatgttcaagtaagtcaaaatagtaaaaatttaaaagcgtactatactcaaccgagtgttgaatataaaaatgtgacaggttatatcagtagtattcaacctaaaccaggcactaaatttatgaatatgatagaaggtaatacagttaataatctagctttagttggcaaagataaggaacactatcatacgggtgtacatcgcaaccttgatatattttatgttaatgaggataagagatttgaaggtgcaaagtactcgattggtggtatcacaaaagcaagcgataaagttgtcgaccaagtagcagaagcaagagtcattaaagaagatcacactggtgaatatgcatatgactttttcccatttaaaatagataaagaagcaatgacattgaaagaggttgattttaaaataagaaaacatcttattgatcattatggtctttatggggaaatgagttcaggaacagttactgtccaaatgaaatactatggcaagtatacaattgaattggataaaaagttacaagaagaccgaatgggcgatatcgtcaaagttatagatattgatagaattgaagtcaaagttaaaaaagcataa

SEQ ID NO: 407721 - DNA, 1032 bp, Staphylococcus aureus
atgaaaataagaacaattgtgaaagcgagtttagcgttagggcttgtaacaacaggtgcaagtatagtaacaacgcaatcggccaaagcagaagtagcatcagcacttaaatcagaacagttagcaatgataagcgtatcaccaagcgcaatcacaactacaacgcaagcagtgaacgcagaacaaaatcatacggctaatcctgaacaggcggcaaagtctaacacagaaaatgtatcaacatcgccttcaactaaaacagaacagacaccaaaatctaacatacaaaaagcaacccaacaaacaccaagcgtaactacaacacctccaccaaatgcacaaccgcaatcaacacaaccaacaccaaaaccaacaacaccgccttcatctagtgtagaaacgcctcaaccgcaatcgcctaccacaaaacaagcacaaaagaaaataaaccctaaatttaaaggtttaagatcatattatacgaaaccaagtttagaatttaaaaatgagttgggtattattatcaaaaaatggacaacaataagatttatgaatattgttccagattatttcatatataaaatagctttagttggaaaagatgataagaaatatggtgaaggcgtgcaccgacatgtcgatgtatttatcgttttagaacaaaataaatatggcgtagacaaatactcggtcggtggtatcacaaaagcaaatagaaagaaagttgattacaaagcaggaatcagtattactaaagaagataaaaacggtacaatctcacatgatgtttcagaatacaagattactaaagaagagatttccttgaaagaacttgattttaaattgagaaaacaacttattgaacaacataatctgtacggtaatattggttcaggaacaatcgttattaaaatgaaaaatggtgggaagtacacgtttgaattacacaaaaaattacaagaacatcgtatggcagatgttattgatggtacaaatattgatagaattgaagtgaatctaaaatcatcgtga

SEQ ID NO: 407722 - DNA, 849 bp, Staphylococcus aureus
atgaaaatgacacaaattgcgaaaaccagtttagcactatcacttttaacaacaggcgtaagtatagtaacaacgcaatcagccaaagcagaagtagcatcagcacttaaaacagaacagacgccaaaatctaacatacaaaaagcaacaacatcgccttcatcaaaagcagaagcaacacaacaaacaccaagcgtaactacaacacccccaccaaatgtacaaccgcaatcgccaaccacaaaacaagcacaaaaggaaataaaccctaaatataaggatttaagatcatattatacgaaaccgagtttagaattcgaaaagcaatttggctttatgttgaaaccatggacgacagttaggtttatgaatgttataccggattggttcatttataaaatagctttagttggaaaagatgatatgaaatataaagatggaccttacgataatattgatgtatttatcgttttagaggacaataaatatcaattaaaaaaatattctgtcgggggtatcacgaagacaaatagtaaaaaagttgatcataaagcagaattaagcattactaaaaaagatgaggaaggcaaaatctcacgcgatgtttcagaatacaagattacaaaagaagagatttccttgaaagagcttgattttaaattgagaaagcaactcattgaacaacataatctgtacggtaatattggttcaggaacaattgttattaaaatgaaaaatggtgggaagtacacgtttgaattacacaaaaaattacaagaacatcgcatggcagatgttattgatggtacaaatattgatagaattgaagtgaatctaaaatcatcgtga

SEQ ID NO: 407723 - DNA, 705 bp, Staphylococcus aureus
atgaagatgacagcaattgcgaaagccagtttagctctaagtattttagcaactggggttataacatctacggctcaaactgtagatgcgagcgaacatgaatcaaaatatgaaaatgtgacaaaagatatctttgacttaagagattactatagtggcgcaagtaaggaacttaaaaatgttactggctatcgttatagcaaaggtggcaagcactaccttatctttgataaaaatagaaagttcacaagaatacaaatttttggtaaagatatagaaaggattaaagcacgtaaaaatccaggtctcgatatatttgtagttaaagaagcggaaaatcgcaacggcacagtgtattcatatggtggtgttactaagaaaaataaaggtgcttattatgattacttaagcgcacctagattcgttattaaaaaagaagtaggtgcaggtgtttctgtacatgttaaaagatactacatttataaggaagagatttcgctgaaagaacttgattttaaattacgacagtatttaattcaagattttgatttgtataaaaagtttcctaaagctagcaagataaaagtgacaatgaaagatggcggctattatacgtttgaactcaataaaaagttacaaacaaaccgaatgagtgacgtcatagatggcagaaatattgataaaatagaagccaatattagataa

SEQ ID NO: 407724 - DNA, 696 bp, Staphylococcus aureus
atgaaattaaaaacgttagctaaagcaacattagcattaggtttattaactactggtgtcattacatcagaaggtcaagcagtaaaagcggcagaaaagcaagagagagtacaacatttatatgatattaaagacttacatcgatactactcagcaccaagttttgaatatagtaatattagcgggaaggttgaaaactacaatggttctaacgttgtacgctttaaccaaaaagatcaaaatcaccaattattcttactaggaaaagataaagataaatataaagaaggtcttcaaggtcaaaatgtctttgtggtacaagaattaattgatccaaacggcagactatctactgttggtggtgtaacgaagagcaataacaaaacttctgaaactaaaacacaattagttgttaataaagttgatggcggaaatttagatgcatcaattgactcatttttaattcaaaaagaagaaatctcattaaaagaacttgatttcaaaattagaaaacaattagttgaaaattacggattatatcaaggtacatctaaatacggtaaaatcattatcaatttgaaagacgagaaaagagaagtaattgatttaagtgataaattggaattcgagcgcatgggcgatgtgttgaatagtaaagacattagaggtatagcagtcactattaaccaaatttaa

SEQ ID NO: 407725 - DNA, 699 bp, Staphylococcus aureus
atgaaattaacagtattagctaaagcaacattagcattaggaatattaactacaggtgtgatgacagcagaaagtcaaactgttcacgcgaaagtaaagttggatgaaacacaacgccaatattatataaatatgctaaaagattactattctcaagaaagctatgaatcaacaaacattagtgttaaaagtgaagattattatgggtctaacgttttaaactttaaccaacgaaataaaaatttcaaagtatttctaattggcgacgatagaaataaatataaagaactgatgcatggccgtgatgtctttgcagtacctgaattaatagatactaaaggcggcatatataccgttggcggtataacaaagaaaaatgtgagatccgtgtttggctatgtaagtcatccaggactgcaagttaaaaaagttgatcctaaagatggcttttcgataaaagagttgttctttattcaaaaggaagaagtatcgttgaaggaacttgattttaaaataagaaaaatgttagtcgaaaaatatagattgtataaaggcgcgtcagataaaggtagaatcgttattaatatgaaagacgaaaagaagcatgaaattgatttaagtgaaaaattaagttttgatcgtatgtttgatgtaatagatagtaagcaaattaaaaatattgaagtgaatttgaattaa

SEQ ID NO: 407726 - DNA, 684 bp, Staphylococcus aureus
atgaaattgacagtattagcaaaagctacattagcattagggattttaacaacaggaactttaacaacagaggcccattcaggtcatgcaaaacaaattcataagtcagtaaacaaacatgacaaagaagcattacaccgatactacagtggaaactttaaggaaatgaaaaacattaatgctttgaaacatggtaaaaacaacttacgttttaaatatagaggtatgaagactcaagtattattgcctggagatgagtaccgtaaatatcaacagcgaagacatacgggcttagatgtgttttttgttcaagaaagaagagacaagcacgacatatcatatactgttggtggtgtaacaaagaccaataaaacatccggctttgtcagcacaccaagattaaatgttataaaagaaaatggtgaagatgcttttgtgagaggatacccttatgatattaaaaaagaagaaatatcactaaaagaattagattttaagttgagaaagcatttaattgagaaatatggcttgtataaaacgatttcaaaacatggtagtgttaaaatcaacatgaaagatggcagcttttataaccttaatctaaggtgtaaattagcgttcaaatatatgggggaagtcatagaaagcaaacaaattaaagatattgaagttaacttaaagtaa

SEQ ID NO: 407727 - DNA, 1557 bp, Staphylococcus aureus
atgtctattactgaaaaacaacgtcagcaacaagctgaattacataaaaaattatggtcgattgcgaatgatttaagaggaaacatggatgcgagtgaattccgtaattacattctaggcttgattttctatcgcttcctatctgaaaaagcggaacaagaatacgcagatgccttggcaggtgaagatatcacgtatcaagaggcatgggcagacgaagaataccgtgaagacttaaaagcagaattaattgatcaagtcggttacttcattgaaccacaagatttattcagtgcgatgattcgtgaaattgaaacacaagatttcgatatcgaacatctggcgacggcaattcgtaaagttgaaacatcaacactaggtgaagaaagtgaaaatgactttatcggactgttcagcgatatggacttaagttcaacgcgactaggtaacaatgtcaaagaacgtactgcactaatttccaaagtcatggttaatcttgacgacttaccattcgttcacagtgacatggaaattgatatgttaggtgatgcatacgaattccttatcgggcgatttgcggcgacagcgggtaaaaaagcaggcgagttctatacaccacaacaagtatctaagatactggcgaagattgtcacagacggtaaagataaattacgtcacgtgtatgacccaacatgtggttccggttcattactgttacgtgtaggtaaagagacacaagtgtatcgttatttcggacaagaacgtaacaataccacttacaacttagcgcgcatgaacatgttattacatgatgtacgttatgaaaatttcgatatccgtaatgatgacacgttggaaaatccagcctttttaggtcatacatttgatgcggttattgcgaacccaccatacagtgcgaaatggacagcagattcaaaatttgaaaatgacgaacgattcagtggttacggcaaacttgcgccaaagtctaaagcagactttgcctttattcaacacatggtacattacctagacgatgaaggtaccatggcagtcgtactcccacatggtgtattattccgtggggctgcagaaggtgtcattcgtcgttatttaattgaagaaaagaactacttagaagccgtgattggcttaccagcgaatattttctatgggacaagtattccaacatgtattttagtatttaaaaaatgtcgccaacaagacgacaacgtactatttatcgatgcatccaatgattttgaaaaaggaaaaaataaaaaccatttaaccgatgcccaagtcgaacgaattattaacacatataagtgtaaagaaacgattgataaatatagctacagcgcgacattacaagagattgccgagaacgattataacctaaacataccgagatacgttgatacattcgaagaagaagaaccgattgacttagagcaggtccagcaagatttgaaaaatatcgataaagaaatcgcacaagttgaacaagaaatcaatgcatacctaaaagaacttggggtgttgaaagatgagtaa

SEQ ID NO: 407728 - DNA, 1260 bp, Staphylococcus aureus
atgagtaatacacaaaagaaaaatgtgccagagttgagattcccagggtttgaaggcgaatgggaagagaagaaggttggcgagttattagaatttaaaaatggtttaaataaaggaaaggaatattttggctcaggatcgtcgattgttaacttcaaagatgtatttaataaccggagcataaatacaaataatctgactggaaaagttaatgtgaatagcaaagaactgaagaattattccgttgaaaagggtgatgttttttttacaaggactagtgaggtgattggtgaaataggttatccgtctgtaattttaaatgaccctgaaaatactgtgtttagtggatttgtattaagagggcggcctaaatcaggaattgatttaataaataataattttaaaagatatgtcttttttactaattcatttagaaaagaaatgattacaaaaagttctatgacaactagagctttaacatcaggtaccgcaattaataaaatgaaagtcatataccctgtttctgctaaagaacagaaaaaaataggtgacttcttcagcaaactcgatcgacaaattgaactagaagaacaaaaacttgaattacttcaacaacagaaaaaaggatatatgcagaaaatcttctcacaagaattgcgattcaaagatgagaatggaaatgattatccgaattggagaacaattgaattaaaaaatattttagaaaacattgtggataatagagggaaaacaccagataatgctcctagtgaaaaatatcctttattagaagtgaatgcattaggatattatcgtccagcatatataaaagtaagtaaatttgttagtgaaaacacttataataactggtttagagaacatttaaaagaaaatgatattcttttttctactgtaggaaatactggaatagttagtcttatggataattacaaagctgtaatagctcaaaatatcgtaggattaagggtaaataataataacctcccttcatttatttactatatgctatcgtataagggaaatcagaaaaaaataaaaagaattcaaatgggggctgtacaaccaagtgtgaaagtttctcaatttaagtttataaaatatttagtaccaataaaagatgaacaagagaaggtagctaaactgttgattgaaatagataaattagtgaataaacaattaataaaaatagaattacttcaacaacgaaaaaaagccttacttaaatcgatgtttatttaa

SEQ ID NO: 407729 - DNA, 696 bp, Staphylococcus aureus
atgaaattaaaaaatattgctaaagcaagtttagcactagggattttaacaacagggatgattacaactactgctcagccagtaaaagcagaaagtatggatagctcattaactgctatttctaatgatactcaaaaattgaaagattattatacaggaacaagttttgattataaaaatttaaaagggtatagagaaggtaatatcgcaacatttatttttaattcacagcaaatagatgtaaatttaaccgaaaatgaaaaaaataagtttgaagatggaaatggaatacaaaatgtggatgtgtttgttgtgagagaaggatctggtaggcaagcaacagattattcaattggaggaatttcaaaaaccaatggggaaaattacaaagattatgtaaatagacctcatatagaagttaaaagagaaagaggaatgtttacaacggttaaaagtgatactgatttttacataaataaagaggaaatctcattaaaagaacttgattttaaattaagaaagcacttaattgataaacatgatctttataagacagagcctaaagacagtaaaattagagttactatgaaaaatggtgatttttatacttttgaattgaataaaaagttacaaactcatcgtatgggtgatgtgattgatggtagaaaaatagagaaaattgaagtgaatttataa

SEQ ID NO: 407730 - DNA, 1491 bp, Staphylococcus aureus
atgagggaaaattttaagttacgtaaaatgaaagtcggtttagtatctgtagcaattacaatgttatatattatgacaaacggacaagcggacgcatcagaaaaagaaaataacaatcagcaagaaagtaatgaaaaagctcatacagaaaaaaataatgcacaggttaaaaacactgatgttaaaactgcaactgacaagccagctaattttgtaaatttggaagatgttaagccaggtgatacatcaattaaaggtaaaacattaccaaatcatataattttattgaatatagacagacaaagtgccgattcatttgaaggctctgatggagagcttgttatgtcagatgataaaggtaacttcaattatgatttaaaagaccgtaaaatagtccataatcaagaagttgaagtttcatcatcatctttagatgatttaggtgatgaagaggaagaggttgaagaaaaagaagaagttcaagaagaggaaacaggtgctaaatctactgtcacaacaccaaggtatgaaaaagcatataaagttccaaatcagcaattaaaacaagaaaatggacatcatcaagtattagttgaaccaattaccgcaggatctggtattattaaaggtcatacttcggtgaaaggaaaagttgctctttcaattaataataaatttattaatcttggtgatagtactgatgttgaaaatcgtttaactgaagaccaaggaaaaactaggtatcaaggtatttggaaacatatagatgataaaggttattttgaatttgatttcaaacgtaaaccatatgataacttaaaattgaatccagatgataatgtgtcattaacattcttgccaaacgatgaagaagaagctttaaagccaattatatttaaaacaaaagtaacaagttttgataatattgaatctgctataactagctataatcctaaaaatgtcaataaagtaacaactcttactaatgtaaaagaagacttagtagttgaagatatttatggctttgaatataaaagtgaacaaggaagaggaattcctcaaaataatagccatagtactaaagaaattaaaggtaaaacaaaatttgcgaatgcagttgtaaaagttgattctgaattaggtgaaggtcaagaattcccagatttacaagttaatgaaaatggggaattcacttttaattcgtttgacgctggttatagattatacaatggcgaaaagttgaactttactgttgtagatccaattactggagacttgcttagtcaaggatttgttagcaaaaatatagatgtttatgaatcgcctgagcaaaagaaagagcgagaatttgatgaaaaacttgaaagtattccggcttattatcaattacacggagacaaaataattggatttgatactgagggtggtgtatcaacttggtttgatgcacttgataagaaagaactggaaaaagttcttcgccaatactaa

SEQ ID NO: 407731 - DNA, 309 bp, Staphylococcus aureus
atgaaatttaaaaaagttttagtagctacggcaatggtaggtgtattagcaactggggttgttggatatggtaatcaagcagatgcaaaagtttattctcaaaatggactcgtactacatgatgatgcaaacttcttagaacatgaattaagctatatcgatgtgttattagataagaatgctgaccaagctacaaaagacaacttaagatcatacttcgccgataaaggactacattcaatcaaagacattatcaacaaagctaagcaagacggctttgatgtttcaaaatatgaacacgtaaaataa

SEQ ID NO: 407732 - DNA, 783 bp, Staphylococcus aureus
atgggatatttaaaaaggctttcatggtacataagtatcttaattttaatagttgttatagcaggttgtggcaaaggtaatgaaataaaagaagattcaaaagaaacacaaatcaaaaagagctttgcgaaaacattagatatgtatccaattaagaatctcgaggatttatatgataaagaaggatatcgagacggtgagtttaaaaagggcgataagggtacatggactttactcacaagtttttcaaaaagtaacaaaccgggtgaaatagatgacgaaggtatggttttattccttaatagaaatacaaagaaggcaacaggatattattacacgagcaaagttcatgatgaatttaatgaaaaagatcaacaaaaaaaatatcatgttgaattaaaaaataataagatagtacttttggataaagtagaagatccaaagctcaaaaataaaatagaaaattttaaattctttagtcagtatgctgattttagagatcttaaaaattataaaaatggaaatatatcaagtacagataatgtgccaagctacgatgcagaatataaaatgagtaatacggataaaaatgtaaaaaaacttagagaagtttatccgattacaaccaaaaagtcgccagtattaaaattacatatagatggcgatataaaaggaagttcagttggttataaaaatatagaatataatttttcaaaagtaaaagaccaagaaactgctgttagagattttttgaattttggaccatctgatggagttagctaa

SEQ ID NO: 407733 - DNA, 792 bp, Staphylococcus aureus
atggaatatctaaaaaagcttgcactgttcataagtgttattattttgagcatttttataataggttgtaatagttcaagcgatactgcagaaaaagcaaaagaagattcaaaagaagaacaaattaaaaagagctttgcgaaaacgttagatatgtatcctattaagaatctcgaggatttatacgacaaagaagggtaccgagatggcgaatttaaaaagggagacaaagggacgtgggttgttagatctgaaatgataattcaaccaaaaggtaaaagtttaacttcaagaggcatgatattatacatgaatagaaatactaggaccacaactggttatttttcaatagaagagatagattcaagaaaaagtcttgatgaaagagaaacagaaaaaaagtatcctgtgaaaatgaaaaacaataagattattccaaatgaggagataaaagatgaaaagttgaaaaaggaaattgaaaactttaagttttttgtgcaatatggcagttttaaaggaatagagaattatgaaaatggtgacatttcctacaattctgaagctcctatttattcagcgaaatataaactgaaaaatgatgattataatgttaaagaattacgaaaaagatataatattccaacagaaaaggcgcctaaattgttgttgaaaggttcgggggatttgaaaggggcttcagttggatataaggaaattgaatttatattcctagaaaacaaaaaagaaaatatatatttttcagatggattaaacttaattccaagtgactaa

SEQ ID NO: 407734 - DNA, 750 bp, Staphylococcus aureus
atgggttgcgatagatcaagcgatactacagaaaatcaaagagaagattcaaaggaagaacaaatcaaaaagagctttgagaaaacattagatatgtatccaattaagaacctagaggatttatacgacaaagaaggataccgagatggcgaatttaaaaagggtgataaagggatgtggacgatatatacagatttcgccaaaagtaataaacaaggtggattgagtaatgaaggtatggtcttatacttagatagaaatacacggactgcaaagggacattattttgttaagacattttatgaaaagaataaattcccagatagaaaaaattataatgttgaaatgaaaaataataaaatcattttattagataaagtagaagatacaaatctaaaaaagagaatagaaaactttaaatttttcggacaatatgcaaacctaaaagaattgaaaaactacagcaatggtgatgtctcaattaatgagaatgttccaagttatgacgcaaaatttaaaatgagcaataaagatgaaaatgttaagcaattaagaagtcgttataatattcctactgataaagcaccggtattaaaaatgcatattgatggtgatttgaaaggaagttctgtgggttataaaaagttggaaattgacttttcaaaaggtgaaaaaagcgaattatcagtagtcgattcattaaattttcagccggcgaaggtggatgaagatgatgaggatggtgtgtaa

SEQ ID NO: 407735 - DNA, 783 bp, Staphylococcus aureus
atgaaatctataaaaaggattggattgtgcataagtctgttgattttaatcatttttgtaacatcttgtggtggtaataagatcatgggagattcaaaagaagaacaaatcaaaaagagctttgcgaaaacgttagatatgtatccaattaagaatctcgaggatttatacgacaaagaaggatatcgagatggcgaatttaaaaaagatgataaaggtacttggctaattagatctgaaatgaaaatccaattaaaaggagaaaatctggaatctagaggggcagttttagaaattaacagaaatactagaacggctaaagggcattatattgttagagaagttgttgaagatagcgatggaatgacacacaatcatacaaaaagatatcctgtgaaaatggaaaataataaaatcattccattaaaaccaatcgatgatgaaaaagttgaaaaagaaattgaaaaatttaaattctttgtgcaatacgggaatttcaaagaattgaaaaactataaagatggtgaggtgtcatataacccagaagtaccaatttactctgcacaatatcaattgaaaaacagtgattataatgtagaacaattacgtaagcgatataatatcccgacgcaaaaagcgcccaaattattattgaaaggctcaggtaatttaaaaggctcatcagttggatataaaaatattgaatttacctttgttgaaaataagaaagaaaacatttacttcacagatagtgtctactttaatccaagcgaggataaataa

SEQ ID NO: 407736 - DNA, 822 bp, Staphylococcus aureus
atgatggagtgtataaaaaaaattgctttgtacatgagtgtattacttttaatcatttttattgggggatgtggaaatatgaaagatgaacagaaaaaagaagcacaaacaaataaaacagattcaaaagaagagcaaatcaaaaagagttttgcgaaaacgttagatatgtatccaattaagaatctcgaggatttatacgacaaagaaggatatcgagatggcgaatttgaaaaaggtgacaaagggatgtgggttctctattcatctattgtatcggaattcaaaggtgagagattaaaatcacgagggatggtattaaagttagatagaaataagagaactgctaaaggaagttatattattagagaattgaaagaagataaaaatcatgatgttcaaaaaaacgaaaaaaagtatccagttaaattggtgaataataaaataattccaactgaagatgtaaaaaacgaagatttaaaaagagaaattgaaaacttcaaattattttctcaatatggtgaatttaagagtttaaatacggataggataacaaatatttcttataatcctaatgcgcctaactattcagctgaatataaaattaatgatgatgataataatataaaacaattaaaaaatcgattcaatattaagtctaataaaaatcctaagttattgttcaaaggagcaggtaatataaaagggtcttctgttggatataaggagatacagataattttcaataggaacaaagaagaaagtgtttcttgtattgatagtatagagtttaaaccgagtgaaggagaccataatgagtaa

SEQ ID NO: 407737 - DNA, 357 bp, Staphylococcus aureus
gtggcaccttacattgcaagacttgttgaaaactcattattggaagtagacgaggggattattgaagcggcgaaagcgatgggcgcttcaccactacaaatcattagatattttttaattcctgaagcgttaggttcattagtattagcaattaccactgcgattattggacttattggaagtacggcgatggcaggcgctgttggcggtggtggtataggagacttagctttagtgtatggttatcaaagatttgatacgacggtcattattattaccgttattgtattagtcattattgtccaagtaattcaaacgctagggaatgtcctagctagattcatacgtagacattaa

SEQ ID NO: 407738 - DNA, 255 bp, Staphylococcus aureus
atgaataaccgcgaacaaattgaacagtccgttataagtgctagtgcgtataacggtaatgacacagagggattactaaaagagattgaggacgtatataagaaagcgcaagcgtttgatgaaatacttaagggtttacctaatgctatgcaagatgcactcaaagaagatattggtcttgatgaggcagtagggattatgacgggtcaagtggtctataaatatgaggaggagcaggaaaatgaagaaatttaa

SEQ ID NO: 407739 - DNA, 243 bp, Staphylococcus aureus; identical to SEQ ID NO: 407400

SEQ ID NO: 407740 - DNA, 369 bp, Staphylococcus aureus
atggcgagaaaagcaaggattgtaacaataaatgataaaccatataggtttaccaaatctgaaatggaattaatagaaagtcacggtataaccgctggaatggtttctaagagagtaaaagacggttgggaactacatgaagcaatggacgcaccagaaggtacgcgtttaagcgagtacagagaaaagaaaacaatagaaagactggaacaagctagactcgaacgcaaattggaaagaaagcgaaagaaagaggctgagctaagaagaaagaagccacatttgtttaatgtgcctcagaaacatccaagaggacgttatgcgtgctacctgatggaaaacgacatattcgtgaaagttaagaagtag

SEQ ID NO: 407741 - DNA, 405 bp, Staphylococcus aureus
atggagatagaaattaaatttaacgaaactttcgaggcacctatgggctcgcctcgaccgcgttttagcacaaaaggtagatatgcacacacatatatgcctacaaaatatacagaacataaaaaatatttacaaaatcaaatgccaaagctaaatctagaaaatgcattaaaaattgaattagagttttactttactccacctaaatcatggtcgaagaaaaagaaaactcaagcgattggacaattaaaagtaactaaaccagatatcgataatttgatgaagacagttctagacgcttgtaacaattatttgtggaaagatgacaatcaaattgcagaaataactagctcaaagcgttatggaattgagcccaaaataatcatacgaatagaagaaatataa

SEQ ID NO: 407742 - DNA, 219 bp, Staphylococcus aureus; identical to SEQ ID NO: 407417

SEQ ID NO: 407743 - DNA, 894 bp, Staphylococcus aureus
atgactggttggataagtattgatcgctcaattcaaaatcattggctatttaaagaaaagagaacattttcaaagttcgaagcatggatatatttactcatggaagcgaatcattcagaggcaaaagtgcctataggaaaccaaattgtaaccgttgaaagaggacaaagattaacatctattttgaccttgtctgatctttttaactggtcacgatttaaagtgaaaaccttccttgacttactcgagagtgatggaatgttagaagtcaaaacaacatcaaaatatacccttataaccattgtcaattatgacttttatcaaagtgagcagggcaggaaccaacatcaaaacgacatcaaaccaacatcaaaacaacatcagtcaaacatcaacccaacatcaaaacaacatcaaaccaacacaaacaataatgataataaagataataatgaaaagaatgtgaataatgagaagaagaaggtaaccgccttcgacttcttccaagataacggattcggtttcataactccttacaatttagacgatttaaattactatcttgattcatttgaaaatgattcagatgaaatagttaccgcatcacttaaaatcgctaaagacagaaacaaggttacttggggatatgctaaaagcattttgaatacttggcttaatgcaaacttgaaatctattgaacaagtacgtgcatttgaaaagcaacaacttgaaagcaaaaaacaaaattataaacctttcgttaaacaatcaaaagaaaaaacacccaaatggctcacagacagcacgagagaaacgaaaacgccggaagtagatgaaaaccttgagaaagacagagaagcttttattaagcgtctaaatagcaaatgggagtga

SEQ ID NO: 407744 - DNA, 471 bp, Staphylococcus aureus
atgataaacagaacaatattagttggtcgtttaactagagacccagaattaaggaccactcaaagtggtgtaaatgtagcatcattcacattagcagttaaccgtacatttacaaatgcacaaggcgagcgcgaggcagactttattaatatcatcgtatttaaaaaacaagcagagaacgttaataaatacctatctaaaggatcgttggcgggcgtagatggtaggttacaaacgcggaactatgaaaataaggaaggtcaacgtgtatacgttacggaagttattgctgatagtattcaatttttagaaccgaaaaactcaaatgacactcaacaagatttatatcaacaacaagtacaacaaacacgtggacaatcgcaatattcaaataacaaaccagtaaaagataatccgtttgcgaatgcaaatggtccgattgaactaaatgatgatgatttaccattctaa

SEQ ID NO: 407745 - DNA, 486 bp, Staphylococcus aureus
atgactgctggaacacaacaagctatgaattttgaaagtcatcgcttatgcacgattaaggcaaagcaagagctgcgaataggcacatggtcaattctaccgtttgacatcgaacatgatgctaacgagcctgtggctttcttattacaaagtacattaggttataaggttctgtatgttactgatacaaagtatttgaaatacaaatttaacggcattacgcacatgatgttagaagttaattatatctatgaacaaatacaggaaaacataaaaaacggcagtgtgcacagcacattagcaaatagaattatggagtctcattttagcttagaacatgctatcggaatgttaaaagcaaatgatttaactagactcgaagaaatacatttaattcatttaagtagccaaaattcaaatgcaaaatacattaaaagtgaaatacaaaaagtgacgggcgtgcccgtttatgttggaggtttataa

SEQ ID NO: 407746 - DNA, 921 bp, Staphylococcus aureus
atgactgaaaataataaattacaaactattgaacaacaattagtacaagaaaagaacgtatctgacaacgtattaaacaaagtgagagttttagagtcacaaggcaatttggaattgccaaatgattattcaccaagtaatgccatgaaacaagcatggttacaaatcagccaagataacaaattaatgagttgtaacgatacaagcaaagcaaatgccttattagacatggtaacgcaaggtttaaatccagctaaaaatcaatgctactttattccttacggcaacaaaatgcagttacaacgtagctatcacggtaatgtaatgatgttaaaacgtgatgcaggtgctcaagatgttgttgctcaagtgatttataaaggcgatacattcaagcaagaaatgggagaaacaggacgtatcaaagcgattaaacacgaacaagacttctttaacatcgacaaagaaaacattatcggtgcgtactgcacaatcgtatttaatgatggacgagataactatattgaagtcatgactattgaacaaattaaacaagcatggatgcagtcatcaatgattaaagatgaaaaagcattacaaaattctaaaacacataataatttcaaagaagaaatggctaaaaaaacagttatcaatagagctgctaaacgttatatcaacacatcaacagatagcaatcttttcaaatacgcacaagaatccgaacaacgtcaacgcaaagaagtgttggacgcagaagttgaagaaaatgcaaatcaagaacaattggactttgaacaaccagttcttgaagaagcacaatacacagaattagaaaatgataagcctattgatgtatctgactttgaagaaataaaagaacctgcaacagaaaaagaaagcgaagaagagccattttaa

SEQ ID NO: 407747 - DNA, 1944 bp, Staphylococcus aureus
atgaaaataaataagttaactatatcgaactttgctggaatcaaagaagaaaaatttaactttgacggtaaagatgcaaaaatatacggcaataatgcgactggcaagactacaacagcaaccgcattacaatggctgcttttcgataagggtttagacggttcaaccaaatcatttaaccctgtacctttaaacgaaaaaaacgaagaaaattatgagttaattccgactgttttcgcagaatttgaaatcgacggaaaaattacgacttttaaaaaagagtcacatcctaaatacacaataaatcaaaaaacgaatcgcaaggaatactcacgaagtcgaacgaagaaacaatatatcaatgatgaatcaataaaagtaaaggattataaagctcgtattgatgaactgattgatgaagatgtattcaagttaattacgaaccctcaagcatttaacttactagattggaagaaacgaagaagtttgttgtttgaaatcgctaaaccaatcaatgatgaggatgtcattaaaacaaatgatgattttaaagaactaaataatattcttggagatcacgaaattgaaacaaagaaaaagattcttacagacaagataaaacagattaacaaagatatcaaagatattccgatacgtattaaccaaacgcaacaaaataagcaggatgtaccggaattcgataatgatagacacacaatcataaaacaagaaattgagcaacttgaaaatgagcgtatagatattcaaaacggtgcagaagaaattaatttgcgtaaccaattagctgataaacaatcagaattgaagcgcatagaagctaataatagcgccagtaatgagaacaaaatacatgctttaacaaatgagctacacgttgaaaatggaacggttgcgaatcttaaaacaagattaaagcaaaacaaacaacaaattacacatgaagaaaatcgacgtaatcaattattagaaaatcataaaggattaaaaagtgatttagaaaaagctaaaaatcaaaaatttgaatatcttgatgacaatgtatgtagttgttgtggtcaacagttaccagctgaacaagtgagtgaggtaagagaaaaagcattgcagaaattcaatgcaaacaaatcgaaagaattagaaacaatacaaacatctatcaatcacattatttcagaggacaagaaaataaagccaattatcgagaaattagaggatgacaacaataatttacaaattaaaatcaacgaagcagaagagcgttcagcaagaatacaaaacaaaattaataagttgaaaacaactcacgttgacgttacgcaaactgacgaatacaaagcagtaatgttagagataaatgagattaatcaaaaacgctctaacatcaggaaaactattcaagataaagtttcaggaatagatgacaaaataagcgaacttactcaagaaaaatcagaaattgaagtgtcaatatcaatcgaaaaatcaaataaacatctagatgatgttatttctgaattaagaaatgaagaagacagattattggatgaaaaagaaaagtattcacatgacctttatatcttaaaagaatttacaacaacaaaagtcaaaatgcttactgaaaacatcaataacgaatttgatattgctgaatttaagctattcaataccttagttaacggcgaattagaagaaacatgttcaacaacggttaatggtgtcgagtatgacagcggtttaaataacgcctcaagaattaatgttggcttagatatcatcaacacactatcaaaacattttaaagttacagcgccaatatttattgataatgctgaatcagtaacagagcttatcaaaacagaatcacaacaaattcaattgatagtaaatgaacaagataaaaaattaagaatggagactatataa

SEQ ID NO: 407748 - DNA, 264 bp, Staphylococcus aureus
atgagagatacagaaagaaatatattgaatatttttaagacgttattcgacgaatatactttgtcaaaccaacgagcattattggaaattgaacgtaatcatcacggatacttatcgattaatttcttgcactatcacgacagttacaaaacaaacaataagcttgtgcagatacatgaaatcaatccagacagccatgaacgaataaaaaatttaattatcgaggtgctaagaggtcatcggaagattaaaaaaggagcatga

SEQ ID NO: 407749 - DNA, 324 bp, Staphylococcus aureus
atgccacatattttaaacgtaacagttccaatacctgaaacacacgtgcttatcacaaaagatgaatatgaagagttaatagcttactcattagaccctgtatggaacatgagcgacttaaagaagaaattaaaaattgcatctgatgaaacaatcaaagacaggttattatttcaccctagactcgaaaaagagttaagagcacaaggtatcgtacattatcctgatgagaattttaatcgttggaggtttaacgcaagaaggatgcataagtttgtagatgaacattttaatgagatttacaaaggagggcacaacaaatga

SEQ ID NO: 407750 - DNA, 753 bp, Staphylococcus aureus
atgcaagcattacaaacaaaatcgaacataggcgaaatgttcaacatacaagaaaaagaaaatggagaaatcgcaatcagcggtcgagaacttcatcaagcattagaggttaagactccatacaaaaaatggtttgaaagaatgagtgattacggatttgaagaaaatatcgattatatagtcacggacatttttgtccataacccactaggaggtcgtcagaatcaaactgaccacgcactcacactagacactgcaaaagagattgcaatgattcaacgtagtgaacctggcaaacgtgcaagacaatacttcatccaagttgaaaaagcatggaatagcccagaaatgattatgcaacgtgctttaaaaattgctaacaacacaatcaatcaattagaaacaaagattgaacgtgataaaccaaaaattgtatttgcagatgcagtagctactactaagacatcaattttagttggagagttagcaaagatcattaaacaaaacggtataaacatcgggcaacgcagattgtttgagtggttacgtcaaaacggattccttattaaacgcaagggtgtggattataacatgcctacacagtattcaatggaacgtgagttattcgaaattaaagaaacatcaatcacacattcggacggtcacacatcaattagtaagacgccaaaagtaacaggcaaaggacaacaatactttgttaataagtttttaggagaaaaacaaacatcttaa

SEQ ID NO: 407751 - DNA, 330 bp, Staphylococcus aureus
atgactgatgaagctaaatttgtccttttacaactttattcaatttaccttgatagaattgacgaaggtatgtctaaacgttctgcatcttatttcggtagtgatgaatcctcatttaacgctttctttttaggttttaattttgaagactatatcgatgcagttcttgaattaaagcatagagattttgtaattgcttctgctgaagatggcggttttcttgagatggctctttctcgagaaggtatcgcctactcagaatcagaatccaaaaaagattacaaaacacttatgggtttaattagagatttgaaaaaattaataatctaa

SEQ ID NO: 407752 - DNA, 216 bp, Staphylococcus aureus
atgaacattcaagaagcaacgaagctagcgatggagaaaggaataagtataaggagagagaatcaagatgtgtatgggatattaccaactaatttgcagcgttatcaatgcctagtcgtatctagacactataagaaaaaaagacaaaccgccgccggaaggtggcagcctagcgcagacgatttaatagcagatgattggattttagattattaa

SEQ ID NO: 407753 - DNA, 282 bp, Staphylococcus aureus
atgaaaacattaaaagagttgaggactgattacggattgactcaaaaagagttaggagatttatttaaggtctcatcacgtacaattcaaaatatggaaaaagactctacaaacattaaagatagtttactttctaagtatatgagtgcttttaatgttaaatatgatgatatttttttaggtaatgaatacgaaaatttcgtatttacgaatgataaaaagaaatcaattattttagcatttaaaaaaaacaaacatcttaataggaggaataacaaatga

SEQ ID NO: 407754 - DNA, 714 bp, Staphylococcus aureus
atgaacaaagaaagaaatattattatagccaaaaacattagaaaatttctcaacgattcaaatatgtctcaaaagaaacttgctgaactcattaacataaaaccatctactttaagcgattatttaaatttacgttccaacccctctcacggcgttatacaaaggatagctgatgttttcgaggttggtaaaagcgacatagatactacatacaaagacgataacgacatcacttccatatacaacaaactcacacctccccgccaagaaaacgtacttaactatgcaaatgaacaattggaagaacagaattctaaaggagataacgttgtagatattaattcatataaacaggagaaaactccagttaacgtcaatggttgcgtctctgctggtgtaggagaacgtttacacgatgaaacgctatttactgaaatggttaaaggacctatccccacacacgatttagcgttaaaagtaaatggtgattctatggaacctatgtttaaagatggcgaaatcatatttgtggagaaaactcacaatataaagaatggacaaattggtatattcatcattgaagaagaagcgtacgttaagaaagtctttgttgaagatgatagattgactctagtttcactaaataaagattacgacgatctacacttttatagaaatgaaagtgtgaggttaattggaaaagttattttataa

SEQ ID NO: 407755 - DNA, 933 bp, Staphylococcus aureus
atgaaaaaatatgatattgcagtcttagactttgaaactatgaatgaacatatgaacagcccttgcgaagttgctgtatctttaattaaggatttatcaatagtaaaagtttattcatcttatattaatcctcctaataatagatataacttgaaaaacgctaaaatacataaaatacctgaagatgtcatattaaaagcacctaaatatccagatatttaccaagaaattctctatcttttaaaagaatcacatttaattattgctcataatgcactttttgatatttcagtattaaaaaatactaataattattatgacttacctgttccaaacttcatgtatgtcgatagtataaatatctttagaagcttccacgcaatctctagttttaaattagaaaatttgtgtagcttatatgatatcgataaagaaaaattacattctgctaaatttgacgtgctagctttatcgaagatgttgatatcactcgctaaaaacaatcagcattatagtgtattaaaattaatacattatatgcctaagcaatacattagatttagcaaatattctaactctccaactaaacttttcgattcaggatttcaaaaaattcatatgaaaatatctgagattaataaaatagaagtggaaagtgtaatccctattttaaaagataaaaatgttgtttttacaggtaattttgacactgaaaaacaagatttaatgatattaactagaaagaaaggagcttatatcagaagtgacgtaactgcaaaaacagatattttagtcgaaggtgttcaagatgataaatataaagatgtgaacggactagtttcaaaacaacgaaaagctcgagaatatgttggaaatggtgcaaaaattcaatttttaaatgaagaagacttaataaatttaataaaggaataa

SEQ ID NO: 407756 - DNA, 342 bp, Staphylococcus aureus
atgatcaaaaaaatttttacaaaaaagcatgtattcttagttatagaagatgaaaaccataatcacagtgatgctgtttttggaaaaagtatattactttcaatttacgtcggtgtgaataaaaagactaattctaaatcagggaaatttatataccttgacagatctaaaagaatcgttagacaatctgatatcaccaaaatagaatcagctaacgaaaatgatgtagatttttataatttactgaagaaagaaaaggaaattgtttattccaaaaatatagtagataaatacaatttagcgaactatataatttactacgaagttagtactaaagaataa

SEQ ID NO: 407757 - DNA, 183 bp, Staphylococcus aureus
atgaaaataactaattgcaaaataaaaagagaaactgtaatatacgaagttttaactagtggtaatcaaccattcacttatgagttacctaaagatttatcgtcacataatgcgcgtaaatacttggaatttatttcacaaaaattagatggcgataagttaaccaaagaagattcattatga

SEQ ID NO: 407758 - DNA, 465 bp, Staphylococcus aureus
atgaaaagattgttaggtttattattagtgagcacgttagtgttaagtgcatgtggaaatgatgagaatcaggaagaatctaaaaaagaagttaaatcaaaagaaaagaaaattgagaaggaaaaggaaaataaatcgaaaaaagataaggaaaaagaagttgcaacacaacaacaaccagacaatcaaaccgttgaacaaccccaatcacaagagcaatcggttcaacaaccgcaacaacagataccacaaaatagtgttcctcagcaaaatgtccaagttcaacaaaacaaaaagcaaaaagttgatttaaataatatgcctcccactgatttttctacagagggtatgtctgagcaggctcaaaaacaaattgaagagctttcaatgcaaaaagactatcatggtctgtcacaaagagaatacaatgatagagtttctgaaattataaataatgataattga

SEQ ID NO: 407759 - DNA, 1020 bp, Staphylococcus aureus
atgattaaacaagtatgtaaaaatattacaatctgcagtttggcgctatcaacagctttaactgtgttcccagcatcttcttatgcagaaattaaatctaaaattactacagtttccgagaagaaccttgatggtgatacgaagatgtatacacgtacggctacaacgagtgatacagagaaaaaaatctcacaaagcttacaatttaattttttaactgagccaaattatgataaagagacagtatttattaaggcgaaaggtacaattggcagtggattgaaaattttaaatccaaatggttattggaatagtacattaagatggcctggttcttattcagtctcgattcaaaacgttgatgataacaacaacagtacaaatgtgactgattttgcgcctaaaaatcaagatgaatcaagagaagttaaatatacgtatggctataaaacaggtggagatttttcaattaatcgtggcggtttaactggaaatattacaaaagagaaaaattattcagagacaattagttatcaacaaccatcttaccgcacacttattgatcaacctacaacaaataaaggtgtagcttggaaagtagaagcacattctatcaataatatgggacatgatcatacgagacaactaactaatgacagtgatgatagagtgaaaagtgaaatcttttcattaactcgaaacggaaacttatgggcgaaagataatttcacgcctaaaaataaaatgcctgtaactgtgtcagaaggatttaatccagaatttttagctgtaatgtcacacgataaaaatgataaaggtaaatcaagatttatcgttcattataaacgatcaatggatgactttaaattagattggaacaaacatggtttctggggctattggtctggtgaaaaccatgtagatcaaaaagaagaaaaattatcagcattatatgaagttgattggaagacacatgatgtaaaattaattaaaacatttaatgataaagaaaagaaataa

SEQ ID NO: 407760 - DNA, 1056 bp, Staphylococcus aureus
atgaaaaataaaaagcgcgtattcattgcgtcatcattatcatgtgcacttttattgttatcagcagcaaatacagaagcgaattcagcgaataaagactcacaagaccaaactaagaaagaacatgttgataaggctcaacaaaaagaaaagcgtaatgtgaatgataaagataaaaatacaccaggacctgatgacattggtaaaaacggtaaagttacaaagcgtactgtatctgaatacgataaagagacaaatattttacaaaatttacaattcgactttatcgatgatccaacatatgacaagaatgtcttacttgtcaaaaaacaagggtcaattcattcaaatttaaagtttgaatctcatcgaaatgaaacaaacgcatcatggttaaaatacccgagtgaatatcacgttgattttcaagtacaaagaaaccctaaaactgaaattttagatcaactgccaaaaaataaaatttccactgcgaaagtagatagtacattttcttatagcttaggtggtaaattcgattcaacaaaaggtattggacgaacatcatctaatagctattctaaatctatcagttataaccaacaaaattacgacacaattgcgagcggtaaaaataataatagacacgtacattggtctgttgttgccaacgatttaaaatacgggaatgaaattaagaacagaaatgatgaattcttattctatagaaatactagattatctactgtagaaaatcctgaattaagttttgcgtcaaaatatagatatcctgcgcttgtaagaagcggatttaacccagaattcttaacttatatttctaatgaaaaaacaaatgacaaaacacgattcgaagttacatatacacgtaatcaagatattttgaaaaacaaacctggtatacattatggacaaccaattttagaacaaaataaagatggtcaaagatttattgtagtttatgaagtagattggaaaaataaaacagttaaagtcgttgaaaaatactctgatcaaaataaaccatataaagaaggataa

SEQ ID NO: 407761 - DNA, 1224 bp, Staphylococcus aureus
atgacaacttttagtgaaaaggaaaaaattcaattactcgcagatatcattgaacttcaaactgagaacaacaatgaaatagaggtttgtcattatttaaagaatttattcgacaaatatgatattaactctaaaattttaaaagttaatgaacagcgcgccaatatcgttgctgaaatcggtagtggctctcctatacttgcattgagcggtcatatggatgtcgttgatgcaggaaatcaagataactggacataccctccttttcaattaactgaaaaagatggcaaattatatggtcgaggcacaacggatatgaaaggcggtctgatggctttggtcatcacactcattgaattaaaagaacaaaatcaattgcctcaaggaaccattagattactcgctactgctggtgaagagaaagagcaagaaggcgccaaattattagcagataaaggctatttagatgatgttgatggtctaatgattgctgaaccaactggatctggaatttattatgcacataaagggtctatgtcatgtaaagtaactgcaactggtaaagctgtccatagctcagttccatttattggtgacaatgcaattgatacactgcttgaattttataatcaatttaaagaaaaatattcagagcttaaaaaaaatgatactaaacatgagttagatgttgcgcccatgttcaaatcattgataggaaaagaaatttctgaagaggatgcaaatgatgcatctggtcttacagctgtatgttcgattataaatggcggcaaacaatttaactctgtaccagatgaagcttcacttgaatttaacgtaagaccagttcctgagtatgataacgactttgtagaatcatttttccaaaatatcataaatgatgtgaatagcaataagctttcacttgaaattccaagcaatcatcgtcctgtcacaagcgataaaaatagcaaattaattactacgattaaagatgtagcttctagttatatagaacaaggtgaaatctttgtttcggcgcttgtaggtgcaacggatgcttccagcttcttaggagataataaggacaatgttgatttagccatttttggaccaggtaatccattaatggcacatcaaatcgatgaatatattgaaaaagatatgtatctgaaatatattgatattttcaaagaggcttccattcaatatttaaaggagaaataa

SEQ ID NO: 407762 - DNA, 1530 bp, Staphylococcus aureus
atgagtagtcatattcaaatttttgatacgacactaagagacggtgaacaaacaccaggagtgaattttacttttgatgaacgcttgcgtattgcattgcaattagaaaaatggggtgtagatgttattgaagctggatttcctgcttcaagtacaggtagctttaaatctgttcaagcaattgcacaaacattaacaacaacggctgtatgtggtttagctagatgtaaaaaatctgacatcgatgctgtatatgaagcaacaaaagatgcagcaaagccggtcgtgcatgtttttatagcaacatcacctattcatcttgaacataaacttaaaatgtctcaagaagacgttttagcatctattaaagaacatgtcacatacgcgaaacaattatttgacgttgttcaattttcacctgaagatgcaacgcgtactgaattaccattcttagtgaaatgtgtacaaactgccgttgacgctggagctacagttattaatattcctgatacagtcggctacagttaccatgatgaatatgcacatattttcaaaaccttaacagaatctgtaacatcttcaaatgaaattatttatagtgctcattgccatgacgatttaggaatggctgtttcaaatagtttagctgcaattgaaggcggtgcgagacgaattgaaggcactgtaaatggtattggtgaacgagcaggtaatgcagcacttgaagaagtcgcgcttgcactatacgttcgaaatgatcattatggtgctcaaactgcccttaatctcgaagaaactaaaaaaacatcggatttaatttcaagatatgcaggtattcgagtgcctagaaataaagcaattgttggccaaaatgcatttagtcatgaatcaggtattcaccaagatggcgtattaaaacatcgtgaaacatatgaaattatgacacctcaacttgttggtgtaagcacgactgaacttccattaggaaaattatctggtaaacacgccttctcagagaagttaaaagcattaggttatgacattgataaagaagcacaaatagatttatttaaacaattcaaggccattgcggacaaaaagaaatctgtttcagatagagatattcatgcgattattcaaggttctgagcatgagcatcaagcactttataaattggaaacactacaactacaatatgtctctagcggccttcaaagtgctgttgttgttgttaaagataaagagggccatatttaccaggattcaagtattggtactggttcaatcgtagcaatttacaatgcagttgatcgtattttccaaaaagaaacagaattaattgattatcgtattaattctgtcactgaaggtactgatgcccaagcagaagtacatgtaaatttattgattgaaggtaagactgtcaatggctttggtattgatcatgatattttacaagcctcatgtaaggcatacgtagaagcacatgctaaatttgcagctgaaaatgttgaaaaggtaggtaattaa

SEQ ID NO: 407763 - DNA, 417 bp, Staphylococcus aureus
ttgaaaatatttattggtacgatgttaacttttttatttgtatgctcattgattgtgtgtggattttttgcttataaaatatattttcctacagatgctgaaaataagtcagaaatcccgaatcatatgcaagaaaacaaacatgaaaaagaaaacacgcataatattaataataatggtagtgaagctaatgagaattttaataataagaagaagcgtatagaaaatattgaagataaacaaaaagcatatgctttgatgagtataccacgacataatttaccagaaagtgagaaggctatttatgacaaagtaatttcaactgccattcaaaatataaataatggggtggggaatgaagaagactttaggctcaaagaaatatacgatggtatacaaagcgtgcaacctcaataa

SEQ ID NO: 407764 - DNA, 684 bp, Staphylococcus aureus
atggaatggatattatttgataaagatggtacgttaattgaatttgatagaagttgggaaaaaataggcgtaagatttgttgaatcattactagatacatttccagtacaaaataaagaagtggcacttagacaactcggtgtcattaaagaatctattgatccaaaatcagtgatgggttcaggatctttacaacaaattatagatgcatttaatgatgtgacaggacaagatacaactgaatggtcaaagtcaacgagtcaaaaacttgtagatgaaagaattcctgaaattaattgggtagatggtgttgaggaaacgcttcaaaagttgaaatcacgaggatacaaattaggtgtcgtaaccagtgatactaaaaaaggtgtagaacaatttttgactcatacgaatgcaacatcattattcgatataattatttcgactgaagcacatgcctatgagaagcccaaccctaaagttttagccccattatttgacaatcatgatgtggctcctaatcaagtagctattgtaggtgatactgccaacgatatgaaaaccgctagcaatgcaaatttagggatggcaattggtgtattaactggcgttgcaactaaagaggaattgcacgaagccgatgtaattttaaacagtgcgaaagatattttagaagtattaaaataa

SEQ ID NO: 407765 - DNA, 1296 bp, Staphylococcus aureus
atgattgaacgttattctagagaagaaatgtctaatatttggactgatcaaaatcgctatgaagcatggttagaagtggaaattttagcatgtgaggcatggagtgaattaggacatataccgaaagctgacgtacaaaaaattcgtcagaacgcaaaggtaaatgtcgaacgtgcacaagaaattgaacaagaaacgcgccatgatgttgtagcctttactagacaagtttctgaaacgctaggtgaagaacgtaagtgggtacattatggtttaacttctactgatgttgtagatacagctttaagtttcgttattaaacaagcaaatgacattattgaaaaagatttagaaagatttatcgacgttttagctgaaaaagcaaaaaattataaatatacattgatgatgggacgtacacatggagtgcatgcagaaccaactacatttggtgtcaaaatggcattgtggtacacggaaatgcaacgtaacttacaacgtttcaaacaagtaagagaagaaattgaagtagggaaaatgagtggtgcagtaggtacttttgctaacattccccctgaaatagaaagttatgtgtgtaaacatttaggtattggcacagcgcctgtatcaacgcaaacattgcaacgtgatcgacatgcatactatattgcgacattagcattaatcgcgacgtcactagaaaaatttgccgttgaaattcgtaaccttcaaaaaaccgaaacaagagaagttgaagaagcatttgcaaaaggtcaaaaaggatcatctgcaatgcctcataaacgaaatccaattggttctgaaaatatcacaggtatttcaagagtaattcgtggttatattactacagcttatgagaatgtgccattatggcatgaaagagatatttctcattcttcagctgagcgtattatgttaccagatgttacaatagcactagattatgcattgaatcgtttcacgaatattgtggaccgtttaactgtatttgaagataatatgcgtaataatatagataaaacatttggtctgattttctcacaacgtgtcttattagcattaattaataaaggtatggttcgtgaagaagcatacgacaaagtacaaccaaaagcgatgatatcttgggaaacgaaaacacctttccgtgaattaatcgaacaagatgagtctattacaagtgttttaacaaaagaagaattggatgaatgtttcgatcctaaacatcatttgaatcaagttgacactattttcgaacgcgctggattagcataa

SEQ ID NO: 407766 - DNA, 504 bp, Staphylococcus aureus
atgaagaaattatatacatcttatggcacatatggatttttaaatcagataaaaatcaataatccatctcatcatttattccaattttcaactgctgattcatcggtgatttttgaagagactgaagaaaatactgtactgaaatcaccttcaatatatgaagttattaaagaaataggcgcattcaatgaagatcatttttattgcgcaatttttattccgtcaactgaagaccatgtttatcaacttgaaaagaaattaatcagtgttgatgacaatttcaaaaactttggtggctttaaaagttatcgattgctgagacctgttaaaggtacaacatacaaaatttactttggctttgctgatcgacaaacttatgaagactttaaaaattctgatgcttttaaagatcatttttcaaaagaagcattaagtcattactttggttcaagcggacaacattcaagttattttgaaagatatttatacccaataaaagaatag

SEQ ID NO: 407767 - DNA, 2070 bp, Staphylococcus aureus
atgaaatttaagtcattgattacaacaacattagcattaggcgttatagcatcaacaggagcaaactttaatactaacgaagcatctgccgcagctaagcaaatagataaatcatcaagttcattacaccatggatattctaaaatacagattccatatacaatcactgtgaatggtacaagccaaaacattttatcaagcttaacatttaataagaatcaacaaattagttataaagatatagagaataaagttaaatcagttttatactttaatagaggtattagtgatatcgatttaagactttctaagcaagcaaaatacacggttcattttaagaatggaacaaaaagagttgtcgatttgaaagcaggcattcacacagctgacttaatcaatacaagtgacattaaagcaattagtgttaacgtagatactaaaaagcaagtgaaagataaagaggcaaaagcaaatgttcaagtgccgtatacaatcactgtgaatggtacaagccaaaacattttatcaaacttaacatttaaaaagaatcagcaaattagttataaagatttagagaataatgtaaaatcagttttaaaatcaaacagaggtataactgatgtagatttaagactttcaaaacaagcgaaatttacagttaattttaaaaatggcacgaaaaaagttatcgatttgaaagcaggcatttatacagcgaacttaatcaatacaggcgatattaaaaatatcaatataaatgtagaaactaaaaagcaagcgaaagataaagaagcaaaagtaaataatcaagtgccatattcaattaatttaaatggtacaacaactaatattcaatctaatttagcattttcaaataaaccttggacaaattacaaaaatttaacaacaaaggtaaaatcagtattgaaatctgacagaggcgttagtgaacgtgatttgaaacacgcaaagaaagcgtattacactgtttactttaaaaatggtggtaaaagagtgatacatttaaactcgaatatttatacagctaacttagttcatgcgaaagatgttaagagaattgaagttactgtaaaaacagtttcgaaagtaaaagcggagcgttatgtaccatatacaattgcagtaaatggagcatcaaatccaactttatcagatttaaaatttacaggtgactcacgtgtaagctacagtgatatcacgaaaaaagttaaatcagtattgaaacatgatagaggtatcggtgaacgtgaattaaaatatgccaaaaaagcaacttatacagtacattttaaaaatggaacaaaaaaagtgattaatttaaactctaatattagtcaactgaatctgctttatgtcaaagatattaaaaatatagatatcgatgttaaaactggggcaaaagcgaaagcggatagctatgtaccatacacaatcgcagtaaatgggacaacaacacctattgcatcaaaactaaaactttcgaataaacaattaattggttatcaagatttaaataaaaaagttaaatcagttttaaaacatgatagaggtatcaatgatattgaattgaaatttgcgaaacaagcaaagtatactatacactttaaaaatggaaagacacaagtcgttgaccttaaatcagatatctttacaagaaatttattcagtgtcaaagatattaaaaagattgatattaatgtgaaacaacacactaaatctaataaagcgcttaataaagtgactaacaaagcgactaaagtgaagtttccagtaacgataaatggattttcaaatttagtttcaaatgaatttgcgtttttacatccacataaaataacaacaaacgacttgaatgctaaacttagactagcgttagcaagcgatcaaggtattactaaacatgatattggactttctgaacgcactgtgtataaagtgtattttaaagacgggtcatcaaaatttgttgacttaaaagctgcgaaacaagattcaaaagtatttaaagcaactgacattaaaaaagtagacattgaaattaaattttaa

SEQ ID NO: 407768 - DNA, 558 bp, Staphylococcus aureus
atgaacaagattacttatttaaatgaattagaaacagcacttgatgcgctacctagacatttaagagatcaaaaaatgtatgaatatgaacgttttttttatgagcaagaacttaatggcgttgatgaagaggaaattttaaagaagttaaaagacccacaagatgttgcagctgaaacaaaagctagaagtgttattgattatgctgaatctaaaccaacatttgaaaatatttcaagagctgttgctgcttcattaagtttaggcattctatctatttttgtcatccttataccagtatctatagttggattatttgtattagcattatttttaatatcacttttgctgctgttttgtccaattattttattagcatcagcaatatccagaggaattgtagactcaattagtaatgtattttttgccatatcatattcaggattaggattagtatttatcattgtcatatttaagattttagaatacatttatcgtttaatcttaaaatatttactttggtatattaaaactgtcaaaggaagcgttagaaaatga

SEQ ID NO: 407769 - DNA, 1380 bp, Staphylococcus aureus
atgaatatcattgagcaaaaattttatgacagtaaagcttttttcaatacacaacaaactaaagatattagttttagaaaagagcaattaaagaagttaagcaaagctattaaatcatacgagagcgatattttagaagcactatatactgatttaggaaaaaataaagtcgaagcttatgctactgaaattggcataactttgaaaagtatcaaaaatgctcgtaaagaacttaaaaactggactaaaacaaaaaatgtagacacacctttatatttatttccaacaaaaagctatatcaaaaaagaaccttatggaacagttttgatcattgcaccatttaactatccttttcaactagtgttcgaacctttaatcggtgctattgcagcaggtaatacagcaattattaaaccatctgagttgacaccaaatgttgcacgagtgattaaacgattaatcaatgaaacatttgatgcaaattacattgaagttattgagggaggaattgaagaaacgcaaacgttaattcacttaccttttgactatgtcttctttacaggaagtgaaaatgtaggcaaaatcgtttatcaagctgccagcgaaaatttagttcctgtgacattagaaatgggtggtaaatctccagtcatcgttgatgaaacagcgaatattaaagttgccagtgagcgcatttgttttgggaaattcactaatgccggccaaacatgtgttgcaccagattacattttagtacacgaatctgtaaaagatgatttaatcacagccctatcaaaaacgttgcgtgaattttatggtcaaaatatacaacaaagtccagattatggccgcattgtaaaccttaaacattatcatcgtctgacatcattacttaacagtgcacaaatgaatattgtatttggtggtcatagtgatgaggatgaacgttatatagaaccaacattgttagatcacgttacaagtgattcagcaattatgcaagaagaaatttttggtcctatcttaccgattttaacgtatcagtcattggatgaagcaatagcctttattcaccaaagaccaaaacctttgagtttatatttatttagcgaagatgaaaatgctacacaacgtgtaataaacgagttatcatttggcggcggtgctattaatgatacattgatgcacctagcgaatcctaaattaccatttggtggtgttggcgcctcaggtatgggacgctatcatggtaaatattcattcgacacttttacacatgaaaaaagctacattttcaaatctacacgattagaatcaggtgtccatttaccaccatataaaggtaaatttaaatacatcaaagctttctttaaaaattaa

SEQ ID NO: 407770 - DNA, 1167 bp, Staphylococcus aureus
atgaaaagaaactttccaaaattaatagctttaagtttaatattttctttaagtattacccctattgcaaacggtgagagcaattcaaatatcaaagcaaaagataagaagcatgtgcaagttaatgtcgaggacaagagtgttcctactgacgtacgtaatttagcgcaaaaagactatctttcttatgttacttcgcttgataaaatctataataaagagaaagcctcgtatacgcttggtgaaccttttaaaatttacaaattcaacaaaaagagtgatggtaattattattttcctgttttgaacactgaaggtaatatcgattatatagttacaatttcaccaaaagtcactaaggattctagttcatcttctaaatacacaatcaatgtttcttcatttttatctaaagtcttaaatcaatataaagatcaacaaattactattttgacaaactctaaaggttactatgtggttactcaaaatcataaagctaaactagtactaaaaacaccacgtctagaagataaaaaggtaaaagagaccgagaatatacctactggcaataatgtaacgcaactaaagcaaaaagcttctgtcactatgccaactagtcaatttaaaagtaataattatacttacaatgaacaatatgtaaataaacttgagaattttaggataagagagactcaaggtaacaatggttggtgtgcaggctattctatgtctgcattactaaatgcgacttataatactaacaaatatcatgcagaagctgtgatgagatttttacacccaaacttacaaggacaacaattccaatttactggtttaacgccaagagagatgatttattttggacaaactcagggaagaagtccacaacttcttaatagaatgactacatataatgaagttgacaatcttactaaaaataataaaggaattgctgttttaggtagtagagtagaatcaagaaatggtatgcacgcagggcatgctatggcagttgttgggaacgctaaattagacaatggacaagaggttataattatatggaatccatgggataatggttttatgactcaagatgctaaaaacaatgttattccagtatccaatggcgaccattatcaatggtattcatctatttatggttattaa

SEQ ID NO: 407771 - DNA, 537 bp, Staphylococcus aureus
atgaataacacattaacaattgatcaattacaagagttattacaaatacaaaaggagttcgacgatagaataccaacgctgaacttacgagatagcaaaatagcatatgtagttgaattctttgaatggtttaatacattggaaacgtttaagaactggaagaagaaaccaggtaagccgttagacgtacaacttgatgaattagctgacatgttggcgtttggattgagtattgcgaatcaagtaggagtgtcatcagaagagataaaagaagcgattgaatcaagttttaaagatacagaatttcacaaaatgtttaattttaaagataaagaatttgctcaagacgcagttgttagtacaccacagataatattcaaagaattttatcccgaccaacaagcaattgttatagtgatagacatagcttacaacttatattctatcgaccaactcattgacgcatacaaaaagaaaatgaaaaggaaccacgaaagacaagatggaacagcagacgcaggaaaaggatacgtgtaa

SEQ ID NO: 407772 - DNA, 246 bp, Staphylococcus aureus
gtgagcgacatgttagaaatatttttaatagggtttggcgtttatctcttttatcgcatagcaattatttttcttaagagtaaaaagactatacacacaaacatatatgaaatgttaatgcttgctactatctttatgatatctacatttgcttataaacatcaaaagacgcatatcttaatagcatttttagtaatgttttttatgagtaagctcaaacaagttcaagggagctatgaggaatga

SEQ ID NO: 407773 - DNA, 387 bp, Staphylococcus aureus
atgattaaaaaacttaaaaatatggatgggttcgacatctttattgttggaatactgtcattattcggtataaccgcattgctacttgttgtcgcattgcctatctatacagtggctagttaccaaaacaaagaagtacatcaagggacaattacagataaatataacaaaagacaagataaagaggacaaattctatattgtattagatgataaacaagtcatcgaaaactcagacttattcttcaaaggaaagtttgatagcgcagacatacaagctaggttaaaagtaggtgataaagtaaaagttaagacgattggatatagaatacactttttaaatttatatccggtcttatacgaagtaaagaaggtagataaaaaatga

SEQ ID NO: 407774 - DNA, 756 bp, Staphylococcus aureus; identical to SEQ ID NO: 407389

SEQ ID NO: 407775 - DNA, 492 bp, Staphylococcus aureus
atgctcaaaagaggtttattatttttaactgttttattgttattattctcattttcttcaattactaatgaggtaagtgcatcaagttcattcgacaaaggaaaatataaaaaaggcgatgacgcgagttattttgaaccaacaggcccgtatttgatggtaaatgtgactggagttgatggtaaaggaaatgaattgctatcccctcattatgtcgagtttcctattaaacctgggactacacttacaaaagaaaaaattgaatactatgtcgaatgggcattagatgcgacagcatataaagagtttagagtagttgaattagatccaagcgcaaagatcgaagtcacttattatgataagaataagaaaaaagaagaaacgaagtctttccctataacagaaaaaggttttgttgtcccagatttatcagagcatattaaaaaccctggattcaacttaattacaaaggttattatagaaaagaaataa

SEQ ID NO: 407776 - DNA, 450 bp, Staphylococcus aureus
atgaaaaagaaattagcaacaacagttttagcattaagttttttaacggcaggaatcagtacacaccatcattcagcgaaagcttttacttttgaaccgtttcctacaaatgaagaaatagaatcaaataagaaaatgttagagaaagaaaaagcttataaagaatcatttaaaaatagtggtcttcctacaacgctaggaaaattagatgaacgtttgagaaattatttaaagaaaggcacaaaaaattctgctcaatttgaaaaaatggttattttaactgaaaataaaggttactatacagtatatctgaatacaccacttgctgaagatagaaaaaatgttgagttactaggtaaaatgtataaaacatacttctttaaaaaaggagagtctaaatcatcttatgtaattaatggtcctggaaaaactaatgaatatgcatactaa

SEQ ID NO: 407777 - DNA, 378 bp, Staphylococcus aureus
ttgttaaataatagtagaattactattaatgaattaagtaaacaagtgaacttatctgctccagctgtaagagaaagggtaaataaacttgaagatcaaggtattataaaaggttatacaattaacatagattataaggaattaggttacgatgtagaaatattaattgagttaactataaagaataatagatacaaagattttaaagaatttatttcaaaacaagataatgttgagttttgttatcgtgtatcaggagaggcatgttttgtatttaaggttcggttggaaaatatggatgaagtagaaacatttgttgataccatacagccatatgggcagataaaatgtcagtttatcttttcatcagttgtctaa

SEQ ID NO: 407778 - DNA, 474 bp, Staphylococcus aureus
ttggaatataaatcttacaacaaaatgagtaatactattttatctatcttgttgagtgaaaaaaatttcgataataaaatggtagtctcaacaggtagttacattttgtctgagttgccatgtattgttgcctataaaaataatgatatcgtggggctactaacgtataaagtttatgatgagtacattgaaatcatttctttagatagttttgtagagaacaagggtattggtagtcatttacttaattatgctgaaataattgcctcagatatgagtaaaagaagtatcagtgttattactacaaatgaaaatattaaggcactctatttctatcaaaaaaataaatatagaatcacagaagttatttttgatgctgtaacagaagcaaggaaaataaagccgtcgattcctacaattggtaaaaatggcattgaaattagagatgaaattgtattgaaaaaatgtttataa

SEQ ID NO: 407779 - DNA, 558 bp, Staphylococcus aureus
atgataacaacgattgttttaactttatgtacttttgttagttggttattaattcctcataaaatcacacgctatatattaggaacattatttactcttgcgttgacactaacaatcattggtattacagctaatatgactaaccattggggtatggaaaagaaagtaatcacatcaaataaaaaagaaatttttactggtggtcctaaaaataatccagctaatatattaataatcaatgaaataggaaaaaatacaaataactatgtcatggtctatagaaatcatcctaaggataaaaaacctacaactcatttcaagcctaaaatggataaaaataatatatctgagtccattaagcatcaagctaaatatgaagtgaagaatactgataaagcaacacagcaaactcaaaaagaagtttgggtttggaaatcagatttatataaatcattactaagcttcgatgaaagtgaaaacgaattaattcaatcaacaactacagttaccgttccaaaagatacttgggttatcataaatgccaaaaaagacaaatag

SEQ ID NO: 407780 - DNA, 1518 bp, Staphylococcus aureus
atgtctactcaaaaaagtaatgcaatgaatttagatattcatggcaatcaatataaacccaaaattataatgagcattatattattagctacattctctggtgcattgatgcagacttcattaggtaccgctctacctactttgatgaacgattttgatatcgattttagtactgctcaacaagcaacaacttggtttttactcgcaaatggtattatggtaccactttcggcatttttagcgacgcgtatatctactagattgttacatgtatactcttacggcgccctattattcggattaattcttactgcaatcgcaccatcaaatcaagatggctggttaatatttctagctggacgtattgttacagcaattgctgttggtttaatgatgccattgttacaaatcatcattatttatatgtttccaataaaacaacgtggtactgcaatgggtctgagtggtttagcagtaggtctcgcacctgcaatgggtccaacttttgctggttggatattaaacaaaaaccacgtggtactaggtattacaatttcagactcatggcgtaatatttttgttcttccaatcattattatagcgatagcatttatattaagcttcttcttcatgaaagatgttatacctaatcgtaaacttaaattagatctctattctctaatactttcttgtatcggtttcggattatttttatggggattttcaaacgttgcaagcgaaggatggggaaatataaattacgttattttaccaatttttttaagtatctttattctcactttgttcgttatcaaacaattaaaatctaaagatcctttcttggatttacgcgtttttaaatctaaaggtttcatgatagcgacaattggtttaatcgttgtaactatggcaatgtatggtgttgaaatgatgttacccacttacttacagaatatacacggtttctcaccatttgaatctggtttaacacttttagctggagcgctgatgttaggatttatctctccaatttcaggaatactgtacaataaaattggcattaaaagattagcgttcgttggtttcactattttgactttagcttcagttccatttggatttttaacagttaacacatcaccaacacttattcttgttctatatgcagtaagaatgtttggtgtggcaattttaatgatgccactcacaacaaatgcgatggatgctttaccagttgaaaaaggtacacatgctacagcagtaaataatactgctagacaagtagcatcatctatagcagtagcattactgacatctgttactcaaaatattattaacaaccatatgcctgcagatagtttaaaagaaagcaatccactcaaatatgcacaccttgctcaacaagcatcaatcgatggctttaatactgcatttataattggcattttctttgcaattataggtatcattttagttccatttttaaaaatgaatattattgaaagtgaggataaataa

SEQ ID NO: 407781 - DNA, 573 bp, Staphylococcus aureus
atgggttataaaaggaaaacggtcttaactcagcgtaatataaaaaatgctttagtgagtttattagagaacaataagtttgatttcattacaatcaatcaaatagtagaagaagcggaaataacaagaagtactttttacaggtattatgatgataaatatgaattaatatcagaaatagaagaagaaattttagaacatattcataaagaaaggcaaaagatagacgagaacgcttcagagaagaatttattagatattgagatgtttaaatatctgtttgaaacattagagccatattcgaacacgatatatcgattgttaggatataatggtgattccagttttgagatgaaactcaagaatgaaatatcaagaagatttatagatatagaacaacgtaatcatatttctcaagtacgagcagacttagtaaaggaatatgtatttgttattatgataaaaacattacaatattggtcagctcataaagacgaagtagatattgatgaaatagctttaacaattagggatatccagttaaaaggattaagaaaagcaatagggttataa

SEQ ID NO: 407782 - DNA, 987 bp, Staphylococcus aureus
atgaaggaaaatttttggagtgaattaccacgtccattttttattttggcgccaatggaagacgttacagatatcgtctttcgacacgttgtaagtgaagcagctagaccggatgtgtttttcactgaatttacaaataccgagagcttttgtcaccctgaaggcatacatagtgtgcgcggacgcttaacttttagcgaagatgaacagccgatggtcgctcatatatggggagataagccagaacagttccgtgaaacgagtattcaactagctaaaatgggctttaaaggcattgacttaaatatgggatgtcctgtagcaaatgttgctaaaaagggtaagggttccggcttaatcttaagacctgacgtcgctgccgaaattattcaagcaactaaagcaggcgggcttccggtaagtgttaaaacacgccttggctactatgaaatcgatgaatggaaagattggttgaagcatgtcttcgaacaagacattgcaaatttatctattcatcttcgtacacgtaaagaaatgagtaaagtagatgcacattgggaattaatcgaagctattaaaaatttacgtgacgaaattgcaccaaacacattgttaacaattaacggtgatattcccgatagaaaaacaggacttgaacttgcagaaaaatatggcattgatggcgtcatgattggtagaggcattttccataatccattcgcttttgaaaaagaaccacgcgaacatacaagcaaagaactattagatctgttgagattgcatttatcattatttaacaaatatgaaaaagatgaaataagacaattcaagagcttgcgtagattctttaaaatctatgtgcgtggcataagaggcgctagcgaacttcgccatcaattgatgaacacacaatcaattgcagaagcaagagcactactagatgaatttgaagcccaaatggacgaagacgttaaaatagaattatag

SEQ ID NO: 407783 - DNA, 204 bp, Staphylococcus aureus
atggaagatttaaaggaatctttaaaaggtttaagttggtatgacttattttttacagtacctatgtttctactattcgtgtatctaccgaattataattttataactatatttcttaacattgttatcattattttcttttccataggtttgattttaactacgcatataattatagataaaattaagagcaactcgaaatga

SEQ ID NO: 407784 - DNA, 297 bp, Staphylococcus aureus
atggctactgaaaaagatataaatgatttgtttttaaatcatgtgaattcaaacgcggttaagacaagaaagatgatgggagaatatattgtttattatgatggtgtggttataggtggtttgtatgataatagattattggtcaaggcgactaaaagtgcacgtcatcaatttcaagataatacattagtatcgccgtatccaggtgctaaagaaatgatattaattccagactttgtcaaagtaataaatattactaatttatttgagtgcataaaaaatgatttgaaaaagtga

SEQ ID NO: 407785 - DNA, 1227 bp, Staphylococcus aureus
atgcaagataaaatattcgcatttgttgaacctagtttttatggtgttaaatatgttgagtatacaaaaagattaggttacaaaattcttgtaatagtaaatgacagcacaaatccaatcacatatggatattcaaatgactacgactacctaataacatgtgacatccggaataaagaggatatatataatgctattaaatcttttaaatattccgataaaattattggattgttgccagcaactgattatgctacaccaaacgcttgttgggtagcaaataaattaggattaaaatctatgggctatcaatctgcaatcgctgctagaaataaaaatattgctagagatttatttctaaaatttaatgttccaagtccaaaatataaagctatccgatcttatgaagaagctaaggaatttgctgatttaataggatatccattagtattaaagccaacaaatactgcaagtagccaattcgtttcgctaattcataatcaatctcaacttaaatcatccttagaagaattattaaatttcaaagaatcttatatggggtttaaggtcaacgacattttcttaatcgaagaatttatgcgtggccaggaatatagcattgaattatttttaaattctggaaaaacagagttcttggaagtcacaaaaaaattaaaatcaaagccaccatattttgtagaattaggccatattatacccgcacctattgataataaaagtgaatttgcaaaaattgctgaaaatggagcaaaagctttaggcatagagaatggcccccttcatatagaagtaatagacactattgatggattaaaaatcgttgaaattaatggtagacctggtggagacgaaataacatcacaactaatcccactatcttttggagttaatatattccaaaatacaattttcaattatttaggggaaaacttgaaatttgaaaaaagccgtcaaaaatatagtatgatttattattttacagcccataaaaatggcaaattaaaaaaaatacatggtttagaaaaaattaagcaactagaatttgttaatacggtaaggttaaatgttagtcttggtgattcagtcagaatacctgaaaactctgatgataggttaggttacattaccttttattccgattcctataattctttaattaaaaataaaaaagcgatagaagaaactctcaaaattgaaatactatga

SEQ ID NO: 407786 - DNA, 906 bp, Staphylococcus aureus
atgctatcatctagagacgcatataagcatgaattaaccaaactggcatataaatacgaagatatcattgcagttgaagcagatttaggcggtaaaaaacatatatttaaacaacatcacccttcacgcttttttaatttcggcatcgccgaaatggcttccattgatatatgcagcggcttagctcaaaaaggattcaaaccatacttttcaacctttgctccatttgtagcattacgatgtgcagaatcattaaaattatctcttagctacatggaacataatataaaaattattgcttgttatggtggtgtttctggcggttggtttggaactacacatcattgtctagaagatatgtcaattgtggcaactcttccaaatataacaatcgcatgccctcatggtgaagaagaagtccgaagcgtcatcagaaaatcttattttgaagataaaccatattatataaggctatatagaaatgatacttttgaaagtataaaaaatccttataacaaaccttttgtaatagatggagaatttgataaaaacaacaaaatgacattaatatctattggagaaatttctacagaaatttgtaaagaaataaatgataaatcaaataaaattaatcatatacatttgatttatgtagataaagattcgctaaaaacttatataaatgaattgtcttctttacttaaaggacacaaaatcattacagttgaagaacatagacaaacaggttctatatcgaacttactagcatctttaattgacaatacagtgatcccattcacacctaatgatgaatatccacaccatggcggttcacatgctgaagtactaaatcaattgggatttagtaaagaaaagttattaacattacttaaagaggtggaataa

SEQ ID NO: 407787 - DNA, 777 bp, Staphylococcus aureus
atgcacttcataaaaagtttagaacttgatgctagagaattaagaaaagagctaattgacattgcaaattcagaatatggttgccacttgggtggttctttatcagttttagatttattatacgcttcatatataaatttcgaaaatagcgaaataatacttagcaaaggtcatacatgcgcagcattatacgctattctctataaattaaataaattaaaagaaaaaccttcattaagttatggaaagttcaactcgcttttaactggtcaccctaatcatctaataccaaacataaccttctcaactggcagcttaggtcacggtttaccatatggcataggggtgtctttgtctaataaattaaagcagaaagagtcaggagaaaatacaataattataggtggtgatggtgagttacaagaaggtttaatatgggaaactttgcaagtagccagtggtcaaaacattgccaactttatttatataatcgataaaaacaatggtcaaaatgatggagcaacttcaagtatctctccttatcataacttaaaaagtcgtttttcttcgtatggttttgatgttctagaaattaatggacatgattataaagagatattagaatcattttcaaaaaaaagagcaaatcacgctctagtaattattgcaaataccattaaaggtaagggaataccttctctagaaaataatttttcatctcattacgtaaaaatcaatgaggctactgcccaaaaatggaaggaggagttaatttaa

SEQ ID NO: 407788 - DNA, 1842 bp, Staphylococcus aureus
atggaaaatagcatatatgtaattaaagttggtagtgattcagtatatcaaaaggatagtcctattttatcagaaattaaagatctattagataagaataaaaaggttattttagtgtctggcggagcaagaagtattaaagattattattatgagaacagtattgaagagaaatttgttacattatataaaaatggtgactctgttagattttcaaactctgaagacatatataatatcaaaaacgcttatttaaatggtgttttaaaaattttaaaaacagaattttcggaatataaaatttattgtcataccggggattttaataatctaatttcaggagaagtaggcaaaccattgaagataaatcagaatggcaaaccacaaatcttgagaggatcacattacggtaccataaaaagtattagtgaaaaaaacgtaaggaatttgctggcaataaatgacttaattattttatctcctcctgtttatgaagaaagtttaaaatcaatcattaatgttgatgctgacatgttagcatctcatttagccgtttctttaaaagctgctcatctgagatttgttacttcttctccaggtatattaaaaaatattaatgattctgaatcgttaataaaagatatttacttagacagcgacttaacttccgtaaaagggcgtatgaaacaaaaagtaagagctgcaaatttcgctttaaaaaacggatattgcgatattcaaatctgtggatataacagtttatataaatcccattcaaccttctggagaatgaatagttatactaaaaatattgatttaaaaaaagtaataaacataccatccgtatcaacagatgaagaagtattatctatatatttattagaaaaatacaaaagtgtatttgacaagtcatatattgataatgctggtaatatcgtatttgaaaaagggaatggttcaaacaccgtattattattagggcatattgatactgttccatattattggactcctaaaaacactgagaataatatttttgcaagaggcagtgtcgatgcaaaatctagttatttcaactttgttcaagctgcgataaacatatcagtacctaaaaactgcaaattactagttattggcgctactgaggaagaagtatcttcttcaaaaggagctttttttgtgagagataactatgctgcaaatcatgtcataattggagaaccaagtggatataatgctcttacattaggatactttggacttactaaattaaaactaactatttcaaaaaaaagagaacattctgcagcaaaagatagtgtcggtatcattgaaatgctactcgattatatagaacagttaaaggcctttataatggatttagattcacaaagcttatcaacgatattagatataaaaaaatacaaggataatgaaaaagattttgctacttgtacaataaactttagaacaagtattaaatcaccagaaaatctaatggaacaaatttttaattttaataaagaatttaaaaatactaaaatcaatattttaagaagtactaaaggatatactagcaaaagaacaaacgatattgtaaaatcattcaacttcgcttttaaaacaaatgaaatctctcaatataagtttttaaataaaaaaggtacaagtgacatgaatactctagctacgacttggaatgttccaatggttgcttatggccctggagattcatctttagatcatactgaaaacgaacaaattgaattatctgaatttgataaaagtaataaagttcttgtatcttcattgcaaaacttattttcaaggataggagattaa

SEQ ID NO: 407789 - DNA, 789 bp, Staphylococcus aureus
ttgcctaattatataaataaattacttaataaatcagaagttatatttaatgttagtggtgactacagacttaatgataaaactctctcaaatcgttactatccagcaacggaatgggaaaacctaaattcaaaggtacagtattatatacctgaatttactaaaattgatagagataaaaaaatcattaatttaggaggttgtatggcagtatcttcaatttattctctttatcctcttatcaaacataacttaatagaaaacaataatattattttagatgttaaaacaggctccagtggaggtggaaaaaccacaaaagaatctcatgcagaacgctttaataactttagaattcataaagcttttgaacacaaacatcaacctgaaatagtaatgtttttaaatacaatttcacaaaatactaataatgttaatttttctgcatttagtttagatatacctagaggaatatatgttagttcatatactaatcttaaacaagatgttacagaaatagatgtaaagaaagcatactttcaaacttataaagaatcagtatttatagattatatatctaacataaacaaaattaatctaaaacaaactttgggaacaaaccaagtatatacaagtttcaaacttaataaaaatttatgtctttctgtatcgatgttagacaacttagttaaaggtgcagccggtcaagctattcaagctgctaataattacttcaatattccagaaagtgaaggtttatctgttcagaaaggagctatgtggccctaa

SEQ ID NO: 407790 - DNA, 189 bp, Staphylococcus aureus
atgataaaacaaagagaggtagcaatattaggtggtacaggatttgtaggaatggaattgttcagacttttacaaaaccatccattctttagggttacatttatttcttccgaaagtatgagtggtaaatcaattattaaccaacacacgttggacagaaaaatgaaatatcaaagtatagtagtttaa

SEQ ID NO: 407791 - DNA, 1083 bp, Staphylococcus aureus
ttgtctactgcaagtggaacttccagtttacatctagcactcatatcagttggtgtaaatcccggagatgaggttatagtcccagcatttacatttattgcaactgcacaagccattgtagcagctaaggctatacccatcttcgtagacgtaaatcctcgaacattttgtatagatactgaaaaaattgaagaaaagattacacctaaaacttctgtaattatgcctgttcatgtacatggtttacctgcagatttattagaaatacaaaaaatatgtgataaatatcaattaaaattagttgaagatgcctctcatgcacattctgctaaagtaggtaataaaatgtgtggatctattggcgatgcggctggacaaagcttaatggcagacaaaaatttccctgttggcggtgaaggcaggattgttttctttaaaaaagaagaatattttagacgtgctaaagattttttagaaactacacaaatcgattaccaaatgtcttggattgcagcagctttcggtattagtcaattagatagattgggttattatgataaaatacgacaacgtaatgcaaatattctaatagatgaacttaaaaaaactagacttttttcaccaccatttatcccaattaattcaactcacagcttcaacatgtttagatttcatatcaatgtaaatttagaagaatttaacggcattgaaaattttaaaattaaagaagctattcaaactttattaaatgaagaaggtatatttgctagagaatggcaaaatagagtattacctcatcatttaccatttattaataaaattggatttgggaataattacccctttaccttaaacactaacaacaacatcgattatttaaatcaaaaatttcctattgccgaaaatatgataaatactactttagtattatgccgtgaactgagatctcctattgaatatgaaaagctacttcattatgttcaagcttttaaaaaaatagatagtaatattaataaagtagtcgagttaagtaataaaataaatgtaaaaaaaccatttgaaaaggatgctagattaggatga

SEQ ID NO: 407792 - DNA, 273 bp, Staphylococcus aureus
atgaagactgatttttctcaatatgttttatatccaccaaaacatgatttgcacactgaaaatttggcatattatggtgggtctccaatattacctaaggaagctagaaaaacaactttccccaatactactaaagaagatattattcaaatgataaaaagcgtttctcagacaccttcaagtataatcgatgaatttgaaaaaaatacaaaaaatatgttggagctgaatatgcattgtctactgcaagtggaacttccagtttacatctag

SEQ ID NO: 407793 - DNA, 612 bp, Staphylococcus aureus
atgacaaatctgaagaacgattactataatctatcgtttattttatcaagagttctaaatacagggacaataatgagcatagaaaagaatgaaaaagaactccctggcttagaaaataaagtaaaaaaattaactaaaaagaaatacgcctctactttcaactcctatacaggtgcattacacgcagcagctatatcatattcatctggatttggagatgctttaaatatagctaacacaactgataaagaaactaaatttttaaaatggcttgggataaaaatatctaatactccagaatatctagaaagactccatttaaattttgaaaatttgaatgatataatctcgcctaaaatacaagattatgaaacgtttatattagattttactggtttgggttttggaccagccgcggttattattacagataataaaatcgtatatgagaaagctgaaaaactcaaaatttttggttcttatgacttaagaactatgtggacacaagaaagagatgcatcatcaattgaacccgcgatacaatttaactatagattgagcccattagtagctgcttgtttgaaattaagtctaattaaaggagtgaattaa

SEQ ID NO: 407794 - DNA, 873 bp, Staphylococcus aureus
ttgctaaaaattattttgtcagtaacttttgttagagaagaagaaaaacaaatagtaaatagccttaaagaatatgatgttgaagtagtgataatgacagaaaaaaacaatcataaattatcctatttgcaagagtttaatttagcaataattcgtaatttatctcaagatatgtgtttacaaagagcaaagttatttgaatctttaggtatcaaatgtattaatacatttgataccatcaaaatttgtactgacaaactaatacaatctaatattttttctaatcataatttacctacacctgaatttgaggctatttttccagaaacaacttttccagatctatataataaattcaaaaccccatttgtaattaaacccgttaattcctcatggggtagaggtattgttaaaattgacagtcataatgattttattttgtggaaagaagtatcaacttctttagatctcaaaaatcaaaattatccataccttgctcaagaatatattataaaagaaaactatgatattagagcattagtcattaataataaaatagtgggtttatttaaaagagttagtaataacaattggaaaaccaatactcatttaggagcggaaataaagcctatagaaattacagaagaaattagtgatattattaacaaaatttcgattatattgccaaatgcaattttaggtgtagatttgcttttcgatgtttcaagacagaaatatattatttgtgaagttaataacaatcctgaatttgcaaaaagcagtaaaatatacaaaaaaaatattggtgaaataatatcagaattcgtaacaaaggagcccaaaaatgacaaatctgaagaacgattactataa

SEQ ID NO: 407795 - DNA, 171 bp, Staphylococcus aureus
gtggaattaaaatgcttaacatgtaactcagaaatcaacttaggcgaaggtttaattgagggggaaattgtagaatgtgattcttgcggacaagaacatgaacttgtaaaagatggtaatttcttcaaactagaatttgctcctgaaatcgaagaagactggggagaataa

SEQ ID NO: 407796 - DNA, 807 bp, Staphylococcus aureus
atgaatgagttattgaaaaaaataagagaagatcgttgtaaaaccaaaaaagagataagtgaagggataattagtcaaaagacatatagcaatattgaaaaaggtataacgtcactagatttaaatgatttgacaaaaatacttaaaaatttagatgtaacttttgaagaatttgcttatcaacataaagaaatgtatgaagattatttcagtaaatatattcatatgataaggaagactgtatactcttgtaatgataaatcaataaacgattctatagacacaatcttaaaggatagtaacttaaatataagaaagaaaaagattttgactagcacattaaactgtatatttaatattagtaaaggggaattaaaaagtgcgagagtacatgctaatattgtatggtcatatttaaaagaatttgatactttatatgcttatgatttgtttcttttgactcatatttttataattttcactgatgaatcgttaaatcatgttatttctagaataaaaaaagatattcgtaaatggagagattttaaaaactttcaaatagttgaaatgtctttttatttgaattatggaaagtatttagaattacaaggacagaaaatcgaagcggttaatgcatataatgaaggacttaaactttcaaagattaataacaatgcactatatgcgtcggtatgcatggtaaggttagggcgtctcactcaaaatcaaaaattagtagagcaaggtatttatatactgaaaatctttaatcctaatttatgcaaagaggtattaaaagaagagtga

SEQ ID NO: 407797 - DNA, 516 bp, Staphylococcus aureus
ttgaaaaataaattgctagttttatcattgggagcattatgtgtatcacaaatttgggaaagcaatcgtgcgagtgcagtggtttctggggagaagaatccatatgtatctgaatcgttgaaactgactgggagtaaaagtacaggtgttacaccagcaatgtataaagaaaatttagaatctttaatatcatctttatcatttgcagattatgaaaaatatgaggaaccagaatacaaagaagcagttaaaaagtatcaacaaaaatttatggctgaagatgatgcattaaaaaaattttttagtgaagagaaaaaaataaaaaatagaaatactaatactaatacatcaaattatctgggattaacacacgaaagatatgagtcaatttataattcattaaaaaatcatcgtgaagaattttcaaaagaaatcgaagaaattaataataaaaatccagagttaaaagaatataactggtatgtcaacaattttttagacagttttcatgtgtag

SEQ ID NO: 407798 - DNA, 2772 bp, Staphylococcus aureus
atgaatatgaagaaacaagaaaaacacgcaattcgtaaaaaatcgattggcgtggcttcagtgcttgtaggtacgttaatcggttttggactactcagcagtaaagaagcagatgcaagtgaaaatagtgttacgcaaacggaaaatacgagtaatgagagcaaaagtaatgattcgagtagcgttaatgctgcacctaaaacagacaacacaaacgtgagtgattctaatacaacgacaaacactaatagtgacgaaacgaatgtagcgcaaaatccagcacaacaggaaacgacacaatcagcatcaacaaatgcaactacagaagaaacaccggtaactggtgaagttactactacggcaacgaatcaagctaatacaccggcaacaactcaatcaagcaatacaaatgcggaaaaatcagtgaatcaaacaagtaatgaaacgacttctaatgatactaatacagtatcatctgtaaattcacctcaaaattctacaaatgcggaaaatgtttcaacaacgcaagatacttcaactgaagcaaaaccttcaaacaatgaatcagctccacagagtacagatgcaagtaataaagatgtagttaatcaagcggttaatacaagtgcgcctagaatgagagcatttagtttagcggctgtagctgcagatgcaccggctgctggcacagatattacgaatcagttgacgaatgtgacagttggtattgactctggagatacagtttatccgcaccaagcaggctatgtcaaactgaattatgggttctcagtacccaattctgcggttcaaggtgacacatttaaaataactgtacctaaagaattaaacttaaatggtgtaacctcaactgctaaagtgccaccaattatggccggagatcaagtattggcaaatggtgtaatcgatagtgatggtaatgttatttatacatttacagactatgtaaatactaaagatgatgttaaagcaacattaactgtgccggcttatattgaccctgaatatgttacacatactggtaatgtgacattggctactggcataggaaatacaacagcaaacaaaacagtattagtagattatgaaaaatatggtaagttttataacttatctattaaaggtacaattgaccaaatcgataaaacaaataatacgtatcgtcagacaatttatgtcaatccaagtggagataacgttattgcaccggttttaacaggtaatttaaaaccaaatacggaaagtaatgcattaatagatcagcaaaatacaagtattaaagtatataaagtagataatgcagctgatttatctgaaagttactttgtgaatccagaaaactttgaggatgtcactaatagtgtaaatattacattcccaaatccaaatcaatataaagtagagtttaatacgcctgatgatcaaataacaacaccatatattgtagttgttaatgggcatattgatcctaatagtaaaggtgatttagctttacgttcaactttatatggatataattcgaatataatttggagatctatgtcatgggacaacgaagtagcatttaataacggatcaggttctggtgacggtatcgataaacctgttgttcctgaacaacctgatgagcctggtgaaattgaaccaattccagaggattcagattctgacccaggttcagatagtggttcagattctggcagcgattctaattcagatagcggttcagattcgggtagtgattctacatcagatagtgattcagattcagcgagtgattcagattcaacgagtgattcagattcagcgagtgattcagattcagcaagcgattcagattcagatagtgactcagactcaaacagcgattcagattcagatagtgactcagactcagatagcgattcagattcagacagtgactcagactcagatagcgattcagattccgacagtgactcggattcagatagcgattccgactcagacagtgactcagattcagatagcgattcagattcagacagcgactcagactcagacagtgactcagattcagacagtgattcagactcagacagcgactcagactcagatagcgattccgattcagcgagcgattcagattcagcaagtgattcagactcagatagcgactcagattccgatagcgattccgactcagacagcgattcagatttagcaagcgattcagattcagcgagtgattccgattcagatagcgattccgactcagacagtgactcggattcagatagcgattcagattcagacagcgactcagactcagacagtgactcagataatgactcagactcagacagcgattcggattcagcgagtgattccgactcaggtagtgactccgattcatcaagtgattccgactcagacagtgactcagactcagcgagtgattccgattctgattcaacgagtgacacaggatcagacaacgactcagattcatcaagtgattccgactcagacagtgattccgactcagacagcgactccgagtcaggttctaacaataatgtagttccgcctaattcacctaaaaatggtactaatgcttctaataaaaatgaggctaaagatagtaaagaaccattaccagatacaggttctgaagatgaagcgaatacgtcactaatttggggattccttgcatcattaggttcattactacttttcagaagaaaaaaagaaaataaagataagaattaa

SEQ ID NO: 407799 - DNA, 567 bp, Staphylococcus aureus
atggatataaaaattaaaggcgatactattgttagtgacaaatttgaagctaaaataaaagaaccgtttatcatcaatgaaaaagatgagaaaaagaaatatatcgcttttaaaatggaaattactgctaaaaaagacgataaagatttaaatccatcttctatttctcatgactatattaatatcactcaagatgataaaaatacagtaaataaattaagagatggttatcttttaagtgataaaaaatataaagattggacagaacataaccaagatcaaattaaaaaaggcaaaactgcacaagccatgtttatctatgagataagaggtgatggaaacattaatttaaatgtccataaatactcagaagataaaacagttgattctaaatcatttaaatttagtaaacttaaaaccgaagatttttctcatagagcggaaacaagagaagaagtagaaaagaaagaaaaagaatttgaagaagagtacaaaaaagaacaagaacgagagaaagaaaaagaaaagcaaaaagatgacgaccacagtggtttagatgaagtataa

SEQ ID NO: 407800 - DNA, 615 bp, Staphylococcus aureus
atgaatgacttgagtttatcttcatttttgaaacgcagtaacaaatttatgcaattcaattgttttatttgtttgattctaataatagtattttacataattggtatgaatatacaggactttagtgattttcctagtaaagatttaaatcataaagtgacttataattttaatgggtttttggagatatttgttaataatgcttttatagttcctttggtgtcacttatattatcgataataccaataccatatttgtattttattcctacaatttctacaatttattcattgtcggttattattggggttacattttcatataaatttaacgaagggatagctatttttattggtattttgcctcatggtattttagaaatatacttaacaagcattgaactatcaatgttattcttattaaatgcgtatattagaaaaaattcaatgaatttatttagaaaaagaaaagagacattgccaaaattttttgttttattaaaatcaatagtaaagtgttacctgctaatatttttacctgtggcatttttatgcgctttaattgaaattactgttacaccaactgtttacaaatttttaactaatataatatag

SEQ ID NO: 407801 - DNA, 723 bp, Staphylococcus aureus
atgaaaaaaagattattatttgtaattgttattactttatttattttttcttctaatcatacagtcttatctaacggcgatgtaggtacaggaaacctaagaaatttttatactaaatatgaatatgtgaatttaaagaatgttaaagacaaaaattcaccagaatcacaccgcttagaatactcgtataaaaatgatacattgtatgctgaatttgacaatgaatatataactagtgatctaaagggaaaaaatgtcgatgtttttggtataagctataaatatggttctaactctcgtactatatatggtggtgttactaaagcagaaaacaataaattagattcgccaagaataatacctataaatttaattatcaatggcaagcatcaaacagttacaactaaaagtgtttctacagataaaaaaatggttaccgcacaagaaatagatgtcaaactaagaaaatacttgcaagatgaatttaatatttatggacacaatgatactggtaaaggtaaagaatacggcacttcttcaaaattttatagcggttttgataaggggagtgtagtatttcatatgaatgatggttctaatttctcgtatgatttattttacacaggatacggtcttccagaaagcttcttaaaaatttacaaagataataaaactgttggttcaacacaatttcatctagatgtcgaaatttcaaaaagatga

SEQ ID NO: 407802 - DNA, 801 bp, Staphylococcus aureus
atgaataagagtcgatttatttcatgcgtaattttgatattcgcacttatactagttctttttacacccaacgtattagcagagagccaaccagaccctacgccagatgagttgcacaaatcaagtgagtttactggtacgatgggtaatatgaaatatttatatgatgatcattatgtatcagcaactaaagttatgtctgtagataaatttttggcacatgatttaatttataacattagtgataaaaaactaaaaaattatgacaaagtgaaaacagagttattaaatgaagatttagcaaagaagtacaaagatgaagtagttgatgtgtatggatcaaattactatgtaaactgctatttttcatccaaagataatgtaggtaaagttacaggtggtaaaacttgtatgtatggaggaataacaaaacatgaaggaaaccactttgataatgggaacttacaaaatgtacttataagagtttatgaaaataaaagaaacacaatttcttttgaagtgcaaactgataagaaaagtgtaacagctcaagaactagacataaaagctaggaattttttaattaataaaaaaaatttgtatgagtttaacagttcaccatatgaaacaggatatataaaatttattgaaaataacggcaatactttttggtatgatatgatgcctgcaccaggcgataagtttgaccaatctaaatatttaatgatgtacaacgacaataaaacggttgattctaaaagtgtgaagatagaagtccaccttacaacaaagaatggataa

SEQ ID NO: 407803 - DNA, 555 bp, Staphylococcus aureus
atgaataaaaaactattaacaaaaacattgatagcaagtgcattagttttaacaacagtaggttcaggttttcattcttcttcaaattataatggtattaataacgttgcaaaagctgctgaaacaacagacggacagttgtggaaaaatgtaagagatgctttgaaagaggctaatataattgatggaaatgaaaatgaaacaatagatgttaattataaattgaaaaatggtagcgaaaataaaatttcagcaaatgggaactctaatggagatttttcgaaacaaaatatagatattgaaagtttaactactattaatatcaaaaaagtaaatattagtaatttcaacgaaagaattgatgctaataatacatggaagaatttaactaacaaattaaaaggacagaaaatcattaaagatggtgataaagtaaccattcatagtaaagaccaaaaagatcctaaaatctctggaatagttggacaagattttactgagcataagaattatatgttatacaagaaagacatagataaaataactataaactag

SEQ ID NO: 407804 - DNA, 645 bp, Staphylococcus aureus
atggaaactttagagaatgtaagttttaaagacattgatgaacaatttgttttagatgcagaagaatataagactctagttaaagatttatcaattttagaaaagccatcagtttctactaaagaaaagggagatagattagaaagaattttgattaacatactttctaatagtggtctttttaatgtaacatcaaataaaagaacttcaactaatgaaatagatataagggtagaaaagactactcaactagttttagtggaaaatcattatagtttcgatgttgaaaatgttatttattttgagtgtaagaattattcaagaaaacttggcgtcacttatataggaaagtttttctcaattttaaatgtagctaatattaaacttggcgtcttaattactccatatgggttaactggtaatggttggtataatggtcatggactttgcaaaaaacttcaccttaaaaatgatattaatattatatctattacaaaagaagatttactaaaacttaataaaataagtttgttatatttgatgcaacaaaaaattcatgaattacaagaagatatggacttagaattgtgttttaaacaaaaacatgagttagtaagaaacggtgatatagttaatgaaaaatag

SEQ ID NO: 407805 - DNA, 765 bp, Staphylococcus aureus
atgttaaatgtattattattaattttaaatttaattgcaatatgtagtgtaaacaatgcatatgcaaatgaagaagatcctaaaatagagagtttgtgtaagaagtcaagtgtagaccctattgctttacataatattaatgatgattatataaataatcgatttacgacagtaaaatcaattgtatcaactacagaaaaattcttagacttcgatttattatttaaaagtattaattggttagatggaatatctgctgaatttaaagatttaaaagtggaatttagctcatcagcgatttctaaagaatttctaggaaagactgttgatatttatggtgtttactataaagcacattgtcatggtgagcatcaagtggatactgcctgtacatatggtggggtaacacctcatgaaaataataaattaagcgagcctaaaaatataggagtagctgtgtataaggataatgtaaatgttaatacatttatcgttactacagataaaaagaaagttactgcacaagaacttgatattaaagtaagaacaaaattaaataatgcatataaattgtatgacagaatgactagtgatgtacaaaaaggttatattaaatttcattctcattcggagcataaagaatcattttattatgatttattttatattaaaggaaatttaccagatcaatatttgcaaatttataatgataataaaacaatagattcatcagactatcatattgatgtttatttatttacataa

SEQ ID NO: 407806 - DNA, 720 bp, Staphylococcus aureus
atgaaaagaatacttatcattgttgttttattgttttgctattcgcaaaatcatatcgcaaccgctgatgtcggagttttgaatcttaggaactattatggtagctatccaattgaagaccaccaaagtattaatcctgaaaataatcatctttcgcatcaattagttttttctatggataattcgtcaataacagctgaatttaagaacgttgatgatgtaaagaaattcaaaaatcatgctgtagatgtatatggtctaagttatagtggatattgtttgaaaaacaaatatatatacggtggagttacattagcaggtgattatttagagaaatctagatgtattcctattaatctttgggttaatggagaacatcaaactatatctactgacaaagtatcaactaataaaaagttagtaacagctcaagaaattgatactaaattaagaagatatctacaagaagaatataatatttatggctttaatgatacaaataaaggaagaaattatggtaataagtcaaaatttagttctggatttaatgcaggaaaaatattatttcatttgaatgatggttcatcattttcttatgacttatttgatactggaacaggacaagctgaaagtttcttaaaaatatataatgacaacaaaactgtcgaaactgaaaaattccatttagatgtagaaatatcttataaggacgaaagttga

SEQ ID NO: 407807 - DNA, 729 bp, Staphylococcus aureus
atgaaaaaatttaaatatagttttatattagtttttatattactttttaacattaaagatcttacgtatgctcaaggtgatattggtgtaggtaacttaagaaatttctatacaaaacatgattatatagatttaaaaggcgtcacagataaaaatctacctattgcaaatcaactcgaattttcaacaggtaccaatgatttgatctcagaatctaataattgggacgaaataagtaaatttaaaggaaagaaactggatatttttggcattgattataatggtccttgtaaatctaaatacatttttggaggggccactttatcaggacaatacttaaattctgctagaaaaatccctattaatctttgggttaatggcaaacataaaacaatttctactgacaaaatagcaactaataaaaaactagtaacagctcaagaaattgatgttaaattaaggagatatcttcaagaagaatacaatatatatggtcataataacactggtaaaggcaaagaatatggatataaatctaaattttattcaggttttaataatgggaaagttttatttcatttaaataatgaaaaatcattttcatatgatttgttttatacaggagatggactgcctgtaagttttttgaaaatttatgaagataataaaataatagaatctgaaaaatttcatcttgatgtcgaaatatcatatgtagatagtaactaa

SEQ ID NO: 407808 - DNA, 771 bp, Staphylococcus aureus
atgaagttatttgcttttatcttcatatgtgttaagtcttgcagcttactatttatgttaaatggcaatcctaaaccagaacaattgaataaagcgagtgaattcactggtctaatggataatatgaggtatttgtatgatgataaacacgtatcagaaacaaacattaaatcccaagaaaagtttttacaacatgatttattatttaaaataaatggttctaaaattttaaaaacagaatttaataataaaagcctttcggataaatataaaaataaaaacgtagatttgtttgggacaaactattataatcaatgctatttttcatcggataatatggaattaaatgatggtagattaattgaaaaaacgtgtatgtatggcggtgtgaccgagcatgatggaaatcaaatagataaaaataattcaactgataactctcataatatcttaattaaagtttatgaaaacgagagaaattcattatcttttgatatacctactaataagaaaaacataacagcacaagaaatagattataaagttagaaactatttacttaagcataaaaatttatatgaatttaacagttcgccttatgagactggctatataaagtttatcgaaggaagtggtcattctttttggtatgatttgatgcctgaatctggtaaaaaattttatccgactaaatatttactaatttataatgataataaaacagttgagagtaaatctattaatgtagaagttcatttaaccaaaaaataa

SEQ ID NO: 407809 - DNA, 756 bp, Staphylococcus aureus
atgagattgttctacatagctgcaattataataactttattatgtcttattaataataattatgttaatgctgaagtagacaaaaaagatttaaagaaaaaatctgatctagatagtagtaagttatttaatttaacaagctattatactgatataacgtggcaattagacgagtcaaataaaattagtacagatcaactactgaataatactataatattaaaaaatattgatatatccgtacttaaaacttctagtttgaaagttgagtttaactcatcagatttagcaaatcaatttaaaggaaaaaatatagatatttatggactgtattttggaaataaatgtgtaggcttaactgaagaaaaaacatcatgcttatacggaggagttacgatacatgatggaaatcaattagatgaagagaaagttataggcgttaatgtatttaaagatggtgtccaacaagaaggttttgttataaaaaccaaaaaggctaaagtaacagtacaagaattagacactaaagttcgatttaaattagaaaatttatataaaatatacaataaagataccggtaacatacaaaaaggatgcattttctttcattctcataatcatcaagatcaatcattttattatgatttatataacgtaaaaggttcagtgggagcagagttttttcaattttatagtgataatagaacagttagctcatctaattatcatattgatgtatttttatataaagattaa

SEQ ID NO: 407810 - DNA, 777 bp, Staphylococcus aureus
atgaagaaattatctactgtaattattattttgattctagaaatagtttttcataatatgaattatgtgaatgctcaacccgatcctaaattagacgaactaaataaagtaagtgattataaaaataataagggaactatgggtaatgtaatgaatctttatacgtctccacctgttgaaggaagaggagttattaattctagacagtttttatctcatgatttaatttttccaattgagtataagagttataatgaggttaaaactgaattagaaaatacagaattagctaacaattataaagataaaaaagtagacatttttggcgttccatatttttatacatgtataatacctaaatctgaaccggatataaaccaaaattttggaggttgttgtatgtatggtggtcttacatttaatagttcagaaaatgaaagagataaattaattactgtacaggtaacaatcgacaatagacaatcacttggatttacaataactacaaataagaatatggttactattcaggaactagattacaaagcaagacactggctcactaaagaaaaaaagctatacgagtttgatggttctgcatttgaatctggatatataaaatttactgaaaagaacaatacaagtttttggtttgacttatttcctaaaaaagaactagtaccttttgttccatataagtttttaaatatttacggagataataaagttgttgattctaagagtattaaaatggaagtatttcttaatactcactga

SEQ ID NO: 407811 - DNA, 777 bp, Staphylococcus aureus
gtgaagacaatcgaagaaagaatgaacgaatatttcaactggttaaagcaaaattatatcttcaaagaattagatagttctacagaaattactactccctttaagaaccatttgaatgattttattagaatatatgctgatacactacctaataatgaaatttgtctatcagatgacggattgacgattaatgaattagaaatgttgggtattgatataaacacaaaaacgagaactaaacttatacaaaatattttaaatcaatttaatttaaaattagttgataaagaaattacagcggatgttaaaaatgagagttttgctcagtctaaacataatttaattcaaggcatattgaaaatttatgaccttactttaactactaaatctaacgttacaaacatattctatgaagaagtatttgaattcttatatgaccaagaaataagaggtttagcacaagtttctgtttctggagaatcaggtttaaaatattctattgattatattgtttctgaaacaaaatcacaaccagaaaaactagttaactttacaaacaacttagatttcaacaaaataactaatgaagcttatatttaccgtgatatcaaaccaaacagaccatccagaaacaaattagaacctatcatgttgataattgtaaatgatgtagatcatccgataaatgaaagagcacaaactgtagcagaacatgaaaaccttgagatattaaaatggtctaataaatcaaaaatcattgaaactttaacctcataa

SEQ ID NO: 407812 - DNA, 237 bp, Staphylococcus aureus
atgattaggttcgatgttaatggtagtgatcatgcaaatccaccaaataatgaaagaatacctacgccacatatacacatatatactgaggaatataataatggtggtattgcgattccattaaaagatattgaagatttagaattaacagatgaaattatagaatcattagacttctttatgaagtatactaatataaaacacgataatgttataatagaaccaagattactgtaa

SEQ ID NO: 407813 - DNA, 495 bp, Staphylococcus aureus
atgaggagattactcagtctattactagctagtacaatgattttagtcgcatgtgggaatgctaacaatgaaaataagaaaaaggaagacgaaaaaaaatcagaagtaaaaaaagaagctaagaaaaataatgataaaccaaagaacgaaaagaagaatcaagatataaataaaaacaataatgagcaagttcaaaatgtcaataataaacaaccagtcttaaataataatagtaatcataacaatcaacaacaaagcaataaaaacaattacacagttatagaaaacgggaatagagttacagaaatttataatggacaatcacacacaactacaaataaccctattagagaagaatatgtagagggagaaacagacacgatatataaaagagagtataagcatttttatacacctgaagaagctcaaagagcacaagaaaatagcgaccaaattttaagagaaatgggtctcgaaccagaaagatatgaataa

SEQ ID NO: 407814 - DNA, 156 bp, Staphylococcus aureus
atgagtgcagttaaagaccataacaataaagcgaaagcattaccggaaacaggtactgaaaataataattcaaataatggcacattattcggtggattattcgcggcattaggatcattattactattcggtcgtcgtaaaaaacaaaacaaataa

SEQ ID NO: 407815 - DNA, 324 bp, Staphylococcus aureus
ttgtttttatctgcatcaacgacagttaaagttgtagttgaagtaattaaattattaacatttttagagtctgttgatgatggttgtactgctgctatacgcattcttgtattcaaacgtttaggtgctgtactttttggcataatcacatctgaaccatttgcattgtcagtattatcgcttttttctcctacatttcttacttcttcactattaatttttaagtcatctttacttacattaattggtgctgccgacattgttgcatttgaagttgtgttatcagtatttaattgctgtgaattaactgtagtagtaacttga

SEQ ID NO: 407816 - DNA, 1920 bp, Staphylococcus aureus
atgattacccaatcattaaagacagttatcaatttttcaaatgaaaatttttttcaagattacttaaataaaaataatatgtctttaaaaaaaacagaaattgaagatataaaaaaatttgtggcattattaaatggaaaattagaaaaaaatagtaacttatttagggggtatatccttggatattcttttcaagatttaacaggagaatttgatttattaagatttactgaaacacatattattaacattgaacttaaatcacgcgataccactgaaaaagaaatagaagatcaattaaaaagaaataagttttatttaggaagtactaattacacacttttacagtatgggtttttatcatcagaaaataaattatataaattaaatgaagaggacttattgcgagaaataaatgtagaagaatttatcagtgaatgttcgaacttaaaaaataaattatttataaatgtagaagagttatttagaccagaaaaatttattatttctccatttaataatactcaagaatttttagaaggaaagtattttttaaatgacgaacaagttaaaataaagaaatgtttaacccaatttttgaataatgatgactcaattgttaaattaacaggtgtgcctggttgcggaaaaagtttgattctttatgatttttacaaagagtgcttaaaaattgataagaaagttgccttaatgcattgtggtgctgagttgaatgacggacagctagatttaataaaaggtcatgattggaatatatatcccccaaaggcaaacgaagagtttatatctttagatgctgacatctatatgattgatgaagctcaacgtaagtatcctcatcagttagagaaaatttattcttatattaaagaaaatgataaaaagttaattatttcttatgatcctgaacaaacattggtgaaaagagaaactaaatggaatatttctaaaactatagcagaagattacgaaggtaaaacattaaatctagaatccaggatacgtaataacaaagaaattagtagttttattaggttattattaaataaaaatcaatctaactatattcgggattttaaaaatattgaaatagtatatgcgaatgatattagtgaatcaaaaactattttaaaatttttagataatacatataccgttattgattacaccgctcctaattttaatagaaaaggctataatgaaatatctaacatgagatacggaaatactatattgaattctcataacgtcataggtcaagaatttgataatgtgtgtttaatcttaggtaatgaatttttttatgataatgatgggttcttaagagcgaatgatgttaatgatcaacttgatcttatgaaattactttatcaaaatgtgactagaacaaaacataaacttgttttagtagttaataggaataaagagttatatattgaccttttaactatactaaaacccagaattcagaagtcaataaaattaaaagaaattgaaaatataggttacaatacaataccaaattcaaaaggtgtgttttatatatttaagcataataacaatattttaaaaaacgaaaatactggtgaagatattaatgttaaaggaaatatattatatgtagagagttgtaaagacttgagaaaggcaattaaaagtttaataaccaatattataaccaaaaaattaaaaaaatttgaagatattgaaatcgctgatttacttaatctaaaagtatcgtggattgatagcaaaaataaggaacaaatattttcttatattgttgagcaacatatagaaaagtacggagaaattccttttttaaatatacctttaaaattaaaaggttattcagataatattattagaaattatagctatattgttgaatatgattaa

SEQ ID NO: 407817 - DNA, 177 bp, Staphylococcus aureus
atgatcaaaccaacagtcattgattggtacattggcgaatataatccaaaaccaacatggatgcaagccaccaaagcacgtgcctatttgcctagaatattagtagagaaattactcattaaaattgacgatatgttaaaaggaatagaaatatatgatttccttgagtctagataa

SEQ ID NO: 407818 - DNA, 654 bp, Staphylococcus aureus
atgaaagagtttacagtacgaatgactaaaagattcgtagaaatagcttctgaaccaattagaacaaaacaacatgttattatgttaatgctagaagctattctattactgaaaaatgctgatgttttagaaaaaccaagtaataattatatcatcttaaaagttgataaaatgaaacggttgttttttgtaattgagaataagattttctcatttaattttcctttcagtgttgaagttcaggaagaaagtaacaatttaataatttacgattctattactaatttagaattaaatgcgcttaaccttacagttctgaaattagcgtttaaagaaactttttttggaaaagaaattcaggggattcttgatttggattctgaattgatgcaagttatagacagttttgaaacaaaaccgaataaagatgaagtatggcaagtacttaaaaacctacagatgtttgaatcgggttatttacgatacgattatgatgaggtgcacgaaaatggtaagttacacccattaaatcatattgatataaattatactcctcacggtacctttaagattggaattaaagatacacttgattgtaacgcttttatggatattcttgacttaaatacggatagttattttatctcaaaatga

SEQ ID NO: 407819 - DNA, 1707 bp, Staphylococcus aureus
ttgggtagaccaagaaaatggagagataagcttgtaaaaaaagttgacttccagactactgatgatataacttcgattatcgaaagttgttcattaactggtatagatgcacgtaaaggtgagttattgatatctttactaactggaagtatcaatgatattgatcgtgttgatggagaactccctggaaatacgttagaacaaattaagaaaaatattactctatttgatggagaacaaacaaggttcatttacaaacaaccagataaaaaagtagtaacaattcaaggtttagcaggcacgggtaaaacggaattactgttacataaacttaaggatatttacgttaacgaggaaaagtcaaaaatatttttcacctgttatagtaagattttagcacaagatttgaatgaacgaatccctgctttttttgatttcatgaaagttaatgagcaaattaaatggggcgagcgactttgggtagaacgtagctggggctctaaagttgataaaaattcaggtttatatagttttatttgtgattattacgaaattccttttcaaaggtacaactggtctatatcttttgaatcggtatgtaaagatgctttagaaaagctgaatcaacttgaatcagaagggatatttgagccgttctttgattacattctaatcgatgaaagtcaagattttaatgaagcttttttcgaattatgtaaaaaagttacaataaaacaagtttatattgccggagacatctttcaaagtatttattactataatgaaaacacagaaatagtgcctgactttcttttgaatagagtttataggactgatccaaaaacgctaatgtttgcacacgcaataggatttggacttttagagaggccggtagttagatggttaagtgatgaagaatgggaagcctgtggatacacaattgaaaaagaaggggattattacagtttttcaagagagcctttaaaaagatttgaaaatattgcagaagatattaccagcctcaaactttctgttgctttagatgacaagtatttggataaagttctatcggctattcaagatattcgagaaaaaaatcctactgtcgaaccaggtgatattggagtcgtattccttgaagacaataattcaaactatgaacttgctgaacaattgattattaaggttgatcaaatgtttgggtggaaatccattaaaggttatgaagtaaaaaataaaacaaaagatgctttgtttataagtaatcgaaataatataaaaggtctagaatttccctttattatttgtataaccacctctgtacttaatagtaatacaaatattagaaactcactatatatgatgcttacaaggtcatttatcacaagctatttaatactttcagaagaaaatggagaactcaattctaaacttggagatgcagcagaaaagttaaacgatacgggacaacttaaggtggaaaagccaaaacctgatgaaataatggataaatctaaattgatgctagaagctagtgaaaataaatctcaataccaaattgtagaagagattttgcgccaatcgtttcatattcaagatcaaaaagcaaaagaaaaaattcatgaaatggttaatgtattgttaccggggagtgtggattttgaaaaaatttataaggtaattaacaaaaatattgatatggtatag

SEQ ID NO: 407820 - DNA, 807 bp, Staphylococcus aureus
atgtgtaaagtcctaaaaataccaagaagtacctattatgattctataaaaagaaaagataataaaatcactaaagatgattcaaacgtagaacgtgctgtcataaatatttttaattctaatagaaaagtctttggtacaagacgaattaaaaataatttaaatgataagggtcttactgtatcaagacgaaagataggtcgtatcatgaaaaaacataatctagtttctgtttatacgaaagctaaatacaaaaatcatccaaaagaaactaataaaaaacgaattaaaaatcatttgaatcgcgcttttaatagagaacaaccaatggagacattagtaagtgatttgacatatgtaaaagtcgcaggaacatggcattacatatgtttatttatagatctatttaatagagaaattgttggttacagtgcaggtaaaaataaggacgcaaatttagtatcaaaagcaatcagcagaataaatcataatcttgaacaaatcaaactattccacactgatagaggcaaagaatttgataatcatttgatagatgaagtcctagaaacatttaaaatcaaacgttcattaagtaccaaaggttgtccttatgataacgcagttgcggaagcaacgatgaaagcaatgaaaaccgaatttgtaaaacaaatgcaatttgaaaacttagaacagttagaaacagaattatttgattatgtaaattggtacaacaattttagaccacattcttcattacagtatttgacgccagtggcatttaaaaatctacacatgaaaactgtctaa

SEQ ID NO: 407821 - DNA, 282 bp, Staphylococcus aureus
atgacaagagaaagaagatcatttagttcagagtttaagttacaaatggttagattatatgaaaatggtaagcctaggaatgaaattatacgcgagtatgatttaacaccttcggcgttaggaaaatggataaagcaacatcaaaacacgggtacattcaatcaccaagataacttatcagatgaagaaaaagagctgattaaattacgtaaagaagttcaacatttaaaaatggagaacgatattttaaagcaagcagcgctgatcatgggacgaaaatag

SEQ ID NO: 407822 - DNA, 1146 bp, Staphylococcus aureus
atgattcgaattcaagataatacaataagggatggtatgcaacaaagtaatgttcgaaaaagtctaattataaaaaaagaagtattgaaacaaattaacaagttaaatataaattctgttgaagtaggcatgtgtacaactatcgaggatgaatttaatattcatcaattcagagacattttaagtcctgaaaaagaattagtagtattgactaggcttaatgaaaaagaaataaaaaaaatagtcaaattaaaaattcataatttagtggtaaaaatactattgccaatatctgacttgcatataaaagaaaagcttaatttttcaaataaatattatattcagaaaatcaaagactgcttggatatattaaagaaagataaaaaaggagtagatatttgttttgaagatgcaacaaggacttctagagaaaaattgaaggaatacatggaaattatttcaaaatatcaagttagaacagttacctttgcggacactgtaggatgttcgacaccattagaatacggagatatttttaattactttgtaaaaaaatattctaacataattttttctgctcattgtcataacgatctagggttggctactgcaaatacattagctgcaattttaaatggtgcgaaacaaatagaaactacatttttgggaattggtgagagagcggctaatgctcctattgaggaaataattactattttgacaaaaaaacaaataaaaagtacggaattcactttacccgacgtatataaaactagtattaatatttctaaaattctcgattttcaaatatcagaaaacaaacctataattggtgaaaatatatttaaacatgaatcaggaattcatcaagatggtactaaaaaaaatataaatatgtatcaatatttagttcctagtgatttaggattgaaaaattcacaagttgttcagtttccaataagtaatatttctagtaagaaaatcttgcacaataaatttaaatcaatagttaacactgaagaaattgatgaaaatatttctttctataaacttgtgaacaagttttcacctgaagtagcacctgaagatacaatggatttacttcagataataaaaaggaggagtaaagatggaaattttaaatga

SEQ ID NO: 407823 - DNA, 876 bp, Staphylococcus aureus
ttgttattatatcaaaatcaatatttaattttagtagtggcacaaatattattagggttaagttactcaatgatggcgggtgttgatacagcaataattaaaagaaatataacaaatgagaaatacgtacaaaataagtcaaatagctatatgttcctatcattattaatttcagggattataggtagttatctttatggaataaatattaaatggcctataataatgactggtatattttcaattctaacaattataattattcgatgcacattagttgaaaatagggaattaaatttaataggagaaacaaagggaaagataaagaagtttctaccggaagagaagttttggatattgcattattcttttttaagagcgttaatattaggattttttataggatttattccaattaatatatataatgatttaaaactgaataatttacaatttatttcagtattaacttgttacacaattatgggttttgtatcttcacgttatttaactaaatacttgaactataagtttgtgtcagaaatttgtttagtaatatttttaataatatatacatatcaaagtttcatagcagttactatttctatgatatttttaggtatttcttcagggttaactcgtccacaaactataaataaactttctagcagtagtaacttaagagtgatgcttaattatgcagaaacgttatattttatttttaatatcgcatttttacttatgggtggttacttatatacaataggaactattcaatacttaatattatttatttcgttattaatttttatatatttaataataatattttattttacaaggagagatcaacatgaaaatcaacacagaatttaa

SEQ ID NO: 407824 - DNA, 1569 bp, Staphylococcus aureus
atgattgaaaaattagtaacctttttaaatgaggttgtttggagtaagccattagtttatggtttgctaattactggtgtgctatttacattgcgtatgcgattttttcaagttagacattttaaagaaatgattcgattaatgtttcaaggagagaagtctcctaatggtatttcaagttttcaagcgatagccatgtctttagcaggcagggttggtacaggtaatattgtcggtgtatctactgcaatatttataggaggacctggtgcagtattttggatgtggattactgcgtttttaggtgcaagtagtgcttttattgaatctacacttggtcaaatattcaagagagttgaaaataatgaataccgtggtggaccagcgtattatattgaatatggtattggtggtaaatttggtaaaatttacggaattatctttgctattgttacgattatctcagtaggtctattgcttcctggtgtgcaatctaacgctatagcaagttctatgcataatgcgattcatgttccacaatggttaatgggtgctattgttgtagttattttgggattaattatttttggtggtgtacgtagtattgccaatgttgcaacagccgttgtaccatttatggcaattatttacatactgatggctgtcattatcatttgtatcaatatacaagaagtgccagcgttatttgcattaattttcaaatcagcatttggattacaatctgcttttggtggtatcgttggcgcaatgatagagattggtgttaaacgtggattatactcaaatgaggctggtcaaggtacaggtccacacgcagcagcggcagcagaagtatcacatccaagtaaacaaggtctagtacaagcattttcagtttatattgatacattatttgtatgtactgcaactgctctgattatacttatttctggtacatataatgtgactgatggtacggttaatgcgaatggcacaccgcatttaattaaagatggcggtatttatgttgaaaatgcaacaggtaaagattattcaggtactgcgatgtatgcacaagccggcattgataaagcgttccatggcagtggttatcaatttgatcctactttctctggcgtaggttcgtactttattgcatttgctttattcttctttgcatttactactattttgtcgtactactacattacagaaacaaatgttgcttatttaacgcgtaatcaaaataatcaagtttcatcgatatttattaatattgctcgtgtgattattttgttcgctacattttacggtgcagttaaaacagctgatgtagcatgggcattcggtgatttaggtgtaggtctaatggcttggttaaatatcattgcgatttggattttacataagcctgccgtaaatgctttaaaagattatgaaattcaaaagaaacgtttaggcagcggttataatgcagtttatcaacctgatccgaataaattacctaatgctgtcttttggttgaagacatatccagaacgtttaaaacaagcacgtgccaaaaagtag

SEQ ID NO: 407825 - DNA, 726 bp, Staphylococcus aureus
gtgaataataagcttatatatacctcttatgatggcgataacataccattgatagatagttttattaaacttgttattgattttaaatatgttccaataaatccaactaaatcattaggatattatatatctacatcgattcatgacaatgacaaaggtgagtgtttaaaagactgcttgtctttggaaatgatttgtgatgaactttgggtattcatagacaataataaatatattccagaaggagttcggttagaaatagctacatggttaaaatataaatcctctccagttaagtatataagcataccttctttattagagaattcgagtataaatgacgatttatttttagactttgatgattcaaatatacttaaagaaaaggaaatttccgaactagtaccgaaaaaaagtgagttaagacctgtaaattgtattaatatactaccggaacaccataaatatatagactggataaagtatcatttattttataacaaattcgtaccattggattatttaagtataaagccatatatttattttgataatatagaacattataaaagtgagttatcgctattgaatgaacgatgtaattacatttctgtgatgccatattatgtgagtgaaaataattttaatttatctttttcagaatgtaaaatacctaaatatattaagaaagattgggctataacaacaatggagaataaaaattaa

SEQ ID NO: 407826 - DNA, 852 bp, Staphylococcus aureus
atggatatatcattaaatttcaatcattatattgatttaaaaaagagtattaaaaatttatgcttaatgaaaaagtttgagccatatgtaaccaatgaaaattatgattttattgaaatgcctctggtagtagaaggaaattatgtgctcttaaaaatttatcaagaaacagacgctttaattaaacttcattatcaggaagtattaaactctaatcgaaaaagtgtaatacaagaaagtgatatagttagaatttcgcgaagcatacttaatgaagctcttgatatcaatagtaatataaaatataaatatgatacttttggattaactattatatccgatgcagataattacacaacattaatacggactatacttgctcagcaagtgagcatagaacaagccaataaactatttttattatttattaatacttatggtgaaatttttgaactaaacaataaagaatacacttttttaaattgggataaaatattcagtcgaatatataaagaacagaaggttttagtaggcacgactaataatagaaagcaggctatcataactcttgctgaattacatataaaaaacggcttaagagaaaatgttttacaagttattccaagtataaaaggtataggtgcttggacagtgcaaatgtttatgctatttcaatttcctcacgtagcttttgaaaatattcctgtagcagacattggtttgcacagagccatagaaaaaaatcatgatcttccacataaatcgattgataaaagtaatggagaatcttactttcaaaacatgaaatctatagatgtgtttaaatattggtatatatacatggttgaatag

SEQ ID NO: 407827 - DNA, 177 bp, Staphylococcus aureus
atggttagattatatgaaatttggaaacaaaggaatgaaatagtatgcgagtatgatttaacaccttcggcgttaggaaaatggataaagcaacatcaaaacacgggttcattcaatcatcaagataacttaacagatgaagtaaaagagctgattaaattactcaaagaagtttaa

SEQ ID NO: 407828 - DNA, 207 bp, Staphylococcus aureus
atgatgttaaaagatccgattgttatgttagctgatgaaccaactggtgcgttagatcctgaaacaggacagatgattattcaatcattatttgatttggtcgatgaaaataaagtgctgattttagcaacacatgatatggctattgcaaatcaatgtgacgaaataatagatttagaacagtatagaaaagtagcatctttgtga

SEQ ID NO: 407829 - DNA, 552 bp, Staphylococcus aureus
gtgatacgtcaagcacgtccagaggaccgatttgatattgcgaagttagtttatatggtttgggatgatatggaattagaattggtaaagcatctacctaaagacatggtattagatgcaattgaaaaaagctgtgttgatgcaacatatcgaactttttatcagcatattttagtttatgaagtagaaaataaagtagcaggttgtattattagctatagtggtgaaaatgaattgaaatacgaaaaagcatgggaactacttgacttgccagaagaaataaaacaatatggcacgccattacctgtaaaagaagctaaagacgatgagtattatatagaaacaattgcgacatttgcagcatatagaggtagaggcatcgcgacaaagttattaacgtcattacttgaatcaaatacacatgttaaatggagtttgaattgcgatattaataatgaagcagcattaaagttatataaaaaagtaggctttatatctgatggacagattgaattatacaagcacatgtatcatcatttaattgttaaataa

SEQ ID NO: 407830 - DNA, 177 bp, Staphylococcus aureus
atgcagaaaaaatacaatatttgggttaaagttgcagatgaagttagaataacaaataaaatggtagcaaaacatgttcgtttgctaccattttatttgcagtatagtgatgagggctatttaacctcaatatacctagtggaaattttaattgcaccatctgaatcagtgacatga

SEQ ID NO: 407831 - DNA, 147 bp, Staphylococcus aureus
atgcgccgagcacatgcaaaaaagcccctaacaactaaaagttgtaaggtaaaagagggatacatgcaccgagcacatgcaaaaaagcccctaacaactaaaagttgtaaggaaggagagggatacatgtgccgagcacatgcataa

SEQ ID NO: 407832 - DNA, 135 bp, Staphylococcus aureus; identical to SEQ ID NO: 405310

SEQ ID NO: 407833 - DNA, 1173 bp, Staphylococcus aureus
atgaaaatagcaactctgaacaaaggcaaagaaacaaaatattttaatggatatcctttaattgaagaagaggatatctattcacaagatcatttaaaagaaggagatatttttcaaattgtgactgataaatcacaatatgttgcaacggcttatgttggtcgccaacataaaggattaggttgggttctaacatacgataaagctcaagaaatcaacacagctttctttgtgaaattgtttaatactgcattagcagaacgtgattattattttaatatagatggaacaaatgcttttagattatttaatgctgaaggtgatggtgttgggggattaacaatcgacaattacgatggtcatttgttgattcaatggtactcaaaaggtatttataaatttaaatatgccattcttgaagcggttagaaaagtatttgattataaatctatttacgaaaaagtaagatttaaagacagcgaatatagtggtggttttgttgaaggagatgcacctgagtttccaattgttatcgaagaaaacttcacattttataatgtagaccttgaagatggtttgatgacaggtatctttttagatcaaaaagaagtgcgcaagaaattaagggatcaatatgccaaagaacgccatgttttaaacttatttagttatacaggtgctttttctgtaatagcagcaagtgaggcatcttcaacaacaagtgtagatttggctaatcgttctcgtagtttaactgaagaaaattttggattaaatgctattgatcctaaatcccaatatatttatgtcatggacacttttgatttctataaatatgctgcacgacatggacatagttatgacacgatcgtgattgatccacctagctttgcacgcaacaaaaaacgtacattttcagtgcaaaaagattatgacaaattaattaatggcgccttaaatattttatcatctgaaggaacattattgttatgtacaaacgcaagtgtatatccattaaagcaatttaaaaatactattaaaaagacgcttgaagagagtggcgttgattatgaattaactgaagttatgggattaccaaaagattttaaaacgcatccacattataagccatctaaatatttaaaagctgtttttgtaaatattagacattaa

SEQ ID NO: 407834 - DNA, 396 bp, Staphylococcus aureus
atgaaaaaaaatatcacaaaagtaattattgcatctacagtcatcgctacaggtcttctaactcattcaaatgatgctaaagctttctttagttatgaatggaaaggtttagaaattgctaaaaagttagcagatgatgagaaaaaagatgaagaacgtgctgatagattaattaaagacgccgagaaagaaagaacttatacaggtaaaacggttgaagatttatatgtcattgctaaaaaattaggtaaaggtaatactatagctgtagtaagaattatagatggtggtaaaaacggttactatacgtttgatatcacgcgtccattagaagaacacagaaaaaatattaaagtagtcgctaaaggtgaaatcgattcgattacttggtattaa

SEQ ID NO: 407835 - DNA, 147 bp, Staphylococcus aureus
atgaaactattttatatcgtatttcttattattatatggctgaatatatttttaggaaatgaaattatccatacactgactgttttaataacaacattgtatattgttaattcaagaaaggggattaaaaatgacagagttgaataa

SEQ ID NO: 407836 - DNA, 393 bp, Staphylococcus aureus
gtgtttggactaaaagacaaagatactgatcagttatggtggtcttatagagagacatttacaggtggcgttacaccagccgcaaaaccttctgataaaacttataatctttttgtgcaatacaaagataaactacaaacgattattggtgcacataaaatataccaaggcaataaaccagtattaacattgaaagaaatcgatttccgtgcacgagaagcgttaataaaaaataaaatattatataacgaaaatcgtaataaaggtaagcttaagatcaccggtggcggtaataactacactattgatttaagcaaaagattacattcagatctagcaaatgtttatgttaaaaaccctaataaaataactgttgacgtcctctttgattag

SEQ ID NO: 407837 - DNA, 306 bp, Staphylococcus aureus
atgtgtaagaacatcacgaaaaatataattttaacgacaacattattactattaggtacaatattacctcaaaatcaaaaaccagtatttagtttttactctgaagctaaagcttatagcattgttcaagatgaaactaacatcaatgaattaattaaatattacacacagcctcatttttcattttcaaataaatggctatatcaatatgataatggaaacattatgttgaacttaagagatattcatggtcagcacatatatctttatggggcgctgaaagttggggaaatattaatcagttaa

SEQ ID NO: 407838 - DNA, 936 bp, Staphylococcus aureus
atgatggcgaaaatagtagtagcattaggtggtaatgctttaggaaaatcacctcaagaacaactcgagcttgttaaaaatactgcgaaatcattagtaggattaataacaaaaggacatgagattgttattagtcatggtaatggaccacaggttggaagcattaatttgggacttaactatgctgcagaacataaccaaggtccggcatttccatttgctgaatgtggcgcaatgagtcaagcttacatcggctatcaattacaagaaagcttacaaaatgaattgcattctattggaatggataaacaagtggtaacactagtgacacaagttgaagttgatgaaaatgatccggcatttaacaatccttcaaaaccaattgggttattttacaacaaagaagaagctgaacaaattcaaaaagaaaaaggatttatatttgttgaagatgctggaagagggtatagacgtgttgttccttcaccacaacccatctctattattgaattagagagtattaaaacacttattaaaaatgatacactcgttattgctgctggtggtggaggtataccagtaattagagagcaacatgatggttttaaaggtattgatgcagttatagacaaagataaaacaagtgcgttgttgggtgctaatattcaatgcgatcaattgattattttaacagcaattgattatgtatatattaattttaacactgaaaaccaacagcctttgaaaacaacaaatgttgatgaattaaaacgatatatagacgaaaatcaatttgcaaaaggaagtatgttaccaaaaattgaagcagccatatcatttattgaaaacaatccaaaaggaagtgtgcttataacatcattaaatgaattagatgctgccttagagggtaaagtaggtactgtgattaaaaagtaa

SEQ ID NO: 407839 - DNA, 1239 bp, Staphylococcus aureus
atgaaagatataagtaagatagtagctgacgtcgaatcaacgttagcaccatattttaaagaaattgaagaaacagcatatattaatcaagaaaaagtattaaatgcatttcatcatgtcaaagcaaccgaaagtgatctacaaggatcaacaggatacgggtatgatgactttggacgtgatcatttagaagaaatatatgcgcaggcatttaaagcagaagatgcaattgttcgtccgcaaattatttcaggtacgcatgcgattactattgcattacaaagtttattaaaacatggtgatgaattaatttatataacgggtagtccatatgacactttacttgaagtcattggcgtaaacggaaatggtattgaaagtttaatggagcacggcgtatcgtataaagatattgcacttaaagaaggtaagatcgatattgaaagtgtgttagatggggtttctgagcgcaccaaagtaatagcgattcaacgttcgaaaggctatgatcaaagaccttcaattccgctagatgaaattgaaaaggtaattactaggttgaaaaacgtgcatcctaatattttaatatttgtggataactgttatggggaatttgttgaaagacgcgaacctatagaatgtggtgccgatttaatagcaggatcattaattaaaaaccctggcggtggtttagctaagattggtggatacattgctggtagaaaagatttaattgaacgatgtggttatagattgacagcacctggtattggtaaagaagcgggtgcatcattaaatgcattgcttgaaatgtatcaaggtttctttttagcaccacacgttgtcagtcagagtcttaaaggtgcattgtttactagtttatttttagaaaaaatgaatatgaacacaacgccgaagtactacgaaaaacgaactgatttaattcaaacagttaaatttgaaacgaaagaacaaatgatttcattttgtcaaagtattcaacacgcatccccaattaatgcacattttagtccagaacctagttatatgcctggttacgaagatgatgttattatggcagctggtacgtttattcaaggttcatcgattgaattatctgcagatggacctattcgtcctccttatgaagcatatgttcaaggaggattaacatatgaacacgttaaaattgctgtgacaagagctgttaatcagttgaaagaacaaggacttatataa

SEQ ID NO: 407840 - DNA, 369 bp, Staphylococcus aureus; identical to SEQ ID NO: 405650

SEQ ID NO: 407841 - DNA, 1341 bp, Staphylococcus aureus
atgccaaaacgtactttcactaaagacgacattcgtaaatttgcagaagaggaaaatgtaagatatttaagattacaattcactgatattttaggaacaattaaaaatgttgaagtgcctgtaagccaattagaaaaagtacttgataacgaaatgatgtttgacggttcttctatcgaaggtttcgtacgtatcgaagaatcagatatgtacttacatccagatttagatacttgggtaatcttcccatggactgctggacaaggtaaagttgcacgtttaatttgtgatgtatataaaacagatggaacaccatttgaaggggatcctcgtgcaaacttaaaacgtgtattaaaagaaatggaagatttaggcttcacagactttaatctagggcctgaaccagaattcttcttgtttaagttggatgaaaaaggggaaccaactttagaacttaatgatgatggtggatatttcgatttagcacctacagatttaggtgaaaactgtcgtcgtgatattgttttagaattagaggatatgggcttcgatattgaagctagtcaccatgaagttgcccctggtcaacatgaaattgactttaaatatgcagatgctgttacagcatgtgataatatccaaacatttaaattggttgttaaaacaatcgcacgtaaacataatttacacgcaacatttatgcctaaaccattattcggtgtgaatggtagcggtatgcactttaacgtttcattattcaaaggtaaagaaaatgcattctttgatccaaatactgaaatgggcttaacggaaactgcatatcaatttacagcaggtgtgcttaaaaatgcacgcggatttactgctgtatgtaacccgttagtaaactcatataaacgtttagtacctggttatgaagcaccatgttatattgcatggagtggtaaaaaccgttcaccattaatccgtgtaccatcttcaagaggattatctactcgtatcgaagtacgttcagtagatccagctgcaaacccatacatggcgttagctgcaatcttagaagctggactagatggtattaaaaataaattaaaagttccagaaccagttaaccaaaatatttacgaaatgaaccgtgaagaacgtgaagcagtaggcattcaagacttaccttcaacactttatactgcattaaaagcaatgcgtgaaaatgaagttattaaaaaagctttaggaaatcatatctataatcaatttattaattcaaaatcaattgaatgggattactacagaactcaagtatctgaatgggaaagagatcagtacatgaagcaatattaa

SEQ ID NO: 407842 - DNA, 213 bp, Staphylococcus aureus
atgaaccagtttaaagaaatttataatacaatagaaaaattactaaatgataaaacaatatctaattatagaattaatcaagacactggtgtttcttatggtggtataagtgaattaagaagcgggaaaagaaaagtgaataatttaactttagaaacagcggaaaaactctataattaccaaaaacaattagaaataatgattgaagattaa

SEQ ID NO: 407843 - DNA, 435 bp, Staphylococcus aureus
ttgcttaaagatgccaaagaaaacaatgatagcaatgaagtagcttatttattaaaagatggtaaagttacaaaagtatatggtgatcaagatagtgtatcttttgcaccaggggaaaaagcaacagaattgttatttaacagtaaaccgaattcaattgttatgttacataaccatcctgggcagtctagtttttctcttacagacttgtatttatttatatttaataattctattaaaacactgacaattgttacaaataaaggtcaaacaaagtacttaactaagacaaaagaatattgcaaatcaacttgtattgattgtattaaaaaatataataaaaataagaatataaaaaaattcaatcataaggatattgatatgattctaaagagattatataatagtggtaacataatatataaagttaggtga

SEQ ID NO: 407844 - DNA, 213 bp, Staphylococcus aureus
atggagaaaaatgaaagtaatattactgacgtaactcagaacgaagagcaactagacaacagtgatgaacaatcacaacagaatgagaaaacattttctcaagaagaagtatcacaattgattaaagagcgtatagctagagaacgcaaaaaatcagatgaacgtattaaagatgcggttcaagaagctgagaagttagctaaaatgaagtag

SEQ ID NO: 407845 - DNA, 462 bp, Staphylococcus aureus
gtgccacatgttggcagttggcgagacaagttctttaaagagcgtgaaggtaaatatcaggtagaagtaaaagaagctaaattacaagaaaaagctaaaaaccagatgaaagaaatgattgaaagttgtaaaatgaaaatagaaataaattgtgaaaaacaaaatggacatatgttaggtcatcatctatataatgaaaataaaaaaagagccattttaaataataagaaattgcctagctatacaatactttctatagatttattgaatgaattgttaagagaaaaaatgtcaacaggcaatctaatattaagtgatgagctatttgatatgaaagagattattaattttaatcaaattattggaaaagtacatatcgataatgtgtatattgaaaccagaaaaggaaaagtgcattattcgaagacaggtgctcatatagtaccttatattgataagtag

SEQ ID NO: 407846 - DNA, 1026 bp, Staphylococcus aureus
gtgatctcatttgaaaatgattatttagaaggtgctcatgaaaaagtattaaaacgattagtagatacaaatcttgtacaagcttcgggatatggctttgatcaattcacagctcaggcaattgaaaagattaaagatacaattgattgtccaaatgctactatccgttttttagtaggtggaacgcaaaccaatcaggttgttattaattcaatgttagaaagttacgaaggggttatttcagcagacactggtcatgttgctgtgcatgagggcggtgcaattgaatatagtggacataaagtaattactataccctctaaggaaggaaaagttagtgcttcagatgttgaaacttacatggagacatttaaaagtgattttaaaaaggaccatatggtattcccaggaatggtatatatttctcatcctacagaatatggcacattatactctaaatcagaattggaagagttatgcaaagtatgtaagcaatatcagcttccattatttatggatggtgcacgattagggtatggattgatgagtgatcaatcagatatgactattaaagacatcgctaaatattgtgatgtattttatataggtggtacgaagataggtgcattatgcggagaagcaattgtttttacgaagaataatgaaccgaaacaatttaccactcgaatcaaacatcacggtgcacttttagcaaaaggacggttaacaggcatacaatttttagaattatttacggataatttatattttaatataagcagacatgctatcgaaatggcaaataagatgaaagacgggtttataaataaaggctatcgtctttactttgattctccaaccaatcaacaattttttattttaagtaacgagaaaatagcagagttagaacaaaaagttaaatttgctgtttgggaaaaatacgatgatcaacatcgtgttgttagattcgcaaccagctgggcgacaaccgaagaaaatttaaataaactattagaattaatctaa

SEQ ID NO: 407847 - DNA, 1518 bp, Staphylococcus aureus
atgttttttgtgcctttctttataggagaaaagactatgcgatatacattttcaaatgatttaggaacactttttaccattattttagccattggattcatcattaatttagtattggcttttattattatctttttagaaagaaatagacgtacagcgagttcaacttgggcatggctatttgtactttttgtcttaccattgattggttttattctttacttgttttttggtagaaccgtttcggcacgtaaattgaataaaaacaatggtaacgtgttaacggatttcgatggacttttaaaacaacaaatagaaagctttgataaaggtaattatggtactgataacaaacaagttcaaaaacatcatgatttagtacgtatgcttttgatggatcaagatggttttttaactgaaaataataaagttgatcatttcattgatggaaatgatttatatgatcaagttttacaagatattaaaaatgctaaagaatacatccatttagagtattatacattcgctctagatggcttgggccaaagaattttaaaagcgttagaagagaaattgaaacaaggtctagaagtgaaaattttatatgatgacgttggttcaaagaaagttaagatggctaattttgatcattttaaatcgttaggtggagaagttgaagcattttttgcttctaaattaccgttattgaatttcagaatgaataacagaaatcatagaaaaatcatcgtaatcgatggtcaactaggttatgtcggaggatttaacattggtgatgaatatctaggattaggtaaactagggtattggagagatacgcatttacgtatacaaggggatgcggttgatgcactgcagttgcgatttattttagactggaattcgcaagcgcaccgtccacagtttgaatatgatgttaagtatttccctaaaaagaacggaccattgggcaattcaccaattcaaatagctgcaagtggtccggctagtgactggcatcaaattgaatatggttatacaaaaatgattatgagcgctaagaagtcggtatatttgcaatcgccttatttcattccggataactcatatataaatgccattaaaattgcagctaaatcaggggtagatgttcatctaatgattccatgtaagccagatcatcctttagtttattgggcgacatattcaaatgcttcagatttactatctagtggcgtaaaaatttacacgtatgaaaatggatttatacattctaaaatgtgtttaatagatgatgaaatggtttcagtcggaactgctaatatggactttagaagttttgaattgaatttcgaagtcaatgcttttgtatatgatgaaaagcttgctaaagatttaagggtggcttatgaacatgatattacaaaatcaaaacaactaaccaaagaatcatatgccaatagaccgctgtctgttaagtttaaagaatcgttagctaaattagtttcgccaattttataa

SEQ ID NO: 407848 - DNA, 1092 bp, Staphylococcus aureus; identical to SEQ ID NO: 406991

SEQ ID NO: 407849 - DNA, 1485 bp, Staphylococcus aureus
ttgagtactaaaaacaaacacatcccatgtttaatcacaatctttggtgcaactggtgacttaagccatcgtaagttgtttccatcaatattccatctctaccaacaagacaatttagatgaacatattgccatcatcggtattggacgtcgtgacattactaatgatgatttccgtaatcaagtaaaatcatcaattcaaaagcacgtaaaagatacaaacaaaattgacgcgtttatggaacatgtcttctatcatagacatgatgttagtaatgaagaaagctatcaagaattactagattttagtaatgaattagatagccaatttgaattaaaaggtaatcgactattctatttagcaatggcaccacaattctttggcgttatttctgattatctaaaatcttctggtcttactgatacaaaagggtttaaacgccttgttatcgaaaaaccattcggtagtgatttaaaatcagccgaagcattaaacaatcaaattcgtaaatcatttaaagaagaagaaatttatcgtattgaccactatttaggaaaagacatggttcaaaatatcgaggtattacgttttgcgaatgcgatgtttgaaccattatggaataacaaatatatttcaaacatccaagttacatcttctgaaatactaggtgttgaagatcgtggtggttattatgaatcaagtggtgcgctaaaagatatggtgcaaaaccacatgttacaaatggttgcattattggctatggaagcacctattagtttaaatagtgaagatatccgtgctgagaaagtaaaagtacttaaatcactgcgtcatttccaatctgaagatgttaaaaagaactttgttcgtggtcaatatggcgaaggctatatcgatggtaaacaagttaaagcataccgtgatgaagatcgcgttgcagatgactctaacacacctacatttgtttcaggtaaattaacaattgataactttagatgggcaggcgtaccattctatatccgtactggtaaacgtatgaaatctaaaacaattcaagttgtcgttgaatttaaagaagtaccaatgaacttatactatgaaactgataaactgttagattcaaacctattagtaatcaatattcaacctaatgaaggtgtatctttacatctaaatgctaagaaaaatacacaaggtatcgaaactgaacctgttcaattgtcttattcaatgagcgctcaagataaaatgaatactgtagatgcatatgaaaatctattattcgattgtcttaaaggtgatgccactaactttacgcactgggaagaattaaaatcaacatggaaatttgttgatgcaattcaagatgaatggaatatggttgatccagaattccctaactatgaatcaggtactaatggtccattagaaagtgatttactacttgctcgtgatggtaaccattggtgggacgatattcaataa

SEQ ID NO: 407850 - DNA, 867 bp, Staphylococcus aureus
ttggacgttatcaagcaaatacaacaggcaattgtttatattgaagatcgtttattagagcctttcaatttgcaagaattaagtgattacgttggtctttcgccataccatcttgatcaatcatttaaaatgattgtcggcttatctccagaagcttatgcacgcgcgcgtaaaatgacactcgctgcaaatgatgtgattaatggtgctacacgacttgtagatatcgctaaaaaatatcactatgcaaattcaaatgattttgcaaatgattttagtgattttcacggcgtatcacctattcaagcttctactaaaaaagatgaattacaaattcaagagcgattatatatcaaattatcaactactgagagagcaccctatccatacagattagaagagacagatgatatttcattggttggatatgcacgatttatagacactaagtatttgtcacatccttttaatgttccggattttttagaagacttgctcattgatggtaaaattaaagagttacgacgatataatgacgttagtccatttgaactatttgttattagttgtcctcttgaaaatggtttagaaatatttgtaggtgtaccaagtgaacgttatcctgcacacttagaaagtcgatttttacctggcaaacattgtgcgaaattcaatttacaaggtgaaattgattatgcaactaatgaagcttggtactatattgaatcaagtttgcagttaacattgccatatgaacgaaatgatttatatgttgaagtgtaccctctcgatatttcatttaatgacccattcactaaaattcagctttggattcctgttaaacagagtccttatgacgaagattaa

SEQ ID NO: 407851 - DNA, 1650 bp, Staphylococcus aureus
atgaataagcaatggtggaaagaagcagtagcatatcaagtatatccaagaagttttaatgatagtaatcacgatggtattggggatttacctggaatgattgataaattggactacttaaaagatttaggtatcgatgtcatttggctcagtccaatgtttaaatcacctaatgatgacaatggttatgatattagtgactatcaagaaattatggatgaatttggaacgatggaagactttgatcgtttattaaaaggtgttcatgatagaggcatgaagcttattttagatttagttgtaaatcatacatctgatgaacatccttggtttatagaatctaaatctagtaaagacaatcccaaacgtgattggtatatttggcaagatccaaagccagatggctctgaacctaacaactgggaaagtatctttaatggatctacatgggaatatgatgctaatactgagcaatattatttccatctattcagtaaaaaacaacctgatttgaattggggtaatccagaagttagagatgctgtatttgaaatgatgaactggtggtttgataaaggcattgatggatttagagtagatgcaattacgcatattaagaagacgtttgaagcgggtgacttacctgtacctgagggtaaaacatatgccccagcatttgatgtagatatgaatcagccaggtatacaaacttggttacaagagatgaaagatcgctcattaagtaagtatgacattatgactgtcggtgaagcgaatggtgtaagccctgatgatgctgatgactgggtcggggaagaaaatggtaaatttaatatgatattccaatttgaacatttgggactgtggaatagtggtgattctcactttgatgtaaattcgtataaatctgtattaaatagatggcaaaaacaacttgaaaataaaggttggaatgcgttgtttattgaaaatcacgaccaaccacgacgtgtatcgacgtggggtgacgatgacaagtattggtatgaatcagcaacaagtcatgcagcagtttatttcttgcaacaaggtacgccattcatttatcaaggtcaagaaattggtatgacgaattatccatttgaaagtattgaaacgtttaacgatgttgctgttaaaaatgactatcaaattgtgaaagctcaaggtggagatgtagacgctttacttgcgaaatataaagatgagaaccgagataattctcgcacaccaatgcaatgggatgatacgttaaatggaggatttacaaatggtgaaccgtggttcccagtgaatccgaattataaaactatcaatgttgcacaacaattagaagatgatcattcagtattacaattttataaagatttaatcaaattaagaaagtctaatgatgtatacgtatatggtcaatttgatttagtagatgctgaaaattcacaagtttttgcgtacacgagaacattaaatgaaaagcaagttcttattgtaggtaatcttactaaccatgaagcagaattaactgtaccatttgatataagtcatggagaagtgaagctatttaattatgatgtcaaagttaatttaaaacagttacgtccatatgaagcatgtgttatcgaactaaattaa

SEQ ID NO: 407852 - DNA, 1020 bp, Staphylococcus aureus
atggttacgattaaagatgttgcactaaaagccggtgtttctccttcgacagtttcaagagttataaaaggaaatcaacgtattagcgaagcgacaatttcaaaagtgaagaaagttatggaagaattgaattattttcctaataccgctgctagaactttaattacaaaccaaacatataaaattggtttagtgttaaaagggtctgaggagcctattcgactgaatccattctacatcaatgtattgctaggaatttctgaaacgtgtaaccagcatggctatggtacacaaacgacagtctcaaataatatgaatgatttaatggatgaagtttataaaatgattaaacaacgaatggttgatgcgtttatactgctttattcaaaagaaaatgatccaattaaacaaatgttaattgatgaaagcatgccatttattgtgattggtaagcctacatcggatatagatcatcaatttacacacatagataatgataatatattagcttctgaaaatttgacacgacatgttattgaacaaggtgtagatgaattaatatttattacagaaaaaggaaattttgaagtttcaaaagatagaattcaaggatttgaaacggttgcatcacaatttaatctggattatcaaattattgagactagtaatgaaagaaaagttatttttaattacatgcaaaatctacatacgcgcttgaaggacccaaatattaaacaggcaatcatttcgttagatgctatgttacatttagcgattttaagtgtgctatatgaacttaatattgaaattccaaaagatgtaatgacagcaacattcaatgattcttatttaaccgaaattgcgtcaccacctcaaagcagtattgacatcaagcctcgaatgttaggtcaacaggctggttcagcaattttaaatatattgaaaaacaaagcacaggatgttattgaactcgtcattatagatacagaattaaaaataagaaaatcaacacagcgatag

SEQ ID NO: 407853 - DNA, 372 bp, Staphylococcus aureus
atggaaaagttaaatcaagttatgttatatgttgatgatgttgacaaagcgaaagcattttggacagaaactttagaatttgttgttgtaagtgaaacaccgttagctgaggactatgttgcagttgaagtatcacctacgaaagatgctgaaacgtcattgacgattatggcaaaagaatttattgaaaagtatagcccggaagtgaacctaggaacaccatctttaatgtttaaagagaaaaactttgatgcattatactcaaaattaaatgatttaggtttaactgggcatgatatagtagaaatgaatggtcaacgtgtatttaattttcaagatggccaaggtaactattttgcagttagtgactaa

SEQ ID NO: 407854 - DNA, 1218 bp, Staphylococcus aureus
atgtcatatacttctgtattgtttaataagaactttactttttatttaatagggatagctttttctaacataggcagtgcttttactacgtttgtttttccgttaatgattttaaagcttactggctctgcatttcaagttggcatagtttctgcactaagttttataccttatgcaattttaggactgccagcaggtgctttaattgacagattgaataagaagaccataatgaaatgtgctgatataattaggttcatttcatatttaagtataccagtattaagtttttataatatgttaagcatctttcaaatttatgtagttgcaatcatttcaggtattggattagtatttcacagtatttctgaggtttcgataatcccaagtattgtaaaagaagaagatttggcgagcgcaaacagttatatatacgctactcaaaatgtttcggaatttttgggccctataattggaggtttactttatacatatatgggatattcaatattgatttttatagattctatgacttttttactctcatttttcagtttgatattaattaaaattgaaacaaagagtatattcaatcaagaaaagttgagtggaaaaaattttttgagcgatgttaaagttggatttgattatctattatctaattcaactattagagtaatggctgttgttgtaagtttatccaatctaattatctcaccttattatatttatatagtaatgtttgtaaaggaagacatgaatcaatcatctcaagcattggggttagttttaggtatctcatcattaggtgcgctaatcggttcattatctgcaagttttctcttgaaattatttaatttcggaaaactaattgtaattatattatttttagatacaatttttagattaatgttaccatttagtacttatatttttatactcatcccacttttagggttgacatatatgacacaatccattttaaatatagcgataatcacactgaggcaaaagaaatgttcagaacatatgttaggacgtgttaatagtgtttttaaaacaatggtttttgcattcagacctataggcctttttttaggcggcatattacttgaaaataaaggtggattttatgcacttacgatcagcgctgtgttatttataccattagtgttatatatactgaaaaatagattttatcaagttgaagaatattaa

SEQ ID NO: 407855 - DNA, 153 bp, Staphylococcus aureus
atgaatttaggtaatgttaaagagacaatttctattatttatttgatagaaattgtctctttccttatgtatttatcgaaatttactacgcatgatatattcaatgattttctttctcttgtcaaattaaaatttttaacttttataaattaa

SEQ ID NO: 407856 - DNA, 1134 bp, Staphylococcus aureus
atgattaatgagcaaagattacttaatacgtttttagaacttgtaaaaatcgattctgagacagggaatgaatcaacaatccaacctattttaaaagaaaaattcatagcattagggttagatgttaaagaagatgaagcggctaaacatcctaaattaggtgccaataatctagtgtgtacaatgaatagtactatcgaagaaggcgaagtacctaaattatatttgacgagccatatggatactgttgtacccgcaattaatgtaaagccaattgtaaaagatgacggctacatatactctgatggtacgactatactaggtgcagatgataaagcaggattagcagcgatgcttgaagttttgcaagtgataaaggaacaacaaatcccacatggacaaattcaatttgtgattactgttggggaagaatcaggtttaattggtgctaaagaattaaattcagagttgttggacgcggactttggttatgctattgatgcaagtgctgatgtcggcactacggttgtaggtgcaccgacgcaaatgttaatttcagctaaaatttttggcaaaacggctcatgcaagtacgccaaaagagggtgttagtgctattaatattgcggcgaaagcaattagtcgaatgaaattaggacaagttgatgaaataactactgccaatattggtaagtttcatggcggttcagctacgaatattgttgcagatgaagtcattttagaagcagaggcacgttctcacgatccagaaagaataaaaacacaagtcaaacatatgactgatgtgtttgaaactactgcatcagaattaggtgggaaagcagaagttacagtggagcaaagttatccaggatttaaaattaatgataatgaagcggtagttaaaattgcacaagaaagtgctcgtaatttaggattatctgcaaatacaattatttctggtggcggttcagacggcagtattattaatacatttggtattccttcagtcattttaggagtgggttatgaaaaaatccatacaacaaatgagagaatgccgattaaatcattgaacttgcttgcaagtcaagtgttagaaataatcaaaatagttgcgcgacaatcgaaatga

SEQ ID NO: 407857 - DNA, 330 bp, Staphylococcus aureus
ttgaagattctatttcaagaaataattaataaagcgatagaaatgaaagcgagtgatgtacattttattccagttaaaaatgaagtaagtattaaatttagaattaatgataacttggagcagtatgaacaaattgggaatagcatttatcaaaagttattagtttatatgaagtttcaagctgggcttgatgtttctacacagcaagtcgcacagagcggtcgatatagttaccttttcaataaaatatattttttgagaatatcaactttaccattgtcacttggccaagaaagttgtgttatcagaattgtacctcaatttttttaa

SEQ ID NO: 407858 - DNA, 1605 bp, Staphylococcus aureus
atgaagcaatttaatgtactcgttgcagatcccatatcaaaagatggtatcaaagcattattagatcacgaacaatttaatgtagatattcaaactggcttgtccgaagaagcattaatcaaaattataccttcataccatgctttaatcgttcgtagtcaaactacggtcactgaaaatatcataaatgctgctgattctttaaaagtaatcgcacgcgccggtgttggtgtagataatattaatattgatgctgcaacattaaaaggtattttagttattaatgccccagatggtaatacgatttcagctactgaacattcactggcaatgttattatcaatggctcgaaatattccgcaagcacaccaatcacttacaaataaagaatggaatcgaaatgcatttaaaggtactgagctttatcataaaacattaggtgtcattggtgctggtagaattggtttaagtgttgctaaacgtgcgcaaagtttcggaatgaaaatactagcttttgacccttacttaacggatgaaaaagcaaaatctttaagtattacgaaggcaacagttgatgagattgcccaacattctgatttcgttacattacatacaccactaacacctaaaacaaaaggcttaattaatgctgacttttttgccaaagcaaaacctagtttgcaaataatcaatgtggcacgtggtggtattattgatgaaaaggcgctaataaaagcattagacgaaggacaaattagtcgggcagctatcgatgtgtttgaacatgaacctgcaactgattcgcctcttgttgcacatgataaaattattgttacacctcatttgggtgcatcaacagtcgaagctcaagaaaaagtggcaatttctgtttcaaatgaaatcatcgaaattttaattgatggtactgtaacgcatgcagtgaatgcacctaaaatggacttaagcaatatagatgatactgtaaaatcattcatcaatttaagccaaacagttggtgaattagctattcaattaatgtacaatgcaccaagctctattaaaattacgtacggtggcgacttagcctctattgatagtagtttattaacacgtacaattattactcatattttaaaagatgatcttggtcctgaagtcaatattatcaatgctctaatgttgttaaatcaacaacaagtgacattaaatattgaaaataataaagcagagacaggttttagtaactacttagaggtagaactatcaaacgatagcgattccgttaaagttggcgcttctgtctttacaggtttcggtccaagaattgttagaattaataatttttctgtagacttaaagccaaatcaatatcaaattgtgtcatatcataatgatactccaggtatggtaggaaaaactggcgcattgttaggtaaatacaatatcaacattgcatctatgactttaggtagaactgaagcgggcggagatgcgctaatgattttatccgttgatcaacctgtttcaaacaatataattgatgaacttaaacaagttggtgaatacaatcaaattttcacaactgaattgacggtacagtcataa

SEQ ID NO: 407859 - DNA, 1473 bp, Staphylococcus aureus
atgaattacattttaggaacaattttagaaagtaaaattacaggtgtagaaaaagcgcaaataaatagattgaagttgtttaaacaacacggcatatcttcaaaatgtgtatatgttaaatggaatccttattcatacacatatgcgaagcaacatcagattgaaaatgatgtatttacaatgtatgactattttcaaaaaacaatcaattataaaaagacaaagcaagttaactggatacagtattgggaaaagtcatgtaggtacacattgaaatttgtggaaaattcaaatgatgtcagaatatatgatgaagagcaatttgtaatgtatgctcattttttagataaacagtatcatcaattaaactatgtgaattattttgatcataaaagaagaaaagtaaaacgcgaattgtatgatggaagaggctttttaagttgttctcgaattttaggtgaaggacaacgaattgtactcgaaaattactatacacctaatggggaaatcgtcatccaaaaatatttcgatgatataaaagggaaaaacacgctcacaaaggttatcttaaatgaagaccagcatcaacaattttttgatacagaagatgaattagttcaatattttctccatcaattatgtaaaaataatgatcaaatcatattagatcgtcctcatgaattaggaaatgttatagcgggattaaatcaaagtattccagttattgttgtgctccatagtacacatttagccggtaccggtaatggtataaaaagtttttataaaacagtatttaataatttaacacgttataaagcgattgttgtatcaacagaaaagcaatgccaagatatttcacaatatattgaaaataaaataccagttatcaatattccggttggctacgtgtcaaatttaaagtatcaatttgacatcaatcaaaaggagaaaaatcatatcatatcaattgctcgcctcgttgaaaataaacaaattaaacatcaaattgaagtgatcaagcaattagtaacaaaacatcccaatattcaattgaatatttatggacatggaaatggtttgtcagaatatcgacaacttgtagaagattatcatttatcggaacatgttaaatttcatggttttaagacgcatattaatgaagagattgctaaagcagaactgatgttatcgacaagtaaaatggaaggttttggcttagcaattttagaatcgctttcagtaggtacaccagtgatcagttatgatgtagattatggtccatcagaactgattcaagatggatttaatggctatttagtacctcaaggtgacatcaatcaaatggttgaaaaggtcgaccaattactaaataatactcaaaaattgcaacagttttcgattaatagcatagaatctgcacaacagtacaatgcaactactatcagtacaaagtggcaaaatattttaaactaa

SEQ ID NO: 407860 - DNA, 633 bp, Staphylococcus aureus
ttgctttacgaatctaatattattaacaaaaatcccagatatagaattattaaatataaaaacgactatctgatgattgatttagtaagcacctggttagttttgttctttccgtttattaattggttaataccaaaaaaatatgtccaaatcagcagagaagagtttgataatttaaatattgttaaaccagttaaaaataaagctttatggccagttataggtagcatacttttatttggcactatgtttagagataaaatatatatacctgattctcatttagaaaaaaattgcgttattatcatttgttcggttttattattaagtattctagtgttttatatatatttaaatcagaaagtaaagttatctatctataataatcggagtagcaatggaaaaattatgatttttccatcattcaagaatctttgctttgtgctattttcttattttttctgtggtggattatcaatcatgttcttagatgttttgattagtttatctatccaaaatattatagtatttattgcttgggttattatgacaatgctatttttctttataaatatgtcttcaataatagacaaaaagattcatgttatatatttaaggtcatataaatattaa

SEQ ID NO: 407861 - DNA, 627 bp, Staphylococcus aureus
ttgctttgcgaatctagaattatagataaaaatgcaaaatatagaattataaaatacaatgatgaatatttcatgatagatttatcgagtaattacatatcttatctattgccaatgatcaattggtttatacccaaaaaaggagttaagttaagtgttaaagaggtagaaaaactagatactataaagcctcaaaaaaattcagctttaaattggtatataggattctctgtattattgactgtgatttttagaaagtatattagtttattagatttacaaattgaaaggtatataaacattagtataagtcttttgataattctttttatcattttgtttagattgtatataaataaaaagttaacaattaagaattttcatcaaaatgagtacaggactttaatgctaatcccgacatggaaaagctttatatttacgtcgtttgcttttgtctttataggattaatatcaatatttacaatcattgtcaccttttattatgaaaatcaaaacatcatagtatttctaactgaagttgctatgattctaatattctcttttttaaatgttttatcaatttctgactcgaaagtccatgtcataataaaagaaaatggcaaatga

SEQ ID NO: 407862 - DNA, 639 bp, Staphylococcus aureus
ttgctttgcgacgttgaagtggttaataagaatcctaaatatagaattattaaatataatgatgaatatttgatgatcgatttagtaagtacctggttaactttatttcttccaatgatgaattggttaatccctaaaaaatacgtgaagattagtaaagaagaatttgaaaatttaaagattgtaaaacctgttaaaaataatgctttttggccagctgcaggtggctcagttttatttggagttacattcaggaaatatactcaatttcttaatattcaattagaaaaaaacttggttattgccatatgttgcatgatatttctagctgtttttacattatttttatatttaaataaaaaactaaagctgcatatgtttgaggacaataaaaatgataacgataaaatcatattaatccctacatttaaaaatatttgcttatccctaattgcctatgtgtttttcggtggcttttcaataatgcttttaagtatgttgatgaccttaaatcctcaaaatataataggattcttagctttgtttggtatgattgctgctttctttatagcaaacaggtcttcaattatcgataaaaatgtatacgcaatactaaggtcaaaagaggttgagaagtga

SEQ ID NO: 407863 - DNA, 552 bp, Staphylococcus aureus
atggttgacttagcaaataactggctaacattactccttccaatgatgaattggttaatcccaaaaaaatacgtaaagattagtaaggaagaatttgatgtcttaaacattgttaaacctactaaaaatagagctttttggccagctgcaggtggctcaattttatttggagttacgttcagaaagtatactcatttgctcgatatccaactagaaaaaagtttagttattaccatatgttttataacattcttaagtattttaatcttttttatgaaattaaaacaaaaattaaaattaaaagtttttaataaaaataaagaacataaagaaaaaattatgctactacctactttcaaacatttttgttttgtactattttcttatttattttcgggatttttttcaataatgagtctatgcatgttaataactttagattcccagaatataatagtatttattgcttggattataatgacaatgcttttctttctagtgaatatggcttcgataggtaacaaaaatgttcatgtcatatttaaaaaataa

SEQ ID NO: 407864 - DNA, 282 bp, Staphylococcus aureus
atgatagctcttataatattgctcgctagtaatccagtaggatggggagttttaccaagatatactgcaggttctgtttcggcaatacttgtaaattgggatcatcaaacaaataaatttggattaagagataaaactgaatggatatgttataaaacggatgacaatatagatgtaatagaaaaattcgcagatgaaattgtagaaggtattgaaagtaccattggtgaagctacaaacaacattagtaatcatataaatccaatgaaatgggcgtggtga

SEQ ID NO: 407865 - DNA, 555 bp, Staphylococcus aureus
atggttgatttagcaagtagttggatagtattttttcttccaatgatcaattggtttatccctaaaaattacgtcaaaattagcaaggaagaatttgatgtcttaaacatttttaaaccagttagaaataatgctttttggcctgttacaggcgctttagttttacttgtaaccttgtcgaaaaaatatatttatttgctcaatacccatttagacaaaaaaacagtaataatcatatgttttgtcatatttctatgtgtaataacatgctttttatacttgaaccaaaaactaaaactatatatttgggacaaaaataaaggtgaaaacgaaaaaatcatattaatacctacgttaaaaaatatatttatatctttgtttgcttatatattttttggcagcttttcaattttatctctaaatatattattaacaatggattctcaaaatataataggatttcttggttggattgtaacgacgtcatgtttcttttttgttaacaggtcatcaataatcggtggaaatgttcgtgtcatacttaaaaagcattag

SEQ ID NO: 407866 - DNA, 549 bp, Staphylococcus aureus
atgattgatgtaactagttcttggattttctttttcattccaatgcttaattggggtgtacctaagaaatttgcgaagattagtcaaagtgagtttgaagaattaaatacatttacaccgaaaaatagtagttcagctggatggatagcaggtgggggatcagttttattggcagtattgacgagaaaatatatacagttgttaaatatacaaattaatcaaattgctgtgaatattttatgctctctcgtacttttgggggttttcctttcggctttatatattaattcgaaatctaagttaaacgtttatgatagaaataactgtgatgaaaagataattttaataccaacttttaaaaatttatgcttaatgctcctttcgtatattatttttggtagtttaagcatacttgctttttatatgtttatcacagaaggtattcaaaacatcattttatttattacttggattatgcttgtaataatgttcttacttagtaatgtagctttggtagtcaataaaaaagtaaatgttataaaaaggtag

SEQ ID NO: 407867 - DNA, 411 bp, Staphylococcus aureus
atgtcgaaaaagaaaattttaatattaactagtattatgttaatcatattaattagtgttgcaagtatctattttaaaatgaaatatgacgaaaaagaaaaacaaaaatcaatttattataaagaacaacaagcgcgcattacactttatcttaagcataatactatagaaccgaacacaatcaaatctgtacatttcacaaaattggaaacaagtcctatgggaagtgctgtgattgaaggttacataaatgaaaataaagaagatgattttgttgcctatgcatcacctgaaaataactttcaatttgtaggtgatttaattaaaagtgaaagattaagtgagttactaaaaccagcgcatcaattaaaatcaccagatgatataaaaaaagaactaaataaaaagtag

SEQ ID NO: 407868 - DNA, 795 bp, Staphylococcus aureus
atgattcattcaaaaaggttaaaattgtgtctatgcttgatgatactatctgtttttattagcgcttgcggaatgaaaaaagaagaaagtagtaaagataaacaaattaaagaaaacttcaacaaaacgttgagcttgtatccaaccaaaaatcttgaagacttttatgataaagaaggctttcgtgacgaagagtttgaaaagggtgacaaaggcacttggataattcactctaaaatgattattgagacaaataatagcaatatggaatctagaggaatggtgctctatctcaatcgtaatactagaacaacgaaaggtaattttgttgttagagaaataaccgaggatagtaaagggtattcacatagtaaagatacaaaatatccagtgaaaatggaacataatagaatcattccaaccaaaccgatagctgatgataaattaagaaaagaaattgaagactttaagttttttgtacaatacggtgactttaaagatattaatgattataaagatggtgacatttcatataatcctaatgttccaagttattccgcaaaatatcaattgaaaaacgatgactacaatgtgaagcaacttcgaaaaagatataatattccaaccaacaaagctccgaaattattaataaaaggtgatggtgatttaaaaggctcatctgtagggtcaaaaaatctagaatttacctttgtagaaaataaagaagaaaacatttattttacagattctgtacaatatactccaagtgaggatacaagttatgagtcaaactga

SEQ ID NO: 407869 - DNA, 786 bp, Staphylococcus aureus
atgattcattcaaaaaaattaacgctcggtatatgtttggtattactcattatattgattggaggttatgtcattatgacaaaagaaaatggtcgaaacgctcaaattaaagaagcatttaataaaacattaaaagtatatccaaccaaaaatctcgatgatttttacgataaggaaggctttcgagatcaagaatttgataaaagagataaaggtacttggatcatttattctgaaatggttatcgagccaaaagggaaaaatatggaaacgagaggaatggtgctttatatcaatcgcaatactaggacaacaaaaggtaattttattgtcaatgaaattacagatgataacgatggtagacccattgataataaaaagaaataccctgtaaaaatggaacataataaaatcataccaacgaagccactaccgaatgacaagttaaaaaaagagattgaaaactttaagttttttgtacaatatggcaactttaaagatattaatgattataaagatggtgatatttcatataatcctaatgtaccaagttattcggcaaaatatcaattgaataatgatgattataatgtccaacagttaagaaaaagatatgatattccaaccaaacaagcgcctaaactattattgaaaggcgatggagatttaaaaggttcatccgtaggttctagaagtcttgaatttacctttgtcgaaaataaagaagaaaatatcttttttacagattcagttgaatttactcctagcgaggttgataaatcatga

SEQ ID NO: 407870 - DNA, 1209 bp, Staphylococcus aureus
atgactgattctgtaagttctaatgatgcctctaagtattctcttgcagcattttttagcggtgtcggaggaattgagttaggttttcatcaaactaacaagttcagagtggtgtacgccaatgaatttgataaaaatgcacaaataacatatgaaaataatttcaataatgtaagtttagattgcagagatatccatgatgttaaaacgagtgaaattcctatgtctgatgttatagtaggtgggtttccatgccaggcatttagcattgctggatatcaaaagggatttgaagatgaaagaggagatttattttttgagttgttaaggtttattaatgagaagtcaccacaagcaatatttattgagaatgtaaaaaatatggtcacacatgatcatggaaacacatttaaagtaataaaagaagctttaactttgaatggatattttattaagtggaaagtacttaatgctaaagattacggggacatacctcaaaatagagaacgcatatatattgttgggtttaagtgtcgaaaggcttttgatttattcgaattccctgaaaagatagatttaaagacaggcataaaagatattataaacttcgaaagtgaaatagatgaacgttattattataggatgaataagcaacctttttatgacgaacttgaaaaagaaatgaaggacagtaatctaatttatcaatggagaagaaggtatgttagagctaataaatctggagtagtcccaactttgacggcaaacatggggactggtgggcataatgtaccattaatcaaatctaaatttggaataagaaagttaacgccacgagagacattttcagtccaaggattccctgaaagcttcaagttacctgataacatgtcaaatggtcaattatataaacaagcaggtaatagtgtagtggtacctgttgttaaaaggattgcagaaaatatagctgaatcattagataatagtgagttgccggtgtttaaactggatattaaatctaaatatgttcttttatatactaaaatgattggtagatttgaaggagaaagctatattttaaatggctttgatagtgaaaacgatcttaataaatttataagaaaacataaaatcaactttataattgaagaagaatataaaaaagtaatgaaaagtaatgtaggtaaagagtattatactctgaaataa

SEQ ID NO: 407871 - DNA, 1062 bp, Staphylococcus aureus
atgccttcaaagaaaggtcaaaagcctcaaatacatgttggagaaactgattataaaccaattgatattgataacttagaaattataggagccactaccaaaaataatccaacaaattttaaatttactgataataatcatgaatataaatatacgtcagctgatagtcaattgtatatggcatttaataatagagatatagttgtggagtcatgggatgtaaattatattaatgatccatttgatttatttgaaaaactaaatgagcaagtgaaccaaggggttttagagaaaaaatataaagatgaagagatattaaaaactattagttgggttatttatgatgaaaatggaaatattccaactaactcaggattcaacgcatttaatggaggatccaaattaggcttaagtactagagcaaaaagaattaataaaatttatgatgaatataaatctaaggttagtgaagaaaaaataaaaaaagtaaagaatttattggaagaagttttacttaagaagtggtctactgatgaggaaaaagaaataatgatgaaaattagagatgaattaagtgaactattagtagaaataaaaaatatcgatctaattgaagaagttgaaaaattaatttatagacctattagagaaatgtatattccgattcctaattcgaaaaaatttcatgaaagtaaccctgatttttttggacatgatataggaaggtttaaagtgaattcttccaaattgcttttgcctaaagaagatagaacatttaaactaaagtttttatcatcaggagatgttatagaagcttatattaatcaagatgcaggaaagagtattcaatcgtataaaaaccagcaaattttaggtgaatggatactacaaggtgttttccaactagcaccaagagaaatattaacaggagataaactaaatgatataggtattaatggaatacggttaataaaatttaaagatggaactataggattagaatttatatggatagatattgaaaatccaccagatgatgtaattggttgggttggaaaatag

SEQ ID NO: 407872 - DNA, 477 bp, Staphylococcus aureus
atgtggtcaaacttgaaggatgaagataaaaaaacatatagaaaattgattactaactttgcaagtttgagtgaggctttttcgcaaaaaaatgagtcgaaagaaggcggggaagatatagttgcgcctatagtaaactcgaaatttcaagaaaccgtttttcaaagagcttttggtgcaattggtgaagatattgcgaatacatcatatgatgcctcactgttattagatgataaacataaatatttagttggcataaaatcgtttggaataacgtctggtgatcaaaaaatagcacaatttaagaaaaatagtcagttcgataattggggacgtatcttaaatgagattcaaaaaaatgcacaaatggttaactcaaaggaagaagccaatgaaattaatgaatatttatataaagagttagcaattaaaatagctagacttagaaatgctagaatagagtcatcaaaagaataa

SEQ ID NO: 407873 - DNA, 267 bp, Staphylococcus aureus
atgaaaggctctaaacaaatacttttgattatgggcattatatctcttattgttttatttatttttacactattcatcatggcacaatatgcaaaacattatgaacaaaaatccgacagttccaacgcacatactttaaattcatcatcagccataattgagcaacatactatgtcgaatttagcgtctctagatttatacgctcctgttcgtaacattacttctagtcgtgatattcatcctatttatttcatgacaaaagattaa

SEQ ID NO: 407874 - DNA, 309 bp, Staphylococcus aureus
atgaccgtcaacatcgtattttctatcgtgttctgtatcagtatggttatattaggcatttatgtcgcaataactaaagatttcacactaatctcttttataaatcaaacgaccattgcagataatcacaagaaccaaattgcatatatatttgcgctatgtatcagtttgagtgcagtatttttaatgtcttcaattctatgctttgaatatgattttattgcattagcattcttatttttaacaatagcattattacttatcgcattattctacgtttgcttttataaaattacaaaatacccataa

SEQ ID NO: 407875 - DNA, 171 bp, Staphylococcus aureus
atgaaatataaaattagtttggcttataatttagcaattataatagggtcgctaattatattatgtatactaatatctagaggtcatgatatttatgtaatcttgattccaattttgactgttttagctagtttaatcaatttattttgtgatattaaaaagcataaatga

SEQ ID NO: 407876 - DNA, 1194 bp, Staphylococcus aureus
atgttgtacttagaagttttgaaaaatagaaactttacatatttattgattggtaatttcttacgtcggagttgctttgtgctgttttcgttgcaaataatttggtttactgttgaattgacaaaccaatcatctttaaaattatcaatgatggttatgagtcaaacactaccatttattatatttggtattttcggtggcgcatattctgataaacataataaaaagaaaatactttatctatctgatcttatactaagtttgattattataattattcctttacttgcaataacatcaaatttaaattatctgacgcttctaaccatatctacagctatcaccattattaactgctatacggatcctgcgtttagggcaattcttcctgaaattattgatgaggagcatttagcaacaagtaatgcgttaatcgatagtttgcaaagaggctcaaatattattttacctgctttaattggtgtcattgtaatactagttggtaatgttggcgtcttttttatttgcagtatattgctatttttaggatttatttttaatgcacttttaaaatatacaaataacaacatgattgatagacactcaaaagaagatttttctgaaacttgggaattcttgaaacaatctaaagaaattccatttatcattatcattcaatttgcctgcatattgattaatactggcctttggcgtgttgcattaccattgtttatttccaatatattaaaagagggcgttggtgtatatggactagctacatcatgtttaggtattgcgtctttactaatgtcattgattatgggtttgctgtcagaaaaacgattaatctttaaatttagtattggtgttttagtttggggaattggtttatcgattattaatgtgtttccaagtgtggcgatattgtatataggtgcaacattagtgggacttggacaatctatagagggactaacaagatcagttgccattcaaataaaaacgccaaatcatttgatggggaaagtatttagtatctcatctacatcgaattacgcagcggatacattatctttaggactgataagtttaattatacctttactaagcttaagtaatatatttatatcaggaggtgcaattatttcaatgcttagcttatcggggttaaagttttttaagaagtctatgtaa

SEQ ID NO: 407877 - DNA, 2877 bp, Staphylococcus aureus
gtgaaaagcaatcttagatacggcataagaaaacacaaattgggagcggcctcagtattcttaggaacaatgatcgttgttggaatgggacaagaaaaagaagctgcagcatcggaacaaaacaatactacagtagaggaaagtgggagttcagctactgaaagaaaagcaagcgaaacacaaacaactacaaataacgttaatacaatagatgaaacacaatcatacagcgcgacatcaactgagcaaccatcacaatcaacacaagtaacaacagaagaagcaccaacaactgtgcaagcaccaaaagtagaaacttcgcgagttgatttgccatcggaaaaagttgctgataaggaaactacaggaactcaagttgacacagctcaaccaagtaacgtctcagaaattaaaccaagaatgaaaagatcagctgacggtgccgtagttccagagaaagaagtagtggaagaaactaaagcgacaggtatagatgtaacaagtaaagtgaaagtagaagaaggtagtgaaatagtagggcataacaataaagagacaaatgttgttaatcctcataatgcagaaagagtaaccttgaaatataaatggaaattcgaggatggtattaaaccaggggactactttgatttcacattaagtaataatgtagaaacacatggtatttcaacactgcgtaaagttccagaaataaaaagttcagatggtcaagttatggcagtaggtgaagtgaatgaagaaaggaaaattaggtatacatttaaagaatatgtacaaggtaaaaaagatttaaaagctgagttggatttaaacctatttatcgacccaacaacagtgacaaaaagaggtaaccaaaatattgaagtgaccttaggagagaagaagacatctaaacagttcgacataaaatacttagacggtgtaaaagataactggggagtaacagttaatggtcgaattcatactttgaataaagaagagggtagatttagccattttgcatacgtgaaacctaataaccagtcgttaacttctgtcacagtaagtggtcaagttactaaaggaaataaatcaggggctagcaatccatcagtcaaagtatataaacacattggttcggatgaattagctgaaagtgtttatggagatgttctggatgaaacaaagtttgaagatgtaactgataaactaagtttaacacttactggaaatggtggatatactttagattttagtgaattggataaaactaaaaattatgtaattaagtatgaaggtgactatgactcgtctgctagtgatttaaacttccaaacgaagttatccggttatcataattattattactcatattacccagttcaattaacttggaacaatggcgttgcattttactctaataacgctaaaggcgacggcaaagataagccaaatgatcctatcattgagaagagtgaaccaattgatttagacattaaatcagagccgccagtggagaagcatgaattgactggtacaatcgaagaaagtaacgattctaagccaattgattttgaatatcatacagctgttgaaggtgcagaaggtcatgcagaaggtattattgaaactgaagaagattctattcatgtggattttgaagaatctacacatgaaaattcaaaacatcacgctgatgttgttgaatatgaagaggatacaaacccaggtggtggccaagtaacaactgagtctaacttagttgaatttgacgaagagtctacaaaaggtattgtaactggcgcagtgagcgaccatacaacaattgaagatacgaaagaatatacaactgaaagtaatctgattgaactagtagatgaactacttgaagaacatggtcaagcgcaaggaccaatcgaggaaattactgaaaacaataatcatatttctcattctggtttaggaactgaaaatggtcacggtaattatggcgtgattgaagaaatcgaagaaaatagccacgtggatattaagagtgaattaggttacgaaggtggccaaaatagcggtaaccagtcattcgaggaagacacagaagaagataaacctaaatatgaacaaggtggcaatatcgtagatatcgatttcgatagtgtacctcaaattcatggtcaaaataatggtgatcagtcattcgaggaagacacagaaaaagacaaacctaagtatgaacaaggtggtaatatcattgatatcgacttcgatagtgtgccacatattcatggattcaataagcataatgaaattattgaagaagatacaaacaaagataaacctaattatcaatttggtggacacaacagtgttgattttgaagaagatacacttccacaagtaagtggtcataatgaaggtcaacaaacgattgaagaagatacaacacctccaatcgtgccaccaacgccaccgacaccagaagtaccaagtgagccggaaacaccaacaccaccgacaccagaagtaccgagtgagccggaaacaccaacgccaccgacaccagaagtaccaagtgagccaggcacaccagtaccaccaacgccagaggtaccaactgaacctggtaaaccagtaccacccgcaaaagaagaacctaaaaaaccttctaagccagtggaacaaggtaaggtagtaacacctgtcattgaaatcaatgaaaaggttaaagcagtggcaccaactaaacaaaaacaatctaagaaatctgaactacctgaaacaggtggagaagaatcaacaaacaaaggtatgttgttcggcggattatttagtattctaggtttagcattattacgcagaaataaaaagaatcacaaagtataa

SEQ ID NO: 407878 - DNA, 123 bp, Staphylococcus aureus
atgaaactaaataactattctttaaaagttaaaaacaaacaactagttgacaattgtgatttaaatttctatcttggtcagatcaatcacattgttggtaaaaatggtgtaggaaaatcataa

SEQ ID NO: 407879 - DNA, 1128 bp, Staphylococcus aureus
atgaaatggttatcacgaatattaacagtaatagtgaccatgtctatggcgtgtggtgcattgatatttaatcgtagacatcagctaaaggcgaaaacgctgaacttcaatcataaagcattaacaattattattccggctagaaacgaagaaaaaagaataggtcatttactacattcgataatacaacagcaagttccagtagatgtcattgttatgaatgacggatcgacagatgaaacagcacgtgtagcacgttcatatggtgcgactgtagtagatgttgttgatgatactgacggcaaatggtatgggaaatcacatgcttgttatcaaggtgtgacgcatgcatgtacgaatcgcattgcctttgtagatgctgatgtaactttcttaaggaaagatgctgttgaaacgttgattaatcagtatcaattacaaggtgaaaaaggattgttaagcgtacagccttatcatataacaaagcgtttctacgaagggttttcagcgatatttaatttaatgacagtcgttggtatgaatgtattttctaccttagacgacggtcggactaaccagcatgcatttggaccggtgacattaacaaataaagaagattattatgcaactggaggtcataaaagtgcaaaccgtcatattattgaaggatttgctttaggaagtgcatatacttcacaatcattgcccgtaacagtttatgaagggtgtccatttgttgcatttcgcatgtatcaagaaggatttcagtcattacaagaaggatggacaaagcatttgtcaactggggcaggtggcacaaagcctaagatcatgacagcaattgtgttgtggttgtttggttctatagcgagtattttagggctatgtcttagtttaaaatatcgccaaatgtctgtaagaaaaatggtagcactttacttgagctatactacacaatttatttatctgcatcgaagggtcggccaattttctaatttattaatggtatgtcatccattgttatttatgttttttactaaaattttcatccaatcttggaaacaaacgcatcgttatggtgtagttgaatggaaaggtcgtcaatattctatatctaaagaacaataa

SEQ ID NO: 407880 - DNA, 588 bp, Staphylococcus aureus
atgttaggtagtgaacaaatgatggaaagtaaatccatagatccaagaatcgttagaaccaaacaattgcttgtcgatgcttttcttaaaatttctagagaaaagaaattatctcaaattacagttaaagatatcactgatattgctacgctaaatcgtgcaacattttacgctcatttcactgataaagaagacctcctagactacacattatctgtaaccattttaaaagacttgaatgataatttgagcatttctaatgtcattaatgaaaaggttctgcgtaatattttcatttcaattgcgagttatatcaaagatgctgcaaagtcttgcgaattaaatagtgaagcattttgcaacaaagcacatcgacgtattaataatgaattagaagatatttttgcgattatgttagaaaacagctatccggagcatcaacgagatatcattgtaaatagtgcgagttttttagcagctggtatctcaggcttagcattacattggtttaacacgagtcaagagacagccgatgtgtttatcgatcgcaaccttccatttttaattcatcatatagcacatttttaa

SEQ ID NO: 407881 - DNA, 768 bp, Staphylococcus aureus
ttggaaacaattaaacaagaagtaagagaatctattgttaaaggaattatcgcgggatataaggactatgttaatgagagaaatgaagtcaagaaacgtatggtgattagtgatgcctatgtgtacaccaaatctaatcatattgaaaatcaagttgctaagcatttggaaaattttgttaagtatattaaagaaaatgctggaccatcatggaagtatttaaagtttatatttaataaagatgaagagaaaaataatatcatgtttatattgaaaaatgaagattactttgatgaaaaaaatgtaagcgtagggaagagtttagttgctgataaaaatccaaaaagtaaaaactacctagaggtacttatggctaagaatagggacattaattttggtactgttgaagaagattttgaaattgggcatcaaatgactgcagatagtatattatttaatataaaagaaggcagtaatagagatattaattcttattttttaattattacatatcgtattgataaagaatcaaagcaattagctgcaatcaaacaatggttaccaaatccagaaacaaattctgcaattatggttgatgatttgacagagttaatagaaaaagtaatagtagaaagagaagattatcatattgacgaagaagagttagaagtacttaaaaacgatggagagttagaactcatagatgtagaacatgcatttggtatcagtatcgatgaaggtaacgatatgattgaaagtgaaaggtga

SEQ ID NO: 407882 - DNA, 1176 bp, Staphylococcus aureus
atgtttattggcaagaatttagaatacgtgagaaagcttaatgctctaagtagaaaagaattatcagaaaaaataaatgtgagtgaacaagcaatttggcaatatgaaacaaaaaatatgatgccagaaattagtaaaatttatgatatgacatctatttttaatgttaaatctagctactttattagcgagcagcccgaagagctcctaataaattctgtcgataaacatagtatagcttttagagcaaaaaattataaagtatctacgaaactattaaataagcaatattatcaagcaatgtatttatctaatttaactagctacttattttcttttgtaaagataccggataatattattttatctttaataaataatttaaatgacttgttgaatggcaatttagaatcactaaataaaaaagaaagcataaaagaaactgctaaagttgtgagggctaaaattcttcaagacgaaagcaatgaagcactattatttatgcttgaaaaagcgggtatagttatatacgaaaagcgaattaatgatagcatagacgcatatagtttttggagtaaagatcagacaccttttattatactgggtacaaataagggggtagcagttagaaggaattttgatcttgcacatgagctgggacatctcgttctacatcgtcatattcaattcgacttattatctcctgaagaatataagacaattgaacatgaggcagatattttcgcctctgaatttttactacctgaagaagcgtttaaaaaagactttgatcaaatgaccaaaaaatcaaatcctgactatttagctgtattgaaagaaaaatggtatgtttctatacaagcaattgcaatgagagcctattatctaggtctaatgtctagtactcagtacagatatttttgggcatcattaaataaaaaaggctataaaagtaaagagcctttagacgacgtgattgaaatgtcacgtcctgtcaaaatgaatagtttattaaagttgtattttgatagaaatatactgacaccacaaaaattattgaattatttaaaagtcgatgaaacatttttgaatcatctagcaggtattaatttaaaactctttaaggactatgttaatgaaaatagagaatataatataacgaatctatataaataa

SEQ ID NO: 407883 - DNA, 1845 bp, Staphylococcus aureus
atgacaaaagatattgaatatctaacagctgattatgataatgaaaagtcatctatccaaagtgtaatagatgcaatagagggtcaagacttcttagatgtagatacaacaatggatgatgcggtaagcgatgtcagttctttagacgaagatggcgcaatatcattaacaagtagtgtagtaggtccacaaggatctaaattaatggggtattatcaaaatgagctatatgattatgcatctcaattagattcgaaaatgaaagaaattattgacacgccatttatagaagatatagataaagcattcaaaggtataacgaatgttaaattggaaaatatattaataaaaaatggcggtggtcatggtagagatacctatggggcttctgggaaaattgcaaagggagatgccaagaaaagtgacagcgatgtttatagcatcgatgaaatattaaaatcggatcaagaatttgtaaaagtaattgatcagcattacaaagaaatgaaaaaagaagataagaaattatctaagagtgattttgaaaaaatgatgactcaaggtgcttcttgtgattacatgacagtagctgaagcggaagagatagaggagcaaaagaaaaaagaattggcagttgatattttagcgggtgtcggaattatagctttaactatagtcaaccctgtcgcaggtgcagtagcagcaggtgcatataccgcttattcagcagccaatgcagccacaggaaaaaatattataactggaagaaagctatctaaagaagaacgcatcatggaaggactttcgcttattccgttgccaggtatgggcttcctcaaaggtgctgggaaaagtttaatgaaattaggcttcaaaggcggagaaaaatttgcagttaaaacaggattgcaaaagacaatgcaacaagcggttagtcgtatttcacctaaaatgggaatgatgaaaaacagtgtgttgaatcaatctcgtaactttgctcaaaatactcatgttggacaaatgttgagtaacatgcgtggtcaagcaactcatactgttcaacaaagtagaaattggattggacaacaagcacaaaatgtcaaacgaatagtgaataatggacttgataaagaaatagcacatccatttaaacaacaacttgcaccagcgggaatgggtggtataaaatttgctgaaacaactactttgagaaacatgggtcaaaacatgaaacgtgctgttacaccacaaaatcacgtgacacatggtccgaaagatagtatggtgagaagtgaaggcaaacatagtataagtagccatgaaatgaattcatcaaaatatgttgaatcaccaaactacaccaaggttgaattcggagaacactatgcaagacttagacctaagaaactaaaagcaaatatagaatatacaacaccaactggtcacatatatcggaccgatcataaagggcgcataaaagaagtttatgtagacaatctttctctaaaagatggcggtcgtaataaccatgcacaaagaactgtggggggagaggatagattaccagacgatgatggtggtcacttaattgctagaatgtttggtggttcaaaagacatagataaccttgtggcacaaagtaaatttatcaaccgtccatttaaggaaaatggtgattggtacaatcttgagaaagagtggcaagagttcttaaactctgggaaagaggtgaaaaatattaaaatggatgttaaatatagtggtaatagtaaaagaccaaccgaatttttggttagatataatattaatagtgagcagtttgtaaaacatataattaataaatag

SEQ ID NO: 407884 - DNA, 495 bp, Staphylococcus aureus
atggtttttgaagaaaaactaagtggaatgtataacgagattgcgaataagattagcagcatgataccagtagaatgggaaaaggtatatgcaatggcatatatagatgatggaggaggagaagtgttctactattacacagaacctggaagtaatgaattatattactatactagtgtattaaataaatatgatatatcggaatcggaatttatggattcagtgtatgagttgtataaacaatttcaaaatttaaggaatttatttaaagaagaaggacatgaaccatggacatcatgcgaatttgactttacaagagaaggtgaattaaaagtttcatttgattatattgattgggcgaattcagaatttggtcaagtaggtcgacaaaattactataagtatagaaaatttggaattttaccagaaacggaatatgaaattaataaagttaaagaaatcgagcaatatattaaagagcaagaagaagaatag

SEQ ID NO: 407885 - DNA, 528 bp, Staphylococcus aureus
atgactactaaagaaaatattgatactcttcgaaagccaggtgcacaagccttaagtttaatatcattgtttttgatacttttttcatgtctaactttcttttttggtttagattatgaaaggtttccaaactatttaaagataacgacaattatagaattaataattattgtaattagtttacttcaatggattaggtttatagatttcgaaaaagaaagtgcacagaaatataaaaaaatatatgctcgatttttagttattataaatgtgttaactactatcactgtagtatttgcactgtgtaacctttattattttgcagctgtacaaaaccattatgatttattcaattattggttaatgggtacgatttcaatcataattagctatttattattagtaattggcggaatgtttacgttgttaaaattacctaaagtaacaaaacgctggggtggtaaaactaaaacacatttcggtttattattaactgcgttgagctcatttatatatattgattcctaa

SEQ ID NO: 407886 - DNA, 294 bp, Staphylococcus aureus
atgtcggaaaatgccattatttatgatgattatttttacaatctaaaagcagtaaagactcataatatagccaaaaacgttaataaaagtttattaaatgacaagggtgtgagtattggtaaatttactcaaaaggttgaagggaaaaatcctacctggagagatccaaaaactaaatggactatttccaaaaataaagggcaatcacatggtggttcttattggaagttaatcaataacaaaggaaaaagaatagcttctttaactaaagaaggaaaaatcttaagggaataa

SEQ ID NO: 407887 - DNA, 2430 bp, Staphylococcus aureus
atgacatatagaatgaagaaatggcaaaaaatatctaccattacgttattaatggccggtgtgattactttgaatggtggtgaattcagaagtattgataaacatcaaatcgctgtggctgatacgaatgttcaaacgccaaattatgaaacgttaaagaagacgtggctcgacgttaactacggttataatcagtatgatgagaataatgatgcaatgaagaagaagtttgaggctacggagagtgaggcaaagaaattacttagtgagatgaaaactgaaagtggaaggacttacttgtgggatagtgcaaaagatttagataataagtctgcggatatgactcgtacctatcgtaatattgagaaaatcgcagaagcaatgaagcatcctaaaaccactttaaatactgatcaaaataaaaacaaagttaaagatgcccttgaatggttgcataaaaatgcctatggaaaagaaccgactgataaagtaaaagaactatctgagaattttaaaataactgattcatcaaagaaaaaagctttaaattggtgggattatgaaattggaacacctaaatcattaacaaatacactaatattactgaatggtgatatttcaagtgatgaaaagaaaaaatacactgcccctattaaaactttcgctccagatagtgacaaaatattatcgtcagtaggacaacctgaaaaagctaaaggcggaaatttagtagatattactaaggtgaaacttttagaaagtattatcgaagaagataaagatatgatgaaaaagtctatagattcatttaataaagtcttcacttacgttcaagattctgccactgataaagatcggaatggattttataaagatggttcatatatcgaccataaagatgtcccatacactggtgcttatggcgttgtactcttagagggtatttctcaaatgatgccgatgataaaagaaacaccttttaatgatagtaatcaaaatgatacaacgttaaagtcatggattgatgacggatttatgccactcatttataaaggtgaaatgatggatttatcacgaggtagagctatcagtcgcgaaaatgaaacgagtcatacagcgtcagcaactgtaatgaaatcattgttgagattaagtgatgccatggatgagtcaacaaaagataagtataaaaagattgtcaaatcttcagtagagtcagattcaagttataaacaaaatgattatttaaattcatattcagacatagataaaatgaaaaagttaatggatgacaaatctatctctactaacgatttaacacaacaacttaaaatatataatgacatggatcgtgtcacctatcacaataaagacttagactttgcatttggtttaagtatgacgtcgaaaaacgtcgcacgttacgaaagtatcaataatgaaaacttaaaaggttggcatactggtgctggaatgtcttatttatacaatagcgatgtgaaacactatcgtgataacttctgggcaacagctgatatgaaacgtttagcaggtactacaactttagataatgaaatattaaaagatacggatgataaaaagtcgagtaaaacttttgtaggcggaacaaaattcgatgaccaacatgctagtatcggaatggattttgaaaatcaggacaaaactttaactgccaaaaaatcatatttcatattaaacgataaaattgtcttcttaggaactggcattaaaagtactgattcatcaaagaatccagttacaacgattgaaaatcgcaaagcgaatgggtatacgttatatacagacgataaacaaacaaccaattccgataatcagggaacgaattccgtctttttagagtcaaccaataaacctaaaaacaatataggctatcattttttaaacaaaccgaaaataactgtaacaaaagaaagtcatactggtaagtggaaagaaataaataaaagtcaaaaatcagaagacaaaactgatgagtattatgaagtaactcaaaagcattctgataaagacgataaatatgcatatgtcttgtatccaggcttatctaaagatgtctttaagacaaaaaaagatgaagtaactgtcgttaaacaagatgatgacttccacgttgtgaaagataatgaatcggtttgggctggtgttaattacagcgatagcactaaaacttttgaaattaatggtactaaagtcgaagttaaagccaaaggtatgtttatacttaaaaagaaagatgataaaaattatgaatgtagcttctataatcccgaatctacaaataccgcttcagatattgtatctaaaatttcaatgactggatactctattacaaacaaaaatacatcgacttctaatgaatccggcgtgcgctttgaattaactaaataa

SEQ ID NO: 407888 - DNA, 930 bp, Staphylococcus aureus
atgaaaattagtcggctaattagtattatattgttattaaatgagagaaaacgtgtaagtgctcatgagttgtcagaattaatggaagtatcacaacgtacaatttatcgagatatagaagcgataaatatagctggaatacctgtttattctattccaggtgtcggtggtggctttgaaattatggaaaattttaaaatagataaaaatacatttactgaaaatgaattggcaagtcttttaattagtaactctaattttccggaaaaactaaagaataatgatttttttaatacaaatctaaaaattaaaagtttaataccgaaagaaaagttaaattcaatagaaacacaagtagaacaatttcaattagattctaatcattggaatgaattaagaaatatagatgaacaactgattaaatttaaaaacgctatacaaaacaatcaggtattaaaaattaaatatattaatcatttaggaaataaaacagaaagagaagtcgaaccatatcaacttattttaaaagcaggacattggtattgttatgtttattgttatttaagagatgattttagattacttaaattaaatcgagttatacatttgcaagaattagaaagcaaatttattaaaaaaatgtatatagacccattattatctacaaatagaatttttgaaaaattaaaaatgacaattaaacttcgcgtacacgaatcaattgttgaacgtttattagatttctgtgattacgatagctttaggcaagaaaataatcgatattatgtagttgacttcccattcatcgacaactcatattactttggattaattttaagttttggagataagtgtgaagttatagaaccaactgaaattagaaataaaatgaaacaaacaattaaaaaaatggcggataattataagtag

SEQ ID NO: 407889 - DNA, 636 bp, Staphylococcus aureus
atgaagaatgtatatttttatattttagatggtttagcagactgggaaataggtaatattttagccgagttaaactctaagcgattctataaaaaagatgctcaaacaataaacatagaaatggttagtaactcaaaaacacctattactacaatgggaggtattaatattaagcccgaatgcttaattgaggaaattagtatttctaaagacacttttctaatactacctggctcagacacatggaatgattcaaaacatttacctgtaataaaaattgctaaagaagttttatcacatggtggctatgttgcggctatatgcggagcaacaattccgctagctgatattggtatattaaatgaacattatcatacgagtaatgacttattatatctagaaagtttttcttcaaattaccatggacaaaaattatatattgatcaaccatctgtatctcataaaaatttaattactgcaagttcaactggcgcactaatgtggacaaaagatatactacatcatctagatgtatttaaacattctactttagatgcatggtttaactattttagtaccggcaattcaaagtattactttgaattacaacaaacattaaataaagatgataattaa

SEQ ID NO: 407890 - DNA, 576 bp, Staphylococcus aureus
atgagtaaaatagccgctcaaaaaaagtttatgtattttttgcaaggatttaacccggaagaaataccatcagaagaaaaattgaaaaagttaaagaaatatgtaaataatgaagagaaagctatgtttatctcggacactttatcaaaaattttactgtctaaatctacatatgcaaacatgttattaggttatttgttgaattatatcatcgaaaacaatgaagatttagatatggattatttgattgtagttgatgcacttaataacttatatgataaagatattattaatttcaaaaaaatatacagtatcaattcaagaattgttactactacaagacttagaaaagaaattggaaataacaatgattattttagtgcgataaaaactattgaaaaacttaattttttgaggctaattattaaagcagtagagattgagactaacctaaattatgataatgatgatcctgaattcagtgatatagatgttgatcaaaacgaaatttatagaaaaaataatgcggggaaattactttacagtactattaagaaagtaaaaatacttaattaa

SEQ ID NO: 407891 - DNA, 1446 bp, Staphylococcus aureus
ttgaaatttaatactctttatctagattatgagggaatgaaaaagcaattcgatttttcatcaaataataatctagtttatagtaagaaaaatagtgtaggaaagtctactttactaagaatacttttatttagcctaggttatgcaattccaggaacaaaaggaataaaatttgaaaaattaaaaacaattttatttttggagataggtaatagaaaaataacgttgataagaaataataataatctcgaattgatagaaaatgatatttctcaccattttttgttacccgatgaagatatatatctattacaggttatttttaattcagaaaataaaaatgttttagagaacatattgggtagtatatatatggatcaagaaaaaggttggacgcttttaaataaagggttcgtcatcggaaggatatactttaatttatatgaattagttggaggattagctgaaagaaatattgaagaattacaaaaagaactaaacgttctaaaacaagaaaagtcgaaatatattgcaatgagaagtatatatttctatcaaacatcagtgattgaagaaaaaagtaatttagaaatggactatattgataaaatagaaaatgatattttgttattagaattagaaaaaaaacaattaatgaaagatctaaatgaaatcgaaagagcgattgaagataacgagagttttttaaaatttatagaaaaaatgaaaatagctgtagaaattgaggggaaaagtgaactagttacaaaagataatattgtgggatttgaagaatctcaattgtatattcataccagaaaaaaattaatagaaataaaaataaaaaaaataaaatcaaagatttctaaaatgaggaacaatctttcaaaagagtatagcttattaaatctagaaaccgaacttcaaaaatttgatagtagaataatgaatattaatctagattttaatttgattgaaaaattaataaaagaaattgagacaaaagaaaaatacaaaagagaagaactaaggaaaaaaataattgtaaataataatattataagtgaactttatgaatcaattgctgattatgcgaaaaggctaggtattgagcaatatttggatttaaaatctgattttatttttacaaataatttaaagagatattcgggtgctgttttacataaactagtatttgcatttaaattatcttatataaaatctattcaaaaatatttagggattagtttgccaatattactggactctccatctggaagagaggtagacaaacaaaatattgaagaaatatttaagattttaaaagaagactttaatgaaaatcaaatcatattagcatcgatctttgataattataagttagatgaaatcaatgttattgaaataaaaagcggaatctttaaagataatgaatatattatatga

SEQ ID NO: 407892 - DNA, 1041 bp, Staphylococcus aureus
atgaatcataacgcatcatcatctatatttggatggcattttcaaattaatagcgctattgtatattttattaaatatataaaagatattaaaagtataagaatcgaaggaaaagatgaagatattgaattgttactatttaatgaaaagaaaatattaattcaagctaaatcgtattctaagttagggaaggatagtaaagcattagaaaaattagaaacaggtttaaatacactatttttgggagctcaaaaaaatgaaatagacaagttaatttatacaactaattttccaaatccaattggtggtacaacttctcagcatcatatttttatgggtgatggaattattgaaagaacattcaatgaaatccctgctaattataagaaaaaagtagtagagattatagaaaagctttcagaaaaatataataaagaatataataccgataatttaaatatatcagtaataaattttgatggagaagattatgaaactagatacagaactatcttacgcataattagagaatttctaagtaatatttctgtaaatccagtttactcaaaaacattgttagaaatttggcaaagtgaatttttgtttaatgctaccacaagtaacgtttctattgatcttaccaagaatcaagttatctggccaataatagtcataaactctcaactattagaagatgataaaaactttgaaaagcttattgatgagtttcaaatggatgaagaagaaatagagatagtactatataaatatactacttttattgataaacaatcagaaaaattttcttttgtgatgagagtaaataatgattatgaaatttatagaaaaaataaaataggtaaagaaagagggataaaatcatttattaatgataaatggactgactatatttatttagtaaatacagataaaatagaagaagaagtaaaacaaataatagttaaaatcattttatttaaaattctgaatttaaaaacaatggttaataaacttaaagaggaggtaaaacttgaaatttaa

SEQ ID NO: 407893 - DNA, 1524 bp, Staphylococcus aureus
ttgtttgacaatctttattgctcaacactttatcaagaagaattaaatatttcgaatgattataatcaaaacccaaaaagttttcagtatgattttcttaacgatgatataaatatcaatcctgaaagtaatccttatgaaatcaaaatgcctatagaattatttgagtcattaaaacaaaataaaccgtttatcttcttggcgaatccaccatatgcgacagcaaacaatgcaggatctaaaggaacgtcgaagaaaagtgttgcaattactgaaatcaacaaattaatgaaatcaaatggtttgggtaaggcatcacaaaaactttatgcacaattttattatagagtaataaaattagttgaggattttaatcttacaaatgttcatatagcgttctttagtaaatctcaatttatgaacggtggagattattggactcatttcaataacaaattattcagtaactttaaatttcaaaaaggtattttgtttaatgctggtgagttctcagatgtaagtaatgattgggcaattgcatttagtgtatataagaatagagatattataaaaaatgattattctaaactatttccaatgtcagtagaacatttagaaatagatggtatagtccaagatagaataaaagttattgaagaaatagagcaattgaactttttatcgaagtgggttagagaaccgaatgtaaaaagaaaggactttatggatgagccatatcctcatttttcttctgcttttaatataaatcaaggtgtaaaaaatagtggtagactattaaataattcaataggatacatggttaatgtagcaaacaatgtttttaaatctcaaagagatgtatttattttaagtggtagtgcatatatggggcatggattatcaattacacctgaaaatttcgaacgtatcgctataacatttgcggcaaggaaatcaattagtcatacatggataaatgatatggataattttaaagccccagattttagaaaaataacagatatagaaaaggatgaatttatatctgattgcattatatattgcctgtttaatataaatgcaagttatcaaacttctcaaagggatataatttataataatcaatcatttgatttgaataacgaaatgtttttcatgggcatagaagacataaagaaattagctgaagataactataattatgatatagaaaatcaacttagatttgaaaaagaagaaagatatgtttattcattaattaagacaaagaatttaagtaaggaagctactttagtatatgatcaagcagtggaacttttaaaagtttcatttaagtatcgcaatttagcaaatgaagatcatccagaatggcatgttaataattgggatgctggtttctatcaagtatttaaattaattaatgagtataaaattgaagggtttgatgagttcaaaaattcatataatgatttagaaagaaaaattgagaatagagtatatgaattaaaaatgctacaagagtaa

SEQ ID NO: 407894 - DNA, 519 bp, Staphylococcus aureus
atgcatacaaacgaatattcaaaaaaaagatatatagatggaaatccaaatgctacattacataatgcatatggtagtgatggatttttgagatcaggggatttagttttagcgttgagaatgttaatggagtttaaacaaaatttagacttgttaaaagtttcatctagagcaaggattattgctcaagtaatttattatttaaaacagttcgagttaaatggcgaagagccaccaaacgtaatttttagtggtgatgaagatgaaatgtttgtagtatatgcgcctgtactttatgactatttaaaaaaagatttagattggagtattgcaccaagtgacgcatggattaaaaatatagatttaatgaatcaattaaacaatgaccctaacctttcaactttcgtatttgatatcaatacaaaggggtttgatataaatgatgaattaaatgctattgatagtttggtaaacaatgatggagtaatgtacaaaattaaagttacagaaaaaacataa

SEQ ID NO: 407895 - DNA, 810 bp, Staphylococcus aureus
atgagcatagttcagttatatgatattacacaaataaaatcgttcattgaacattcgaattatgaatcagcatcatacttatataaacttcctcaacagtacaatgaaatagatgtattaataaccgatgcgattgaatcacctggtgtattttcgattaaagaaaacgattcaatcaaagcaatcatattgtcttttgcatacgataaaaataaattcaaagtcataggccctttcgtggctgacaattatgtattatctgtcgatacgtttgaaacgctatttaaagcaatgacttcgaaccaacctgacgatgccgtctttaacttttcttttgaagaaggcattcaacaatacaaaccattaatgaaagttattcaagcaagttataacttcactgactattacatagaagcccgtacaagattagaagaagatatgcaccaaccaaatatcattccttatcacaaagggttttatcgtgctttcagcaaattacacacaactacatttaaatatcaggcacagtcaccacaagatatcattgatagtttagacgaccatcatcatttgtttttatttgttagcgaaggtttacttaaaggttatttataccttgaaattgattcacaacagtcaatcgccgagattaaatacttcagttctcatgtagattaccgtttgaaaggtatcgctttcgagttgcttgcgtatgcattgcaatatgcttttgataatttgatattagaaaagtttattttaaaattcgtaataaaaataataaactcatcgaacgatttaatggtctag

SEQ ID NO: 407896 - DNA, 435 bp, Staphylococcus aureus
atgcacatgtcaattataagtgaagcgagcaaagaaataaatttaactagattatcaatattcatttttatcataaatatacttaatcaattacgagggattgttatttatcaaaatgacacgatgattgtaacgaagttcaaacatgaagtacaatgtgtcatttgtttgccagccgcattgttaaatgagaattcagacgctatacgtttatcgtgtaagggtcttcaacaatttagccatgctaaaactaaacaaattgttttaagtatagataaagataatcatacttccgaaaatggtgtacttgtgaatgatattatgcaacaacacagttattggaaagctaattttatagaaagaaatatttatgatcattcattaatggtctcaagcaatagtattgttcatttgaaatatcatcttgagatatag

SEQ ID NO: 407897 - DNA, 1398 bp, Staphylococcus aureus
atgaaaagaaaaccaacctttttagaatcaatttcgacaatgattgtaatggttattgttgttgtaacaggctttgtgttttttgatattccaattcaagtattattaattattgcctcagcatatgccacatggattgcaaaacgtgtaggcttaacatggcaagatttagaaaaaggcattgcagaacgtttaaatactgcaatgcctgcaattttaattatactagcggtaggaattatagtaggcagttggatgttttctggcacagtgccagccttgatttattatggcttagatttattgaatccaagctattttttaatatcagccttttttataagtgctgttacatctgtagcaactggtacagcatggggctctgcatcaactgcagggattgcacttatttctattggtaatcaattggggattcctccagggatggcagcgggtgctattatagcaggggctgtgtttggcgataaaatgtcaccattatcagatacaactaatttagcggcgcttgttactaaagttaatatatttaaacatatacattcgatgatgtggacgacgatacctgcatcaatcataggtttattagtatggtttattgctggatttcaatttaaagggcattcaaatgataaacagattcaaactttgttatcagagcttgcacagatttatcaaattaacatatgggtctgggttcccttaattgtgatcattgtttgtttgctatttaaaatggctacagtgccagctatgctaatatcaagcttttctgccattatagtggggacttttaatcatcatttcaaaatgacagatggtttcaaagcaacatttagtggttttaacgactcaatgatacatcagtctcatatttcatccagtgtgaaaagcttgttagaacagggtggtatgatgagtatgacccaaatattagtaacgatattttgcggatatgcatttgcaggtattgtagaaaaagcaggatgtttagaagtcttattaactactatttctaaaggcatccattctgtaggaagtttaatatgtattactgttatttgttgtattgcgcttgtattcgctgcaggtgttgcttcgattgtaattattatggtcggtgtgttaatgaaagatttgttcgaaaaataccaagtctctcgttccgttttatcaagaacacttgaagactcaagtacgatggtcttacctttaataccatggggaacatcaggtatttactatacgaatcaacttcatgtctctgttggagaatttttcatgtggacagtaccatgttatttatgcgcaattatagcaattatctatggttttacagggataggtattaaaaagtcatcgaattcacgtttaacttaa

SEQ ID NO: 407898 - DNA, 987 bp, Staphylococcus aureus
atgcaaaaagttgaaagtatcataattggtggagggccatgcggattaagtgcggctattgaacaaaaaagaaaaggtattgataccttaattattgaaaaggggaatgtcgttgaatcaatctataattatcctactcaccaaacatttttctcatcaagtgataaattaagtattggggacgtaccgtttatcgttgaagaaagtaaaccaagacgtaatcaagcgctagtttattaccgagaagttgtaaaacatcatcaattaaaagtaaatgcatttgaagaagtattaactgttaaaaaaatgaataataaatttactattactacgacgaaagatgtttatgaatgtcgatttttaacaatcgcgacaggctattatggtcagcataatacattagaagttgaaggagcggatttacctaaagtgttccattattttaaagaggcacatccgtattttgatcaagatgttgttattattggtggtaagaattcggctatcgatgctgctttggagttggaaaaagctggtgctaacgtgacggttctatatcgtggtggagattattcgccttcaattaaaccgtggatacttccaaatttcacagcattagtaaatcatgaaaaaattgacatggaatttaatgctaatgttacccaaataactgaagatactgtgacttatgaagtaaatggtgaaagtaaaacaatacacaatgattatgtatttgcgatgattggttatcatcccgattatgaatttttaaaatctgtaggcattcaaattaatacaaatgaatttggaacagcgcctatgtataataaagaaacatacgaaacaaatatcgaaaattgctatattgcaggtgtaattgctgcagggaacgatgcgaataccatttttattgaaaatggtaaattccacggtggcattattgctcaaaacatgctagctaagaaacaaacgccgttagaatcataa

SEQ ID NO: 407899 - DNA, 1461 bp, Staphylococcus aureus
atgtctaataattttaaagatgactttgaaaaaaatcgtcaatcgatagacacaaattcacatcaagaccatacggaagatgttgaaaaagaccaatcagaattagaacatcaggatacaatagagaatacggagcaacagtttccgccaagaaatgcccaaagaagaaaaagacgccgtgatttagcaacgaatcataataaacaagttcacaatgaatcacaaacatctgaagacaatgttcaaaatgaggctggcacaatagatgatcgtcaagtcgaatcatcacacagtactgaaagtcaagaacctagccatcaagacagtacacctcaacatgaagaggaatattataataagaatgcttttgcaatggataaatcacatccagaaccaatcgaagacaatgataaacacgagactattaaagaagcagaaaataacactgagcattcaacagtttctgataagagtgaagctgaacaatctcagcaacctaaaccatattttgcaacaggtgctaaccaagcaaatacatcaaaagataaacatgatgatgtaactgttaagcaagacaaagatgaatctaaagatcatcatagtggtaaaaaaggcgcagcaattggtgctggaacagcgggtgttgcaggtgcagctggtgcaatgggtgtttctaaagctaagaaacattcaaatgacgctcaaaacaaaagtaattctgacaagtcgaataactcgactgaggataaagcgtctcaagataagtctaaagatcatcataatggcaaaaaaggtgcagcgatcggtgctggaacagcaggtttggctggaggcgcagcaagtaaaagtgcttctgccgcttcaaaaccacatgcctctaataatgcaagccaaaaccatgatgaacatgacaatcatgacagagataaagaacgtaaaaaaggtggcatggccaaagtattgttaccattaattgcagctgtactaattatcggtgcattagcgatatttggaggcatggcattaaacaatcataataatggtacaaaagaaaataaaatcgcgaatacaaataaaaataatgctgatgaaagtaaagacaaagacacatctaaagacgcttctaaagataaatcaaaatctacagacagtgataaatcaaaagaagatcaagacaaagcgactaaagatgaatctgataatgatcaaaacaacgctaatcaagcgaacaatcaagcacaaaataatcaaaatcaacaacaagctaatcaaaatcaacaacagcaacaacaacgtcaaggtggtggccaaagacatacagtgaatggtcaagaaaacttataccgtatcgcaattcaatactacggttcaggttcaccggaaaatgttgaaaaaattagacgtgccaatggtttaagtggtaacaatattagaaacggtcaacaaatcgttattccataa

SEQ ID NO: 407900 - DNA, 546 bp, Staphylococcus aureus
atgcaacaaaataaacgtcttatcacaataagtatgttgagcgcgattgcgtttgtattaacttttatcaagtttcctataccatttttgccaccatacttaactttagattttagtgatgtaccgtcactactagctacatttacgtttggaccagttgccggtatcgtagttgcactggttaaaaatttattgaactacttatttagtatgggcgatccagttggaccatttgctaactttttagcgggcgcaagtttcttattaactgcttacgccatctataaaaataaacgttcaacaaaatctttgattactggattaatcattgcaacaatcgttatgactatcgtgttgagtatcttgaactatttcgttctattacctttgtacggtatgatatttaacttagctgatatcgcaaataatcttaaagtaatcattgtttcaggaattataccattcaatattattaaaggtatcgttatttctattgtatttattttactatatagaaggcttgcgaatttcttgaaaagaatttaa

SEQ ID NO: 407901 - DNA, 957 bp, Staphylococcus aureus
atgcttaaaaaagcaaaattaatcttaatagcagcactagtactgtcagggtgctccacgattgaaaatgaatcaaaaaaagacagaaatacagaaacaaatacagaaacgaaatcagtaccagaagaaatggaagcttcaaaatatgtaggccaaggattccaaccgcctgcagaaaaagatgcgattgaatttgcgaagaagcataaagataaaattgctaaacgtggcgaacaattttttatggataacttcggtctaaaagttaaagctacgaatgttgtaggtagtggcgacggcgtagaagtatacgtgcattgtgatgaccacgatatcgtatttaatgcgagtattccatttgacaaatcaattattgacagtgatagctcattaagaagtgaggataaaggcgatgatatgagtactttagttggtacagtgttgagtggttttgaatatcgagcacataaggaagagttggataatttaacagaagttttaaaagaatataaaagtaaatataaatatactggttatactgaaaatgcaattatgaaaacgcagaatagtggttttagaaatgagtattattatttgactgcaattccatatactttagatgaatgtaaaaggtattttcaacccttaatcaaagaggatgataagtcttttagggacggtatgagaaactcaaaaaaacaacttaaagataaatcacgtccatatgttgttacaactttatttagtactaaagataattttactaaagataatacaatagacgagatgattgatttttctgaagtactaaaaaagaaaaagaatattcctcatgatttgaatgtttctcttcaaatttctaataaatatataaatacaaaaagacctaactatagtaagaaggaagtaatagaagtaggtgtatttaatcatgaaaaagctaacacgaatgattaa

SEQ ID NO: 407902 - DNA, 255 bp, Staphylococcus aureus
atgaaaaaagattttaaagtaaatggaaaacggttcaaacaaatagattattttaatgataaaaataacgataatatgaaagatgcagttgatataaaaacctacgagctacttaatgatcagggagatccaactggtcaaaagacaataatatatcaaggaacatctaaagaggcaattaatccaaataatccattaaaatcatcgggttttggagatgattggcttcaaaatgctaaattaatgaataattaa

SEQ ID NO: 407903 - DNA, 1581 bp, Staphylococcus aureus
ttgaaaaagaaaaacatttattcaattcgtaaactaggtgtaggtattgcatctgtaactttaggtacattacttatatctggtggcgtatcacctgctgcaaatgctgcgcaacacgatgaagctcaacaaaatgctttttatcaagtcttaaatatgcctaacttaaatgctgatcaacgcaatggttttatccaaagccttaaagatgatccaagccaaagtgctaacgttttaggtgaagctaaaaaacttaatgactctcaagctccaaaagctgatgcgcaacaaaataacttcaacaaagatcaacaaagcgccttctatgaaattttgaacatgcctaacttaaacgaagaacaacgcaatggtttcattcaaagtcttaaagacgatccaagccaaagcactaacgttttaggtgaagctaaaaaattaaacgaatctcaagcaccgaaagctgataacaatttcaacaaagaacaacaaaatgctttctatgaaatcttgaatatgcctaacttaaacgaagaacaacgcaatggtttcatccaaagcttaaaagatgacccaagccaaagtgctaacctattgtcagaagctaaaaagttaaatgaatctcaagcaccgaaagctgataacaatttcaacaaagaacaacaaaatgctttctatgaaatcttgaatatgcctaacttaaacgaagaacaacgcaatggtttcatccaaagcttaaaagatgacccaagccaaagtgctaacctattgtcagaagctaaaaagttaaatgaatctcaagcaccgaaagctgataacaatttcaacaaagaacaacaaaatgctttctatgaaatcttacatttacctaacttaaacgaagaacaacgcaatggtttcatccaaagcctaaaagatgacccaagccaaagcgctaaccttttagcagaagctaaaaagctaaatgatgctcaagcaccaaaagctgacaacaaattcaacaaagaacaacaaaatgctttctatgaaattttacatttacctaacttaactgaagaacaacgtaacggcttcatccaaagccttaaagacgatccttcagtgagcaaagaaattttagcagaagctaaaaagctaaacgatgctcaagcaccaaaagaggaagacaataacaagcctggtaaagaagacggcaacaagcctggtaaagaagacaacaacaagcctggtaaagaagacggcaacaagcctggtaaagaagacggcaacaagcctggtaaagaagacggcaacggagtacatgtcgttaaacctggtgatacagtaaatgacattgcaaaagcaaacggcactactgctgacaaaattgctgcagataacaaattagctgataaaaacatgatcaaacctggtcaagaacttgttgttgataagaagcaaccagcaaaccatgcagatgctaacaaagctcaagcattaccagaaactggtgaagaaaatccattcatcggtacaactgtatttggtggattatcattagcgttaggtgcagcgttattagctggacgtcgtcgtgaactataa

SEQ ID NO: 407904 - DNA, 1776 bp, Staphylococcus aureus
atgtattacagttatggaaattatgaagcatttgcgcgccctaaaaaacctgaaaatgtagaaaacaaatctgcttacttaatcgggtctgggttagcttcacttgcggcagcttgtttcttaattagggatggtcaaatggaaggttcgaagattcatattttagaagagttacctaaagcaggtggtagtcttgacggagaaaatattcctttaaaaggctatgttgtccgcggtggtcgtgaaatggagaaccactttgaatgtttgtgggacttattcagatctatcccttcattagaaatcgataacgcgtcagtattagatgaattctattggttaaacaaagaagaccctaactattctcgttgtcgtgttattgagaaacagggtcaacgtttagtcacagatggagacttcactttgactaaaacggcaattaaagaaattttagatttatgtttaacgaatgaagaagatttagatgatgtcaaaataacagatgtattttccgatgacttctttaattcaaacttttggatttactggaaaacgatgtttgcatttgaaccgtggcattctgctatggaaatgcgtcgctatctaatgcgattcgttcatcatattggtggtctcgcagacttttcagctttaaaattcactaaatataatcaatatgaatctttagtattacctatggttgaatatttaaaatcgcatggggttcaatttgaatacgatgtaaaagtagaagatattaaagtagatgttacgacaagtcaaaaaattgcccgagaaatattaattcaccgacatggcaaagcagagtcaattaaactgactgtagatgatcttgtctttgtgacaaacggtagtattacggaaagctctacgtatggtgataatgatacaccagcaccaccaactgacgaattaggtggtagttggacactatggaaaaatttagcgcgacaaagtcctgaatttggtaatcctgataagttttgccaaaatattcctcaaaaaagttggtttgtttctgcaacatcgacaactaacaataaagatattatcgatacaatagaaagcatttgtaaacgtgatccacttgcaggcaaaacggttactggcggaattattacaatcaatgattctgcatggcaaatcagttttacaatcaatcgtcagcaacagtttaaagaccaacctaaaaatgaaatatctacatggatttatgccttatattcagatgtaaatggcgattatattaaaaagccaatcacagaatgtagtggtaatgaaatatgtcaagaatggctgtatcacttaggtgtatcaactgacaaaattgaagacttagcaaaacatgcatctaatacgattcctgtttatatgccatatatcacatcttatttcatgacgcgtgctatcggcgacagacctttagtcgtcccgcatcaatctcagaacttagcatttattggtaactttgcagaaacagagcgagacactgtatttacaacagaatattcggttcgtactgccatggaagctgtttatcaattactaaatatagatcgtggtattccagaagtcatcaatagtacatttgatcttcgcgtcttaatggatgccgtatacgaactgaatgaccatcaagatttgcgcgagattactaaagattcgaaaatacaaaaactcgcattagctggattccttaaaaaggtaaaaggtacgtacattgagacattattaaaagaacacaaattgttataa

SEQ ID NO: 407905 - DNA, 261 bp, Staphylococcus aureus
atgtctattaattcaaataaattcttttttgctacttatttttggtgtaaatctcaaattgaagaagttatggaacatttttattctaaatttgaggaaactatagaaaatcgctggttttgggttattattgctatcattgccatagtaggaattataggctacgcattcttttgtactagcagaggatataactttaatggaaacgttaaattacattggccaagaatttggcaggctggaataggttgcagtagataa

SEQ ID NO: 407906 - DNA, 723 bp, Staphylococcus aureus
atgttaaatattaaaaatcttacaaagaatttcaaaaaaaaagaagtgttaactaatattaatacttctttttctctcaatggaacttcaataatagttggtttaaatggtagtggtaaaacaactctattaaatataataacaactctaacaaaaccagattttggtaacgtttttattaataataatgctttaggtgatccaaattataaaaaagaaatatttttcatcccctccgatttctttttaccagaatatatgacgggggaagagtattttttattcgtaagtagtatttacaatcaaaaattcataaatgacaaaaattacttttatattttaagtgaactatttgacatatattcattccttaggaatacaatcgaaacctattcttatggtatgaaaaagaaattacagatatgcatagcattgactattaaaactaattttttattagcagatgaattaactaatggtctggattttgaagctaaaatactattagaacatttaattaaagagcaagaaaaaacacgtaaaattattttggtttcccattcgatggattttatttctaaattttcagatgatattagaattttagaaaaaggtaaactatccatatatgaaggcaatatttcgttattagaaaagtatttaatttctaaaggtgatctatgtggaaaaattaaaattatcgaacaatataataatagttaa

SEQ ID NO: 407907 - DNA, 1344 bp, Staphylococcus aureus
gtggaaaaattaaaattatcgaacaatataataatagttaaatttttattacgtgaggtttttaatagcgtatttaatagcgtgttattaaaaagtaaaaccaataaagtaatattccttatattactagcacttgcttatataacctatatttatatcaacattacacaattcaacacatttaataaaaattttgataataatatagccaaacaattaattagcagctatataaatgtaactattatcactagcctaataatatacttatttatagatgttacattcaacttaagttcgaaatctttattcatgctaaaaagtttgccttttagtttaaaagaaattaatttatctaaatctatatttaaactagcactttttatcattttatttgaacttataataataattactatacctttgtttacactaactaatatgaatctaattcagtttttaagtttattcataattatacacatcattatgctcgattgttttttgatattagaatttttaattcaaaatattttattaaaatatttatcaaatatgcttggctatggattatacattagttttattatttctagctcagcatactattttgtgttctttagatttaaaatagacttatgggtatactactcttcttacagtatcaacagtttattaatattatgcttcataatattttttatgattttgttgataatgatttcgatattatttaaatggttcggtgatgaccgctcatttataaacttaaaatactttaacacaaaaattaaactaactaacggtatattcaatattatattattagcacttttaagacaaaaaagattagtttatatgttgagtttagttattacagctacagtgttgtgctttatctattttgattggtttaaatctttacaattactatactttttatatcctttaacatttgttgcaggtctattttatgccgactctatatctggtgtaagtagaatgttcactttatatagagtatcaaccaatcaagaatttttatgtttagttatttgccaaactcttttgttattaccaatgactttattatttggtattactaaactttctatctcttttatattaattggctttgctctaataactttaacaattattttaggattcatattcccagcctttgaaagtgcaattaacgaatcaacttcaagcatattaactttgtttatcctggtattaatttctttattattttcaaaaacacactatttaattttatctataacaatacttttaggtgttgaatacttatgtatttttaaagaaaggaggcacacgtaa

SEQ ID NO: 407908 - DNA, 273 bp, Staphylococcus aureus
atgaaactagctaagttattaacaattagctttatagtttggttagctatatcgctaatagattttctatatgaactatttaaaatcacacagagtcaaaccataatcacacttatgggattgaaaatacaaatgtctatgactaaagatgaaattatgacatatttctctttaacccccaagatgttagttagttttataacagtgtttgttatagtgactgttataatgcttttcttttcaaaacacaataaggttacagaaaaacaatga

SEQ ID NO: 407909 - DNA, 360 bp, Staphylococcus aureus
atgaattttgtacttattatattaaatttacttctttcttttataatagttgctttaatacatgagtttactcatttgatatttctcaaaattttcaaaagagaaaatatacggataaatatacgtatattttttgtttctattacctataaaaataaccacaatcctctccaaaatttaattatagctatatctgcacctgttatttgtctttgtattggattgattatgctatcattaggtaagttgaattttattacgttaatatttttaaccaatgtatttaattttttacctataactcaagacggtcaagttattttgatttctttaattgatatatttaaagacaaaaagtaa

SEQ ID NO: 407910 - DNA, 483 bp, Staphylococcus aureus
atgaagaaatttaacaactggatattaaacgcaataagtggatctcaaacagacaagaatggaacaactgaagaattaaaaggggcaaaatttatcattttatatgcatattcaatgctcgttttgcttgcgttagtaatttctaacatattcattcacattttggagcctaaactatcaattaccactcaaatcatcatcgttttgattttaattgaatcactaattggactacgtttcttgaaagggtacgatgttaggcgtggcaaagataaagaaaataagaaaaatagtaaggatttcgttaaactaaaatcaattttagtagcaattttatttacatcattggcgctgacagcaggcactgtagctgatatatacggtatcactgacttaggaaatactagaagtgatttaatcgtttggagcataggtggtattatatttggcctcgtatgttacacaatggaagataaaaaataa

SEQ ID NO: 407911 - DNA, 3153 bp, Staphylococcus aureus
atgagtcaattgctaaatgatacgttatcggcttggttgttaattgaatctttaagtccaggagaagtaaattttacagcggaagatatactctcagctgaacattttaaaaatggtacaaagcaagcacagcttcaaagttttgatgaatattttgaaatatggaacgatgaacgttttattgtgtcagaagaaaaatcagagactggggaacttatatttaaattttatagacattgcttccgctataatgaaattaatttgaaaattcaagatatttttgaaaatcactctgatattcataatccaaatgggacacactgttatggttacacatttaacacagataaacacggcaaagtgatagttgattctatacatattccgatgattatgagtgcattaaaagaaattgaaaagaacaaaaatgccaatatagaagaaaaatttaatgattctgttgaaaaatttgttcaaaaagtaaaagaaattttagcagatgaaccaattaatgaatttaaattgaagaagatagacaaagcttatgatgagtacttttctgtattaaattcaaagaaagatggattatttgcgcattatgtagcaatagaatatgtgaaagatagtgatttaccacagccggaatttaacagcttcttcataagtgatattgagaaagcaagaaaatctcccaaccaaactttaattgattacattgaaggtgtagaagaaagtcagcgcatagaagtagatgaaaataaagaaatgtttgacaaatttttacatccttcacgtttgcctgatggacgctggccatcacagactgagtttagattgtctttaatgcaacaacttgctgtaaaccaaatcacgagtggtaatgaaagaataagttctgttaatgggccaccagggacaggtaagacgactttattaaaagatatatttgctcatctagtagttgaaagaggcaaagagttagccaaactaaataatcctaaagatgcatttgtcaaaacaaaaattcatgaaacagatgataaatacgtctatttacttcaggaatctattgctaaatataagatggtagttgcgtctagtaataatggcgctgttgaaaatatatctaaagatttaccgaaaattgaagaaattataagaaatcctgaaaaatgtaaattcccggaatatgaaacagcttatgcaaatttagcatatgaattaaaagattttgctgaaatagctgaagatttgattggggaaagtgcctggggcttattttctggggtgtttggaaaaagtaccaatattaatcaagtattggatcacatgttaaaacaagatgtgaatgatattggctttgctagattacttcaaaatgaaaataatcgtatgggttatcacgagttaataactgaatggcaagcacatcaacgtgcatttttagaagagttgaagcatgttgaaatgttaaaagaagaatctattagagcctatgatgtttataaaagttgtgagtcttactctaagatggaacaggcaattaatagtgaaaaaacaacaattgaagaacagatatatcatttagaaaatgaagcgttacgagacaataaagaaatagaagatttggataatcaaattaattataatgctaagcaactagaaactttaaatgagttgattaaatccatcaaagaaagcaacaaaggttttattaacaaactgaaggcgatgtttaattcagaagaagatgaaagttataaagatcataataaagagaagcaacaattattaacacaacagttagagttagagaaatgtaaaaaaaacaaacatgaagaccttgttagcaaactaaaagaaaaagagaaattaattaaacaattaactaaagtacagttgcaattagacgagttaaattcacagttacaagagttagaagcatatcgtattaagtcaaaaattacaattccagaaaaagatttttggagtgacaacaattatgatgagcgccaagttactaatttgtggacgagtgacgaacttcaatacagacgtgccatgctctttttaagagcaatgatattgcataaattattattgattgttaataatacaactatttattatgcgattaatgattttaaagatagaaggaaattaattgatgcaaatccagataaagtacacaatgcatggaatgtgatgcatttaatatttccagtagttagtacgacgtttgcaagctttaaatctatgtatgggggcataccaaaagatttcatagactacttatttattgatgaagcaggacaagcaatacctcaagcagctgtgggagcattatttagatcgaaaaaagttgtagctgtaggtgatccgattcaaattgaaccggttgttactttagaaagtcatttaattgataatattcgtaaaaattataatgttccggaatatctagtttctaaagaagcttctgtgcagtctgtcgctgacaacgctaatcaatatggtttttggaaatctgatgctactgatagtaatcaaaaaacatggataggcatacctttatgggtgcacagacgatgtttaaaacctatgttcacgatagctaaccaaatcgcttataataataaaatggtgttgccaagtaatattacaaaagtaggtaaaacaggttggtatgacgttaaaggaaacgcagttcaaaaacaatttgtgaaagagcatggtgaaaaagtagtgggattattagctgatgattggattgaagcaattaaggaaggtaaaaatgaaccgagctcatttgtaatatcgcctttttcagcagtacagcaacaaattaaacgtatgttaaagcaacgactaccggctagaatcgatattcaacgttcaaaagtcaatcaatggattgataaatccattggaactgttcatacttttcaaggtaaagaggctcaaaaggtgtattttgtaataggtactgataatactcaagatggtgctgtgaactggtcatgcgaaaaaccaaacttgttaaatgttgcagtgacaagggctaaaaaagagttttatgtaattggtgacatgcaaagaatacagtcgaaaccattttatgagaccatttttaaagaaagaaatgtaaaatga

SEQ ID NO: 407912 - DNA, 603 bp, Staphylococcus aureus
atgttaattagtctcgtaaccccagtttttgctttgttagttattggtggtattatttgggtgattatagaaggtatagtacatatttcaaaaaagaataaagcaatggatatttttttaaacaaagttaataaagttagtgagacatataaattcgctactacttttttatttctaatcttggctacggctggtatttctcaattttatctatattatatagtatcagcgtttcttttttggcttgtcatacttacctttggtattgcaggtattatttttttaatgccatatggattatgttttctaccgctttataagcaaaaaaagaaaaaacagacatttaaaaaatacatggtttacactacgattggtttgtcaatttgtctaggcttatctctagttttggttcacactacgaaaatttatatggacgaaggtggcgtaagatactattacggtagttttgtaatgaaacaagcgggcggttatgcttatttagctttagcggtactttcaacgttgttaattgttgcgaaaaaagctacaaataaaaaaaaagaaatcgaaaccgtcgacaatacaaatataacggaaagataa

SEQ ID NO: 407913 - DNA, 861 bp, Staphylococcus aureus
ttgaacttaaacattttaaaatcatttttagtaactagtgaaacaaagaaccttactaaagcatcagagttacttaactattcacagtcaactgtatctacacatattgaaaaattagaaaggcaattagatgttaaattattttatagaaaaaaatatggtatggaactaacggaagaaggcttagcatacgttaaatacgctaaagtgattttagatagtaatagcgaatacgagagagaaataaaaggactttacaataagaaggtaaatataagtattaacatgcaagaaagtcagtatttgtatcgctactataataagattagtgaatggttagctgaacacccatatgtaaacttgaagtttaaatccgcacattctaatttctatattaaagaagaaattgctaatttcaaatcggatattagccttatcacagacgaaaagattattaatagtaacttaactgctattcctataactgaagaacgtttaatatttgttactaacaaagagatgaaagatttcaaattaaacgatattcaaaaccatacattacttgttactgaaaaagggtgtagttacagagaacagttagaaaagattctctataaatatagcttttcaacaaaacaaatgattgaatttctaggaattgagtcattgaaaaaacacttgaaaaattcagatgggattgcgctattgccggagtttattgttgcagatgaattacaaaataaaagtttgtttcaaatagatgtcgatgtcgatattccgaatttagaaacaactttgataattaatcctgaatccagtaagcaagtactagaatcttttgtaaaagatgtctttttataa

SEQ ID NO: 407914 - DNA, 777 bp, Staphylococcus aureus
atgcacttcataaaaagtttagaacttgatgctagagaattaagaaaagagctaattgacattgcaaattcagaatatggttgccacttgggtggttctttatcagttttagatttattatacgcttcatatataaatttcgaaaatagcgaaataatacttagcaaaggtcatacatgcgcagcattatacgctattctctataaattaaataaattaaaagaaaaaccttcattaagttatggaaagttcaactcacttttaactggtcaccctaatcatctaataccaaacataaccttctcaactggcagcttaggtcacggtttaccatatggcataggggtgtctttgtctaataaattaaagcagaaagaatcaggagaaaatacaataattataggtggtgatggtgagttacaagaaggtttaatatgggaaactttgcaagtagccagtggtcaaaacattgccaactttatttatataatcgataaaaacaatggtcaaaatgatggagcaacttcaagtatctctccttatcataacttaaaaagtcgtttttcttcgtatggttttgatgttctagaaattaatggacatgattataaagagatattagaatcattttcaaaaaaaagagcaaatcacgctctagtaattattgcaaataccattaaaggtaagggaataccttctctagaaaataatttttcatctcattacgtaaaaatcaatgaggctactgccaaaaaatggaaggaggagttaatttaa

SEQ ID NO: 407915 - DNA, 906 bp, Staphylococcus aureus
atgctatcatctagagacgcatataagcatgaattaaccaaactggcatataaatacgaagatatcattgcagttgaagcagatttaggcggtaaaaaacatatatttaaacaacatcacccttcacgcttttttaatttcggcatcgccgaaatggcttccattgatatatgcagcggcttagctcaaaaaggattcaaaccatacttttcaacctttgctccatttgtagcattacgatgtgcagaatcattaaaattatctcttagctacatggaacataatataaaaattattgcttgttatggtggtgtttctggcggttggtttggaactacacatcattgtctagaagatatgtcaattgtggcaactcttccaaatataacaatcgcatgccctcatggtgaagaagaagtccgaagcgtcatcagaaaatcttattttgaagataaaccatattatataaggctatatagaaatgatacttttgaaagtataaaaaatccttataacaaaccttttgttatagatggagaatttgataaaaacaacaaaatgacattaatatctattggagaaatttctacagaaatttgtaaagaaataaatgataaatcaaataaaattaatcatatacatttgatttatgtagataaagattcgctaaaaacttatataaatgaattgtcttctttacttaaaggacacaaaatcattacagttgaagaacatagacaaacaggttctatatcgaacttactagcatctttaattgacaatacagtgatcccattcacacctaatgatgaatatccacaccatggcggttcacatgctgaagtactaaatcaattgggatttagtaaagaaaagttattaacattactaaaagaggtggaataa

SEQ ID NO: 407916 - DNA, 987 bp, Staphylococcus aureus
atgaaagaaaatttttggagtgaattaccacgtccattttttattttggcgccaatggaagacgttacagatatcgtctttcgacacgttgtaagtgaagcagctagaccggatgtgtttttcactgaatttacaaatactgaaagcttttgccaccctgaaggcatacatagtgtgcgcggacgcttaacttttagtgaagatgaacagccgatggtcgctcatatatggggagataagccagaacagttccgtgaaacgagtattcaattagctaaaatgggctttaaaggcatagacttaaatatgggatgtcctgtagcaaatgttgctaaaaagggtaagggttccggcttaatcttaagacctgacgttgctgccgaaattattcaagcgactaaagcaggtgggcttccggtaagtgttaaaacacgccttggctactatgaaatcgatgaatggaaagattggttgaagcacgtcttcgaacaagacattgccaatttatctattcatcttcgtacacgtaaagaaatgagtaaagtagatgcacattgggaattaatcgaagctattaaaaatttacgtgacgaaattgcaccaaatacattgttaacaattaacggtgatattcccgatagaaaaacaggacttgaactggcagaaaaatatggcattgatggcgtcatgattggtagaggcattttccacaatccattcgcttttgaaaaagaaccacgcgaacacacaagcaaagaactattagatttgttgagattgcatctatcattgtttaacaaatatgagaaagatgaaatacgacaattcaagagtttgcgtagattctttaaaatctatgtgcgtggcataagaggcgctagcgaacttcgccatcaattgatgaacacacaatcaattgcagaagtacgagcactactagatgaatttgaagcccaaatggacgaagacgttaaaattgaattatag

SEQ ID NO: 407917 - DNA, 1746 bp, Staphylococcus aureus
atgaagattaatatttataaatctatttataattttcaggaaacaaatacaaattttttagagaatctagaatctttaaatgatgacaattatgaactgcttaatgataaagaacttgttagtgattcaaatgaattaaaattaattagtaaagtttatatacgtaaaaaagacaaaaaactattagattggcaattattaataaagaatgtatacctagatactgaagaagatgacaatttattttcagaatccggtcatcattttgatgcaatattatttctcaaagaagatacaacattacaaaataatgtatatattataccttttggacaagcatatcatgatataaataatttgattgattatgacttcggaattgattttgcagaaagagcaatcaaaaatgaagacatagttaataaaaatgttaatttttttcaacaaaacaggcttaaagagattgttaattatagaaggaatagtgtagattacgttagaccttcagaatcttatatatcagtccaaggacatccacagaatcctcaaatttttggaaaaacaatgacttgtggtacaagtatttcattgcgtgtaccgaatagaaagcagcaattcatagataaaattagtgtgataatcaaagaaataaacgctattattaatcttcctcaaaaaattagtgaatttcctagaatagtaactttaaaagacttgaataaaatagaagtattagatactttattgctaaaaaaactatcgaattcttcaactacagaaaatatatctatagatatatcaagatttttagaactaagtaatatgatactcttgttagatgatatgctcgacgtcaatatatatataaattcttttaaaaataatacattagagacatttgatgcgactgatcctgaagttgattacatcactgaaataggagattacttattaaaatatgacgttaattctataaatgatgtcagaattgaagtgatagataatttggggcattcaaataatatgctactaaaaacgatactacatgcagaagttgaaatggaagatggaaagaaatatttattacaaaatgggaaatggggttattttaatagagaattttttgaccttttgaatgatcatttgaatgagatagaaattaggtataacacactaactcccacaggtttagtatttaaagaaggagaagaaggatatataaaagaaatagtaggaagattgccagaagaatatttaatgttacataaaaaattcataaaaccaataaataagaattttatagtaaaaggaaatggaatagagttggcagacttatacaatattaaaaacaaagagcttttcacgattaaaagaggaattaatacatctttatctctttatagtctagaacagaatataatagcaattaacgccttaaaatatccagaatcatataattttgaagaattaatagaagctattcctgataactcggaaaatatatttaatgatatacaacggagtacaaattttagtatagtatggattttaccgatatcatctattgataatatgcccataaaagatatggttcatactagtaacgtaataaataaaaactttcaattaactaatttaggttcagtattacttaaaaataaattagtagagtggtctctctatttaaaagatcaaagaattaatccaattatttatatggaaacgccaactgaagatagaaattaa

SEQ ID NO: 407918 - DNA, 150 bp, Staphylococcus aureus
atgatattttcgcaaaatttatttcgtcgtcccaccccagcaaggttgactagaattgaaaaaagcttgttacaagcgcattttcgttcagtcaactactgccaatataacttcgtagagcatagaacattgatttatgtaccagcctga

SEQ ID NO: 407919 - DNA, 684 bp, Staphylococcus aureus
atgaaatttacagcattagcaaaagcaacattagctttaggaattttaacaactggaactttaacaacagaggctcattccagtcatgcaaaacaaaatcaagagtcagtaaacaaacatgacaaggaagcattataccgatactacactggaaagactatggaaatgaaaaatattagtgctttgaaacatggtaaaaacaacttacgttttaagtttagaggtattaagattcaagttttactgcctggaaatgataaaagtaaatttcaacagcgtagttatgaggggttagatgtgttttttgttcaagaaaaaagagataagcacgatatattttatactgttggtggtgtaatacagaataataaaacatctggagttgtcagtgcaccaatattaaatgttacaaaggaaaaaggtgaagatgcttttgtgaaagggtacccttattatattaaaaaagaaaaaataacattaaaagagttagattttaagttgagaaagcatctaatcgaaaaatatggactttataaaacaatctcaaaagatggtagggttaaaattagcttgaaagatggcagtttttataaccttgatttaagatctaaattaaaatttaaatatatgggggaagtcatagaaagcaaacaaattaaagatattgaagttaacttaaagtaa

SEQ ID NO: 407920 - DNA, 882 bp, Staphylococcus aureus
atgaaaataacaacgattgctaaaacaagtttagcactaggccttttaacaacaggtgtaatcacaacgacaacgcaagcagcaaacgcgacaacaccatcttccactaaagtggaagcaccacaatcaacaccgccctcaactaaaatagaagcaccgcaatcaaaaccaaacgcgacaacaccaccttcaactaaagtagaagcaccgcaatcaaaaccaaacgcgacaacaccaccttcgtctaatgtagacacatcaccactacaatcgccaaccacaaaacaagtaccaacagaaataaatcctaaatttaaagatttaagagcgtattatacgaaaccaagtttagaatttaaaaatgagattggtattattttaaaaaaatggacgacaataagatttatgaatattgttccagattatttcatatataaaattgctttagttggtaaagatgataaaaaatatggtgaaggagtacataggaatgtcgatgtatttgtcgttttagaagaaaataattacaatctcgaaaaatattctgtcggtggtatcacaaagagtaatagtaaaaaagttgatcacaaagcaggagtaagaattactaaggaagataataaaggtacaatctctcatgatgtttcagaattcaagattactaaagaacagatttccttgaaagaacttgattttaaattgagaaaacaacttattgaaaaaaataatctgtacggtaacgttggttcaggtaaaattgttattaaaatgaaaaacggtggaaagtacacgtttgaattgcacaaaaaattacaagaaaatcgcatggcagatgtcatagatggcactaatattgataacattgaagtgaatataaaataa

SEQ ID NO: 407921 - DNA, 681 bp, Staphylococcus aureus
atgaaatttaaagcgatagcaaaagcaagtttagcattgggaatgttagcaacaggtgtaattacatcgaatgtacaatcagtacaagcgaaaacagaagttaaacaacaaagtgaggctgatttaaaactttattataatggaccaagttttgaatataaaaaagtaactggatatggatttattgaaggtaaagatagatttattgattttatatacaatggacaatataataaaatatctttagttggttctgataaagataaatataatgaagaagttaacccagatatagatgtgtttgtcgttagagaaggaaacggtagacaagctgataatcattcgattggtggcataacaaaaactaatagaggagtgtattatgactatatacacacaccaatccttgaaatcaagaaaggtaaagaagaaccacaaagtagtctataccaaatttataaagaagacatctcactaaaagaacttgattttaaattaagaaagcaattaattagtcaaagtggcttgtattcaaatggtcttaaacaaggtcaaattacaattacaatgaatgatggcacaacacatacaatcgatttaagtcaaaaacttgaaaaagaacgtatgggcgagtctatcgatggcagacaaatacaaaaaattctagtagaaatgaaataa

SEQ ID NO: 407922 - DNA, 846 bp, Staphylococcus aureus
atgaatattatgttaacaggtgctacaggtcatttaggcacacatattacaaatcaagccattgcaaatcacatagatcattttcacattggtgttagaaatgttgagaaagttccagaagattggcgcggaaaagttcctgttcgacaattagattattttaatcaagaaagcatggtagaagcatttaaaggaatggataccgttgtgtttattccaagtattatccatccatcattcaaacgtattcctgaagtggaaaatttagtatatgcggcaaagcagagcggcgttgctcatatcattttcataggttattacgcagatcagcataataatccattccatatgagtccttattttggttatgcagcacgtctattggcaacaagtggcattgactatacgtatgtaagaatggcaatgtacatggatccacttaaaccatatttaccagaattgatgaatatgcataaactgatttatccagctggcgatggtcgtattaattatattactagaaatgatattgttagaggtgtcattgctattattaaaaatccagatacttggggcaaacgctacttattatcaggctacagttatgatatgaaagaacttgctgcaattttatctgaggcatcaggcacagaaattaaatatgagcccgtttcattagagacatttgcagaaatgtacgatgaacctaaaggctttggtgcattattggcatcaatgtacgacgcaggagcaagaggactattagaccaagaatccaatgatttccaacaattagtcaatgatcaaccacagacactgcaatcatttttacaagaaaatatttaa

SEQ ID NO: 407923 - DNA, 585 bp, Staphylococcus aureus
atgaaaacaaaaaatcttaataactttatttatagcatttctaatctcagaaatgctataaaggacaacgccctctttcataactatataagtcaagaaaccaagacatttcaaacatctttaaacccttcaatagcacattccctaaaacataaagcaataacaatgaacgatcaaaattccttacgtacgtatttaattatagataaatcagatcttgaaataatgggatacttctgcttaaaaattgtaaatataaagcttgaaaaagacgttagtggaaaaacgaaaagaaaaatctcgtctgatgctaaaaagaatggagaatttcaagcattattaataactaaattaggtaggagcgataaacacaaaaagcatataccaggagaaattgtaatggactatgccttatctattgcttctgaaatttatgatcgtactgcactaagacatatttgtgttgattggtatgataataagaatttgaaagaattttattgcaataattgtggatttaaaatataccaagaaaaaataactaaaaaaggaaaacttatttccgcattttacaagcttaagtaa

SEQ ID NO: 407924 - DNA, 333 bp, Staphylococcus aureus
ttggcaacactaaaagatgtaaagactggtaaaaaggaaattttgccatcaactgtaaaagataaaaatggtaaaaatgttacgttaatttattttgaaaaagacggtaaattaggtttttatgtgcagaaaacacaaaaagaacgtggagtagggaaatgcgtttctggtatagcgggtggcgcagtgacaggaggcactactttaggtcttgcaggtgcaggagtaggaacagttactattccagtaattgggacagttagtggaggcgtagttggagctgttggtggtgctgtcggcggtggactaaccggtggagccacattctgctaa

SEQ ID NO: 407925 - DNA, 966 bp, Staphylococcus aureus
atggacaatcttcatactaaagataacacatatcacgaactagctggtaatgtttataatacaaaatcctctgataaagaaacaaaaattgaagatgctaatggcgccctacacaattttaaaattcaagcttcacgcgtcgataaagttaatggcttccaagcaatggcggtgtctccaaaagacagtaaaggaaatgtagacaatgaaactgtgtattttgtttatgctgggacagataaatatgaacctgctgatattagtactgatatatatttaggtaccaatgacattaaaattgaaactaatccaaataaaattttaaatgcagctatatacagagacactagcttaaaagaaattaacccaagtacagttggtaataataaatggctagaaatggttgataaaaataatgcaaaagaagctgatcaatttaacgaagcttatctttggactcagtcagttttgaataaagggaattataaacatgtttatggtgctggccatagtcttggaggcacaattgcacaggtgatgacggtactatttaattttgataaaacaaaaactttttcagcacctaatggttacaatatattacctgataatgttaaagaaaacttagatttaagtaagtataatcaaactataactgattatgcacacccaaatgataaaattggtattgctacattgggatcttcaattttaggaacagaaatattagctgatgactctgagctttcgaaactctttttcaatcctatttccggtcatggaattgaaacttttgaattcagtggcggaagtgtaaaaattaaagttgacagtaaaaaagctgatcaaatggctagagagatgagagataagttacacaacatcgataaagcgataaaagcattagaaaaatatatggaaaatactaaaaaaacaagcaaaacaaatcgaatcgaaatatgttaa

SEQ ID NO: 407926 - DNA, 360 bp, Staphylococcus aureus
atgttaaataccattattacatctatctttttattcatattttttctaccatttttctgtataggattttttataatcactttgatcagagatttaacaagagacttcaacaattttaaaatgaaatacgcatctttcacatatcccgagaccggtaaaacgatgcttgaattgcgctactttatttgggagcgtagaaagcgaaaatatttcatagaccatgtcaaacactccgagactatttatttagaaggaaacatacaaattgagagaggtatgtacaatgaagatgttccacttttaaataaaaataataaaaaatcgttaatacgcaagtgtatacaaatatttgaaaagtaa

SEQ ID NO: 407927 - DNA, 1107 bp, Staphylococcus aureus
atggataaatcacttgaaattaacttaaaagaattagaaggcataatgtataaagaaaaagtaatcgacgttaaagagtatgataatttaaaagtaacttttgagacactaaacgatgctcctaaaagtgaaatacccactccctttacaatagaacaaatgttatataaattagaaactaaaaatttatattttcctgaaattaagtcaaaagaaaaatgtgtggagcttttacatagtgttggctattataatttgaagcattttatgtataatgaatttggtaaagatgagccgaaaaattttgatgaagtatatatactttataaatttgatagatatttattgaaacaattatttagtttagtaaatatgttggaaactcatataagaaatattattttagaagtatatatgttagaaattgagtataataacaagccttcgacactgttctatttagataaagatttatattttgagaaagttaatgatgagtataaatattctgccaaaaagctaaaagagttcaataggttacaaaatgttttttggagagctatagaaaaaaagaaaagtaacgataacgttaaacataatattaaaaaatacaatattataccagcttgggttttattccaaaattttagttttggagatttgtctactttttatagaactacattaccaacttatagaaataaagtaagtaagcgaattgaaaatttaatagaaaaaaatactggtataagcataaaacttccagaaaagttattgtgtgcatggttgaatagtatcaggtttttgagaaatagaatagctcacacagatataatttatggaattaattttacaaacacctgtgcaaaacatcatagtgatgaggaaatgtatgtaaatatagaaaagtataaatatcagcaaaggttagttacatttttattagctatgaagaaaatatttatgagtatgccagaaaataatattattgaatggaatgagactctaactaagatagagaataaatgttcagaacataactttattaaactttctaggttaggagttattgaaaataacctttcttactttaaaataactaaataa

SEQ ID NO: 407928 - DNA, 126 bp, Staphylococcus aureus
atgcgtcaactaatgggtgattttggcatagatagagaatttaaggcaattaaaaaagcatcaaacagtaatatgctgcttgatgcccaaatgatgactttagctaaattgattagtcacttttaa

SEQ ID NO: 407929 - DNA, 975 bp, Staphylococcus aureus
ttggaaaaagatgatacactagcagaaattaagcctatgctcaattttgatgagcaaatagcgaaattaaaacagatgaatatattttttaatattattgacaccgaaaaagcaaatgaaattcttagaaaaaataattacttcttcaaactagcttatttccgaaaaaatttcgaaaaaaagaatggcggctatttcatagaatttgcttatttatcagatttagcaactatagatatgaaattaagatacacaatgttgcatttaactttagatattgaacatagtttaaagtgtctagtcttaaaactaataacagaaaataaccaagaagatggttataaaataatagatgagttcttatgtattgataaatcatatagcaattcaaattttgacacaaattcaagaacaccagaagaagttatggaaaccaaaatcaaaaataaaaacgaaatattcaagcatatgaataaacgaggacaactacccgagaagttgaataaatactatcaaaatccacccgcatgggtttgcattgaattcatgcaactaggtcaattcgtttcgtttctcaacttctattacaagaagtacaatgacgaagaattgagagttgctaatattttaatgcctttagttaaaaatataagaaacaaatcagctcataaccaacccatcatagcaaatctaaattatgacagtagatcacctcaatatttatttgaaaaagggaataatataggcatatctagaaacatgttcggaataaaaaatttcatagatactttcgctacgctagaattacataatcaagtttgtagtaatgcaattatccaagcaagatatcacgatttggaccaacttcaaaagcgatataaaagaaacgaaagctattataataatgcattagctatcaaaagattttttatagctttagataaaattattgacttcaacagaccaaaagtataa

SEQ ID NO: 407930 - DNA, 381 bp, Staphylococcus aureus
ttgtctgaatccgaatcgctatctgagtccgagtcactgtctgaatctgactcactatctgaatctgagtcgctatctgattctgaatcgctatctgaatctgagtcactgtctgattctgaatcactgtctgagtctgagtcactgtctgaatccgaatcgctgtctgaatctgagtcgctatctgattctgaatccggatccgggtctggacttggttctggatctggcgttggttccggttctgggtctggacttggttctggatctggcgttggctccggttctggatctggacttggttctgggtcaaccggtggccctggagttgggtctttcggatttactgctgaatcaccatcagcacttccaccaccataa

SEQ ID NO: 407931 - DNA, 2658 bp, Staphylococcus aureus
atgtcaaacactgaatcgctaaacataggaaaaaagcgtggatctttaacaatttacatcggttacagtccaggtgttggtaaaacatttgagatgctttcaaatgccattgaactatttcaaagtaacgttgatattaaaataggatatattgaaccccatcaacgtgatgaaacaaatgcattagctgaacaattacctaaaatcgcaaccaattttactaaacatggtagtcatcattttcaatatttagatgtcgaccgcataatcgaagaatcgccgacaatagtacttatcgatgagttagcacatacgaatatttctagagatcgtcatgagaaacgatatatggatattgaagaaattttaaatcatggtatcgatgttcataccactttgaacattcaacatattgaaagtttaagtagtcaaattgaactgatgaccggtgtacatgttaaagaacgtgtacccgactatttcataatgagcgccgatgtattagaagtcgtagatatctcacctgaacaattaattaaacgcttaaaagctggcaaggtatataaaaaggataggctagatgtagcatttagtaatttctttacgtatgcccacctaagcgaactgcgtacattgacgttaagaacagttgccgacttgatgagtgataaagaaaaagtccgacacaaccataaaacgtcactcaaacctcatattgctgtggcaattagtgggagcatttataatgaagcagtaattaaagaggcattccatattgctcaaaaagaacatgcgaagttcactgctatttatatagatgtattcgaaaaaaacaggcaatataaagatagtcaaaagcaagtgcatcaacatcttatgcttgcaaaatcattaggagcaaaagtaaaagtagtttatagccaaaccgttgcattaggattagacgaatggtgtaaaaatcaagatgtaaccaaattaattatcggacaacatattagaaataagtggcgagactttttcaatacacctttaattgaccatttaatgtcctttgaacatagctataaagtcgaaatcgttccaatcaaacaaatacctgttgaattgaaaatgaacaaatcaccctatcgccctaaaggcaaacgtttcgccatagatatgttaaaaatgattttgattcaaataatttgtgtaatgatgggactgtggatttatcaacttgataagcatgagtctagtacgattattttaatgatttttctcatcggcatcattttattatccatttggacgcgatccttcatcattggctttttagcagcaattattaacgtatttgtttttaattatttttttacggaacctagatatacatttgaagtatatcgctttgactatcctattacatttatcgttagcattttaacaagtattttaacgagtgctttattaaaacaaattaaattccaatactccattactaaaaagcaactttatcgtacagatttattatttcaatttaatgattcgattaaacaaacttatacagttgaaaacttactaataaatgctggataccaaattaatcaattattgcaacaatcaattactatatacgttatcaatcaatcgaaagtaattaaaacaataccattgcaaaaccatatcgataatacgactcaacagcatgaacaagcattaagctgggtaattaaaaatgaaagacaagctggtgcaacaacagatacatttccaggcattaataaatggttgatgccaattggcacatctccgattaaaggcattctagccattgattaccaaagttctcaagtgattaatccatatgatgcatcaatattagaatcaatgttaaatgaactttctctcgccgttgaaaatgtgacgttacttaaacaaacgagagaatccatgttacaggctgaacgtcaactgacacattcaaattttttaagatcaatttcgcatgacatacgtacaccgttaacaacaattatgggaaatttagatattttagtatcacatagtaaagatatgtctatcatagaaaaggaacaattacttgtgcatagttttcaagaaagtcagtatttatatctattagtgacaaatattttatcattaacaaaattacagtcatcaaatgttcaaataaaattgcaaccttatcttgttagtgaattagtagaagaaatcgatatgattttagaacgtcgccatttaaaaaagcgtataactgtatcatcctcagtagatttacagtttatacacattgacagtaagttgattttacaagctttattcaatttgattgaaaatgcagttaaacacacttctactgacaccaaaatcaatttatctattcgttatgctagcgatgaacaaatcgaatttgccgttatagacgaaggacctggaattagtttagaagaacaacaaaagatattcgagcctttttacacaggatcaaataaatattttaaagataaccaaaaagaaagcatgggactaggcttatatttagtacagactatcctacacaaacatcaatcaaacttacaatataaaccgaaccaaccacacggcagtatattctatttcaatatagatacagactttaatgaaggagacatataa

SEQ ID NO: 407932 - DNA, 273 bp, Staphylococcus aureus
atggaaataattttgtttctaacaatgatggttatgattacgtatgtttttagtggatatctatatcgcgtagcattggtgcaatcgtcaagagtagatttaatatttactagatttgaaaatatgtgttttaaaattatcggcacagatttagaacacatgtcagctaaaacatatgtcaaacattttctggcatttaatggatttatggggtttataacatttgtattgctaatagttcagcaatggcttttttttaaatccaaatcataa

SEQ ID NO: 407933 - DNA, 1584 bp, Staphylococcus aureus
atgtctgaacctcaaaaattacatccgatttcatattttaatggcataatcaatgctatcaaacaaaacatagtcgtcttttttattttcattatctttcaattgaaagattttgattatacgaatcccgaatcatatttatggataggtattgtatttgtattctttttaatatcatacatttctcaaattgtcggaattatgaacacgcgatattggattgaggataattatttcattttaacaacaggtatttttaataaaaagcgtaaagaattaaatataaaacgtattcagtccgttgatatgacacaaggggtcgtcaatcaaattattggtggtgtggatttacaaatcaaaacaccaagtgatggtattgtcttaagtgttatttcgaaaaaacaaggtgaatatcttgaacgatatattgatcaattgcaaacagagttgaagacagaagtggcgcaaaagtctagtgctgagaagaatgacaactgtaatcatgacattgaaggtaatgtggaagacatcgcagaaggtcgattagatgaagtgcagaacactgatagtatgcttaatcagaaaaataaacgcattcctatatatcagatgaattttaaagaatcactatttatggcaatgaccagtggcgccattggtgtaacgttagcagctttagtaccgatttacggggctgtaagagagttgatcccatggtcgaagctaaatcatgaaattagtcaatgggttcaaattgtaagtatttcagtattaatcatcattttactagtattaatagtggcatatattattggaacgattataacgatgataagattttatggcttttcggtgatgcttgaaaatgaacaacttaaaattgaatatggtctctttaacaagaagaaagtaactgtaccaacgaaacgattgcaagctgttgttgaacgtcagtcatatatacgaagattatttggctacacagcaatacattttatcatcacaagtgattttgaaaataaaaaaatcgaagatgatgacaatgattcaggtagtgtgccgatattgccgtttattaaacgagacaaagcatatcaaattatccagaatctagtaccagatttatcttatcaacaagttaatgaaggtatgcctttgtcaggtttccacagacactttttaatacctagtattattgtcatagctatggcaggaattggctgttatttttggaatcaattattattgttatttacgattataacagtagtcattattggtttatttgtgatcaaaggatatctttatatcaaacatgcgggttttaaaatgacagaagaacaaattactatccagaatttcgaactgttgaaacgaaatatttattattttaaagcgcgtcacattataggatttgacacttggcaacatacattacttaaacgcaacaatttaaataattttagttttattgttgctaaaggtgtgggagcccaatcgattaatttaaaatacgcaagaagtgaagatgcaaataaattgaaatcatggtatttaagaggtgaaaatgatgagggattataa

SEQ ID NO: 407934 - DNA, 375 bp, Staphylococcus aureus
atgacccaacttacactaccaatagaaacttctgttagaattcctcaaaatgataatacgcgatatgttaatgaaattgttgaaacgatatctgatagcgaattcgatgaatttatatgtcctaataacaaaagaataggttttaaaagatatgcataccgtaatgatagatatagttttaaacgtgacttcaagctatatgaatgtgatgactgttcatcatgttctttgagacatcaatgcatgaagccaaattcgaaatccaataagaaaattatgaagaattataattgggaatactttaaagcccaaattaatcaaaagctttctgaaccagaaacgaaaaaatctatagtcaaagaaaaattgatgtag

SEQ ID NO: 407935 - DNA, 588 bp, Staphylococcus aureus
ttgcaattagaaaatgaaaagctaccacaattgcaacagcaagcgcagcaatccactaatcaaatggatattcaacaagttgcagatatgcagcaatttatagatagactagataaacgcatatatgacttacagctttcaagacaaatagctttgcaaactgcgccacaaattcgtatgattcaaaatgttaatcaagcacttgccgagaagatacaaagttcaattttgacaagtattccactatggaaaaatcaaatggccattgcgcttacattaatgagacagcgtaatgcagttgctgcacaacgagctgtcactgatacaactaatgatttattaacagcaaatgctgaaatgttgaaacaaaatgcgattgaaactgcaacagaaaatgagcgtggcattgttgatcttgatacattgaaacgtacacagcgtaacattattgagacaattgaagaaacattaattattcaacaacacggtcgcgaagaacgacaattagctgaaaaagaattacaacaattagaacaagatttaaagtcacatttagtgaacatcaaaggaccgaataaacaatcataa

SEQ ID NO: 407936 - DNA, 639 bp, Staphylococcus aureus
atgatgaaaaaagttataagtttatttgttgcaattttatcagtgttgatttttacggataatgcgaacgccgaaaataacaaacctgaaggtgtgaatgaaaacagcaatttaataccagttagacaaccggatgcaaattatccagggccagttagtgacatagcacgtgtgaaaaaacttgataatttaatagatggcacgaaagatccagatgttatcaagcagttgaaagatgataatgaggtgccgaataatgcggtaaaggcaaaagattctaaaatagtatccgactgcagacatttactaaaacatccagataatttaatggatggcacgaaagatccaaatgttattaatcagttgaaaaacgcaaatggaacatcgaataatagtgctgtaaatccaagtattaaagcaaatgatattcacacaaaaagtaataaacaaatggctaaacaacaaagtattcatttggatagcaagagcaagtcagtacataagcaacaattgaaagaattaccaaaaacaggagtaaataacgaaagtaatacagcaattatggttttatttattggtttaatattgcttgtagtaagtttagtgacaagatttataaaattaaatagccatcaataa

SEQ ID NO: 407937 - DNA, 822 bp, Staphylococcus aureus
atgaaagatattttagtaataggcgcaacagggaagcaaggtaatgcagttgtaaaacagttgttagaggatggatggtatgtaagtgcattaactagaaataagaataatcgtaaactttcagacataggacatccgcatttatcaatcgttgaaggtgatctgagtgataatgttagtttgcaatcagcgatgaaaggtaagtatggcttatacagtattcagccaatcgttaaagatgatgttagtgaagaattaagacaaggtatgaagataattgaaatagctgagcaagaaaatattcaacatattgtgtatagtactgcgggaggggttaatcgaaatcgaactggcccacactttgaagtactagcaaaaatagaaaatagattaatggaatctaatataaatgcaacagttatcaaaccatcattctttatggataattttttacgcattgctaaagtcgaagatgaacgtattacattaccagaatttattaatccgaatataaaattcacaatgatttcttctattgatatagctaaaattgcatcgtatatttttgcacatccacaaagctttacgcatcaatcaatagagattggttccgatgaagttacattaagtgaagcagcaacaatttttagtgaagtgacaggtaaatctactgttatagaaggagaatttgttagtggtgttgcagaaaagcaatggttggaagaaaaaggttatgaagtagactttgaattaatggctgaaataaatccaacaagattatcattaagtgattggcttaaagtccaaaactataataagtaa

SEQ ID NO: 407938 - DNA, 375 bp, Staphylococcus aureus
ttggatgatattcagaaaataaaaaaagagctttctgaattagttgaacgtgttgatgatgttgaaatactagcaaacgaaacagctgatcatgtgcttgaacttagagaggaacataagcaacatcataatgaactaagagaatctcataaagaacttaaagataagcaagataaagttgtagatgagaatttagagcaaacaaagatattaaacagaattgaagaaagatatcaaacgcaagtagatgttgcgcaaaaaaatgaagaaaagacactcgcccaaaataaatggctcgtaggtgccatatgggcgcttgtaacaattgttatgattgcagtcattactgcatcaattactgcgttattaccttaa

SEQ ID NO: 407939 - DNA, 288 bp, Staphylococcus aureus
atggcaaatgaaattatcaaaaaaacagagagatttattttagtacaaattgacaaagagggaacagagcgcgttttgtatcaagattttgtaggcagttttacaacgtccgattcagcaagttatgcacaagattttaaatctgaggaaaacgctaaaaagattgctgaaactttaaatcttttatatcaattaacaggcaatcaaaacggtgtgaaagttgtgaaagaagttgtggatagaactgacttgtcatctgataaatcagttgatagcgaaataatgtaa

SEQ ID NO: 407940 - DNA, 153 bp, Staphylococcus aureus
atgaatgatagcaatcaaggtttacaagccaatccacaatatacaattcactatttatcgcaagaaatcacaagactaacacaagaaaatgcaatgttaaaagcatatatacaagaacaaaatgaaaaaagcaaaagtgctgaggaagagtaa

SEQ ID NO: 407941 - DNA, 3783 bp, Staphylococcus aureus
gtgatacatgttttagattttaacgacaagattatagatttcctttctactgatgacccttccttagttagagcgattcataaacgtaatgttaatgacaattcagaaatacttgaactgctcatatcatcagaaagagctgaaaagttccgtgaacgacatcgtgttattataagggattcaaacaaacaatggcgtgaatttattattaactgggttcaagatacgatggacggctacacagagatagaatgtatagcgtcttatcttgctgatataacaacagctaaaccgtatgcaccaggcaaatttgagaaaaagataacttcagaagcattgaaagatgtgttgagtgatacaggttgggaagtttctgaacaaaccgaatacgatggcttacgtactacgtcatggacttcttatcaaactagatatgaagttttaaagcaattatgtacaacctataaaatggtattggatttttatatagagcttagttctaataccgtcaaaggtagatatgtggtactcaaaaagaaaaacagcttattcaaaggtaaagaaattgagtatggtaaagatttggttgggttaactaggaagattgatatgtcagaaatcaaaacagcattaattgctgtgggacccgaaaacgacaaaggaaagcgtttagagttagttgtgacagatgacgaagcacaaagtcaattcaacttacctacccgttatatttggggaatatacgaacctcaatcagatgatcaaaatatgaatgaaacacggttgcgttctttagccaaaacagagttaaataaacgtaagtcggcagttatgtcatatgagattacttctactgatttggaagttacgtatccgcacgagattatatcaattggtgatacagtcagagtaaaacatagagattttaacccgccattgtatgtagaggcagaagttattgccgaagaatataacataatttcagaaaatagcacatatacattcggtcaacctaaagagttcaaagaatcagaattacgagaagagtttaacaagcgattgaacataatacatcaaaagttaaacgataatattagcaatatcaacactatagtaaaagatgttgtagatagtgaattagaatattttgaacgcaaaatacacaaaagtgatacaccgccagaaaatccagtcaatgatatgctttggtatgatacaagtaaccctgatgttgctgtcttgcgtagatattggaatggtcgatggattgaagaaacaccaaatgatgttgaaaaattaggtggtataacaagagagaaagcgctattcagtgaattaaacaatatatttattaatttatctatacaacacgctagtcttttgtcagaagctacagaattactgaatagcgagtacttagtagataatgatttgaaagcggacttacaagcaagtttagacgctgtgattgatgtttataatcaaattaaaaataatttagaatctatgacacccgaaactgcaacgattggtcggttggtagatacaaaaactttatttcttgagtatagaaagaaattacaagatgtttatacagatgtagaagatgtcaaaatcgccatttcagatagatttaaattattacagtcacaatacactgatgaaaaatataaagaagcgttggaaataatagcaacaaaatttggtttaacggtgaatgaagatttgcagttagtcggagaacctaatgttgttaaatcagctattgaagcagctagagaatccacaaaagaacaattacgtgactatgtaaaaacatcggactataaaacagacaaagacggtattgttgaacgtttagatactgctgaagctgagagaacgactttaaaaggtgaaatcaaagataaagttacgttaaacgaatatcgaaacggattggaagaacaaaaacaatatactgatgaccagttaagtgatttgtccaataatcctgagattaaagcaagtattgaacaagcaaatcaagaagcgcaagaagctttaaaatcatacattgatgctcaagatgatcttaaagagaaggaatcgcaagcgtatgctgatggtaaaatttcggaagaagagcaacgcgctatacaagatgctcaagctaaacttgaagaggcaaaacaaaacgcagaactaaaggctagaaacgctgaaaagaaagctaatgcttatacagacaacaaggtcaaagaaagcacagatgcacagaggaaaacattgactcgctatggttctcaaattatacaaaatggtaaggaaatcaaattaagaactacaaaagaagagtttaatgcttctaaaagaacactatcaagagtgttagcagacatcactgtaaatgctatgaaaggcatctatttaaggtatgacgaaaatggggcgattacttcacatactattgataaagatggcgtgaaaattagtggcgataaagttgatataacagcgaatagagaatttaatgtagtcgcaaataatattaataacaaagttggtaaaaatgacattgttaatagcctaaacttatcaaatgaaggtcttgacatcaatgtgaatagaattggtattaaaggcggaaatgctaaccgttatgtacaagttcaaaatgattttattgaacttggcggaatcgtacaacgaacttggaaaggcaaacgatcaaccgatgatatattcacacgtcttaaagatggacatctaaggtttagaaataataccgcaggcggttcactttatatgtcacattttggtatttcaacatatattgatggagaaggcgaagacggaggttcatccggtactattcaatggtgggataaaacttacagtgatagcggtatgaatggcataacaatcaattcttatggcggtgtagtcgctttaacatctgactacaaccgaattattatcgattcatatgcttcagctaatattgaaagtagagaagcaccgatatatttatctccgaacaccaaaaataaacctggtttaaaccgattcgcattcacattatcaaacgctgatagtgcatacgaaactgacggttatatcatgtttggttcagatgaaaactataagtacggtgctggattaagattttctaaacgtagcaataaaggattggttcaagtcgttaatggtgactatgctacaggcggagacactacaattgagtcaggtatgggcaaattcaacatagttaaacgaagagatggaaatagttacgttagcattcaaagttatgatttattggcggtaggttctgataatgctggcgatagagtcgcttctaattctatttataagcgtacttattcagcacctgctaacttacacattacttctgctggaacaattgggcgtgctacttctgccaaaaagtataaaatttcaatcgaaaatcaatacatcaatgaagacgatcagttcagtcattcaaaagagattttaaagcttccaattcgtacatggtttgacaaatatgaatcggaaataatggctaaagaattggaaagtggtaaaaagttatctgatgatacttttaaacttagtcgacatactggcttaatagcggaagaggttgaagaattaggatttaatgaatttgttatttatgatgacaacggagaaatcgaaggtatcgcatacgatagactttgggttcatttaatacctattattaaaaaccagcaatcaaaaatcgaaaaactggaggaattaataaatgaatga

SEQ ID NO: 407942 - DNA, 1491 bp, Staphylococcus aureus
atgcaagatacaattcaaatagacaataaaaccattgaatggttagttgtacaaagagggtttgagataccctcttttaattttgttactgaaaaagaaagtgtgaaaggtagaacaggttctattgctaaagctcgttatctaaatgatatcgaatttgaattacctctaataattagaaatgaagtcttggcgccaggtggacaaaaaacgcatgacgatatattggaagagttagttgaattttttgatattgacaatttaaagccgaaaaaacttaaattcaaatctcaaaactggtattggtttgcatactttgatggaccattaaaattaccgaaaaacccaagaggttcagtaaagttcactatcaaagtagtactaacagacccttacaaatattcagtaacaggaaataaaaatactgcgatttcagaccaagtttcagttgtaaatagtgggactgctgacactcctttaattgttgaagcccgagcaattaaaccatctagttactttatgatcactaaaaatgatgaagattattttatggttggtgatgatgaggtaaccaaagaagttaaggattacatgcctcctgtttatcatagtgagtttcgtgatttcaaaggttggactaagatgattactgaagatattccaagtaatgatttaggtggtaaggtcggcggtgactttgtgatatccaatcttggcgaaggatataaagcaactaattttcctgatgcaaaaggttgggttggtgctggcacgaaacgagggctccctaaagcgatgacagattttcaaattacctataaatgtattgttgaacaaaaaggtaaaggtgccggaagaacagcacaacatatttatgatagtgatggtaagttacttgcttctattggttatgaaaataaatatcatgatagaaaaataggacatattgttgttacgttgtataaccaaaaaggagaccccaaaaagatatacgactatcagaataaaccgataatgtataacttggacagaatcgttgtttatatgcggctcagaagagtaggtaataaattttctattaaaacttggaaatttgatcacattaaagacccagatagacgtaaacctattgatatggatgagaaagagtggatagatggcggtaagttttatcagcgtccagcttctatcatagctatctatagtgcgaagtataacggttataagtggatggagatgaatggattaggttcattcaatacggagattctaccgaaaccgaaaggcgcaagggatgtcattatacaaaaaggtgatttagtgaaaatagatatgcaagcaaaaagtgttgtcatcaatgaggaaccaatgttgagcgagaaatcgtttggaagtaattatttcaatgttgattctgggtacagtgaattaatcatacaacctgaaaacgtctttgatacgacggttaaatggcaagatagatatttatag

SEQ ID NO: 407943 - DNA, 4683 bp, Staphylococcus aureus
atgcctaatcctataggtaatatggtcataaaggttgatttagatggttctggattcaatagaggtgtgacaggtttaaataggcaaatgaaaatggtttcgcgtgagctttcggctaatttatcacaattttctagatatgataattcattagaaaagtcgaagataaaagtcgaaggtttgagtaaaaaacaaaaagttcaagcccagattactaaagagctgaaagatagttatgacaaacttagtaaagaaactggtgaaaacagtgcaaagacacaagctgcggctgctaaatacaatgaagcttacgctaaattaaaccaatatgagcgagagttaaaccaagccacacaagaattaaaagacatgcaaagagagcagaaagcattaaatactgcaatgggaaaacttggtaccaactttaataattttggtcctaaacttcaagaaattggtaacagtatgaaaaatgtaggccgtaacatgactatgtatgtaactgcgccggtggttgctgggtttgctgtagcagctaaaaaaggtattgaattcgatgacagtatgagaaaagttaaagcaacttcaggtgctactggtgaagagtttgaagctttgaagaaaaaggctcgcgaaatgggtgcaacaacaaaatttagcgcatcagattcggctgaagcattaaattacatggcacttgctggttgggattctaagcaaatgatggaaggtttaagcggagttatggatttagcggcagcatctggcgaagaactgggagcagtaagtgacattgttacagatggactaacggcatttggtttaaaagcaaaggatagtggtcattttgcggacgttttagcacaaactagctcgaaggcaaatacggatgttagagggctcggagaagcttttaaatatgtcgctcctgtagcaggtgcgttaggttacacgattgaagatacatctattgcgataggtttaatgagtaatgctggtatcaaaggtgaaaaagcaggtacagcgttacgaacaatgttcaccaatctttcaagtccgactagagctatggggaatgaaatggagcgcttaggaatatctattacagatagtaatgggaaaatgattcctatgcgaaagcttttagaccaactgagagaaaaatttaaacatctttcaaaagaccaacaagctagttctgcagctacaatatttggtaaagaagcgatgtcaggagcattagcaattataaatgcttctgatgaagactatcaaaagttaaccaaatctatagattcatctaccggggcatctaaaagaatggccgatacaatggaatctggtttaggtgggaaattaagaactttaaggtcgcaattagaagaactagccttaacgatttatgacagaatagaaccagcactaaagattatagtaagtgcttttagcaaagtagtgacatgggttactaaattaccaacgtcaattcaattagcggttgttgggtttggattatttgcagcagttttaggtcctttagtttttatgttcggtttgtttatcagcgtgatggggaatgcaatgacagttttaggacccttgttaataaacgttaataaagctggtagtatattcgcgtttttaagaactaaaatcgcatcacttgttaaactatttccgattttaggtgtgtcgatatccagtttaacgttacccataacattaattgtaggtgcattagttggtattggcatagctttctatcaagcttataaacgttcagaaacttttagaaatattgtaaatcaggcaatctctggtgtagcaaacgcatttaaagcagctaaactagcgttacaaggtttctttgatttattcaaaggtgatagtaaaggcgcggttaccctagagaagatatttccacccgaaactgtagcaggaatacaaaatgtagttaatacgattagaacaactttctttaaagtagttgatgcaatcgttggtttcgccaaagagataggcgctcaattagcctctttctggaaagagaacggctcagaaataacacaagctttgcaaaatatagctggtttcattaaagcaacctttgaatttatttttaactttattattaaaccaattatgtttgcgatttggcaagtgatgcaatttatttggccggcggttaaagctttgattgtcagcacttgggaaaatatcaaaggtgtaatacaaggggctattaatattattttgggtattatcaaagtgttctctagtcttttcacaggaaactggcgaggcgtttgggacggcattgtaatgatactgaaaggcactgtgcagttaatttggaatttaatacaactgtggtttgtaggcaaaatacttggtgttgttaggtactttggcggattgctaaaaggattgatagcaggaatttgggacgtaataaaaagtatattcagtaaatctttatcggcaatttggaatgcgacgaaaagcatttttggtttcttattcaatagtgttaaatctattttcactaatatgaaaaactggttatctagtacgtggaataatatcaaaagcaataccgtcgacaaggctcattcgttatttacgggtgtaaggtctaaattcacaaatttatggaatgcgacgaaagatatatttactaaattaagaaattggatgtcaaatatttggaattctattaaagataacacggtaggtatagctggtcgcttatgggatagagtacgtaacatctttggaagcatgcgtgacggtttaaaatctatcattggtaaaattaaagatcatatcggtggtatggtagacgctgttaaaagaggtcttaataaattaattgaaggtttaaactgggtcggtggtaagttgggtatggacaaaataccgaagttacacactggtactgaacatacacatactactacaagattagttaagaacggtaagattgcacgtgacacattcgctacagttggggataagggacgcggaaatggtccaaatggtttcagaaatgaaatgattgaattccctaatggtaaacgtgtaatcacaccaaatacagatactacggcttatttacctaaaggctcaaaagtatacaacggggcacaaacttattcaatgttaaacggaacgcttccgagatttcatttcggtactactatgtggaaagatattaaatctagtgcatcatcggcatttaactggacaaaagatcaaataggtaaaggtaccaaatggcttggcgataaagttggcgatgtaatggactttattgataatccgggtaagcttttaaattatgtgctcaaagcgtttggtgttgactttagctctctaactaaaggtatgggtattgttggcgatataacaaaagcgtcttggaataagattaaaagtaaggcgattaattggataaaagaaggattagagagccaagcgggagatggttctgtgtttgatagtttcagaatactacaaccttattcagcaccgccaaaacctcctaaccccaattatccatttaacggaggcgttcatcatggtgttgactatgatacgccgaccggtacccctatacgtacgccaatgggtggacgtgttagaagttggtatgacaactatggtggcggtaaagcaattactgttcaaaaaggtcgaacatttttgtggttcatgcacttatctgaacaattgcgtagaacaggtgaacaaattaaagctggtcaattaattggtaaatcaggtaatacaggttctatgactaattaccgccatttacatttccaagtcaatcaaggcggagagtccaataggtattcgacagaccctattccttggttacggaaaaacgacaaaactggtggaaagaattcacctggagggagtggttctgaaaatgcgcgcagagcgattagaacagctcaaaatatacttggaggtcaatacaaagctagctggattacacacgaaatgatgcgtgttgcgagtcgtgaatccaattatacagctaatgcagtcaataattgggatagcaacgcaagagctggtataccttcaagaggtatgttccaaatgatagatccttcatttagagcgtacgcaaagtcgggttacaataatcctctcaacccaactcatcaagctatatcggctatgagatatattgtgggtaaatgggtaccaagaacaggctcatggagagctgcgttcaaacgcgctggtgattacgcatatgctactggtggcaaagtctataacggattgtaccacttaggggaagaaggatatccagagtggataatacctactgatccaagtagagcgaacgaagcacacaaattattagctttagctgctaacgatattgataaccgctctaaaaataagcgaccaaacaacttaccaaattcaagtataagtaatagtgatacaaactatattcatacattggagaataaactggatgcggttattaattgtttggttagtttggttgagtctaatcaagttattgcagataaggattacgaaccagttattaataagtatgtgtttgaagatgaggtaaataattctatcgataaacgagagcgtcacgaatctacaagagttagatttagaagaggaggcacgataatctaa

SEQ ID NO: 407944 - DNA, 447 bp, Staphylococcus aureus
atggaacgtacatcaattgaattaattacaggatttacaaaaacaggaaagccgcaatatcaaaagtatttagcaaagccgattattactttgtttgaaacaattcaaggttcaaaattaggtttgaaacttaacaaagcctttaagggggctgattttaaagatctaacagaagaagaatttaataacttaagtgtgacagaacaggaagaatacaaaaacaagcaagaagaatacgaaaacaacatggctgtacaaatggaagtattggaagaagttttggatttcatcgttgaagcttttgataatcaatttactagtatagaacttcaaaaaggattaccaaatggtcaagaaggtattgaaaagattggacagttaattggacgcattacaggtggggaacctagcgatacaaaaaagttcgtgacagagaatcagaaataa

SEQ ID NO: 407945 - DNA, 954 bp, Staphylococcus aureus
atgattgaaaaattgaaacaagcaccaagatttttaaaattaaacttacaacattttgcagatacaggagtttcgggtatcgcaattggggtatcaaacttttattatgcacctattttaaaagatacagaaaatgaatgggaaactggagctggcacacgtattcgtttcttaaaagaaattgaagtagaccgtccacaagataccgaggaagattatggagatgatatggtcgcagcaactgctgtatctaatggtaaactgagtgttaagacaacatttgttactgttcctgctgacgataaggcgttcttgaatggcgctaaaaaaggtgtaggtggttataaatatggagctaaggatattccgccagatgtagcgattgtatttgaaagacgtaatcatgatgagtcttcagaatgggttggcttgttcaaaggtaaattcactcgttcaagcatcaaagggcaaacgaaacaagataaggttgaattccaaaatgatgatgtagaaggtaactttattgatcgtttgtttgatgaaagctcgcatgttacaggctatgataaaaaaggaagcactacagggcgcgattatgtattcatggaaacatttggtaaaacttatgatgaattcatgtctagtcgaggagaacaaaatatggaacctgtagaaaaagaaatgaaaaaaacagaaaaagttgaagtcacttctgtaaacgtcactgatgaacaagttacagttaaagttgatgctactaaacaactatcagccacaaccgaaccatctggacagaaagtaacttatgcagtgactgaggggcaaacgtatgctagcgtaacatcaactggtctcgttaaaggtttggcggaaggtaatgcgaccgttacagcgactgcaggaaagcaaactgatactgtgcaaattacagtacaatctaatttagaaatgtaa

SEQ ID NO: 407946 - DNA, 381 bp, Staphylococcus aureus
atgattaatgttaccaaaataattagaaacgctattattgcaaataacattacagatgaagtgaatgtgtttaactacactatagatgaccattttcacgaaaaaactgacaagcctattattcgtatatatcccttaccgttcaatcctgacacatacgctgatgataacgagatttcaagagaataccattaccaaattgatgtttggtggtctcaagatgaaccgaacgagcaagcagaaaaaattgttgagttactcaaagtgataaattttcaatgttattacagagaaccgttatacgagagtgacgtcatgtcattcagacatattataagagcaaaaggctcgattttatcaatgaaattggaggaaaattaa

SEQ ID NO: 407947 - DNA, 378 bp, Staphylococcus aureus
atgggggcaagaattgaaagtaataacattgaacaaggtttgaaaaatgcagttttaaaaatgaatttaaatagtaatgtaattgtcaaagctggggctatgtcattagtcccgcttttaaaaagtaatacaccttttgcgaatactaaaaagcatgctcgcgatcacatagctgtttctaatgtgaaaacagacagacacacaagtgagaaaatcgttacaattggttacgctaaaggcgtctcacaccgtattcatgcaacagaatttggaacaatgtaccaaaaaccacaattgtttataacaaaaacagaaaagcaagggaaaaacaaagttttaaaaacaatgcttgatactgctaagaggttgcaaaaatga

SEQ ID NO: 407948 - DNA, 336 bp, Staphylococcus aureus
atgatgaaatttaattccaataaattaaatgaacgcatagatttttgtgaagatgtaagcgagagagtgaacggaaatccgatgaaaccgaagacgaaaatattatactcttgtttcgcttgcattcaagaatctaaagaatccgacactcaaacgaatctcaatacaggtagcaaattcattaaaactattattatcagagatacacgaggtgattataaaccaacaaataagcattacgtcttgcatgaagggcaaaggtttaacatcaaatatgtaaagccagattatcaagataaatcttatttgcgtatctatggcgaggtggtcatttaa

SEQ ID NO: 407949 - DNA, 333 bp, Staphylococcus aureus
atgcaattaacagctgaggaacttaagttattaaaaaagcattgcaaaatagatcacaattcagaggacgacttattaggaatatattactcttgggcattccatgaaatagctagcgctgttacggatgaaccaagtaaatatattgattggtttaaaagtcatcctctatttgctcgtgctatataccctttagcaagttactattttgaaaaccgtattgcttatttggatagggatttatcgcttgcgcctcatatggttttgagtactgtgcataagttgagaggttcatttgagcaatttttggagagtgaaaatgatgaaatttaa

SEQ ID NO: 407950 - DNA, 159 bp, Staphylococcus aureus
atggcaatgtatgaagtgaagaaatcttatactgacttggaaaaaggccagtatttaaagtcaggtaaacgtgttgaaatgacagtaaaacgtgctgaatatgttaacaaaaagctgaaagagcatggagtaatacttgaaagagtgaaagaagaatag

SEQ ID NO: 407951 - DNA, 1248 bp, Staphylococcus aureus
atgaaaacaaaagaaaagttacaatcggagatttcagacattaaaagacaaattgatttaaaggtgaagtatgcaacgcgagcacttaataacgatgagttagaaaaagcagaaaaattagaacaagaaattactgatttacgttctcaaatccaagaaaaacaagaagaattagataagctaaaagaaaaagatggaacttcagaaaacaatccacaaacagttgaattaaacgaagcacgtacttatcgaaaccaagcaaacattaatgatttaggtatttcgattcaaaacacaaaggtaacatcacaagaagttagagattttactgaataccttgaaacacgcaatgatattcaaggtggttcgttaaaaacagactcaggatttgtagttattccagaggaaattgttacagatattttaaaattaaaagaggttgagtttaatcttgataagtatgtgacggtcaaacgtgttacaaatggttctggtaaatatccggtagtacgacaatcagaagttgcagcccttgaaaaagttgaagaattagaagaaaaccctgaattagcagttaaaccattcttccaattagcatatgacattaatacacaccgtggttacttccgaatttcacgtgaagcaatcgaagatgcaaaagtgaatgttttgcaagaattgaaactatggatggcgcgaactattgcagcaacacgaaacaaagcaattattgatgttatcactaaaggatcaacgggttctacaagttcaggttttgaaaaagaaggcaagaaattagaagttaaaaaagcaaaatctttagatgatattaaagatgctattaacctgaatgttaagccgaattacgaacataatgttgcgattgtttcgcaaactatgtttgcaaaattagacaaaatgaaagataagctaggaaactatttaatccagccagatgttaaagaaaaaacgcaacagcgtttattaggagctaaaatcgaaattttacctgatgaagtactagggcaaaaaggtaataacactttgattatcggtaacttaaaagatgcgattgttttatttgaccgctctcaataccaagcatcatggactgactacatgcatttcggagaatgtttaatgattgctgtacgtcaagactgtagaattctagattataaatcagcaattgtgattgaatatgatgatagtgaacgcggtgaaggcgatcttggcttagaagcataa

SEQ ID NO: 407952 - DNA, 585 bp, Staphylococcus aureus
atgagtaaggaaacgagagttggcaacattattgaggtacgctcaaatgatgacaacgaaatggtcatagaggggtatgcgttaaagtttgatacttggtctgaaaatcttggtggattcaaagaaacgatttcacgtcgcgctttagaaaacactgatttatctgatgtgcgttgtttagtagatcatatcccatcgcaaataattggtaggacaaaatcgggtactttggagctcgaaactgatgatgttggacttaaatatcgttgtaagttaccaaacacaacatttgcacgtgatttatatgagaacatgcgtgtaggcaacatcaatcaatgttcgtttggttttatgcttgacgataaaggcgatgaagtgcgttttgatgaacaagaaaacatttacaaacgtactttaacagcaattcgtgaacttacagatgtttctgtagtgacttatccggcttataaagacactgatgttaaaccagcattacgtagtattgaaaccgttaaaaaagaacaacgtaaaaaagaattagaaataagactaaagaaacactctatattaaataatatttggtga

SEQ ID NO: 407953 - DNA, 1251 bp, Staphylococcus aureus
gtgggaattttttataaaaatgaaaaacgagacttgcaatacaacgaagatgatttgcaaatgatggttcaaactttgccaggttttcaaggaacaaaattacgacaatataaagatatagaagcaattaggcatagcgacatctttactgcagttatgatgattgcttctgatttggcgcgcatgccaattagggtgacagtgaacggtcaaattaattatagtgacaggattgttaatttgttaaatacacgtcctaacccaatgtataacggctatatattcaaattagtagtgtttgttagtgccttactaacatcgcacggctatattgaaattacacgtgataaaacaggagaacctatgaatttaacgttcagaaagacatccgaaatagaattgaaatcagacgcaagaggtcgactgtattattttcatcaaaggatagacagtaacggaaataatatagagcgtcatgttaagtttgaggatatgttagacatcaaattttattcgttggatggtataaatggtttgtcactgttagacacattaagtcgcacgatagaatcagataacaatggaaaagatttccttaacaatttcttgcgaaatggcacacatgctggtggtattttgaaaatgaaaggtgtattagataataaaaaagcaagagaccgtgccagagaagaatttcacaaaagttttagtggaactaaacaagcggggaaagttgtcgtactcgatgaatcaatgacgtttgatcaattagaagttgatacagaagttttaaagcttatcagagaaaacaaatcatcaacaagagaaatagcaggtgtatttggtattccattgcataagttcggcatagaaacagcgaacatgagtatcacggatgctaatttagattacttatcaactttaaaaccttatattacatgcgtttgtgcagaattgaattttaagtttaatgatgaacatgtgaatcgtgaatttaaatttgataccactgaaatacgagttgttgatgagaaaacacaagctgaaattgacaaaattaacattgattctggaaagatgaatattgatgaaattagacaacgtgatggattagcgccaataccaggcggtaatggtagtattcacagagtcgatttaaaccatgtgaatattgaacttgtagatgagtatcagatgaataaatcgagagctactgataaaaaattgaaaggtggtgaggaaaatgagtaa

SEQ ID NO: 407954 - DNA, 240 bp, Staphylococcus aureus
atgaaagcgaagaattcggattttaaaggtggtgacaaaatggacttgaataaaataaatgtcttttttaatttcttggttgctaatttggttagcatcctttttttattaggtttgtttgtggttaacgtttctgtgtataaagcattcggtcaaaatatagggcttttatgcactggtataacactgattgttatttcgttgattttaaatcatgaaagcaatcaagaaaggagttag

SEQ ID NO: 407955 - DNA, 1695 bp, Staphylococcus aureus
atgactgattatgttactcaatacgcaaaaaaggtagtttcaggagaaattttggcaagtttgaagaatattcaagtatgtaaacgtcacctatcttttatggagaacccgccgaatggttgccattgggataatcatttgtctaacaaagcaattaaatttgtggaaatgcttccagaccctaaaacaaaccagcccatgcctcttatggagtttcaaaaattcattgttgggagcttatacggctggcgtagaggtcaatacagaatgtttactaaagcttatataagtatggctagaaaacaaggtaagtctctaatcgtatcgggaatgtccgttaatgaactgttgtttggacaataccctaaatttaatagacaaatttatgtagcttcatctacttataagcaagcgcaaacaatattcaagatggcaagccaacaagtaaacctaatgcgaagtaaaagcaagtttatccgtgaaaaaacagacgtaagaaagacagacattgaagatgtattaagtagttcagtgtttgcacctctttccaataacccagatgcggttgatggtaaagatcctacagttgctattttggacgaattggcaagtatgcctgatgatgagatgtactcaaggtttaaaacaggtatgacattacaaaaaaatcctttaaccctacttgtttcaacggccggagacaatttaaatagtcaaatgtaccaagagtataagtatattaaacgtattttaaatgaagaagtaagagctgataattactttgtatattgtgctgaaatggattcacaagaagaagttcaagatgaaacaaagtggattaaagcaatgccgcttttagaatcaaaagaacatagaaaaactatacttcaaaatgtaaaagctgatatacaagacgaattagaaaaagggacatcatatcataagattttgattaaaaacttcaatttatggcaagcgcaaagagaagatagcttgctagatatttcagattgggaacaagtaataacgcctatgcctaatatcaatggtaaagatgtgtatataggtgtcgacttatcgagattggatgacttaacatctgtagggtttattttccctaacgacgataaaaaagtgtttttacatagtcattctttcattggattaagaacaaacttagaacaaaaatctaagagagacaaaataaattatgaattagcgattgaacgtggcgaagctgagactacacaatcagatagcggcatgattgattataaacaagttatcgattttatagtgaaatttataacgacgcatgacctgaatgtacaggctgtttgctatgacccttggaatgcgcaaagttttataacaacaatcgaatcaatggctttagattggccacttattgaagtgggacaaagttttaaggcgttatcacaatctattaaagaatttagaatgtgggttgcagatgaaagaatacagcataacgataatatgttacttacaacgtcagttaataatgccgttttgattcgtgacggagaagacaatgtgaaaataaataaaaaaatgaatcgtcaaaaaatagatccgattatttcgattatcacagctttcactgaggctagaatgcacgaattccaagaaaattggacggagaaatatgaaagcgaagaattcggattttaa

SEQ ID NO: 407956 - DNA, 468 bp, Staphylococcus aureus
atggcgggtagacctaagaagcttttgtcaaattcgaacaagaattatacaaaagaagaaattattgaaaaagagcgtcaagaagctcaattaaataaattttctaaaatcgatactgaaccaccgcactttttagatgaaatagcgaaacaagaatacttaagaatattaccgcacatgcaagaattgccaatttccaacttagataaagcacaattagcacaatattgtagtttttatagtgactttgttaaagcaagtttgattttagagcgcgaagacttgattttagaagacgacaaaggaaatcaaaaggttaatccggcgttcaacataaaggaaaaagcgggtattcgattgcaacaaacagctaatactttaggattaactattgatagccgattgcgtattatggttcctgatgaaaaagaagatgatgatccatatatggaatttgtgagtggttag

SEQ ID NO: 407957 - DNA, 354 bp, Staphylococcus aureus
ttgtctattatgaagcgatgtggtcatccaacgtgtaatgtattgattaatcataacgaaagttattgtgataaacacaaacaatatgcaattgaaaattacaatgatttgagacgtcgaaacgatccagagtatttaaggttttataaatcgaaaacgtggcaaaacatgcgtcgaatcgtattgttagaacatgattttatttgtgtttcttgtggcaatcaagcgactatggttgaccatattgtaccaacgaaagttgattgggcaagaagattagacaaaagtaatttacagcctttgtgtgatgcttgccataaccaaaagacaaaagaagatttgaagaaatattaa

SEQ ID NO: 407958 - DNA, 453 bp, Staphylococcus aureus
atggagatatcaaagtaccaagagatagctacacgtacacacaatgatgaattgaatttaaatgaatctattacttgttacggcttaggtttaactcaatctacaggcaatgttacagatctaattaaacagcatatgttttgtaatgtaccgatagataaaggaattatgataaatgaacttagcgaagcattgtggaatatagttaatcttactaacgtgttaggtattaacttggatgagatagctggtcatagtgttaacactatcttgatgaataaacctaatcagactatcaatttagacaatggtataaaacaaggagacaaagtattgtttcaaggtagtaagtatcttgttgatggatcgataggaaacttattgttaattagcaatgataaagatgatagacaagtaactgtgcaagatgttaagaaagtcgacaaggagtga

SEQ ID NO: 407959 - DNA, 462 bp, Staphylococcus aureus
atgtataacaggaaagaaatacgtgaaatgatagataactacaagtggatgaagaacataatagacagtaaagtctacgataacgaaagtacatcaattgcacaatatggttatcaatctgcgatgccaaaagctaaaggcacgactagcaataaagtgttagtgaaagttataaacaaaaacaaagcgcttagaaagtacgattacttgattaagaagatagcgttcattgatgaatatgaagaatacatcacgaatgaaaaagattatcatattttacaaatgttaaaacaacgagaaagccataataggattatgagcattcttgatataggcagagacaatttttattctagagtaaaagatatagtaaatatactttataacttgcaacaagaaaccgacacttcggacacatcggacagttcggacacatcgtacaaatcgtacacatcggactaa

SEQ ID NO: 407960 - DNA, 201 bp, Staphylococcus aureus
atgtggattactatgactattgtatttgctatattgctattagtttctatcagtattaatagtgatcgtgcaagagagatacaagcactcagatatatgaatgattatctacttgatgaggtagttaagactaaaggatacaacgggttagaagaatacaggattgaattgaagcgaatgaataacgatattaaaaagtaa

SEQ ID NO: 407961 - DNA, 153 bp, Staphylococcus aureus
gtggtggttaaagaaattttgagactattattcttactagcgatgtatgagttaggtaagtatgtaactgagcaagtatatattatgatgacggctaatgatgatatagaggcgccgagtgattacgtctttcgagcggaggtaagtgagtga

SEQ ID NO: 407962 - DNA, 201 bp, Staphylococcus aureus; identical to SEQ ID NO: 407437

SEQ ID NO: 407963 - DNA, 189 bp, Staphylococcus aureus
atgacacaatacttagtcacaacattcaaagattcaacaggacaaccacatgaacattttactactgctagagataatcagacgtttacagttgttgaggcagagagtaaagaagaagctgagcgcaaatacgaggcacaagttaagataaggagagatggagatgccaaagaaaacggtaacgattga

SEQ ID NO: 407964 - DNA, 537 bp, Staphylococcus aureus; identical to SEQ ID NO: 407771

SEQ ID NO: 407965 - DNA, 171 bp, Staphylococcus aureus
atgaagaaatttaatgtccaaatcacatacgctggcatgattgaagagactatcgaggctgaaagtttagaagaagcagaaattgaggcggattttattgcgatatttgaagcatcatttaattatgatgaatatgaaattaatgtagaggaggcacaggaaaatgaataa

SEQ ID NO: 407966 - DNA, 255 bp, Staphylococcus aureus; identical to SEQ ID NO: 407738

SEQ ID NO: 407967 - DNA, 369 bp, Staphylococcus aureus
atggcgagaaaagcaagaattgtaacaataaacgataaaccttataggttcagtaaatttgaaatggaattaatagaaagtcacggtataaccgctggaatggtttctaagagagtaaaagacggttgggaactacatgaagcaatggacgcaccagaaggtacgcgtttaagcgagtacagagaaaagaaaacaatagaaagactggaacaagctagactcgaacgcaaattggaaagaaagcgaaagaaagaggctgagctaagaagaaagaagccacatttgtttaatgtgcctcagaaacatccaagaggacgttatgcgtgctacctgatggaaaacgacatattcgtgaaagttaagaagtag

SEQ ID NO: 407968 - DNA, 405 bp, Staphylococcus aureus
atggagatagaaattaaatttaatgaagtgtttaatgcgccgatggggtcgcctcgtccacgctttcgtaaaacaggtagatttgttcaaacttacatgccaacgtcttacacaaagcataaagcgtatatacaagggcaaatgcctaagttaaatctagagcgcgcactaaaaatcgaattagacttttactttccattgcttaaatcgtggtcgaagaaaaagaaaagcgaaatggttgggcagtataaagtgactaagccggatatcgacaacttaattaaaacggtattagatgcttgtaatggccatgtatggaaagacgataaccaaattacagaaataactagctcaaagcgttatggaattgagcccaaaataatcatacgaatagaagaaatataa

SEQ ID NO: 407969 - DNA, 753 bp, Staphylococcus aureus; identical to SEQ ID NO: 407750

SEQ ID NO: 407970 - DNA, 357 bp, Staphylococcus aureus
atgaagttaaaacacgattgcatacgtgaagttcttttagttatagagagtgatttaaaattaaataatgttctagataatgaagacctagaaaatacaattaaaaatttctcacgtgaagacatcgaatacactgttaaacaattgaccggtgcaggttatatagacgctgaattctatatggaaggttattttgttaaacatatgaatttttcaggtcacaaccttttggatgatgttagagatgtcgaagtttggagagaaactaaagctaaagcgtcaaaagtttcttcggtttcaatccctataattcaacaaatcgcatcgtcagtcgttaacaagatgctcgggctatag

SEQ ID NO: 407971 - DNA, 195 bp, Staphylococcus aureus
atgcaagctcaaaacaaaaaagtcatctattactactatgacgaagaaggtaatagacgactattatcaattgggaatttggaacattatttattagcagatatcaaatcaaggtttgatttatataaaaagaaaatacctgacttagataatctgttcgttcaaatagacggtgttgaatttaaattactatag

SEQ ID NO: 407972 - DNA, 858 bp, Staphylococcus aureus
atgaaacctagaaagcaagatgaaaaaatattatcagatcaatacagttactttgaaccaataatcagcgacagttgtgacataaaattcgacggagacaagaggagaattggttctatattcatttcacatgaggaaatttgttttataaggaaagaagaagattatatatttaaaatttcgttatcagacgtggtagattacaatactgttgttactatttggaaaaaccaagcttctttaacattaaacgataatagaaaaataacgttttatttcgtaacaaattctcctttaacaggatttatctcaattttaaaaacttatatgcaattatctaggaatagggaaacaattattccagatgataatctacttattaatgatgacgatgaacaaactaaagttgaaattttcgacgtcgtaggattaaattatgagggtcgtagaaaagaattaaagaaacttatcaaaaaaatgaaaactaacgacgctttctttttcttgtatagtgatttgaaagggaatgaacttaaagaagaattgctttatgaagacaaggtgtatgaaattcctgattacgaggttattcctggtgtattcttacaaaaagaaccggataatccttatgatgaaaacgcgataaaagttatgatttcaaatgaatactctgaatttcacgttggatatgtgcctagagagtatgcttcaaggttagtcaattatatagaagacaccgtttcttgtaacgcatatattaacggtggtaagtataaaactttagattatttagaagagaaaattgttactaaagaatcagactatggattacgaatacatgtagaatataaagtttaa

SEQ ID NO: 407973 - DNA, 2682 bp, Staphylococcus aureus
atgaacaaacatcacccaaaattaaggtctttctattctattagaaaatcaactctaggcgttgcatcggtcattgtcagtacactatttttaattacttctcaacatcaagcacaagcagcagaaaatacaaatacttcagataaaatctcggaaaatcaaaataataatgcaactacaactcagccacctaaggatacaaatcaaacacaacctgctacgcaaccagcaaacactgcgaaaaactatcctgcagcggatgaatcacttaaagatgcaattaaagatcctgcattagaaaataaagaacatgatataggtccaagagaacaagtcaatttccagttattagataaaaacaatgaaacgcagtactatcactttttcagcatcaaagatccagcagatgtgtattacactaaaaagaaagcagaagttgaattagacatcaatactgcttcaacatggaagaagtttgaagtctatgaaaacaatcaaaaactgccagtgagacttgtatcatatagtcctgtaccagaagaccatgcctatattcgattcccagtttcagatggcacacaagaattgaaaattgtttcttcgactcaaattgatgatggagaagaaacaaattatgattatactaaattagtatttgctaaacctatttataacgatccttcacttgtaaaatcagatacaaatgatgcagtagtaacgaatgatcaatcaagttcagtcgcaagtaatcaaacaaacacgaatacatctaatcaaaatacatcaatgatcaacaatgctaataatcaaccgcaggcaacgaccaatatgagtcaacctgcacaaccaaaatcgtcaacgaatgcagatcaagcgtcaagccaaccagctcatgaaacaaattctaatggtaatactaacgataaaacgaatgagtcaagtaatcagtcggatgttaatcaacagtatccaccagcagatgaatcactacaagatgcaattaaaaacccggctatcatcgataaagaacatacagctgataattggcgaccaattgattttcaaatgaaaaatgataaaggtgaaagacagttctatcattatgctagtactgttgaaccagcaactgtcatttttacaaaaacaggaccaataattgaattaggtttaaagacagcttcaacatggaagaaatttgaagtttatgaaggtgacaaaaagttaccagtcgaattagtatcatatgattctgataaagattatgcctatattcgtttcccagtatctaatggtacgagagaagttaaaattgtgtcatctattgaatatggtgagaacatccatgaagactatgattatacgctaatggtctttgcacagcctattactaataacccagacgactatgtggatgaagaaacatacaatttacaaaaattattagctccgtatcacaaagctaaaacgttagaaagacaagtttatgaattagaaaaattacaagagaaattgccagaaaaatataaggcggaatataaaaagaaattagatcaaactagagtagagttagctgatcaagttaaatcagcagtgacggaatttgaaaatgttacacctacaaatgatcaattaacagatttacaagaagcgcattttgttgtttttgaaagtgaagaaaatagtgagtcagttatggacggctttgttgaacatccattctatacagcaactttaaatggtcaaaaatatgtagtgatgaaaacaaaggatgacagttactggaaagatttaattgtagaaggtaaacgtgtcactactgtttctaaagatcctaaaaataattctagaacgctgattttcccatatatacctgacaaagcagtttacaatgcgattgttaaagtcgttgtggcaaacattggttatgaaggtcaatatcatgtcagaattataaatcaggatatcaatacaaaagatgatgatacatcacaaaataacacgagtgaaccgctaaatgtacaaacaggacaagaagataaggttgctgatacagatgtagctgaaaatagcagcactgcaacaaatcctaaagatgcgtctgataaagcagatgtgatagaaccagagtctgacatggttaaagatactgatagtagtgttgacaaagatgtgcaacatgatgttgatcatttatccgatatgttggataacaatcacttcgataagtatgatttaaaagaaatggatactcaaattgctaaagacactgataagggtgttgataatagcgttggtatgtcatcgaatgtcgatactgataaagactctaataaaaataaagacaaagtcatacagcttgctcatattgccgataaaaataaagttaataatactggaactgaaacaaacattgatacaatgaaatatcatcctatcagtactatcaaagttactgacaaaaaagcaactgaacatctgccgagtgatattcataaaactgtggacaaaacagtgaaaacaaaagaaaaggccggcacaccatcgaaagaaaacaaacttagtcaatctaaaatgctaccaaaaactggagaaacaacttcaagccaatcatggtggggcttatatgcgttattaggtatgttagctttattcattcctaaattcagaaaagaatctaaataa

SEQ ID NO: 407974 - DNA, 1707 bp, Staphylococcus aureus
atgaaagtcgaagtttataaaggagcgcaaggcaaacataaccttaaagattatgaagaaacatataatacttttgattggaaagacgtagaacaagcattttcttggagtgaaactggaaaaatgaacatggcatatgaatgtatagatcgccatgtagatcaaggattaggggataaaatagcgttaaattacaaagatgagcacagaaaagaatcgtatacttataaagatatgcaacggttatctaataaagcagcgaatgttttgtctgaacatgcagaagttgacaaaggtgacagagtatttatatttatgtcgcgtacacctgaactatattttgcgttgttaggtgttttaaaaattggtgcaattgttgggccgttatttgaagcatttatggaaaaggcagttgctgatagattagagaacagtgaagctaaagtgttaattactaataaggcattgttacctcgagtacctgtagataaattaccgaacttgaaaaaaattgttgtcgtagatgaggatgtagaagacaattacatagacttcattagtttgatggaaactgctagcgatgaatttgacattgaatggttaaagtcggatgatggtttgattttacattatacatcaggttctactgggcaacctaaaggtgtattgcatgttcaacaagcaatgttagtgcactatatttctggaaaatatgtattagatttacaagaagatgatgtttattggtgtacagcagatccaggttgggttacaggaacatcttatggtatttttgcaccatggttaaatggcgctacaaattgtatagctggtggtcgcttttcaccagaacagtggtatagtatgattgaagattttaaagtgacgatttggtatacggcaccaacagctttaagaatgttaatgagtgctggtgacgatattgttgagaaatatgacttgtcatcgttacgttcgattctatcagtaggtgagcctttaaatcctgaagttataaaatgggcgaaaaaagtatacggtttaacggtgttagatacttggtggatgacagaaacaggtggacatatgattgttaactatccaacgatggacgtcaagcttggctcaatgggcaaaccattacctggtattcaagctgcaattatcgatgatgcaggtaatgaattaccaccaaatcgaatgggcaaccttgctataaaaaaaggctggccatcaatgatgtatcgtatctggaagaatccagaaaaatataagtcatattttattggagactggtatgtatctggtgattcggcatataaagatgaagatggttacttctggttccaaggacgtgttgatgatgtaattatgacagctggtgaacgagttggaccatttgaggttgagtctaaattggttgaacacgaagcagttgccgaagcaggaattattggtaaacctgatccagttcgcggtgaaataattaaggcgtttgttgcactgagaaaaggatatgaaccaacagacgaattaaaagaagaaattcgtttatttgttaaagaaggtttgtcggcacatgcagcaccacgtgaaatcgaatttaaagataaattacctaaaacacgctcaggtaaaattatgagacgtgtattaaaagcttgggaattaaatttagatgcaggggatttaagtacaatggaataa

SEQ ID NO: 407975 - DNA, 693 bp, Staphylococcus aureus
atgaaattaaaaaatattgctaaagcaagtttagcactagggattttaacaacagggatgattacaactactgctcagccagtaaaagcaagtgagcaaagcaaattatcagttacttcaaacggcacgcaagaattaaaaaaatactacagtggaacaggatataatctccaaaatgtaggtggttatagagaaaaggataaaatgaacattattgatgggccacaacttaatgtagttactttacttggtacagacaaagaaagatttaaagatgatgaagattatgatgggctagatgtatttgttgtaagagaagggtcaggtaaacaagcagacaatatatcaattggtggaattacaaagactaataagtatcaatataaagatcctgttcaaaacgttaatttgttgctttctaaaagtacaggtcaaaacactacttcagtgacttcaacatactatagcatcaataaagaagaaatttcattaaaagaacttgatttcaaactaagaaagcaattaattgataaacatgatctttataagacagagcctaaagacagcaaaattaaagtttctatgaaagatggcggctactatacgtttgaattaaataaaaaattacagactcatcgcatgggtgatacgattgatagtagaaatatagagaaaattgaagtgaatttataa

SEQ ID NO: 407976 - DNA, 1479 bp, Staphylococcus aureus
atgagagaaaattttaaattacgtaaaatgaaagtcggtttagtatctgttgcaattactatgttgtatataatgacaaacggacaagcagaagcatctgaaggtagccaaactgttaagaatccaaaggtaaatgcaactgaagaaatcaaagctgaatcgcaaccggttcaaaacaatcaagaagtaagttcggaccaaacaaaaaagaattttgttaatttagatcctattaaacctggagctcaaaaagtaacaggtactacattaccgaatcaattaatcttgttaagtattgataaaaaagacgtgagttcagttgatagtgaaggaagcgaatttataacatctaaagatgatggaacgtttgaatatcctctaaaaaacagaaaaattgtacataatcaagaaattgaagtgacttcatcatcaatggaaggattagaggaagaagacgaagagacagaagtagaagaacaagaaagcaatgatgctactcaaaaagttacaactcctcgatatgagaaagcgtataaaataccggaagagcgattaaataaagcaaatggacaccatcaagttttcattgaacctattacagaaggatcaggcattattaaaggtcatacgtctgtaaaaggtaaagttgctctatctattaataataaatttattaattttgaagaaagagctaaagatggaattagtaaagaagatactaaagctagttccgatggtatttggatgcctattaatgaaaaaggatattttgattttgatttcaaaaaaaatccttttgataacttagagttaaagaaaaatgatgagatctcattaacatttgcacctgatgatgaagatgaagcattgaagtcattaattttcaaaactaaagtaacgagtttagaagatatcgataaagcagaaacaaaatacgaccatgcaaaagtgaaagaagttaatgttttgaaagatgttaatgaagagttacatgtagatgaaatctatggcagtttgtatcatacaaaacaaggtaaaggtattcttgataaacaaggaacaaaagagattacagggaagactaaattcgcgaatgcagtagtaaaagtatattcagagttaggtgaagcacaactgtttcctgatattcaagtagatgaaaatggtaaatttagctttgatgctgaaaaagctggtttcagattgcaaaatggagagacattgaattttgcagtagttaaacctattactggtgacctattacatcaaggatttgtctctaaatatattgatgtatatgaatctccggaagaaaagaaagaacgtgaatttgaagaaaaacttgaaaacacgcctgcatatcataaattacatggtgataaaattgtcggctatgatgttcaaggtaatccatcaacttggttctatccattaggtgaaaagaaagttgaacgtaaggcaccaaaattagaaaaataa

SEQ ID NO: 407977 - DNA, 792 bp, Staphylococcus aureus
gtgagatttttaaaaagacttgtattgtacatagttattatggttatgagtgtttttataataggttgtgataaatctagcgatactgcagaaaaatcaaaagaagattcgaaagaaacacaaatcaaaaagagttttgcgaaaacattagaaatgtacccaattaagaatctcgaggatttatacgataaagaaggataccgtgatggtgaatttaaaaagggcgacaaaggtacatggacaatatcaacagattttgctaaaagcaacaaacaaggtgaaatgaatagcgaaggtatggtactacattttaatagaaatacgagaacagcaacaggatattatactgtaagaacaacttatgatgaagtggataagttgacacgcgaaaaaaaatatcgtgttgaatttaaaaacaataagatagttctattggacaaagtagaagatgaaaatcttaaacaaaaaatagaaaattttaaatttttcgggcaatatgccgattttaaagacttgaaaaattataaaaatggaagaatatctagcaatgaaaatgttccttattatgaagcagagtacaaaaggaataatagtgatggaaatgtaaaaaaacttagagaaaagtacccaattacaaccaagcagtctccaatattaaaactgcatatagacggcgatattaaaggtagctcagttggatataaacagatagaatacacattttctaaggagaaagatgatgagacttttatgagtgattttttgaacttcggtccatcacacagtaaatag

SEQ ID NO: 407978 - DNA, 816 bp, Staphylococcus aureus
atgatggagtatataaaaaaaattgctttgtacatgagtgtattacttttaatcatttttattgggggatgtggaaatatgaaagaagaacagaaaaaagaagcaaatacaaataaaacagattcaaaagaagaaaaaatcaaaaagagttttgcgaaaacgttagatatgtatccaattaagaatctcgaggaactatatgacaaagaaggctatcgagatggcgaatttgaaaaaggtgacaaagggatgtggacgatatatacagatttcgccaaaagtaataaaccgggtgaactaagtaatgaaggcatggtcttgtacttagatagaaacacacgcaccgctaaggggtactactttgtcaggacgttttatcgcaaggataaattacctgatagaaaaaattataaagttgaaatgaaaaataataaaattatcttattagacaaggtagaagatccaaatctaaaaaagagaatagaaaactttaaatttttcggacaatatgcaaatcttaaagaattgaaaaactacagcaatggtgatgtctcaattaatgagaatgttccaagttatgacgtgaaatataaaatgagtaataaagatgaaaatgttaagcaattaagaagtcgttataatattcctactgataaatcaccggtattaaaaatgcatattgatggtaatttgaaaggaagttccgttggagataggaagttagaaattgatttttcgaaacgtgaaaatagccatttatcagtaatagattctttggattaccagccagcgaaggtggatgaagatgaaagataa

SEQ ID NO: 407979 - DNA, 246 bp, Staphylococcus aureus
atgttattatatttgtcatttgagtgttttttgtggcgtgatagtatagggaacttagctaaagttaatttgtattgtaatgtcgtgggaattttgttggcattgtacatgaagttgttatgtggcgagatgttgggcattgcacctgaagttgttatgtggcgagatgttggggatatagatggtgttgtatgtggcgagatattggcgcacgtatacagcgttgaaccagaaaatttaatgtag

SEQ ID NO: 407980 - DNA, 957 bp, Staphylococcus aureus
atgaagaaaggtttcattcatttgataggcatgtcagatgagggtgcatctatgattacttatgatttaattggcaatacaccattagtactgttagaacattatagtgatgataaagttaaaatttatgccaagcttgaacaatggaatcctggaggcagtgttaaagacagactcgggaaatatttagtagagaaggcaattcaagaagggcgtgtgcgtgcaggtcaaactattgttgaagcgactgctggtaatacaggcatagggttagctattgcagcgaatagacatcatttgaaatgtaagatctttgcgccgtatggtttttcagaagaaaagattaatattatgatagcgcttggtgcagatgtttcaaggacgagtcagtctgaaggtatgcatggggcacaattagctgcacgttcatatgctgaaaaatatggtgccgtttatatgaatcaatttgaatccgaacataatccggatacatattttcatacattgggacccgaattgacttcagcattacagcaaattgattattttgtggctggtattggctctggcggtacatttacaggtaccgcacgttatttaaagcaacatcacgtgcaatgttatgccgttgagccagaagggtccgtgttaaatggagggccagctcatgcacatgacactgaaggtatcggttctgagaaatggccgatatttttagagagacgtcttgtagatgggatatttacgattaaagatcaagatgcctttcgaaatgtcaaaagtttggctataaatgaagggttgttagtaggcagttcttcaggtgcagcattacaaggtgcattgaatttaaaagcgcaattatctgaaggtacgattgttgtcgtatttccagatggtagcgatcgatatatgtctaagcaaatatttaattatgaggagaatgattatgaataa

SEQ ID NO: 407981 - DNA, 1143 bp, Staphylococcus aureus
atgaataagaaaactaaattaattcacggtggacacacaacggacgactatacaggtgcagttactacaccaatttatcaaacaagtacatatttacaagatgatattggtgatttacgtcaaggatatgaatattctcgtactgcgaatccaacaagaagttctgtagaaagcgttattgcggcattagaaaatggcaaacatggctttgcgtttagttcaggtgttgcagctatcagtgcagttgttatgctgttggacaaaggtgatcatattattttaaattcagatgtatacggcggtacttatcgcgcattgacaaaagtatttacacgatttggcattgaagtggattttgtagatacaacgcatacagattcaattgtacaagcgatacgcccaacaacaaagatgttgtttattgaaacaccttctaatccattattacgtgttactgacattaaaaagtctgctgaaattgcgaaagaacacggtttgatttcagtcgttgataacacatttatgacaccttattatcagaatccattagatttaggcatcgatattgtcttgcattctgcaacgaaatatttaggtggacatagtgatgtcgttgctggtttagttgcaacatcggatgacaagcttgcagaacgtttagcatttatttcaaattcaacaggtggcattttaggacctcaagatagctatttacttgtgaggggtattaaaacattaggtttacgtatggaacaaattaatcgcagtgttattgaaattattaaaatgttacaagcacatccagctgtgcaacaagtgttccatccaagtattgaaagtcatttaaatcatgatgtccatatggctcaagcggatggccatacaggtgtgattgcatttgaagtgaaaaatacagaaagtgccaaacaattgattaaagcaacatcgtattacacattagctgaaagtttaggtgcagtggaaagtttaatttcagtacctgcattgatgacacatgcatccattccagcagatattcgagctaaagaaggtattacagacggacttgtaagaatttctgtaggtattgaagatactgaagatttagtcgatgatttaaaacaagcactagatacgctataa

SEQ ID NO: 407982 - DNA, 339 bp, Staphylococcus aureus
ttgtcaaatacaattggtatgttatcagcagtgatatttttacttatttatactagtttcaaaggatataggtattcatttccattagaattaaatttttggtttggtttattatatttatctattctagcttcatttttagcctggtttttctatctgaaattaattaataatattggagcagctgaaagtggttacatggttgctatgtttcctgcaattggtggtatagcaagtgttattatgggagaaactcatttaagtataaatttagtagtcggaattatattagcatgtatgggtgcatatttagcattatataaaccaaaacctagttaa

SEQ ID NO: 407983 - DNA, 432 bp, Staphylococcus aureus
atgaattatttaatgtacctgttttgcatgtttatatggggattaaactttatagcggtaaagatacaaggagatagtttgcctttagaagttgctttattgtatagatctttaattgctttttcgctattcggtgtaatgttcatatttatttttaaaaaactgaaattaaataatacaaattggtttacgataattggttttggactatgtaactttactataagttatttgcttctttattacggtactttctatagttcagctgctatagttacattgattttttcaatgaaagccatattaacacctatatttattagtatggtattcaagaggaaaatttctaacagaatatatatagggggaggactaggagttgtaagtgtagttgtaatcttatatcctgatttaaacagcttaacaaattaa

SEQ ID NO: 407984 - DNA, 1035 bp, Staphylococcus aureus
atgtataaaactttattttttgacaaaattgctgaattaaaagaaaaaggaagctatagaatatttactgagattaacaggattgcaaacaaatatccattagccaaaggggaagatggtaaagaggttgttgtgttttgtagtaacgattatttaggtatgtctcaaaatcaagaagtaataaatgtaatgagtgatgctttaaaagaatatggtgcaggggcaggtggttcaaggaatattggtggaagccataaatattttaaactattagaaaatgagatagcaaaatggcataaaaaggactcagctttagtttttccaacaggatactcttcaaatgatgcgtctttgcaaggtttattaagaatattcccagaaatgattgtattttctgattctaaaaatcatgcgtctataataaatgctttgcgaagtgttaaaaataagattgaaatttttgaacataataatgttaaacatttaaatgaattactgaatcaatatgatattaatataccaaagttaatagtatttgagtctgtatattcaatggatggagacattgcaccaatagtagagatagtcgaattagcaaaagaatataattctttaacttttttagatgaagtacatgcaattggcatgtatggtgaagaaggaagaggatactctgatgttgttggtgttcaggaagatatagacatcatacaatctacaatggcaaaaggaatcggaataataggaggatatataaccggagatcaattactcatagatgtaatcagatcatattcttcaggttttatatttactactgcattacctccggttattgctgcgggttgtttaactagtataaaaatagtcagaagtaatgataaattaagagaagaattgcaagataaaacgaaatacttaaaagaaaaattcaaagaaaatggtattgaagttttgaaacaaagtaagacacatatactcccagttataattggagattcaaaaaatgtgaggaagcagcaaagttacttctag

SEQ ID NO: 407985 - DNA, 906 bp, Staphylococcus aureus
atgtttaaaagaacaaaactaatcttaatagcaacgatactactatcaggatgttcaactaccaataacgaatccaacaatgaaacaaaatcagtgccagaagaaatggaagcttcaaaatatgtaggacaaggcttccaaccacctgcagaaaaagatgcgattgaattttcgaagaagcataaagataaaattgctaaacgtggcgaacaattttttatggataactttggactaaaagttaaagctacaaatgttgtaggtagtggcgacggtgtagaagtattcgtgcattgtgatgaccacgacatcgtatttaatgcaagtattccatttgacaaatcaataattgagagtgatagctcattaagaagtgaggataaaggcgatgatatgagtactttagttggtacagtgttgagtggctttgaatatcgagcgcaaaaagaaaagtatgataatttatataaatttttaaaagaaaatgaaaagaaataccaatatacaggatttactaaagaggcaattaacaaaacacaaaatagtggatatgaaaatgaatatttttatatagttgctaatataccgacgctccaagaatataggaaatattacgaacccctaataaagaaaaataatctgaattttaaaaaaggtatgaaacaagcaaggaaaggagtaggctataaagctgcaatagaagtacatacaacattgttttcgagaagtagtaacttttcaaaggacaaaaaattagatgatgttttagatttgtctgaaagtacgaaaaagttacaccttaattttgaaaatacgaaaatatttttacaactagcaaaatctactattagcactaatcgagttaattacagtgataatgagtctataaggattgaggtcgaatga

SEQ ID NO: 407986 - DNA, 252 bp, Staphylococcus aureus
atgacaaggtttttatacgtttgtatacaacgacgaattatctattcgccatcacattatgatgatatgtttattttaaacacacaagctcatgcacgtcttgatcaaatggcacaacagtttgaagttgtttgtaatggcttgaacgaaaatgaaggacaagcaattcaaacgatggatcaatctgcctctctaatacggtcaaacttaattcaagttaaagaacaattagaaaaactagctgtatactaa

SEQ ID NO: 407987 - DNA, 153 bp, Staphylococcus aureus
atgattaaacaaatattaagactattatttttattagcaatgtatgagctaggtaagtatgtaactgagcaagtatatattatgatgacggctaatgatgatgtagaggcgccgagtgactttgagaaaatcagagctgaagtttcatggtaa

SEQ ID NO: 407988 - DNA, 390 bp, Staphylococcus aureus
atgatgattaaaaaacttaaaaatatggattggttcgatatctttattgctggaatactgcgattattcggcgtaatcgcactgatgcttgttgtcatatcgcctatctatacagtggctagttaccaaaacaaagaagtacatcaagggacaattacagataaatataacaagagacaagataaagaagacaagttctatattgtattagacaacaaacaagtcattgaaaactccgacttattattcaaaaagaaatttgatagcgcagatatacaagctaggttaaaagtaggcgacaaagtagaagttaagacgattggatatagaatacactttttaaatttatatccggtcttatacgaagtaaagaaggtagataaacaatga

SEQ ID NO: 407989 - DNA, 237 bp, Staphylococcus aureus
atgattaacatacctaaaatgaaattctcgaaaaagtacactgaaataatcaaaaaatataaaaataaaacacctgaagaaaaagctaagattgaaaatgattttattaaagatattaatgataaagacagtgaattttacagtcctatgatggctaatatgaatgaacatgaactaagggctatgttaagaatgatgcctagtttaattgatactggagatgacaatgatgattaa

SEQ ID NO: 407990 - DNA, 204 bp, Staphylococcus aureus
atgacggaggttagaattaaaactatttcagatagagtttattacacaacaacagatctagcttctggtgattatattaaacttgttatgaagttagggattgagtattttcttccggtcaaagatgtgttcaacaatgaagtatgggttaaaagagatgagattgaatcatttacatttattgaggaggcagacgatgattaa

SEQ ID NO: 407991 - DNA, 207 bp, Staphylococcus aureus
gtgacgcaatacttagtcacaacatttaaagattcaacaggacgtaagcatacacacataactaaaactaagagcaatcaaaggtttacagttgttgaggcagagagtaaagaagaagcgaaagagaagtacaaggcgcaagttaaaagagatgcagttattaaagtgggtcagttgtatgaaaatataagggagtgtgggaaatga

SEQ ID NO: 407992 - DNA, 528 bp, Staphylococcus aureus
atgactaacacattacaagtaaaactattatcagaaaatgctagaatgcccgaacgaaatcataagacggatgcaggttatgacatattctcagctgaaactgtcgtactggagccacaagaaaaaacagtaataaaaacagatgtagctgtaagcataccagagggctatgtcgggctgttaactagccgtagtggtgtaagtagtaaaacgcatttagtgattgaaacaggcaagatagatgcgggatatcatggcaatttaggaattaatatcaagaatgatgcacaagtatatttaacaactaacgaacagtgttttgatatacaaggagaaatggaaaattcttttgtaaataatgctaagaaaaaaccttttactataaatggttattacgaaatatataaaggcgacaaactagcacaactggttatcgtacctatatggacacctgaactaaagcaagtggaggaattcgaaagtgtttcagaacgtggagaaaaaggcttcggaagtagcggagtgtaa

SEQ ID NO: 407993 - DNA, 171 bp, Staphylococcus aureus
atgaaaaaatttaatgttcaaatcacatacactggcatgattcaagagactatcgaggctgaaagtttagaagaagcagaatttgaggctcatgatattgcgagaatggaagtgccatttgattgtgatgaatatgaaattaatgtagaggtggagcaggaaaatgactaa

SEQ ID NO: 407994 - DNA, 255 bp, Staphylococcus aureus
atgaataatcgcgaacaaattgaacaatcaattatcagtgctagtgcctataacggtaatgacacagagggattactaaaagaggttgaagacgtgtataagaaagcgcaagcgtttgatgaaatacttgaagacattaataactttactcaaagtccgactaaaggagcgctagaactagatgaagcaatagggattatggtaagtcaagttatctatgaatacgaggaggaacaggagaatgaaaaaatttaa

SEQ ID NO: 407995 - DNA, 309 bp, Staphylococcus aureus
atgacggtcaccttatcagatgaacaatataaaaatctttgtactaactttaacaagttattagataaacttcacaaagcattaaaagatcgtgatgagtacaagaaacaacgagatgagcttatcgtggatatagctaagttacgagagcgcaacaaagaactggagaagaaagcaagcgcatgggataggtattgcaagagtgttgaaaaagatttaataaacgaattcggtaacgatgatgaaagagttaaatttggaatggaattaaacaataaaatttttatggaggaagacactaatgaataa

SEQ ID NO: 407996 - DNA, 372 bp, Staphylococcus aureus
atgatacctaaatatcgagtgtgggacgaatatacgggaagaatacacgatgttgtaggattcgacttcattgagagtgaagttcactatgaaaactacgcggaagcagaagctttaatacatgcaagagatttcaaagatgtagaacttatgcaaaacacaggatttaaagatgtgcacggtgtggagatttatgaaggggatattgttcaagattgtgattcgagagaagtaagttttatcgagtttaaagaaggagccttttatataacttttagcaatgtaactgaattactaagtgaaaatgacgatattattgaaattgttggaaatatttttgaaaatgagatgctattggaggttatgagatga

SEQ ID NO: 407997 - DNA, 402 bp, Staphylococcus aureus
atgaaaattaaagttaaaaaagaaatgaaattagatgaattaattaaatgggctcgagaaaatccggagctatcacaaggaaaagtttttgttacaaagagttttgctgatggaatcgttcgttttgattcatatacaaataagtgtacgacatcaggttttgctccaattgatatccctttcatagtcgaagttgaaaaggaaatcacagaagagactaagtttgataggttgtttgaagtattcgaggtctcagaagtagaatataactctgcattatatacgaacactagtataaaagaatgtttatatggcagatgtgtgcctaccaaagcgttctacatcttgaacgacgacttcactttaactttaatttggaaagatggagggctaatcgaatga

SEQ ID NO: 407998 - DNA, 243 bp, Staphylococcus aureus
atgacaggtagcgcacgcaaaaaatacttaagccgatttttcggctctaagagatatctgtatcaggataacgaacgagtggcacatatccatgtagtgaacggcacttattactttcatgggcatatcgtgccaggttggcaaggcgtgaaacagacatttgatacagccgaagagctcgaaatatatataaagcaacatggtttgaaatacgaggaacagaagcaactaactttattttaa

SEQ ID NO: 407999 - DNA, 201 bp, Staphylococcus aureus
atggcgacgcaaaaacaagttgaatatgtgatgtcattacaggagcaactggaattagaagactgcgaaaaatatacagacgaacaagttaaagcaatgagtcataaagaagttagcaatgtgattgaaaactataagacaagcatgagggatgaagaactatatgacgaatgtatgtcgtttggtctgcctaattgttaa

SEQ ID NO: 408000 - DNA, 258 bp, Staphylococcus aureus
atgagcataatcagtaacagaaaagtagatatgaacgaaatacaagacaatgttaagcaaccagcgcactacacatacggcgacattgaaattatagattttattgaacaagttacggcacagtacccaccacaattagcattcgcaataggtaatgcaatcaaatacttgtcaagagcgccgttaaaaaacggacacgaggatttagcaaaggcgaagttttacgtcgatagagtatttgatttatgggagggttaa

SEQ ID NO: 408001 - DNA, 216 bp, Staphylococcus aureus
atgaacacaagatcagaaggattgcgtataggcgtcccacaagtttctagcaaagctgatgcttcttcatcctatttaacggaaaaggaacgtaacttaggagcggaaatattagagcttattaaaaaaagtgattacagctacttagaaataaacaaagttttctatgcattagatagagaacttcaatacagggcgaataataacaaactttaa

SEQ ID NO: 408002 - DNA, 366 bp, Staphylococcus aureus
atgcccttgatatctgatgaatttgatacacttactaaagaccaacaatatatcttgtccgtactctacaaagattatttagaatgtgtaaagttaggttcggttaaattaacctgcaataattttggaagtgctaaagatatacatacaaagtattttcaaaaactacattttgaagatgtaaaatacgatttaaataaacttaaaaactctgggttcctaaacggcgtgtatgctagtaacactatttatcatgtaacaatttcagacaagactgttgtttactttgaaaatgagtttaaaaacaatttaaaaagtatcattgatagcatttctaaaattgcttcaataattcctggtctctag

SEQ ID NO: 408003 - DNA, 246 bp, Staphylococcus aureus
atgaacattcaagaagcaactaagatagctacaaaaaatcttgtctctatgacacggaaagattggaaagaaagtcatcgaactaagatattaccaacaaatgatagttttttacaatgcatcatttcaaatagcgatgggacaaaccttatcagatattggcaaccttcagccgatgacctcatggcaaatgattgggaagttataaacccaactagagaccaggaattattgaagcaattttag

SEQ ID NO: 408004 - DNA, 381 bp, Staphylococcus aureus
atgaaacttaatcacgattgcgttagactcttgctcttagaaatagaatctaataagaaaataggtgaaccacttactcgacataatttcaacgataatattatttttgataaatatgattttgaaacagtaatgtactcacttttaaaattagaagaagctaaatttatttgttgcgatctgaaattcatcgaaggcagggtcgtttcttggattattgatgacatcacttggtctggccatgaatttctcgataatattagagacaataaaacttggaacgaagttaaaagagtcgttaacaaaacatccagtatgtctcttaatcttatggggaaattagcttttcaatatctttctcaaaaattcaatctaacttaa

SEQ ID NO: 408005 - DNA, 198 bp, Staphylococcus aureus
atgcaagctcaaaacaaaaaagtcatctattactactatgacgaagaaggtaataggcgaccattagatattcaaattaatgacggatatgaactgatggtccgatctcatttcatcaacaacaccattgaagaaataccatacgtaaataataacttatatgccttggttgatggttatgaatttaagttagattga

SEQ ID NO: 408006 - DNA, 213 bp, Staphylococcus aureus
atggatttagagaaaattgctcacgatattacaatctcgctattacctagagctctagatagacataagattcataacgaatggcaagaagtcggtgatgacgtaattgcattcgctaaagatagcgttgctcgtgactatttcagcatttactcttctgtgttattgggattacaagaagaagaaaaaagcagaaaagatttaggattgtaa

SEQ ID NO: 408007 - DNA, 150 bp, Staphylococcus aureus
atgaaactactaagaaggctattcaataaaaaacacgaaaacttaattgacgtgtggcatggaattcaatggttaaaagtgaaagaaagcaaattaaaaaaatataaagtggtctcggatagagaaggtaagaaatatctaattaaataa

SEQ ID NO: 408008 - DNA, 444 bp, Staphylococcus aureus
atggaacaaataacgttaaccaaagaagagttgaaagaaattatagcgaaagaagttagaaatgctataaaaggcgagaaaccaatcagctcaggtgcaattttcagtaaagtaagaatcaataatgacgatttagaagaaatcaataaaaaactcaatttcgcaaaagatttgtcgctaggaagattgaggaagctcaatcatccgattccgctaaaaaagtatcagcatggcttcgaatcaattcatcaaaaagcttatgtacaagatgttcatgaccatattagaaaattaacattatcaatttttggagtgacacttaattcagacttgagtgaaagtgaatacaacctagcagcaaaaatttatagagatatcaaaaactattatttatatatctatgaaaagagagtttcagaattaactatcgatgatttcgaatga

SEQ ID NO: 408009 - DNA, 213 bp, Staphylococcus aureus
atgacaactagtgtagcagataaaccatacttaaaaataaaaagcttgattgcacttaaaggaactaaccaaaaagaagttgctaaagcaatcggaatgagtagaagtttattgagtataaagataaatcgaattaatggcagagattttacaacttcagaagctaaaaaattagcagatcatttaaatgttaaagttgatgattttttttaa

SEQ ID NO: 408010 - DNA, 732 bp, Staphylococcus aureus
atgggtattggtgaaggtttaaagaagctaagaaaaaataaaaatatgactatggaacaattagcaactgatcttaataataaatatcccgacttaatgaaattaacgaaaggcaagatatcaaaatgggaaaatgaaaaggaagaacctcgattatcaactgccaaaattttggctgagtacttcaatgtgaagattaatgatttgtatagtgaatcaaatactacatacaaagacgataacgacatcacttccatatacaacaaactcacacctccccgccaagaaaacgtacttaactatgcaaatgaacaattggaagaacagaataaagtcacttctatagatggatataaagagtctaaactagtatcgtatattgcatgtggtgcaactggtgctggcataggagaagaattatatgatgacatattgcatgaagaagtattttttaaagaagacgaaacgccatcaaatgctgatttttgtattttagttaatggtgattcaatggaacctatgttaaaacaaggaacatacgcttttattaagaaagaagattctattaaagatggtacaattgcactcgttgtattagatggagtaagtcttatcaagcgtgtagatatatgcgaagactatattaatttggtatctctaaatccgaagtatgatgatatcaaagtcgcttcgtttagtaatattaaagtaatgggcaaagttgtattgtga

SEQ ID NO: 408011 - DNA, 219 bp, Staphylococcus aureus
atggtgttaaagaaatcagtccccgtgccggaaaatcataaaaaaagatgggataaatttgtaaatcccgcattgaataatgcattaaaacaagaagaggctacatggggaaatgtacaaggtcaagtttcacaagcattgatgggaactggtattaaagattctactgcaagaagcatagggttttgggtttcccaagttggtcaagcattaatataa

SEQ ID NO: 408012 - DNA, 729 bp, Staphylococcus aureus
atgaaaaaagtaatggggatattattagcaagtacacttatcttaggtgcttgtggacatcatcaagatagtgcaaaaaaagagagcactagtcacaaaaagaaagaaaatgacaatgaagaattaaatgaagaacttaaagaatttaaaagcaaaaaaaatatggatataaaaattaaaggcgatactattgttagtgacaaatttgaagctaaaataaaagaaccgtttatcatcaatgaaaaagatgagaaaaagaaatatatcgcttttaaaatggaaattactgctaaaaaagacgataaagatttaaatccatcttctatttctcatgactatattaatatcactcaagatgataaaaatacagtaaataaattaagagatggttatcttttaagtgataaaaaatataaagattggacagaacataaccaagatcaaattaaaaaaggcaaaactgcacaagccatgtttatctatgagttaagaggtgatggaaatattaatttaaatgtccataaatactcagaagataaaacagttgattctaaatcattcaaatttagtaaacttaaaaccgaagatttttctcatagagcggaaacaagagaagaagtagaaaagaaagaaaaagaatttgaagaagagtacaaaaaagaacaagaacgagagaaagaaaaagaaaagcaaaaagatgacgaccacagtgctttagatgaagtataa

SEQ ID NO: 408013 - DNA, 522 bp, Staphylococcus aureus
atgattaatattatttcagctataggatctattggaacatttattatggctttattttattttgtatcagtttcagttcaactttatcaaatgaaaattagctttctgccagctttaggttttaaccaaattttattagaaagggaggaggatcaacttaatataatgaattcggcaacagaagagcatcatcataaagattatattaaactatataatttaggtggcggtgctgctaaaaaaattgcaatagaggttttattggggaaggataaagtcattcagaaaaaatacgtgaatattttacctagtaaagaagggtacatgttaccaattaataaaaatgtgtacgaagaattagaaagaacgattgagaacaatggttatgaagctgatttgaatgtacgtatgacttattatcataatgtaagtcgcaaacaacaggaagttatattaaaaggtcaaatcgaccgttttaatacttataataataaagaaatttatgatttgcagtttatctaa

SEQ ID NO: 408014 - DNA, 546 bp, Staphylococcus aureus
atgaaaaggaaagtactagtactaacaatgggtgtaatttgtgcaactcaattatggcattctaatcacgcaaacgcattagtgacagagagtggcgcaaataatactaagcaatttactgaaattgtatcggaagagaaagttataaaagatgctatttcgaaagtcaatgaaagctttatttactatccccaaaatgatttgaagggattaggtggagaacacaacgattacgaaaaaattacatatagcacttcttctaataatgttttagaattatcaatgagttcaaaatacgtaggcggtaaatcaggagctatggttggttatagtgaaattgactcatcacatttcacagaccgtgacaaacgcgttattagacgtgatcatgttaaagaagcacaaagcttagtagagaactataaagatacacaaagtgctgatgctaggatgaaagccaaacaaaaagttaacacattaagcaaaccgcatcaaaactatttcaataaacaaattgataaggtttataatggattacaacgctaa

SEQ ID NO: 408015 - DNA, 633 bp, Staphylococcus aureus
atgcagaaaattttctcacaggaattgcgattcaaggatgagaatggtgaagattatccagattggaaagagaagaagttaggggatattacagaacaatctatgtatggtataggtgcatctgcaacaaggtttgattcgaaaaatatatatataagaattactgatattgatgaaaaatcaaggaaattaaattatcaaaacttaactacacctgatgaacttaataataagtacaagctgaaaagaaatgatattctttttgcacgaactggtgctagcacgggaaaaagttatattcacaaagaagaaaaggatatttataattactatttcgctggatttttaataaaatttgaaatagacgaacaaaataatcctttgttcatttaccaatttacactaacatcaaaatttaacaaatgggtgaaggtcatgtctgtaagatctggtcaaccgggcattaatagtgaagaatatgcaaaattacctttagttttgcctaataagttagaacagaaaaaaatagcagaattcttagatagatttgaccaacaaattgaattagaaaaacaaaaaatagaaatacttcaacaacagaaaaaaggcttacttcaatcgatgtttatttaa

SEQ ID NO: 408016 - DNA, 855 bp, Staphylococcus aureus
atgaataaaacaaactttggggattatttaaataaaagtaagagcaggaaaatatataagatttttgatcaaaatttgaagcaagagtttagttattggcagtttaggaaacttttcaaatcttatacaaggcagtcagatgtacatgagttaaaagtgtgtactcaaaatgatgatactatggagcaaatatggatagatagagcaaatcaatttggagtgtcagtgacatggaaagataatagtattatcggatttgttatgcgtccgttaatcaattatgatgctattaagaatgaaacgactttaaaatacgcagtgccgacaacagattgctatgaggttttttggggtggagataatgaattatataattatcactatttatacccacatcaaaggtatgctattgatttagttattaaagaaaatcataaaacatataagaatcaaggaaaagtaaatactgattatttttgttttggaaaagatatcattgcgccagcaaatggtacagttgaaaaagtagtgaatggggttcaagacaacagtattggaagtacgaatgaatcacagtttttaggaaattatattgtaattaagcacgcagaaaatgagtatagcttaatagctcatttacaacaatattcaatcattgtgaatgaggggcaaaatgttaaatatggtgacttccttgggaaggttgggaattctggcaattctactgaacctcatatacattttcaagtaatgaatgataagaatattgaagcatgtacgtctttgaaaattcgatttttaaataatctagaacttatcaaaggggatgtggtctgcggattacaaggtgaatga

SEQ ID NO: 408017 - DNA, 2421 bp, Staphylococcus aureus
atgacatataaaatgaagaaatggcaaaaattatccaccattacgttattaatggtcggagtgattactttaaataatggtgaatttagaaatgttgataaacatcaaatcgctgtggctgatacgaatgttcaaacgccagattatgaaaaattgaagaagacgtggctcgacgttaactacggttatgatcagtatgatgagaataatcaagatatgaagaagaagtttgatgctaaagaaaaagaagccatgaagttacttgatgacatgaaaactgatacgaatagaacatatttgtggtcaggagctgaaaaccttgaaactaattcttctcacatgacaaaaacctatcgtaatatcgagaaaatcgcagaagcaatgcgacataagaatacggtattaaaaacagataaaaacaagttaaaaataaaagaagccctagattggatgcataaaaatgtttatgggaagaatccttctcaaaaagtcgatgatttaactaaaaatcgtaaggggcaaactacacccaagaataactcattgaattggtgggattatgaaattggtacgccaagagcattaacaaatacactacttctaatggatgatatgctcactaaagatgaaatgaaaaattattcaaaacctattagtacatattcaccatccagtgacaaaattttatcttctgttggtgaatcagaagatgctaaaggtggaaatttagtagacatttctaaagtaaaacttttagaaagtgttattgaagaagatgtagatatgatgaaaaagtctatagattcttttaataaagtgttcgcttatgttcaagattctgccactggtaaaggtcgcaatggattctataaagacggctcttatattgatcatcaagacgtcccatacactggtgcttatggtgttgtactattagagggtatttctcaaatgatgccgatgataaaagaatctccttttaaaacttcacaagataatgctacattaagcaattggatttatgaaggatttatgccattaatctataaaggtgaaatgatggatttatcacgtggtagagctatcagtcgtgaaaatgaaacgagtcatacagcgtcagcgactgtaatgaaatcattgttgagattgagtgataccatggatgattcaacaaaagctaaatataagcaaatcgtcaaaacttcagtagagtcagatttaagttataaacaaaccgattatttaaattcatattcagacatagataaaatgaagtctttaatggcagatagcactatttctactaacggtttaacacaacaacttaaaatatataatgacatggatcgtgtcacctatcacaacaaagaattagactttgcatttggattaagtatgacatcgaaaaatgtcgcacgttacgaaagtatcaatggagagaacttaaaaggttggcacaccggtgcaggcatgtcttatttatataacagcgatgtcaaacactatcgtgataacttctgggcaacagccgatatgactcgtcttccaggtactactactttaaatgatatgccatctacaaatactaagaatgataactcctttgttggcgggacaaaattaaataataaatacgcaagcatcggtatggattttgaaaatcaggacaaaattttaactgccaaaaaatcatatttcatattaaacgataaaattgtcttcataggaactagcattaaaagtactgattcatcaaagaatccagttacaagtgttgaaaatcgcaaagcaaatgggtataaattatataaagatgatattgaaattaccacttcagatgttaatgctcaggaaacccattcagtctttttagagtctaacgatactaaaaagaacattggttatcattttttagacaagccaaaaataactataaaaaaagaaagtcatactggtaagtggagtgatataaataaaagtcaaaaatcagatgacaaaactgatgggtattatgaagtaactcaaaagcattctaattctgacaataaatatggatatgtgttgtatccaggcttatctaaagatgactttaagacaaaaaaagatgaagtaactgtcgttaagcaagaagatgacttccacgttgtgaaagataatgaatcggtttgggctggtgttaattacagcgatagcactaaaacttttgaaattaatggtactaaagtcgaagttaaagcaaaaggtatgtttatacttaaaaagaaagatgataaaacttacgaatgtagcttctataatcccgaatctacaaattccgcttcagatattaaatctaaaatttcaatgaccggttactctattacaaacaaaaatacatcaacttctaatgaatccggcgtacactttgaattaactaaataa

SEQ ID NO: 408018 - DNA, 444 bp, Staphylococcus aureus
atgaaaaagagatatgtatttgtggtagttgttgcaatattaataggcctaattgttattgcttatgcgcataataaacaaataaaggctcattacattgagacacaagaaaaacgaatcgatttgtattttaagcataatcttaacaattataaaaatatgaaggtgacagattttcataaaactccgatgggtgggtatttcattgtaggttatataaatgatgataaaaaatataaattccaagcaagtatagattcgggaagcaataatcaatatcagaaagatattggttaccatgaagataaattaggcaaattattcaaagaaaaagaccctaaatataaactctcagtcgatgaaataattgaaaaagaacatttggataaaagtgattatgtagcggaaccaccattattcttcttttcggggagattagagtga

SEQ ID NO: 408019 - DNA, 444 bp, Staphylococcus aureus
atgaaaaagaaatatattttaataatagttgtagtaattataataggtttgctagtcgtggcatgtgtgacccataagcatagaaaagattattacattgagacgcaagaaaagcggatagatttgtattttaagtataaccttaataattatagttctatgaaagttacaagttttaaaaagacgcctatgggtggctatattgtagatggatatgttaatcacaacaaaaattatgattttaaggttctcatctctgcaactgacaatcatcaatttgaagatagcataggatacgatgataagacatttggtaaattatttaaagaaaaagaccataaaaatgaattaaaacctaaagatattataaaaaaagaacacttggataaaaatgaatatgaagcagaaccaccactgttcttcttttcagggagattagagtga

SEQ ID NO: 408020 - DNA, 255 bp, Staphylococcus aureus
atggacagttattttataggtggttatataaataacaaaaaagactatgaattccaagcttatattaatgtaggtggtagaaagcaatttcaaagagatataggatatgacgaagaaaaacttggaaaactattaaaagagcaagaagtaaaaaattggaaaaccgtcgatcaaataattaaaaatgaacacttagataaaagtgaatatgaagcggaaccaccgttgtttttcttttcaggatcactggattag

SEQ ID NO: 408021 - DNA, 621 bp, Staphylococcus aureus
atgaaatcaatattaataatctggacaataactttatcaataatgaacaatgacaattgtttagtgttttttttagaaaatacagaacgatttttatctcattataaaagtttgactcaactactaatcagctttataactttgtttatgagcttagggagtatattagtagcttgttatgctatatatataaatcaaaaagaaaagcaaaaagatattaaaaagaaaagtgaaagattactaatgcttattgacgatgaaaccttcatggatagaatgtatgtagtaagtagactatatcttatttcttctatgctagcaaatagcttggataagcatacagaaaaaataaataaagaaattgatgatacattcgataagttaaatgaaataagagataaaatttcagaaattcaaaaacaaaaattagagattattacaaacaatgatttaaaaaaattaatccaaaaaaaagaaagcataactctaaatgcaaacttgttaaaacgatataatacaaaagtagagggaccggaaaataaaaggtacgaagaagcgataaaaagaattatagaaattagaaataacataatcagtgatatggacgacttaattaaataa

SEQ ID NO: 408022 - DNA, 804 bp, Staphylococcus aureus
atgactaaaacaaaaattatgggcatattaaacgtcacacctgattcattctcagatggtggaaaatttaataatgttgaatcagctataaatagagtgaaagccatgatagatgaaggtgctgacattatagatgttggaggtgtttcaacgagaccaggtcatgaaatggtttcattagaagaagagatgaacagagtattacctgttgttgaagctattgtcggttttgatgtaaaaatttcagtcgatacatttcgaagtgaggttgctgaagcatgtttaaaattaggcgttgatatgattaatgatcaatgggcgggtctgtatgatcatcgtatgttccaaattgtagctaaatatgacgcggaaattattttaatgcataatggaaatggtaatcgtgatgaaccggttgtcgaagaaatgttaacatctttgttagcacaagcacatcaagctaaaatagctggtataccttcaaataaaatttggctagatccaggtataggtttcgctaaaactagaaatgaagaagccgaagttatggcaagactggatgaacttgttgcaacagaatatccagttttattagcgacaagccggaaacgtttcactaaagagatgatgggttatgatacaacaccggttgaaagagatgaagtaactgcagctacgactgcatatggtattatgaaaggcgttagaacagtacgcgttcataatgtcgagttgaatgctaaattagctaaaggtatagattttttaaaggagaatgaaaatgcaagacacaatctttcttaa

SEQ ID NO: 408023 - DNA, 711 bp, Staphylococcus aureus
atgacaaaaggtacaccacatattcaaccaaatggagtaaaaattgctaaaacagtattaatgcctggcgatccgctacgcgcaaaatatattgctgataattttttagaaaatgttgaacaatttaacgatgtacgtaacatgtttggttacactggtacatataaaggtaaagaagtttctgtaatgggttctggtatgggtattccaagtattggtatttactcatatgagttatacaacttctttgatgtagatacaatcattcgtatcggttcttgtggcgcattacaagaaaatgttaacttatacgatgttattattgcacaagctgcatcaactaattcaaattatgtagatcaatacaatatttcaggtcatttcgcgcctatcgctgacttcgagttagtaactaaagctaaaaatgtcgctgaccaaatcggtgctactacacacgtaggtaacgtattatcttctgatacattttacaatgccgatccaacattcaatgatgcttggaaaaaaatgggtattttaggtatcgaaatggaatcagctggtttatatttaaatgcgattcatgctggtaaaaaagcacttggtattttcacagtaagtgatcatattttacgtgacgaagctactacacctgaagaacgtcaaaattcatttacacaaatgatggaaatcgctttagaaatcgcagagtaa

SEQ ID NO: 408024 - DNA, 984 bp, Staphylococcus aureus
atgaaaatgaaaaaattagtcaaatcatcagttgcttcatcaattgcactgcttttgctatcgaatacagttgatgcagctcaacatatcacgcctgtaagcgagaaaaaagtagatgacaaaatcactttatacaaaacaacagcaacatctgataatgataaattgaatatttctcaaattttaacgtttaatttcattaaggataaaagttatgacaaagatacgttagtacttaaggcagccggaaacattaattcaggttataaaaagcctaatccaaaagattacaattactcacagttttattggggcggtaagtataatgtttcggttagttcagaatcaaatgatgctgtaaatgttgttgactatgcacctaaaaatcaaaatgaagaattccaagttcaacaaacattaggttattcttatggcggagatattaatatatctaatggcttatcaggtggattgaatggatcaaaatcattttcagaaacaataaattataaacaagaaagttacagaactacgattgatagaaaaacaaatcataaatcaattggctggggtgttgaggcgcacaaaattatgaataatggttggggaccatatggtagagatagttatgacccaacatatggtaatgaactgtttttaggtggtagacaaagtagttcaaatgctggtcaaaatttcttgccaacacatcaaatgcctttattggcgcgtggtaactttaacccagaatttataagcgtactttctcataaacaaaatgatacaaaaaaatctaaaatcaaagtaacttaccaaagagaaatggatagatatactaatcaatggaatcgactacactggattggtaataactacaaaaatcaaaatacagtaacgtttacatctacttatgaagttgactggcaaaaccatactgttaaattaatcggtacggattctaaagaaactaatcctggagtatag

SEQ ID NO: 408025 - DNA, 792 bp, Staphylococcus aureus
atgcatgacaacacaattaaatctattagcaaagactattttgattacttacaaacagaatcaaagtttatcccattagaaaatgaaactatagaattttattcacctatcgtcgattattttggtgattctatttctgtaaatatatctttttcaggggatcgatataaactaactgatcatggtgaaactttgtggaacatggaacaattaggtatagatttaactagtaataaaaaacaaaaaaagtatcaacttctcaataatattgtacaaaactacagtctagtcatcgaaaataagcacataaacttttatacaaatagaataaacttatctcaagctattcatgattatgttttggctatttccgagatcagttatttgggaatattaaagaaagaaaatattaagtccttatttaaagacgaagtgatgcaatattttctatcaaacagaaagatttatcctaatatatttcccgaatttaaggtagaggggaaatctaagttaatccatagtttcgaagcagtatttccaggagaagctacagagtatgttaaaacaattaaacgaatcgataaaaacaatgcaaaaaatgtccttttcgattggaatgatgttgaaatacatagaaataaaaattttgattctaatgctagacttaatatcattacagaacaacaagatgatattagcgaagcagtatcaacaatgttgtctcaatataatgtagaggtattttcatttgaaaacaaaaaacaacttgaagaaaagtttagtaacgtataa

SEQ ID NO: 408026 - DNA, 474 bp, Staphylococcus aureus
atgcatttgaaactgaacgatgaagatttaaattatttagtaaatctaagtaaagaaatacttgaacaatacaacattaaattagacgaaacttgtaagggagatattaacataacatcatgtaattctgaatactttttcactttaagctattttttaaagcctggaaaagcaactataaatttcagagaatgccgttacaactatagcttgttacgtttaaatcttaatgacggttttcataaaaactctaataatgagaaaataaggggaaatagaattaatatattttctgaaaaagaatttatacaaaaagctgacggcgcaacccatatgaaagcatatcctttaccttataatatatttgacgatagctctgattttgtaaaacaattatttactttgcttgaatatacaaaatctaatcataatgataatattaaaattgaaactaatctattcatgagttggtga

SEQ ID NO: 408027 - DNA, 567 bp, Staphylococcus aureus
atggatacaaaatttttaggtaaaacattagtagcaagtgctttagtattaacaacattaggaacaggcttacattcttcatacttaggattagatacaaataaagttgttaaaacggctaaagcagaagaaaatatgacaaatggtcaattgtggaaaaaagttaaagattcattacatgattctgatattattttaagtaacgagtacgaaacaatcaacgttacttatttattaagcaatggatattctagcagcgtttctgctcctggaaatgatgatggaggccatctaacacaatctatagactttaaaggattaaaacaaattgatttaactaaggaaaatgtctacgatgactttaacaaaaagctagatgctaaaaatacatggaattctctaaccgagaagttaaaaggtcttggtttactacaaaatggccaaaaagtatctatttattcttcagatagctcttctccagtctcgggtaaagtgggagaaggagtaactagtggtggcgaaaatactctaactaaacgcttcatcaacaaaatcacaattgattaa

SEQ ID NO: 408028 - DNA, 708 bp, Staphylococcus aureus
atgaataaaaatgtaatggttaaaggtttaactgctttaactattttaacatctcttggttttgctgaaaatatttctaatcagcctcattcaattgccaaagcagaaaagaatgtcaaagaaattaccgatgcaactaaggaaccatacaattcagtggtagcatttgcgggtggtactggtgtagttgttggtaaaaatacaatcgtaactaacaaacatatcgctaaaagtaatgatatttttaaaaatagagtagcagcacatcattcgagtaaaggtaaaggcggaggaaactacgacgttaaagacattgtagaatatcccggaaaagaagaccttgcgatagttcatgttcatgaaacaagtacagaaggtttgaattttaataagaacgttagttatacaaaatttgcagacggagcaaaagcgaaagatagaatttctgttattggttatccaaagggtgcacaaacaaaatataaaatgtttgaatccactggaacgattaaccatatcaatggaacgtttatggaatttgatgcgtatgcacaaccagggaactctggatcacctgtattgaattctcaaaatgaactgattggtattttatatgcaggtagtggaaaagatgaatctgaaaagaatttcggtgtttacttcacaccacaattaaaagaatttattcaaaataatattgaaaaataa

SEQ ID NO: 408029 - DNA, 723 bp, Staphylococcus aureus
atgaataaaaatatagtcattaaaagcatggcagctttgacaatattgacctcagttacaggattgggaacaacgttagttgacaatgttcaacaaatggctaaagcagaaaataatgtcacaaaagtaaaagatacaaatatttttccatatacaggtgtagttgccttgagtagtgcaactggatttgtagttggcaaaaatacaatattaactaataaacatgtatcgaaatattacaaagtgggcgaccgtattactgcacatcctaatagtgacaaaggtaatggcggtatatatacaattaaaaaaattactgattatccaggtaaagaagatgtttcagtcattcacgttgaagaacgtgcagttgaacgtggaccaaaaggatttaattttaacgacaatgtaacgccattcaaatatgcagcaggtgctaaaattggagagcgtattaaagtgattggttacccagaaccatacaaaaataaatatattttacatgagtcaacaggcccagtgacgtccataaatggaagtagcatagtatattcagctcatgtcgaagttggaaactctggttctcctgtattaaatagtaacaatgaacttgtaggtattcactatgcttcagatgcgaataatggtaacaacaaaaatggatatggcgtttatttcacaccagaaataaagaattttattgcagatcaagtagaaaaataa

SEQ ID NO: 408030 - DNA, 717 bp, Staphylococcus aureus
atgaataaaaatataatcatcaaaagtattgcggcattgacgattttaacatcagtgactggtgtcggcacaataattattgaaggtattcaacaaacagccaaagccgaacataacgtgacgaagataacgaatactagtatttcgccatacaaaggcatattaagagtaggtgcaggtacaggttttgtagtaggtaaaaataccattttaaccaatagacatgtcgcgaaagatgttcaagtaggcagtacggttcttgcccacccgaatggcgaaaatgatactggcggatactataaagtcaaaaaagttgtcccatatgcaggctctgcagatttagctattgctcaagttgaagaagattcagtttatccaaaaaataaaaagttcggtgaaaatactgaaatactaacgctgacatcggaagttaaagcgaatgaaagaattgctattgttgggtatccagctccatataaaaataaacatcatatgtatcaatcaacaggaacagtactatcaattaatggagataaattagtatcagatgcatttgctgaaggtggcaattcagggtcaccggtctttaacaataaaaatgaagttgtgggcgttttatatagtggagaccaaattggtcattctaaaaaagagtcatacagcgtatatttaacgcctgaaattaagaaattcatcgcagataacatagataaataa

SEQ ID NO: 408031 - DNA, 492 bp, Staphylococcus aureus
atgactttcgaagaaaaattaagtgaaatgtacaatgaaattgcgaatgagattagcagtatgataccggtagaatgggagcaagtatttacaatagcttatgtaactgatcaagctggagaagtaatctttaattatactaaacctggtagtgatgaattgaattattattcagatatacctaaagattgtaatgtctctaaagatatttttaagaattcatggtttaaagtttatcgaatgtttgatgagttaagagaaacttttaaaaaagaagggcttgaaccatggacatcatgcgaatttgactttacaagagatggcaaattgaatgtatcttttgattatattgattgggtgaatttagaatttggaccattagcaaaagaaaattactatatgtataaaaaatttggggttataccagaaatggaatatgaaattaataaagttaaagaaatcgagcaatatattaaaagacaagaaagttaa

SEQ ID NO: 408032 - DNA, 501 bp, Staphylococcus aureus
atgactttcgaagagaaaataagcaaattatataatgagattgcgaatgagattagcagtatgataccggtagagtgggaaaaagtatatacaatggcttatatagatgatggaggaggtgaagtattctttaattatactaaaccaggaagtgaagatttgaattattacaccgatatacctaaggagtataatgtttctgtgcaagtatttgatgatttatggatggatttatatgatttgtttaagaatttaaggaatttatttaaagaagaaggactcgaagcatggacatcatgtgaatttgactttacaagagacggcaaattgaatgtttcatttgattatattgattggataaatacagagtttgatcaattaggccgtgaaaattattatatgtacaaaaaatttggggttataccagaaatggaatatgaaatggaagaaattaaagaaatagagcaatatattaaagagcaagatgaagctgaactatag

SEQ ID NO: 408033 - DNA, 501 bp, Staphylococcus aureus
atgactttcgaggaaaagttaagtcaaatgtataacgagattgcgaatgagattagcagcatgataccagtagaatgggaaaaggtatatacgatggcgtatatagatgatgaaggaggcgaagtgttttactattacacagaacctgaaagtactgaattatactattatactagtgtattaaataaatatgatatattggaatcagaatttatggattcagcgtatgagttgtataaacaatttcaaaatttaagagaattgtttatagaagaagggctagagccatggacatcatgtgaatttgactttacaagagacggcaaattgaatgtttcatttgattatatagattggataaatacagagtttgatcaattgggtcgtcaaaattattatatgtacaaaaaatttggggttataccagaaatggaatatgaaatggaggaggttaaacaaatcgagcaatatattaaagagcaagaagaaactaacctttag

SEQ ID NO: 408034 - DNA, 501 bp, Staphylococcus aureus
atgacttttgaggaaaatttaagtgaaatgtataatgaaattgcaaataagattagcagcatgataccagtagagtgggaaaaagtatatgcaatggcttatgtaaatgaaagaagtggagaagtgttttacaattatactgaaccaagcagtgatgaattattttactatacgagcgtgttaaataaatataatataccaagatcagaatttatggactcagtatatgaattatataagcaatttgataatttaagagaattgtttatagaagaaggacatgaaccatggacatcatgtgaatttgactttacaagcgaaggtaaattaaaagtttcatttgattatattgattggataaatacagagtttgatcaattaggccgtgaaaattattatatgtataaaaaatttggggttataccagaaatggaatacgaaatggaagaaattaaagaaatcgagcaatatgttaaagagcaagatgaagctgaactatag

SEQ ID NO: 408035 - DNA, 501 bp, Staphylococcus aureus
gtgctgagtggctttgaatatcgagcgcaaaaagaaaagtatgataacttatataaattcttcaaagaaaatgaaaagaaatatcaatatacaggctttacaaaagaggcaattaacaagacacaaaacgttggatatcaaaatgaatacttttatatcacatatttatcaagaaacttaaaagaatatcgtaaatattacgaaccgttgattcataaaaatgataaagaatttaaagagggtatgcaacgagctagaaaagagttagattatactgctaatagtaatacagtagcaacgttgtttagtacgaatgataaaaaaaatagaaaagaaaagataaataatgtaatagatttatccgagaaaattgaaagaacaaaagatatgccaatcaagaatactataactactcaattaggaaataaacttattggcacaaaaaaagctcgttttgatgataagaaagtagtgtcgtttggagcatttgaagatgaataa

SEQ ID NO: 408036 - DNA, 2028 bp, Staphylococcus aureus
atgaataaaattaatgatagagacttaacagaattgagtagttactgggtttatcaagacatcaataaagataatgattttacagttaacggaaaacgatttaagcaggttgatgaatataatgataatggaaataaaaataaaaaaggtgcctcagatttaaaaatttatgaattgttggatgaaaaaggaaaaccaactggtgaacaaaccatgatttatcaaggaacatctaatgaggcaataaaccctaataatccattaaaatctttagatatcggagatgattggttacaaaatgcgaaattaatggataatagtaataagtcaacggattatcttaagcaatcagacgaatttgcagatttatatagagacaaactaaatgacgctaataaattaagtaagtataactttacacaaaaatatggtgttagtccaaataattacaaaaacaaaaccattgtggcggatggcggtaattcggaaggcggtgcaggagcaaaatatcaaggagcgaaacatccaaatgaaaaagttgttgctactgacccagcaatggtaccttatgctgcttggcagaaatttgctagaccacgctttgataatatgattagttttaatagtaccaacgatttattaacatggttacaagatccattcatcaaagatatgccaggaaaacgcgttaacattagtgatggtgtgcccaggttagatgctttaatagacagccatgtaggttataaaaggaagttaaatagaaaagacaacacatacgatactgtaccactaatcaaaattaagtcggtaaaagatacagaaattaaaaatggaaaaaaagtaaaaaagactattaacataacattagatatggatgggcgaattccgataaatgtttggacaggggattcgattgcacgttctggaagaggaactttaattaaacttaatttagaaaatcttgatgcgttgagtaaactgattactggtgaaactagtggtatgttagcagaatgcgtaatctttttaaatgaaagttttaacatctcagaaaatgaaaataaaaattttgcagatagaaagcaacaattatcagaaggatttaaggataagattaacttatttcaattagaagaaatggaaagaactttaattagtaaaataaactcacttgaagaagttgcagatgaaacaatagaaagtattagtgctgttaaacacttattacctgattttgcattggatgcattaaaagaaagaattaatgagttgtttaaaggtataaaatcttttatagaaaaagtgtatgatagtatagataatgaaattttagaaattttcaaaaatatagatcacgacttcagagatggagtatctgaagaaatgatgaaacatttgaaagtagtgaaacagaatatagagcgaataaaaaatcaaaatgatatttatggtaggcaaattgcagaaattagaagtattatgaaacaacaagatgcaacaattttagatgggaatttccaaattaattgtagcggcgaaaatatggtacagggtctagttataccttctaattatttaggaagaaaaatgaaaatattaaaagaccatatcgatgatggtattaaaaaaatagcagactatgttcaaagtatatatgatgaatatgcatcgaaaattgttgatgtaataaaatatttgattaatacaattcccaaaatacgtaagaatttaagacatgcaattgaaatgttaaatgtaaaaaagaaagaatttttgtccctgattcctaatgtaacttgtaattatattaaaactaaattagaagaattagataatactttaggcaaatgggagccatttcttaatgatttaaaagcagtgtcaccaattttagataaccatttagatgatattgttaagaacatgaagcctttgattgtacagatgttatttgaaccatcacattatgatgatatgtttaattcaagaaaagctttaacgccagtgttctcaagcgttttataa

SEQ ID NO: 408037 - DNA, 225 bp, Staphylococcus aureus
atgtatgaatcaactggtaaagtactatcagtgaatggaaatatagtgacatctgatgcggttgtccaacctggcagctctggttcacctatattaaatagtaagcgagaagcaattggtgttatgtatgctagtgataaaccaacaggtgaaagtacaaggtcgtttgctgtttatttctctcctgaaattaagaaattcattgcagataatttagataaataa

SEQ ID NO: 408038 - DNA, 717 bp, Staphylococcus aureus
atgaataaaaatataatcatcaaaagtattgcggcattgacgattttaacatcagtgactggtgtcggcacaacaatggttgaagggattcaacaaacggccaaagccgagcataatgtgaaactaatcaaaaatactaatgtagcaccatacaatggtatcgtttcgataggatctggaacaggattcattgtcggtaaaaatacaattgttaccaacaagcatgtcgttgcaggtatggaaattggcgcacatattattgcgcatccgaatggtgaatataataatggcggattttataaagttaaaaaaattgtccgttattcaggtcaagaagatattgccattctacatgtggaagataaagctgttcatccaaaaaacaggaattttaaagattacacaggcattttaaaaatagcatcagaagcgaaagaaaatgaacgcatttcaattgttggctatccagaaccatatataaataaatttcaaatgtatgaatcaacaggaaaagtgctgtcagttaaaggcaacatgattattactgatgctttcgtagaaccaggcaactcaggttcagctgtatttaacagtaaatacgaagttgtaggtgttcactttggtggaaacggccctggaaataaaagtacaaaaggatatggtgtttatttctctcctgaaattaagaaattcattgcagataacacagataaataa

SEQ ID NO: 408039 - DNA, 630 bp, Staphylococcus aureus
ttgaagcctgagtcaacacgtacgcaaatcgatcaaatcatcgatgaagcgaaagcatacaattttaaatctgtatgtgtgaatccaacgcatgtaaaatatgcagcagagcgactagctgattcagaggtgctagtttgtacggtaataggattcccattaggtgcgtcgacaactgcaacgaaagcatttgaaacagaagatgcaattcaaaatggtgcagatgaaattgacatggtcatcaacatcggcgcattaaaagatggacgttttgatgatgtacaacaagacattgaagcagtggttaaagctgcgaaaggtcacacagtaaaagtgattattgagacggtattgttggaccatgacgaaatcgtaaaagcgagtgaattaacaaaagcggctggtgcggacttcgttaaaacttcaacaggttttgcaggtggcggtgcgactgcagaagacgttaaattaatgaaagatacagtaggtgctgatgtagaagtaaaagcatcaggtggcgtacgtaatttagaagatttcaataaaatggttgaagcaggtgcgacacgtattggtgcgagcgcaggcgttcaaattatgcaaggtttagaagcagattcagattactaa

SEQ ID NO: 408040 - DNA, 2490 bp, Staphylococcus aureus
ttggcaaaatttttatataagatggggacattcatcgcaaaacataaatggtccgcggtcattgcatggatagtgattgtagctgcaatattgataccacttgctacaaatgcaccgaaatttgacaatgatattaaaatgacaggattagagtcgttagatacgaataaaaagattgaaaaacattttaatcaagatagtgaaaaggcacaaatacgtgttgtctttaagacgactaaagatgatggtattgtgcaaccgaacattacagaagacattaagaaaacattagaggatataaaaaaagatgacaagcacattgataaaatatcagatccatatgaaaataagcaaattagtaaagataaaacaactgcatttgcagatatcacatatgacgttagtcaaacatctttaaaagatggctctagagataatgttaaaagtcatttgaaagacttacgtgacaatcataatgtacaaacagagttaactggtacaggaatgacatctacagaagtaggcggtaattctgaactagttggtattattgttgcatttgttgtactgttaatcacattcggttcagtcattgctgcaggattaccaattataagtgcattgattggtctagcctctggtgtaggtattatcagtttgttaacttatgcatttgatataccaaatgtcacattgacattagccgtaatgattggactagcagttggtatcgattatgctttgtttattttattcaggtatcgacaagttatgaaaactgaaacagattacattaaaggcattggtcttgcaataggaacagcaggtagtgcagttgtttttgctggtgtgacagttgtgattgccgtatgtggtttatcgctagttggcatagatttcttagcagtgatggggtttgcttcggcaattagtgttatatttgctgtattcagtgcactgactttattacctgcgttaattagtattttccataaacgcattaaagtgaacaaattgcagtctaattttaaaaaagatattgatacgccgtggtctaaatttattacaggaaatgcacttgcggcagtattactaggtttaatcatattagtagcagctgcaataccagttagtcatatgcgacttggtattccagatgacggtgttaaaccagcagattctacacagaaaaaagcttacgatataatctcggataaatttggtgaaggatttaatggccaaattccgatgttgataaatgttaaagataaaaaagatgatccacaaggattacaacaagatttacagtctgtatataaagatattaaagataagaaaaatgtagatatcgttacgccgccacaaatgagtaaagataatgattatgctttgatggtcgtgatacctaagcaagggcctaatgcagagagcacaaatgatttagtgcatgatttacgagattatcataaagatgcacaagataaatatgggttcaaaacggagatttcgggacaaagtgtcattaatattgatatgtctaaaaagttaaatgaggcgatacctttatttgcaacagtaattgttgtattggcatttttcttattaatgattgtcttccgttcaattctaataccgttaaaagcagttttaggatttgtcttgtcattaatggcaacgctaggatttacaacattagtaatgcaagatggttttatgaaaggtctgtttggtattgaaacgacaggaccaatgctagcatttttaccggttattactataggtatcttatttggattagcgatggattatgaagtcttccttatgtcgcgaattcatgaagaatatagtaaaacaggggataatgattattctatcaaagtaggattgaaagaaagcggtcctgttattgtagccgctgcattaattatgtttagtgtcttctttgcgtttgtattccaagaagatgtcatgattaaatcaatgggtatggcattagcgtttggtgtactctttgatgccttcgtagtcagaatgatgttaattcctgcattaacgaaattgtttggaaaaggttcgtggtatttaccagcatggttgaatcgcattattccacgagttgatattgaaggacatgcacttgaaaaatataaaacggttgaatcacaggaatctgaagccaaagatagtaaggaaacatacgacacaacctttaaagtatatccacaaggtgcaacaaatgtatcgaaacatcaagatgtacatgggcaagatgatgcacattcaatagtactagatgataaaacgatggcattgtaccaagaagtgaaacagcaatctgcaagttcattgttcttatatgatgctttaatagattatcaaaacaagcatcaactaaattcaaaacaacaagtaacgaatatagaacagttgaataaaaatattgaaaagctcaatcaattgttagaaaaaaatctacgaaataaatcataa

SEQ ID NO: 408041 - DNA, 201 bp, Staphylococcus aureus
atgaaaggcgtttcaagacatgtttttgtgcgtattgtacaggcgataattatgaaacacttagtatattgttttaaattagataatgatgaatttaatttgaaaaataagtataaaaaatacaagccttgtatgacaagggtttatgatgacttgaatacaatttataggtatatttcaaataataaaattatcaattaa

SEQ ID NO: 408042 - DNA, 3033 bp, Staphylococcus aureus
gtgaaaaacaatcttaggtacggcattagaaaacataaattgggagcagcatcagtattcttaggaacaatgatcgttgttgggatgggacaagataaagaagctgcagcatcagaacaaaagacaactacagtagaagaaaatgggaattcagctactgataataaaacaagtgaaacacaaacaactgctactaacgttaatcatatagaagaaactcaatcatataacgcaacagtaacagaacaaccgtcaaacgcaacacaagtaacaactgaagaagcaccaaaagcagtacaagcaccacaaactgcacaaccagcaaatgtagaaacagttaaagaagaagagaaacctcaagttaaggaaacgacacaacctcaagacaatagcggaaatcaaagacaagtagatttaacacctaaaaaggttacacaaaatcaagggacagaaacacaagttgaagtggcacagccaagaacggcatcagaaagtaagccacgtgtgacaagatcagcagatgtagcggaagctaaggaagctagtgacgtttcagaagttaaaggcacagatgttacaagtaaagttacagtagaaagtggttctattgaggcacctcaaggaaataaagtagagccacatgctggtcaacgtgtcgtattgaaatacaaattgaaattcgcagatggattaaaaagaggagattattttgattttacattatcaaataatgtaaatacttatggggtttcaacagctagaaaggtaccagagattaaaaatggctcagttgtaatggctacaggtgagatcttagggaatggtaacataagatatacatttactaacgaaattgaacacaaggtagaggtaacagctaatttagaaatcaacttatttattgaccctaaaactgtacaaagcaatggagaacaaaagattacttctaaattaaatggtgaagaaacagaaaaaacaataccagttgtttataatccaggtgttagcaatagttatacaaatgtaaatggatcaattgaaacatttaataaagaatctaataaatttacacatatagcttatattaagccaatgaatggaaaccagtcaaacactgtatcagtaacagggacgttgactgaaggtagtaatttagctggtggacaacctactgttaaagtatatgaatatctagggaaaaaagatgaattgccacaaagtgtttatgcaaatacatcagatactaacaaattcaaagatgtaacaaaggaaatgaatggaaaattgagtgtgcaagacaatggtagttactcattgaatttagataagttggataaaacgtatgtcattcattatacaggtgaatatttgcaagggtcagatcaggttaattttagaactgaattatatgggtatccagaacgagcatataaatcttactatgtttatgggggatatcgtttaacttgggataatggtttagttttatatagcaataaagctgacggcaatggtaaaaatggacaaattattcaagataatgattttgaatataaagaagatactgcaaaaggaactatgagcgggcagtacgatgccaagcaaattattgaaacagaagaaaatcaagacaatacaccgcttgacattgattaccacacagctatagatggtgagggtggttatgttgatgggtatattgaaacaatagaagaaacggattcatcagctattgatatcgattaccatactgctgtggatagtgaagcgggtcacgttggaggatacactgagtcctctgaggaatcaaatccaattgactttgaagaatcgacacatgaaaattcaaaacatcacgctgatgttgttgaatatgaagaggatacaaatccaggtggtggccaagtaacaactgagtctaacttagttgaatttgacgaagagtctacaaaaggtattgtaactggcgcagtgagcgaccatacaacaattgaagatacgaaagaatatacgactgaaagtaatctgattgaactagtagatgaactacctgaagaacatggtcaagcacaaggaccaatcgaggaaattactgaaaacaatcatcatatttctcattctggtttaggaactgaaaatggtcacggtaattatggcgtgattgaagaaatcgaagaaaatagccacgttgatattaagagtgaattaggttacgaaggtggccaaaatagcggtaaccagtcattcgaggaagacacagaagaagacaaacctaaatatgaacaaggtggtaatatcgtagatatcgatttcgacagtgtacctcaaattcatggtcaaaataatggtaaccagtcattcgaggaagacacagaagaagacaagcctaagtatgaacaaggtggtaacatcattgatatcgacttcgacagtgtgccacaaattcatggattcaataagcataatgaaattattgaagaagatacaaacaaagataaacctaattatcaatttggtggacacaacagtgttgattttgaagaagatacacttccaaaagtaagtggtcaaaatgaaggtcaacaaacgattgaagaagatacaacgccgccaacaccgccaacaccagaggtaccaagtgagccggaaacaccaacaccaccaacaccagaagtaccgagtgagccaggcgaaccaacgccaccaaaaccggaagtaccaagtgagccggaaacaccagtaccaccaacaccagaggtaccatctgaacctggtaaaccagtaccacctgctaaagaagaacctaaaaaaccttctaaaccagtggaacaaggtaaggtagtaacacctgttattgaaatcaatgaaaaggttaaagcagtggcaccaactaaacaaaaacaatctaagaaatctgaactacctgaaacaggtggagaagaatcaacaaacaaaggtatgttgttcggcggattattcagcattctaggtttagtattattacgcagaaataaaaagaataacaaagcataa

SEQ ID NO: 408043 - DNA, 744 bp, Staphylococcus aureus; identical to SEQ ID NO: 404905

SEQ ID NO: 408044 - DNA, 357 bp, Staphylococcus aureus
atgaatgatttgaaaagcaagagcaatattaaattaatgaaaagagtattaactacatatgagctgcgtaaatatttaaaaaaatatttttgtcttacattagataattatttagtattagcatatttagatgtatttaaaaatgatgaaggtaaatattttatgagagacattataagttatatcggtatagaccaatctagaattgttaaaagcgtaaaagaattatcaaaaaagggttacttgaataaatgtagagacccacatgatagtagaaatgtaatcattgttgtttctgtaaaacaacacaattatattaaaaatcttttgagtgaaataaatattaatgaaacataa

SEQ ID NO: 408045 - DNA, 2580 bp, Staphylococcus aureus
atgagagataagaaaggaccggtaaataaaagagtagattttctatcaaataaattgaataaatattcaataagaaaatttacagttggaacagcatctattttaattggctcactaatgtatttgggaactcaacaagaagcagaagcagctgaaaacaatattgagaatccaactacattaaaagataatgtccaatcaaaagaagtgaagattgaagaagtaacaaacaaagacactgcaccacaaggtgtagaagctaaatctgaagtaacttcaaacaaagacacaatcgaacatgaagcatcagtaaaagctgaagatatatcaaaaaaggaggatacaccaaaagaagtagctaatgttgctgaagttcagccgaaatcgtcagtcactcataacgcagaggcacctaaggttagaaaagctcgttctgttgatgaaggctcttttgatattacaagagattctaaaaatgtagttgaatctaccccaattacaattcaaggtaaagaacattttgaaggttacggaagtgttgatatacaaaaaaacccaacagatttaggggtatcagaggtaaccaggtttaatgttggtaatgaaagtaatggtttgataggagctttacaattaaaaaataaaatagattttagtaaggatttcaattttaaagttagagtggcaaataaccatcaatcaaataccacaggtgctgatggttgggggttcttatttagtaaaggaaatgcagaagaatatttaactaatggtggaatccttggggataaaggtctggtaaattcaggcggatttaaaattgatactggatacatttatacaagttccatggacaaaactgaaaagcaagctggacaaggttatagaggatacggagcttttgtgaaaaatgacagttctggtaattcacaaatggttggagaaaatattgataaatcaaaaactaattttttaaactatgcggacaattcaactaatacatcagatggaaagtttcatgggcaacgtttaaatgatgtcatcttaacttatgttgcttcaactggtaaaatgagagcagaatatgctggtaaaacttgggagacttcaataacagatttaggtttatctaaaaatcaggcatataatttcttaattacatctagtcaaagatggggccttaatcaagggataaatgcaaatggctggatgagaactgacttgaaaggttcagagtttacttttacaccagaagcgccaaaaacaataacagaattagaaaaaaaagttgaagagattccattcaagaaagaacgtaaatttaatccggatttagcaccagggacagaaaaagtaacaagagaaggacaaaaaggtgagaagacaataacaacaccaacactaaaaaatccattaactggagaaattattagtaaaggtgaatcgaaagaagagatcacaaaagatccgattaatgaattaacagaatacggaccagaaacgatagcaccaggtcatcgagacgaatttgatccgaagttaccaacaggagagaaagaagaagttccaggtaaaccaggaattaagaatccagaaacaggagacgtagttagaccaccggtcgatagtgtaacaaaatatggacctgtaaaaggagactcgattgtagaaaaagaagaaattccattcgagaaagaacgtaaatttaatcctgatttagcaccaggaacagaaaaagtaacaagagaaggacaaaaaggtgagaagacaataacgacgccaacactaaaaaatccattaactggagaaattattagtaaaggtgaatcgaaagaagagatcacaaaagatccagttaatgaattaacagaattcggtggcgagaaaataccgcaaggtcataaagatatctttgatccaaacttaccaacagatcaaacggaaaaagtaacaggtaaaccaggaatcaagaatccagacacaggaaaagtgatcgaagagccagtggatgatgtgattaaacacggaccaaaaacgggtacaccagaaacaaaaacagtagagataccgtttgaaacaaaacgtgagtttaatccaaaattacaacctggtgaagagcgagtgaaacaagaaggacaaccaggaagtaagacaatcacaacaccaatcacagtgaacccattaacaggtgaaaaagttggcgagggtcaaccaacagaagagatcacaaaacaaccagtagataagattgtagagttcggtggagagaaaccaaaagatccaaaaggacctgaaaacccagagaagccgagcagaccaactcatccaagtggcccagtaaatcctaacaatccaggattatcgaaagacagagcaaaaccaaatggcccagttcattcaatggataaaaatgataaagttaaaaaatctaaaattgctaaagaatcagtagctaatcaagagaaaaaacgagcagaattaccaaaaacaggtttagaaagcacgcaaaaaggtttgatctttagtagtataattggaattgctggattaatgttattggctcgtagaagaaagaattaa

SEQ ID NO: 408046 - DNA, 171 bp, Staphylococcus aureus
atgaaatataaaattagtttggcttacaatttagcaattataatagggtcgctaattatattatgtatactaatatctagaggttatgatatatatgtaatcttgattccaattttgactattttagctagtttaatcaatttaatttgtgatattaaaaagcataaatga

SEQ ID NO: 408047 - DNA, 393 bp, Staphylococcus aureus
atgaaaaaagtaatcaatgtagtaggagctattattttttctgataacaaaattctttgtgcacagagaagtgaagaaatgagtctacctttaatgtgggaatttcctggcggtaagattgaaaagaatgaaactgaaaaagaagctttgattagagaaattagagaagaaatgaaatgtgatctaattgttggagacaaagtcataactacagaacatgaatatgattttggcattgttaagttaacaacatacaaatgtactttaaacaaagagttaccaactttaactgaacataagagtattgaatggttgtcaataaacgaacttgataaattaaattgggccccagcggatataccagccgttaataaaattatgactgagggataa

SEQ ID NO: 408048 - DNA, 2862 bp, Staphylococcus aureus
atgagtagattactaaatgatttcaatcaatctttaaaaaaaggttttatagacaaagatatttctcataaagggaattatacaccgaagcttttagtaaataataaaaatgaaaaagtcctttcaacaattatagatgaacttcaaaaatgtgaaacgttctatttttctgtagcttttataacagaaagcggattagccagcttaaaggctcaactattagatttaagcaataagggtgttaaagggaaaatattaacatctaattacttaggatttaatagtcctaaaatgtatggagaattacttaaattaaaaaatgtagaggtaagattaactgatattgctggattccatgccaaaggatatatttttgaacataaggattatagttctatggtaataggaagctctaatttaacatctaatgcgttaaaggttaattatgagcataatgttttactgtctactatgaaaaatggtgatttagttgatagtgtaaaaaatgaatttgaattgttatggcaaaagagtaccccactgactgagcaatggattaattcatataaagaatcatttgagtaccgttccttagaaaaattagcggaggttgaacaaactcaaatgctgctagctgataaggtgaaaaaatcagtggaaattgtacccaatttaatgcaagcagaagcattaaggtcattaaaagctattagggataaaaccaaagataaggcgttaataatatctgcaactggtacaggtaaaacgattttatgtgcattagatgttagagaagtaaaccctaataaatttttatttattgttcataatgaggggattttaaatagagctaaggaagaatttaaaaaagtattacctataaaaaatgatagtgattttggattgttgacaggaaaacatagagatgtcgatgccaaatatttatttgcaaccattcaaacattatctagagatgataattttaagcaatttgatgaaaatgaatttgattatattgtttttgatgaagcacatcgttctgctgcatctacttatcaacgagtatttaactacttcaaacctaagttcatgctgggaatgactgctacaccagaaagatcagatgaattaagtatatttgaactgtttgattataatattgcatatgaaataaggttacaagcagcgttagaaagtgatattttatgtccatttcattattttggtgtgactgattatgtacatcaaggtattaaagaagatgatgtaactaaactgagatatttaacttctgatgaaagagttaattatattattcaaaagacagattactatggatattcaggtgaaattttacaaggattaatttttgtgagtagcaaaaaagaagcttatgatttagcggataaactaagttcaaaagggattaaaagtgttgctttaacaggagatgatagtgttaattatcgccaaattgtaatagaaaaattaaaagaaggtaagattaactatattataactgtagatctttttaacgaaggtattgatattccagaagtcaatcaagttgtaatgttgagaccaacagagtctagtattatattcattcagcaacttggtagaggattaagaaaaagtgcaaataaagagtatgttactgtaattgattttattggtaattataagaccaattatttaattccgattgcgctttctggggatcaatcgcaaaataaagataattataagaagtttttaacgaataacgattcgattaatggagtatctacaattaattttgaagaagttgctaaaaaacagatttacaattcattggatgcagtatcattgaatcaaaataaattaatattaaaagcttatgaagaagttgaaaatagattgggacacatgccgttactaatggattttatacaacaacattctatagatccaagcgttatattttctaaatttagtaattattacgaatttttattaaggtataaaaaaatagatgctttattgacggaaaatgaatctaaaaatctggttttcttttcaagacaaatagcacctggattgaaaagaatcgatagtttagttttagaagaacttttaaaaaatgaattaacatatgatgaattaaaaaataaaatgttgaacgaagttaaggatataacagaagatgatatagatacttcattaagaattttagatttttcattttacaacgcaggaattgaaaaaatctatggaagtcccattatagaatgtaatgaaagaatgataagactaagcgatgcatttactaatgctctaagtaatcaaacatttaaaatatttttagaagatcttattgaattatcaaagtataacaatgaaaaataccaaaaaggtaaaaatggactgattttatataataaatattcaagagaagattttagcaaaatatttaattggaataaaaatggttcgtctgtaatcatgggatacatgataagaagccaagaaatgccaatatttatcacttatgataagcatgaggatataagtgatagtacaaaatatgaagatgaatttttaagtcaagatgaattaaaatggtttactaaatctaatagaacgctaaaatcaaaagaagttcagaaaattttgtcccatagagcaaaaggaattaaaatgtatatttttgtacagaaaaaagatgatgatggtatatatttttattatttaggaactgctggatatatagaaggttcagagaagcaagataaaatgccgaatggttcaaacgtagtaacgatggatttagcactcgataaagctgtaagagatgatatatatcgctatataacaaattaa

SEQ ID NO: 408049 - DNA, 777 bp, Staphylococcus aureus
atgatgattcattcaagaaagttgaggctttggctgtatttagtattattagctgtttttataggcgcttgcggaatgaaaaaggaagaaagcagtaaggataaacaaattaaagaaaacttcaacaaaacgttgagcttatatccaactaaaaatcttgaagacttttatgataaagaaggttttcgagatgaagagtttgaaaaaggagataaagggacttggataattcactctaaaatgacaatagaaacaaatggaaagaatatggaatccagaggcttggtcctgtatgtagaccgcaataccagaacgacaaaaggtgaatttattgtgagagaattatgggaagataaaaaaggatactcacgtagtaaagaaaaagaatatccagtgaaaatggaacataataaaattatcccaactaaaccgatagctgatgataaattaagaaaagaaattgaagactttaagttttttgtacaatacggtgactttaaagatattaatgattataaagatggtgacatttcatataatcctaatgttccaagttattccgcaaaatatcaattgagtaacaatgactacaatgtgaagcaacttagaaagaggtatgatataccaactaagaaagctccgaaactattgttaaaaggtgatggtgatttaaaaggatcatctataggacacaaaaatttagagtttatatttatagaaaataaagaagaaaacatctattttacggatagtattaatttcaaacctactgaatag

SEQ ID NO: 408050 - DNA, 795 bp, Staphylococcus aureus
atgattcattcaaagaaattaacgctcggtatatgcttggtattactcattatattgattgtaggttatgtcattatgacaaaaataaatagtcgaagcgcccaaattaaagacacatttaatcaaacattaaaattatatccaaccaaaaatcttgatgatttttacgataaagaaggctttcgagatcaagaatttaaaaagggtgataaaggtacttggatagttaattctgaaatggtaatcgagccaaaaggtaaggatatggaaacgagaggaatggtgctctatatcaatcgcaatactagaaccacaaaagggtattattttataagtgaaatgacagatgacagtaacggcagaccaaaggatgatgaaaaaaggtatccggtaaaaatggaacataataaaatcataccaacgaagccactaccgaatgacaagttaagaaaagaaatcgaaaactttaaattctttgtacaatacggtgactttaaagatattaatgattataaagatggtgacatttcatataatcctaatgttccaagttattccgcaaaatatcaattgaaaaacgatgactacaatgtgaagcaacttcgaaaaagatataatattccaaccaacaaagctccgaaattattaataaaaggtgatggtgatttaaaaggctcatctgtagggtcaaaaaatctagaatttacctttgtagaaaataaagaagaaaacatttattttacagattctgtacaatatacttcaagtgaggatacaagttatgagtcaaactga

SEQ ID NO: 408051 - DNA, 192 bp, Staphylococcus aureus; identical to SEQ ID NO: 404921

SEQ ID NO: 408052 - DNA, 282 bp, Staphylococcus aureus; identical to SEQ ID NO: 404922

SEQ ID NO: 408053 - DNA, 696 bp, Staphylococcus aureus
atgacagtattaacagataaaatagcagtagttacaggtgcaggtagtggtattggagaagcaattgcaacattactacatgaagaaggggcgaaagttgtcttagccggtagaaataaagataaactacaaaatgtggcgaatcaattagctcaagatagtgtgaaggtagtgccaacagatgtaacgaataaagaagaagtcgatgaattgatgaaaattgcacaacaaacattcggtggtttggatattgttatcaatagtgcgggacaaatgttatcgtctaagattactgattatcaagtagatgagtgggatagtatgattgatgtgaatatcaaaggcactttatatacggcacaggctgcattaccaactatgttagaacaatcaagtggacatcttattaacattgcatctatttctggctttgaagtaacgaaaagtagtacgatttatagtgcgacgaaagcagcagttcacactattactcaaggattagaaaaagagttggcaaagacaggcgttaaagtaacaagcatttctccaggaatggtagatacagcaataacagccgcatataatccaagtgatcgtaaaaagcttgatccacaagatattgcagaagcggtattgtatgcattaacacaaccaaagcatgttaacgtgaatgaaattacagtgcgtcctgtataa

SEQ ID NO: 408054 - DNA, 423 bp, Staphylococcus aureus
atgaacaaaaaacatgtttttataattattggtgtcattttatgtatatgtatagttgcatcagtcatttatttaaaagtgaaatatgacgaaaaagaaaaacaaaaagcaatatactataaagaacaacaggagcgtattacactctatcttaatcataatactaaagaacccaataccatcaaaactgtacatttcacaagtttaaaaagaggacctatgggcgatgcagtaattgaaggttacataaatgaaaataaagaagatgattttgttgcatatgggtctccagaacataattatcaatttggtggaagtttaatcaaaagtaaaaatttaagcacgttattaaaaccagtacatcaaaccaaatcacctgatgagataaaaaaggaattagagtctaaaaagaacgaccgctaa

SEQ ID NO: 408055 - DNA, 411 bp, Staphylococcus aureus; identical to SEQ ID NO: 407867

SEQ ID NO: 408056 - DNA, 420 bp, Staphylococcus aureus
atgaacaaaaaacatgtttttgtaattattggtgtcattttatgtatatgtatagttgcatcagtcatttatttaaaagtgaaatatgacgaaaaagaaaaacaaaaagcaatatactataaagaacaacaggagcgtattacactctatctccagcataataccaaagaacccaataccatcaaatctgtgcatttcacaagtttaaaaagaggacccatgggcgatgccgtaattgaaggctacatcaatgaaaacaaaaaagataattttactgcttatgctacaccagaacataattatcagtttggtggtgctatgatagaaagtgaaagattaagtgagttactaaaaccagcgcatcaattaaaatcacctgacgaaatcaaagaagaattagacaaaaaagaaggccactag

SEQ ID NO: 408057 - DNA, 423 bp, Staphylococcus aureus
atgccgtataattacaagaaacaaaatggagagttaatgtctgtaatgagccaaggtgaaaagtttattcatcaatcaccggttaatgatgaacttagtgcattgattaagttattaatttcaaaaattaacggttgtcattattgtgttgatatccataaaaaagaattaaaggaattgggtgtaacacaaatgaaaattgatgaagtcttgagttttagacatttagatttatttactgatcaagaaaaagtgacgcttgaatttgcagaaatgttaaattcaatcaaagactttaagaagtttgaaattattgaccggctaaaatcattttatgatgaagaacaaattattgatcttgtctttgttgtaaaccaaattaacggttggaacagactaaatattattagtgatagactataa

SEQ ID NO: 408058 - DNA, 1539 bp, Staphylococcus aureus
atgacatcaaaacatcaacaaaaggggtctatcgtcaatcgtttcttgaatagtgttgaaaaaattggaaataaattgccagatcctagcgtcttattctttttaatgtgtgtgggcttagccattatgacgtgggttatctcattatttaatgtatctgttaagcatccaggtacgcatcaaaccatttatattaaaaatataattagccatgatggatttacgatgataatgaatgatacgattaaaaatttctcagagttcccagcattaggcttagtactagcagtgatgattggtattggtgttgcagagaaaacaggatacttcgataagttaatgatttctgttgtgaatcgcgcaccacgatttttaattttaccgactattatattaattggtattttaggtagtacagccggcgatgctgcgacaattatcttgccgccgcttgcagcaatgctttttattaaaattggctatcaccctattgctggtttaacgatggcatatgcttccgctgttggaggatttgcagcaaatatagttgttggtatgcaagatgctttggtctattcatttacagaaccggcaacacgtatcgtttcagattctattaaaacaaacgttgctatgaactggtactttatcgcagcgagtgtcgttgtattacttcctacgatattgctagttacaactaagctcattattcctagattaggaaaatatgatgacagtttaatgcatgatgaccatgaagaagcatcttcacatattactgacaaagaagcacatgctttaaaatgggcaaatatcagtttcatagtcacaattattttattaattattacagctattcctgaacatagttttttaagaaatgctaaaacaggcagcttactagacgatgcgccattaattaacggtgtcggattaattattcttgtcgtatttttagtacctggattagtttatgggattttaagcaaagaaattaaaaatacaaaagacttaggtaaaatgttcggcgatgctgtaggatcaatgggaacatttatcgttattgtgttttttgcagcacagctacttgcgtatttaaagtggagtaatttaggaattatcgctgctgttaaaggtgccaaattattagaacatcaaaacggtattgtattgatactaggtattattgtactgagtgcaatggtcaacatgttaatcggaagcgcatcggctaaatggggtattttaggaccgatattcgtaccaatgttaatccttatcggctttcatcccgcatttacgcaagtcatttaccgtgtaggcgattcaattaccaatccaattacaccgatgatgccgtacttacctttattattaacttatgcacaaaaatacgataaacgcatgaaactcggagccttactttctagtttaatgccgtattcaatcgcgctaagcattgtatggacagtatttgtcatcatttggttcttattaggtatccctgttggaccaggtggaccgatattcgttaaataa

SEQ ID NO: 408059 - DNA, 819 bp, Staphylococcus aureus
atgaaacgtttggaaaataaagttgcagtcgtaacaggagcaagtacaggtatcggacaagcttctgcaatcgctttagctcaagaaggtgcgtatgtattggcggtagacatagctgaagcggtatcggagactgtcgataaaattaaaagtaacggtgacaatgcgaaggcgtataatgtggatatttcagatgaacaacaagtggtagactttgtgtctgacataaaggaacagtttggaagaatcgatgtgttgtttaataatgccggtgtggataatgcggctggtagaattcatgagtatccaatagatgtgtatgacaagattatgaatgtagatatgcgtgggacaattttaatgacgaaaatgatgttacctttaatgatgaatcaaggtggctctattgttaatacgtcttcattttcaggacaggcagaagatttgtatcgctcaggatataatgctgcgaaaggcgcagtgattaattttacaaaatcaatcgcaattgagtatggtcgtgatggcattcgatccaatgcaattgcaccaggtacaattgaaaccccgttagtagataaactgacaggtacgagtgaggatgatgcaggtaaaacatttagagaaaatcaaaaatggatgactccgctgggacgtttaggtaaaccagaagaagttgctaaattagtagtcttcttagcatctgacgacagttcattcataactggagagacgattcgaattgatggtggtgtgatggcttacacatggcctggcgagatgttaagtgatgattcgtggaagcggacattggaataa

SEQ ID NO: 408060 - DNA, 768 bp, Staphylococcus aureus
atgaatattagacatataagaaatgccacggccgtgattgagtatggaggtaaacgcattttgattgatccaatgttaagtgataaaggttcatttgacccttttccaaattcaccgagacaagatcaaaaaaatccacttgtagaactacccatggcaattgaagacattataaatgacatcgatttagtgattttaacgcatttgcatattgatcattttgatccgaaagcaattgaagtattgccgaaagatattaaaatttacgcacaaaatgaagaagatgctagtgaagtagagcgttatgggtttacaaatgtttctgtatttaatgatgtgacacacattggagaaattgagttgattaaaacagatgctcaacatggtcatggtgaaattttgaagatgacaggacatgttcacggcatgattttaaaacattctgaagagccgacattatacttagcagcagatacagtttggtttgaaggggttgaaaaagcattaaaaacgtatcaaccagatgttgttgttcttaatggtggtgcaaatcaattctttgaaggtgggccgttagttatggatgaacatgatgtgttaaaagttgctaatacattgccacttgcgcaaattgttgttgtgcatatggaagcggtcaatcattggcatttatctcgtaaagagctgaatgaatttataaattctaacgacttaggtaatagagttgttgtaccaaatgacggggaattattaacctttgaaaaataa

SEQ ID NO: 408061 - DNA, 822 bp, Staphylococcus aureus
atgaatcggcaggttatagaattttctaagtataatccttcggggaatatgacgatacttgttcattcaaaacatgatgctagtgaatatgcatctatcgccaatcagttgatggccgcaacacatgtatgttgtgaacaggtaggctttatagaatcaacacaaaatgatgatggcaatgattttcacttagttatgagcggtaatgaattttgcggtaatgcgacgatgtcatatatacatcatttgcaggaaagtcatttgcttaaagaccaacagtttaaggtgaaggtatctggctgttcggatttagtgcaatgcgcaattcatgattgccaatactatgaagttcaaatgccacaagcccatcgtgttgtgccaacaacaattaatatgggtaatcattcatggaaagcattagaaattatttatgaaacatatgtacattatgtgattccagttaaacaagtaacaactgaaattcaacatttggttgaagcatttgtgcgtgagcaacaatggagtcacaaatataaaacagtaggtatgatgctttttgatgaacaacgtcaatttttacagccattaatctatataccagaaattcaaagtttaatttgggaaaatagctgtggttctggtacagcatcaattggggtttttaataattatcaacgtaatgacgcatgcaaagattttacagtacatcagccagggggcagtattttagtgacatcaaagcgatgtcatcaattgggatatcaaacttcaattaaaggacaggttacaactgtagctacaggaaaagcatatatagaataa

SEQ ID NO: 408062 - DNA, 1302 bp, Staphylococcus aureus
atgtctaaattattaatgataggcactggtccggtcgcaatccaattagcgaatatttgctatttaaaatcagattatgagattgatatggttggacgtgcctcaacatcagaaaaatcaaaacgcttatatcaagcgtataaaaaagagaaacaatttgaagtcaaaatacaaaacgaggcgcatcaacatctggaaggtaagtttgaaattaatcgtttgtataaagatgttaaaaacgttaagggtgaatacgaaacggttgtcatggcatgcacagcagatgcttattatgacacactacagcaattgtcgttagaaactttgcaaagtgtcaaacatgtcattttaatttcaccgacatttggatcgcaaatgattgtggaacaatttatgtctaagttcagtcaggatatcgaagtgatttcattttcaacttatcttggcgatacacgtattgttgataaagaagcacctaatcatgtgttgacaacaggtgtaaaaaagaaattgtacatgggatcgacacattcaaactcaacaatgtgtcaacgaatctctgctttagctgagcaattgaagattcaattagaagtcgttgaatcgccactgcatgctgaaacacgtaacagttcgctttatgtgcacccgccactatttatgaatgacttttcattgaaagccattttcgaaggaacggatgtaccggtttatgtgtataagttatttcctgaaggaccgataacgatgacattaatccgtgaaatgcgtttaatgtggaaggaaatgatggctattttacaagcatttagagtgccgtcagtcaacctgcttcaatttatggtgaaggaaaattatccagtacgtcctgaaactttggatgaaggtgatattgagcatttcgaaatcttgccagatatcttacaagaatatctgctttatgtaagatacaccgcaatcctcattgatccattttcacagccagacgaaaacggacattactttgatttttcagctgtaccatttaagcaagtctataaaaatgaacaggatgttgttcaaattccaagaatgccaagtgaagattattacagaacggcgatgattcagcatattgggaaaatgttaggtatcaaaacgccaatgattgatcagttcctaactcgctatgaagcaagttgccaggcgtacaaggatatgcaccaagatcaacaactatcttctcaatttaatacaaatctatttgaaggagataaggcactcgtcacaaaatttttggaaatcaatagaacgctttcataa

SEQ ID NO: 408063 - DNA, 816 bp, Staphylococcus aureus
atgacattgttaacagttaagcatttgacgattacagatacctggacagatcaaccactcgtgagtgatgtgaattttacattaactaagggtgaaactttaggcgttattggagaaagtggtagcggtaaatcaattacatgcaaatcgattattggtttgaatcccgaacgactcggggtgacaggtgaaattatctttgatggtacatcaatgttgtcattatctgaatcgcaacggaaaaagtaccgtggtaaagatattgcgatggtcatgcaacaaggtagtcgtgcctttgacccatcaactactgtcggtaaacaaatgtttgagactatgaaagtacatacgtcaatgtctacacaagaaattgaaaagacattgattgaatatatggattatttaagtttgaaagatcctaaacgtatattaaaatcatacccttacatgttatcaggaggaatgttacagcgattgatgattgctttagcgttagctttgaaaccaaagttaatcattgctgatgagccgacaacggctttagatacaattacacaatatgatgtactggaagcatttatagatattaaaaaacactttgactgtgcgatgattttcatttcacatgatttaacggttattaacaagattgcagaccgtgttgttgtgatgaaaaatggtcaactgatagagcatggtacacgtgaatcagtcttgcatcatccagaacatgtttatacgaagtatttattatcaacgaagaagaagattaatgatcattttaaacatgtgatgaggggtgatgtacatgattaa

SEQ ID NO: 408064 - DNA, 750 bp, Staphylococcus aureus
atgtcaaatacaaataaacattacatagaagaagaatacgctactgaacaatcgcgttttttcaaacgtgatattggatttattttcctttatatatttttggttaacatcttgccaatcattatcgtctttttaacttttgggttagtagctgtattcactcaacaagccccatggggtttctcttttcctatttcaatgaacattagctatttactcgcagttattatttcactagctatttttcgtcggatgcatgaagatgcatttgttccgatgatacgtacgcaaatcattgccagcaccaaatataaatggcatattcttatatcatttacactaagtgtcgtactctttttacttttaaattatttcgatattttcgcactaaatgtagatgcctttactgtctttgacatttacccgctcattagagattatgattccatcagtttaatagtaatgttgtggttaaccattatattaaatactttgatttgccaacttattttccgtcatattttaattcaagaattaagcagattaatacctttaaagattacaatagtattatccgttatccttgaaacactgtactattatccatacattaatacatggtgggaattcattccagcattgatactagctagtagtgcgacttacttatatttaaagtcaaaccgtaattttatggtgagctatttctatcaattagcagttatactcgttttgcatattttcatgtaa

SEQ ID NO: 408065 - DNA, 1374 bp, Staphylococcus aureus
atgtttaaaacactctatgctagaattgcgatttattccattacggttattttatttagtgcattaataagttttgtattaacaaatgtttactatcattataatttaaaagcatctaatgacgcgaaaatcatgaagacacttaaagaagcaagacaatatgaacaatcagctaaaccaacgcacattcaacaatatttcaaacatttagggcaaatgaattaccaaataatgaccgttgatcaaaaaggtcataagacattttatggggagccatttagagaagatactttatcacaaaatgctattaacaacgtattaaataataaagattaccatggtattaaagataaaccattcgcattattcgtaactggatttttcgacaatgtaacagataatactgttggtattaactttaagacaaaagacggttcaatagcagtattcatgcgtccagatattggagaaacatttagcgagtttagaacattcttagccgtcttgttaatgttgttattatttatctcgatttcattagttatcgcatcaacctattcaatcattcgtccagtaaaaaagttaaagctagcgaccgaacgcttaattgatggtgattttgaaacacctatcaaacaaacacgcaaagatgaaattggaacattacagtatcactttaataagatgagagagtcattgggacaagttgatcaaatgaggcagcattttgtacaaaatgtatctcatgaaatcaaaacaccattaacacatattcatcatttattaagcgagttacaacaaacttctgataaaacattaagacaacaatatataaatgatatttataccattacaacgcagctgagcggattaacaactgaattgttactcttatccgaattagataatcaccaacatttattattcgatgataagattcaagtcgatcaactcattaaagatatcattcgacatgaacaatttgctgctgatgaaaagtcgttaatcattttagctgacctagaatcaatcaatttcctaggaaatcaacgtttgttacatcaagcattgagtaatttattaataaatgctattaagtatacagatgttggtggtgccattgacatcgctttgcaacatagtcacaacaatatcattttcacaataagtaatgatggttcaccaattagtccacaagctgaagcacgtttatttgaacgtttttataaagtgagcaaacatgataatagcaatggtttaggtcttgcaattacaaaatccatcattgaattgcatcatggtacaatccaattcacacaaagtaacgagtatgtaaccacctttactattacactgccaaataattcacattaa

SEQ ID NO: 408066 - DNA, 948 bp, Staphylococcus aureus
atgaaaaagagtatttatatcttaccattagcttatatagttattgagtcacctttacaaattggcaatgttatcttaaccccatctttaaaagtaattgaatcaggtcattttcatacagacttttcactaatatcaatgtttaacaaaaaagagtttttatctattttatctacttcgcaattaaaagaagatgcactagttatttttaaggacgatttctttgaacctaccacggtagaccaaaattattattttattaataagttaagtcaaaaagccgacagaactctagatattataagaataaacgaaaataattttggtgttcctgaacaattaccaggtataccaggtattacctcaaatggttggcaagtagctgaacaattgactgaccacaaacttagaacaattaatggaaaagtcatgtttatgattcgagaaggaataggattatatccaattgacttatcttctaatatttatgaagataaattatataattgtctttatgttacttcaaatgaaattaatttacttttcagagaagctatccacagagtttctgaatcaatgtacatgaataatttaaatacatcatttgtttatcttttaagtacattagaaatgctatcaagtcgtgaatatttaaactttaaaaaaactaaatctaaaatccttccttttatttcttattctaaatatcagtatcataagtgcagtgagtatctaagaaatattagtgaaaatctaagaactgaaattattcacaatggtaaaagtatatttgatttatatgataattatgaggatgtgtacaagctattaaattggattaaattaataattattgaatatataagtaacatagttaaaaagaatatacaaacttttgatgacctcgaaaaagaaaggaaaaaaattattaattctcttggaatttag

SEQ ID NO: 408067 - DNA, 225 bp, Staphylococcus aureus
atgtcgcctaaaggtacaacgagaatcgagacaaaaaccggtcatcaagcacagtttgactggaaagaaggcattaactttaaaacgaatgataatcaaatagtttcactaaatataggcgtgttactactttcttactcccgttttgtaatcatgaaagtgacaatgaataaatcgagtgatgttttatttaatttatttacacaagcgtttgagctaatgtga

SEQ ID NO: 408068 - DNA, 1278 bp, Staphylococcus aureus
ttgaaacaaaatgtagaatttaatcaagcggttattaagtttaataaaagaaataaaataaataaatcatctaatgatgagtatataaaaaattttagaaataaattcggaaaatttctaagtcaaagttttttgaatagtaataatgtaataaagcaagagattataaaaattattaaagatgaatattattattatgatcaagaaaatacgaagaaatatttaataaagttttgtcaagatcttatagaacatataaaagagcacagaaatcaaatcaatgattgtcactttacaaatatattaaataaagatgcagaaaaaactaatagttcaagtatcttaacttcattatttttaactgcaaacaatataccaaataatctatcatctaatttttctaaagcagtggaatattattttgcaaaaaacaaggaaatatatggagatggatatgaaaagtatttagacgagtattttagaaatgttttaggcgaaaaaagttatttaattttgatagatgatttttcagggacaggaaaatcaatcagcgactttattgatgcaataaaaaagtatatactaacattaaaaatagagattattatattttgcatacatataaccgaagatgcagaaaaaaaaataatggatacttcaataaaaaacggtattgagataaaaatagcttttgtacaaaaaacagagaaatattttataaataataaagagctagagaaaaaattttatgaatttgaaaaggatattgtaaatccaggtaagtactacaacttaggctataaaaatactcaagcattagtatcaaattttagaaatactccaaataatacactgagccttttttggcatgagaatgatcagtggaaacctttatttaaaagaaaagctaaaaatgattttagtaataaatggaaagaaaaggttcatattattagatggtttctggcatataaaaaagttcctaaaattttggtagataaaattatagcaataatgtatgttaaaaatcatgctgatatgaaatcgaaatttttagaaattgagattaataggatattattatataatgacaatatattgcaagaatgtctttctcaaaaatttctaattaaacaaacagatttttatattattacttatgcaggaatagaattactaaaaaaatatggattagaaaaaataactttaagtaatatactttatgaatttaagagtaacggattacatcagcagaaaaattttgatggtaataaataa

SEQ ID NO: 408069 - DNA, 1017 bp, Staphylococcus aureus
atggagaaaattgagaatgaaatagttaataagacatatcttgcaattaattctttggaagaattaagaaatatgattggtattaaatcagactatttttataaatgtctttatgtgaatgaccatttttataatgttatcaaaatacctaaacgaaaaaaagatgaatatagagaattgatgattcctaatatggctctcaaaaatatccaaaggtggattttagataatgtattgtacagaaggcaagttcataaatgtgcaactggttttgttcctaggaaatcaatagtgaacaatgcaatcccacacgttgggcagaaatatatattgaaaatggatatagaaaacttttttccgagtatcacatttaagcaggttagaaaaatattttctgagatgggctataaatttgaacttgcgacagcactcgcaaatttgtgtacagtgaataatcagttgcctcaaggtgcaccaaccagtccatatatagctaatatcatcttttacaatatagataaaagaatcttttcttattgtcaaaaaaataatttgagatatactcgatatgctgatgatattactatttctggatctaataaagtaagttttagtaaagaaattatcagggaaatagtaaaccaatataattttagaattaatgaaagtaagacaattatgtttaaaccaggagacagaaaaaaagttactggtattatagttaatgaaaaaatatcggttcctaaaactttaataagagaggtcaggaagcaaatttattttgtaaataagtttggattagaagaacacttaattcgaaataattattcattggattatgagcagcaatttattatgagtatatatggaaaaatcagttttattaaaatgattgatttcaagaaaggcgttagtttacaaaagaaatttaatgaagtactaggtaatatagaatcgtctaacatgtacagagataatattgactttgatgatatagaactacattggataaattaa

SEQ ID NO: 408070 - DNA, 171 bp, Staphylococcus aureus
atgctgttttatgtcgggcttgaatttgtcgttttatggagatataaaaatgctgttttatggcggtttcaaaatggtgtttcgattaataagccacagcaagacttagatctaactatgacttatacatttcacacttatattagcgattatttttatagttataaatga

SEQ ID NO: 408071 - DNA, 204 bp, Staphylococcus aureus
atgaaatataaacattttgccattattactttaattacaggcatcgtcatgctcacggcaatgtactttgtaccatttggatatcataaaataccaatatttgcaggaatggcgattatttttacagtctattttagtaataaaaaatctattgatgaaacaaatatctttagtaagaaaaatcgcaataaaaataaacaataa

SEQ ID NO: 408072 - DNA, 600 bp, Staphylococcus aureus
atgtcattatcaaaactacctttgtttaatcactttgcaaatatccgcattcaaccaaagttaatcattaagctgtttctgactttgataataattgttacatatacatttgttagtggactatctgtggactataaaaagttattgagtgaagcaggactctcagagacatcattagcacaaataaaaatttttagtcaaattagtatttttttctcaagagttttcagcgtattatttacatttttaatcattctagttatctctagaattatgcgctcagatgctaatacaaaatctatattctctgcaacgttaagctacatactgtttacaaatgctattagtttaattatacttaccatccaaataagtgccggtttatcattaattgactattctattactagtttaaatatttttgctaaaggaaatcgcattctgggtactttcgacttacaattttttgtacaagcatacatacttacagtcatgctaattggtacgtcgaaactttctatacgagcatccactatttggggtattatatatcttattttaattatcactttttctttgattagtattagcattcagtga

SEQ ID NO: 408073 - DNA, 1113 bp, Staphylococcus aureus
ttgaggcgtaaaaggaaatggctaattgttatttgtgtattattagtattgattacgatatcacaaattttgaaacattttaactatggaactgagagtaaagaagcatacaatacatatacggttgaaaaagaaagacaattagatttacaaggtaaggcatatccacgtgaagttaaaacatattataaaaataatcaggttggaacatatttgggtgtgcaagtagcggacgggcaaacagtcaaaaaaggagacatgttaattaattataaaataaatagtaataaacgacagcaacttgttgataagataaatgatactcaacatattattacagaagtttatttaaacattactaaaggtttaaacaatcgagagatacagaagaagttaattgaatataagcagacattatatgaagctcaacagcaattgtatcagtatgatagtcaaaatagggatagtatgtatgcatcatttgatggcaagattatgatcaagaatatagataatgacagtgataatcaacctatactgtatctcatttcaaaggagtctcatattaaaacgtctgttacggagtttgatttaaacaaagtcaaaaaaggagacaaagttaacttaagtattacgagtacgggtaaaacaggagcggggattataaaacaaatctctgagttgcctattagttatgaagagaatttaagtcttcacgaaaatgatgccctgcatttaccagaaagtaacaacgatggggaattagcaaattcaaaatcgatttcggcatctccaatatttaagagtaataacaactctgaattatcaaagtatggagttataattgatgatcttagtctaccaatacgtgcaggttattcgttggaaattaaagtcccattaaatgcgattaaaatacctaaatcagtattaacaaaaggcaataatgtttttattgttaataaaaatagtattgtggaaaaacggaatattcgtataaaaagaatcaatggtgacattattgtagaaaaggggttaaaacctggagacaagttaattaaacaacctaaaagtacaatgaatgatggtgataaggttgagatttcgtcatga

SEQ ID NO: 408074 - DNA, 681 bp, Staphylococcus aureus
atgatagaattaaagaatgtttataggacttttaaaaacggtgataaaaatattcgagttttaaaagacattaatatacatatcaatgcaggtgaattcatagcgattatgggaccatcaggctcagggaagagcacactgattaatatcttaggatttatagatcgagagtatcatggtgaatatttgtttgaaggaagtaattatcagacacaatctgataatcaattggcaaacataagaaataaaacagttggatttgtttttcaaaattttaaactaattcataataatactattttagaaaatataagtatgccactggtatatacaaatatgaatacgatagaacgaaagaataaagttatgactgtgctcagtgctgtaggcctagatggcaaaggtgattttactcctagtaaactatcaggcggtcaacaacaacgtgttgcaattgcgcgagccattataaataatccaaagtttattattgcagatgagccaacgggtgctttggattcagatacatctaaaattattatggacatatttacatcattaaaccgagataatcatactacaattattttagtcacacatgatcgtaaagtagcagaaaaagctgatcgaataattcatattttggatggtcgtatacaacatgaagaggtgattaaatga

SEQ ID NO: 408075 - DNA, 1179 bp, Staphylococcus aureus
atgaggaaagttttaaatatttttacaatagcttttaaatcaatattgaaaaataaaggtagaaatatatttacaatgataggtataatcatcggtatttcttctgttattacgataatgtctttgggaaatggctttaaaaaaactgctgctgatcaattttcagatgctggcgccggaaaacaagaagcgttgattagctttacttttaaagttgatgagaaaatcaaaaagtatccttttaatcaaagagatatagagttggtaaatcaagttgatggcgtactagatgcgaagctaaaggaaaataaagaagaaggaattgaagccacaataactaatgtccagaaaaaaagtgacatcttcattataaaaaaacaaaatttacactcttttaaagtaggtagagggtttgataaagaggataatgaattacgtaagaaaatagtggttataaatgatcaagtagcaaaaactgtattcaataataatgctattggtaaatcgctatatattgagggacagggatttgaagtcataggaattacggataaactatattctgactcatctaccgttataatgcctgaaaatacattcaactactatatgggacacttacatcaaggtctgcctaccttacagataattattgaagatggttacaataaaaaaactgtagttaaaaaagtagaatcactattaaataaaaaaggatcgggctctgttttaggtgagtatacatatacagacactgaagaaattatcaaaagtattgataaaatttttgatagtattacttattttgtagcagctgttgccggtatttcactttttattgctggtattggagttatgaatgtcatgtatatatctgtagctgaaagaacagaagaaattgcgatacgacgtgcatttggtgcaaaaagtcgagatattgaactacaatttttaatagagagcattttaatatgtgtgacaagtggttttattggacttattttaggtgttgtgtttgcaacaataattgatgtattaacaccagattatattaaaagtgtagtaagtttgagttctgtcataattgcggttagtgtgtcgatattaattggacttctttttggatggataccagctcgcgcagcatctaagaaagagctcatagatattataaaatag

SEQ ID NO: 408076 - DNA, 222 bp, Staphylococcus aureus
atgctaaaattacataaaaaaatagcttggacaggaatcaaaggttcagctataactacatttattactgccttatataatggaagtagtgtttggaacgcgctagctgttgctggtattgcttttggtggtggcgctggtactgcggttgcagctcttggtcgtgcaacagtaatgagatttatcaaacgttggggcgtacgaaaaacagctgcttggtaa

SEQ ID NO: 408077 - DNA, 1719 bp, Staphylococcus aureus
ttgggaaagcctctttttaaaaaaggagattcaatgaataattcaatattttatacctatttaaaatttaatcttagatattttatccgtagaaaatttgaaattgtaaaaaggtcgcgacttaatgttactacaaaaatactgtttttaattaaattgattttttcgtcactattattatttatttcaactattatgttagctgactatttcagtgattatattgattttatagaatattatttctatgcgagtatgtttatttacattgtatttataccattaatacctagaactaaattattgatcaatccaatggataaacagctgttatatagatctagtttgagagaagttgacatttttaacttgatatatgcttcagacgttttaaaaaagtttgttggatattttaatttgttgatagttggtatggctattagtttatatcatattagtccttttatatttaacctcaaggttttttgtgcactaatatacttttcaacaatctcttatgtaattcaaattatttttataaatattaaagtcataagcacaaaaaaattattttcttatcactattgtgtttttaattttatgatgggaagcattgtttctgttattggatttgtcgtctcatttcttttagtaaatttattaataaagccctttttagttttttcgacatatgtaataaaaagtaagaaaacttttgaatggtatagttattttcaggatataaagaacgaagtcattattattaatgaaaaagttatgcaattattagattatatatcacctcacactatttttatgagattaaactttgtgaatatatcatttgtgattattacaatagctttatttatagcgttatattattttaataaaatagggttttggtatagaaaagaagatatctatctatcttcaacaaatattaatttttcgttgccaatttcaataaaagctataacaacaatacagctaaaacactggataagtaacaaagaagaagttaatttacataaacctttcttctatattagttattcaatatggttctttttagggtgtttaatctatttttcacagatggcatataatcagttagctaatgcagttatttttattttgatattaaacactataactcgtgatagtttttctgcggggacggatttttttactaaatcattacgttttgattcagatagaaaaagtatcggtttgtataggatgtcaaacactgattttaaacaaatttacgattctaaattatctctaattcgctttattggttttaaagaaacaatacttgctattattttattagcaatatttttaaatcaagacatatatttatatataattggatttgaaataataatcatcaatacagtaataattcctaatttatcattattaccttcgtatttatctccacatttcaatcatcaacattacagtgaattagagtcttttgaagaacaaatttttcttgaagatactgtttttgataaagttaagaattttttatcgtcatcatattttttaattctatttgtaggttacttatctcaacgtaattatattgacataatgatttttataattattttcaacattttagccttaatacttgtttcgttgtttattaggttttctaaacaaaaaataacaaagtcttggagaaagagggatttatatttatag

SEQ ID NO: 408078 - DNA, 444 bp, Staphylococcus aureus
ttgggatgcttggtttattacttattaaatattgatttaggtaaaatgatagttgctcaagatttaaatttacaagagattttctttcataatttaatttatttcttctctgcaatatttggttttctgacacttggtctgttaaatataggtatgttactcataaattctgggatgttaggcttttttatagcacatggaatctatagcaatcaattaaaatctattctattagtattagcgccacacgctatatttgagattttagcacttttaattgcttcaacattctcattaggttttttatcatacctttatcaaagaatggtaaagaaaaataaaataaaaaataagatgttccataattttgtaacaacaataataactgttattgtattaacaataatcgcatcattattagaagtttatgtaaccataaattaa

SEQ ID NO: 408079 - DNA, 723 bp, Staphylococcus aureus
atgctagttttaaataatcttcaaaaaaaatttactaattcaaaaatggttttgaataatgtgaatgctaagtttagaagtgggagcatcaattgcatagtgggagtaaatggggcaggtaaaacgactttgttaaatattattagtagtatattgatgccaacaaaaggtgatgtatatttaaatagtgaaagtatttttgaaaatagcacactaaaaaaagagattttttacacaccagtaaatccctttttttatgaaaatttaagtgctaaagataatttgtacttaatatgtagcctatataatcggaaaatagatcaaataactattgagaaaactattaaagatgtaggtttgaatatagaagatctaaatatacctgtatataatttttcaagtggtatgaagcaaaaactaaattttgcttctatgttattagtagattcaaatgttttattattagatgaaccatttaatgcccttgaccatgttgctcaaaaaaatttcacacgaattttaaagggattagtttctaaagaaaagataataattttcactagtcatttgcctaatacaattttagaactctcagaaaatatttatttgttaaaagatggatgttttacagataaacgaaaagcacagtcatttaatcaaaccacgttagaaacatggttgttagaaagtcaaaaagaggtgataccttatgaagaaaaatga

SEQ ID NO: 408080 - DNA, 177 bp, Staphylococcus aureus
atgaagaaaaatgatttgttagtaatgagtgtagtatatattttaacttcagtcataatgttctacattaatggattaagtaaacaattttttacatatgtagttggtttcccaattatttattttggttatatatgtctagttaatcttataaaaaaaagaagccggaataattaa

SEQ ID NO: 408081 - DNA, 198 bp, Staphylococcus aureus
gtgaaaaataatttgaaaatagctagagtttcactatctatgactcaaaaggagctagcaaataaagttggagtaactagacaaacaatatctcttatagaaaagggtgtacataacccctctctatcactatgtaaaaatatttgttcggtgttgaataaaaatttggatgagatatttggagagaaaccacaataa

SEQ ID NO: 408082 - DNA, 2007 bp, Staphylococcus aureus
atggtcattaacttaaatgacaaacagacaaaaacatctaaagaagggttaatttccgtatcacatcctcttgcggctaaaattggtaaggatgtattagatcaaggtggcaacgccatggatgccgtgattgcaattcaactggcattgaatgtggtagaaccatttgcatcaggtattggtggtggcgggtacttgctatattatgagcaaagtactggcagtataactgcgtttgatgcacgtgagacagcacctgaacatgtagacaaacaattttatctagatgattcaggcgaatataaatcattttttgatatgactacacatggtaaaactgtcgctgtgccagcaattccaaagctgtttgattatattcacaagcgttatgctaaattgtcattggaagatttaattaatcctgcaattgaactagccattgaaggtcatgcagccaattgggctactgaaaaatattcgcgccagcaacacgcacgattgacaaagtatcatgaaacggcacaagtatttacgcatgaaaatcaatattggcgtgaaggtgattggattgtacaacccgaattaggtaagacatttcaaatattaagagaacaagggtttaatgcattttataaaggtgacattgcgaaacaattagtcaatgttgttaaagcatgtggtgggacaatcattttagaggatctagccaattatgacattcagattaaaacgccaatcagtgcgacatttaaagactatgacatttattcaatgggaccatctagttctggcggtatcacggtcattcaaatattgaagttattagaacatgtcgatttaccatctatgggtccaagatctgtcgattacttgcatcatttgatacaagcgatgcatttagcatatagtgatcgcgcgcaatacttggcggatgataattttcatgaggtgcctgtacagtcattaattgatgacgattatttaaaagcacgcagtacgctcattaatagcaataaagcaaatattgatatagagcatggtgttgtgtctgattgcattagtcatacagatgttgaagaaaatcataccgaaacaactcatttttgtgtgattgataaggaaggtaatattgcttcatttacgacatcaattggtatgatttatggttcaggtatcacgattccaggctacggtgtgttattgaatacgacaatggatggctttgatgtagtagatggtggtattaacgaaattgcaccatataaacgaccactaagtaacatggctccaacgattgtgatgcatcacgggaagccgatattaacagtaggtgcacctggtgccataagtatcattgctagtgttgcgcaaacattaatcaatgtattagtgtttggcatggatattcagcaggctatagatgaacctagaatttatagtagccatcctaatcgcattgaatgggagcctcaattttcacaatctacaatattagcattgattgcacgtggacatgcaatggaacataaaccagatgcctatattggagatgtacatgggttacaggttgacttgaatacacgtgacgcgtcgggaggtgctgatgatacgagggaaggcacagtgataggtggcgatgtattatcaattagaaaacaaccattacctagtccgaaaatatacgataatgacacccatcgagtatatttcaatgatatgcagttgccattatatgctgaacaagtgcggtggatgcatgacaaatattgggttgatgaaagtgttattagaatcattttccctgaagttagtgtgcatattgaagatttaagaagttatgaaatcgccggaaaaaattatatagatattgcctggttggcacggaagaaaggttatcaagttaccttaaaggatgacagtttatacttaactgatgaaacatatcattcagtgaaagcaaacacaaatgcatactatagatatgatcgagatagtatcacaagataa

SEQ ID NO: 408083 - DNA, 4440 bp, Staphylococcus aureus
atgcataaattgattataaaatataacaaacaattgaagatgctcaatttgcgagatggtaagacatatactattagcgaagacgagcgtgcagatattacgttgaaatcgttaggcgaagtcattcatttagaacaaaataatcaaggtacttggcaagcgaatcatacttctattaataaggtgcttgttagaaaaggtgaccttgatgacattacattacagctttatacagaagctgattatgcatcatttgcgtatccttcaattcaagatacgatgacaattgggccaaatgcgtatgatgatatggttattcaaagcttgatgaatgccatcattattaaagattttcaatcaatacaagaatcacaatacgtacgcattgtgcacgataaaaatacagatgtgtatattaactatgaactacaagagcaattaacaaacaaagcttacattggtgatcatatttatgttgaagggatatggctcgaagtacaagctgatggtttaaatgtattgagtcagaatacagtggcatcgtcattaattcgcttaacacaagagatgccacatgcacaggcagatgattacaatacgtaccatcgttcgccaaggattattcaccgtgaaccgaccgatgatattaagattgaaagaccgccacagccaatacagaagaacaatacagtgatatggcgttccattataccgccattagtaatgattgctttaactgttgtcatctttttagtgagaccaattggtatttatattttaatgatgattggtatgagtacagtaacgatagtatttggtattacaacgtatttctctgaaaagaaaaagtataacaaagatgttgaaaaacgagagaaagattacaaagcttatttggataataaatctaaagaaattaataaagcgattaaagcacaacgttttagtttgaattaccattatccaacggttgctgaaattaaagatatcgttgaaacgaaagcaccaagaatatatgaaaaaacatcgcatcatcacgatttcttacattataagttaggtattgcgaatgtagaaaagtcattcaaattagattaccaagaagaagaatttaaccaacgtcgtgatgaactattcgacgatgctaaagaattgtatgaattttacacagatgtagaacaagcaccattaatcaatgatttaaatcatggaccaattgcatatattggtgcacgacatctcattttagaagaattggagaaaatgctaatccaattgtcaacgttccatagttatcatgatttagagtttctatttgtgacacgtgaagatgaagttgaaacattgaaatgggcacgttggttgccacatatgacattgagaggtcaaaacattagagggtttgtttacaatcaacgaacacgtgaccaaattttaacgtcaatttatagcatgattaaagaacgtatccaagctgtgcgtgaacgcagcagaagtaatgagcaaattattttcacaccgcaattagtgtttgtcattacagatatgtcattaattattgatcatgtcattttagaatatgtaaaccaagatttatcagaatatggtatttcattaatctttgttgaagatgtgattgaaagtttgccagagcatgtagataccattattgatatcaagtctcgtactgaaggcgaactgattacgaaagaaaaagaattagttcaattgaaatttacacctgaaaatattgataacgttgataaagaatatatcgcgagacgtttggcgaatttgatacacgtcgaacatttgaaaaatgcaattcctgatagtattacatttttagagatgtataacgtgaaagaagtagatcagcttgatgtggttaatcgatggagacaaaacgaaacatacaaaacgatggcagtacctttaggtgtaagaggtaaagatgatattttatcattgaacttacatgaaaaagcacacgggccacatggtttagttgctggtaccactggttcagggaaatctgagattatccaatcatacattttatctttagctattaattttcatccacatgaagttgcgttcctattgattgactataaaggtgggggtatggcgaacttatttaaagatttagtccatttagttggtacgattacaaacttagatggcgatgaagcgatgcgtgccttaacatcaatcaaagccgaattgagaaaacgtcaacgtttattcggagagcatgatgttaaccatattaatcaataccataagttatttaaagaaggtgttgcaacagaaccaatgccacatttattcattatttccgatgagtttgccgaattaaaatcagaacaacctgattttatgaaagaacttgtatcaacggcacgtattggacgttcgttaggtattcatttaatacttgcgacacaaaaaccatcgggtgttgttgatgaccaaatttggtctaactctaaatttaaattggcattaaaagtacaagatagacaagacagtaatgaaattttaaaaacaccagatgcagcagacattacattaccaggtcgtgcgtatttacaagttggtaataatgaaatttatgaattattccaatctgcatggagtggtgcaacatatgacatcgaaggcgataaattagaagttgaagataagacgatttacatgattaatgactatggtcaacttcaagcaatcaacaaagacttgagtggacttgaagatgaagaaacgaaagaaaaccaaaccgagttagaagcggttatcgatcatatcgaatctattacaacacgattagaaattgaagaagttaagcgtccatggttaccaccattaccagaaaatgtatatcaagaagatttagtagaaacagatttcagaaaattatggtcagatgatgcaaaagaagtggaattaacattaggacttaaagacgtaccagaagaacaatatcaaggaccgatggtattgcaattgaaaaaagctgggcacatcgcgttaatcggaagtccaggatatggtagaacaacgttcttacacaacattattttcgatgttgcaagacaccatcgtcctgatcaagcacacatgtacttgttcgatttcggtaccaatggtttgatgccagtcacagatataccacatgttgctgattattttacagtagatcaagaagacaagattgctaaggcgatacgtatatttaatgatgaaatcgatcgtcgtaagaagattttaagtcagtatcgtgttactagtatttctgaatatcgaaaattaactggtgaaacaattccgtatgtctttattcttattgataactttgacgcagtaaaagattcacctttccaagaagtttttgaaaatatgatgattaaaatgacacgtgaagggctagcattagacatgcaagtaaccttaactgcttcaagagctaacgcaatgaaaacgccaatgtacattaatatgaaaacgcgtatcgccatgtttttatatgataaatcagaggtgtcgaacgtagtagggcaacaaaaatttgcggttaaagatgtagtgggtcgagcattgttaagtagtgatgacaatgtatcattccatattggccaaccatttaaacatgatgagactaaatcatataatgatcaaattaatgatgaagtatcggcgatgacagaattttataaaggtgaaacaccaaatgatattcctatgatgccagatgaaattaaatatgaagattacagagaatcattaagcttaccagatatagttgccaatggtgctttaccaattggattagattatgaaggtgttacactacaaaaaattaaattaactgaaccagcaatgatttcatcagaaaatccgagagaaattgcgcatattgccgaaattatgatgaaagaaattgacatattaaatgaaaaatatgcgatttgtatcgcagactcaagtggagagtttaaagcttataggcatcaagtggctaactttgccgaagaaagagaagacattaaagcgattcatcaactaatgattgaagacttaaaacaaagagaaatggacggtccatttgaaaaagattcactttacattatcaatgattttaaaacatatattgattgcacgtatatcccggaagatgatgttaaaaagcttattacaaaaggaccagaacttggcttgaacattttatttgtcggcattcataaagaattaatagatgcttatgataaacagattgatgttgcacgtaaaatgattaaccaatttagtataggtattcgtatttcagaccaacaattctttaaatttagatttattcaacgagaacctgttattaaagaaaacgaagcgtatatggtcgcgaatcaagcttatcaaaagattagatggtttaaatag

SEQ ID NO: 408084 - DNA, 393 bp, Staphylococcus aureus
atgaattttaatgatattgaaacaatggtcaagtcgaaatttaaagatattaaaaagcatgctgaagagattgcgcatgaaattgaagttcgttctggatatttaagaaaagctgaacaatataagcgattagaatttaatttaagtattgcactagatgatgttgaaagcacagcaaaggacgtacaaactgcaaaatctagtgctaataaagacagtgtatctgttaaaggaaaagcgcccaatacgttatatatcgaaaaaagaaatttgatgaaacaaaagcttgaaatgttgggtgaagatatcgataaaaataaagaatccctccaaaaagctaagggaattgctggcgaaaaggcaagtgaatattttaataaagcaatgaattaa

SEQ ID NO: 408085 - DNA, 315 bp, Staphylococcus aureus
atgggtggatataaagggattaaagcagatggtggcaaggtgaatcaagcgaaacaattagcggcaaaaatagctaaagatattgaagcatgtcaaaagcaaacgcaacagctcgctgagtatatcgaaggtagtgattgggaaggacagttcgccaataaggtgaaagatgtgttacttattatggcaaagtttcaagaagaattagtacaaccgatggctgaccatcaaaaagcaattgataacttaagtcaaaatctagcgaaatacgatacattatcaattaagcaaggacttgatagggtgaacccatga

SEQ ID NO: 408086 - DNA, 678 bp, Staphylococcus aureus
atgatgaaagatgttaagcgaatagattatttttcttacgaagaattaacaattttaggtggtagtaaattgcctctcgtaaattttgaattgtttgatccatcaaattttgaagaagctaaagtggctttaattgaaaaagaattagtaacagagaatgacaagttaactgatgcaggttttaaagtggctacattagtaagagagtatattagcgcaattgtaaatattcgaattaatgatatgtattttgcaccatttagctatgaaaaagatgaatatattttgttaagccggtttaaaaataatgggtttcaaatacgaattatcaataaagacattgcatggtggtcgattgtacaatcatatcctttattgatgagacaagaaaaatccaatgattgggactttaaacaaattgacgatgaaatattggagaacttaaataatgaaagtatcgatacgattgggcgtgttttagaaattgaaatctacaatcatcaaggtgaccctcaacaaagtttatataacatttatgaacaaaatgatttgttactcattcgatacccattaaaagataaagtgctgaatgttcatattggtgtcattaatacatttatacgagaattatttggattcgatactgatgaaaatcatattaataaagcagaggagtaa

SEQ ID NO: 408087 - DNA, 312 bp, Staphylococcus aureus
ttgagtggaaaaattagtgttaaagctgaaacgattgcacatgttgtaaaagaattggaaagcattagtcaaaagtatgatgaaatagctcaaaactttggaaaaatagcgcaattaaattactacagtagtgaaaaagctgcacattctatggaaaatggctatagtagtgctgcaacagtcattagtggtctcaaaggtccattgagtacactcggtggtggcgtcatgaattcagcacaaaagttctttgaagcagatgaacattggggtacggaatttgccaagctttactataatattgagggatag

SEQ ID NO: 408088 - DNA, 492 bp, Staphylococcus aureus
atgacatttgaagagaagcttagcaaaatatacaatgaaattgcgaatgagattagcaatatgataccggtagagtgggaaaaagtatatacaatggcttatatagatgatggaggaggggaggtattctttaattatactaagccaggtagtgatgacttgaattattacaccgatatacctaaggagtataacatttctgtgcaagtatttgatgatttatggatggatttatatgatttgtttgaggagttaagagatttatttaaagaagaagatttagaaccatggacatcatgtgaatttgactttacaagagagggtaaattgaaagtatcatttgattatatagattggataaatacagagtttgatcaattaggccgtgaaaattattatatgtacaaaaaatttggggttataccagaaatggaatatgaaatggaggaggttaaacaaatcgagcaatatattaaagagcaagaagaatag

SEQ ID NO: 408089 - DNA, 684 bp, Staphylococcus aureus
atgactactaaagaaaatattgatactcttcgaaagccaggtgcacaagccttaagtttaatatcattgtttttgatacttttttcatgtctaactttcttttttggtttagattatgaaaggtttccaaactatttaaagataacgacaattatagaattaataattattgtaattagtttacttcaatggattaggtttatagatttcgaaaaagaaagtgcacggaaatataaaaaaatatatgctcgatttttagttattataaatgtgttaactactatcactgtagtatttgcactgtgtaacctttattattttgcagctgtacaaaaccattatgatttattcaattattggttaatgggtacgatttcaatcataattagctatttattattagtaattggcggaatgtttacgttgttaaaattacctaaagtaacaaaacgctggggtggtaaaactaaaacacatttcggtttattattaactgcgttgagctcatttatatatattgaaaaaattatcgaatatatattgattcctaatgtcgtagaatccaagtttataattattgtgagcatgttggttatcgctggagcacaatttgtggcatttcaatttattatgcaatacagtagattctatatttttgaattaaacacagaagatgatgactaa

SEQ ID NO: 408090 - DNA, 612 bp, Staphylococcus aureus
atggagttcttattattaattgtcgtagccggactgtattatattatatatttaactgctgtgatgtattctgaaaaaatagtagtattgcctataatcatctatgccattttgtttgtaataattggtatcacttatatctttataggcgacagctatgatcaattaacaaatttcaatgtgattttgtatatggggagtttgttttatgcatggatggctattagaaatctttggaacagaccactattactaaaatataagaacattacagatagttcaagtggaatagttaataaatctgaatacaattcagttgaaagcttacgtataaatattgaaatagctaagtataaagggattatttctttgatagtagctatagtactaacggtattaatgacattaaagtcaacacctcaaatcactgcagaaacacgtgacttaagtatctcatttttcatactcagcttatttatcattattatatttgcagtttgggatttgtttattagagttagaaaaggagcgtttgcttttgttgtaataaggccaatattattcagttgttggatatttattttgaatatgattttatcaagattattataa

SEQ ID NO: 408091 - DNA, 219 bp, Staphylococcus aureus
atggaaaaccaaaaacaaggcaatggcttaaaaattgcaacatgggtatttattgtattaacagtagttacaccgctatttggtattggaagtattgtttgtagtattaattataaaaaatacgatgctgaaaaaggttcgaagttattgcaaattgcaattatcgtaacaataattgcttttgttttaaatttattagcatatttaggtttaagataa

SEQ ID NO: 408092 - DNA, 492 bp, Staphylococcus aureus
atgactttcgaagagaaaataagcaaattatataatgagattgcgaatgagattagcagtatgataccggtagagtgggaaaaagtatatacaatggcttatatagatgatggaggaggtgaagtattctttaattatactaaaccaggtagtgatgacttgaattattacaccgatatacctaaggagtataacatttctgtgcaagtatttgatgatttatggatggatttatatgatttgtttgaggagttaagagatttatttaaagaagaagatttagaaccatggacatcatgtgaatttgattttacaagtgaaggtaaattaaaagtatcacttgattatattgattggataaatacagagtttgatcaattaggccgtgaaaattattatatgtacaaaaaatttggggttataccagaaatggaatatgaaatggaagaaattaaagaaatcgagcaatatattaaagagcaagaagaatag

SEQ ID NO: 408093 - DNA, 684 bp, Staphylococcus aureus; identical to SEQ ID NO: 408089

SEQ ID NO: 408094 - DNA, 612 bp, Staphylococcus aureus; identical to SEQ ID NO: 408090

SEQ ID NO: 408095 - DNA, 219 bp, Staphylococcus aureus; identical to SEQ ID NO: 408091

SEQ ID NO: 408096 - DNA, 462 bp, Staphylococcus aureus
atgactttcgaagaaaaactaagtcaaatgtacaatgaaattgcaaataaaattagcagtatgataccggtagaatgggaaaaggtatatgcaatggcttatgtaaatgaaagaagtggagaagtgttctacaattatactgaaccaagaagtgatgaattattttactatacgagcgtgttaaataaatataatatatcaagatcagaatttatggactcagtatatgaattatataagcaatttgataaactaagagatttatttaaagaagaaggactcgaaccatggacatcatgtgaatttgactttacaagagacggcaaattgaatgtttcatttgattatattgattgggcgaattcagagtttggacaaatgggaagagaacattattacatgtataaaaaatttggaatttggcctgaaaaagaatatgccataaattgggtaaaaaaataa

SEQ ID NO: 408097 - DNA, 486 bp, Staphylococcus aureus
atgaattttgaagaaaaattaagtcaaatgtacaacgagattgcgaatgagattagtgggatgataccagtagaatgggagcaagtatttacaatagcttatgtaactgatcaagctggggaagtcatttttaattatactaaaccaggtagtgatgaattgaattattacacatatatccctagagagtataatgtctctgaaaaagtattttatgatttgtggacggatttatatagattgtttaagaagttaagaaacgcatttaaagaagatttagaaccatggacatcatgtgaatttgattttacaagagagggtaatttgaaagtatcgtttgattatatagattggattaaattaggttttggtccatcaggaaaggaaaactactatatgtataaaaagtttggtgttttaccagaaacggaatatgaaatggaagaaattcgagaagtagagaagtatgttaaagaccaagagtag

SEQ ID NO: 408098 - DNA, 975 bp, Staphylococcus aureus
ttggaaaaagatgatatactagcagaaattaagcctatgctcaattttgatgagcaaatagcgaaattaaaacagatgaatatattttttaatattattgacaccgaaaaagcaaatgaaattcttagaaaaaataattacttcttcaaactagcttatttccgaaaaaatttcgaaaaaaagaatggcggctatttcatagaatttgcttatttatcagatttagcaactatagatatgaaattaagatacacaatgttgcatttaactttagatattgaacatagtttaaagtgtctagtcttaaaactaataacagaaaataaccaagaagatggttataaaataatagatgagttcttatgtattgataaatcatatagcaattcaaattttgacacaaattcaagaacaccagaagaagttatggaaaccaaaatcaaaaataaaaacgaaatattcaagcatatgaataaacgaggacaactacccgagaagttgaataaatactatcaaaatccacccgcatgggtttgcattgaattcatgcaactaggtcaattcgtttcgtttctcaacttctattacaagaagtacaatgacgaagaattgagagttgctaatattttaatgcctttagttaaaaatataagaaacaaatcagctcataaccaacccatcatagcaaatctaaattatgacagtagatctcctcaatatttatttgaaaaagggaataatataggcatatctagaaacatgttcggaataaaaaatttcatagatactttcgctacgctagaattacataatcaagtttgtagtaatgcaattatccaagcaagatatcacgatttggaccaacttcaaaagcgatataaaagaaacgaaagctattataataatgcattagctatcaaaagattttttatagctttagataaaattattgacttcaacagaccaaaagtataa

SEQ ID NO: 408099 - DNA, 726 bp, Staphylococcus aureus
atgaaaaaattagcaacagtaggttctttaattgtaacaagcactttagtattctcaagtatgccttttcaaaatgcgcatgccgacacgacttcaatgaatgtgccgaataaacaaagccaaaatgtacaaaatcatcgcccttatggcggagtagtaccacaaggaatgacgcaagcacaatatactgaattagagaaaactttaccccaattaagcgctggcagtaatatgcaagactataatatgaaattgtatgatgcgacgcaaaatattgctgataaatacaatgtgataattacaactaatgtaggggtatttaaaccacatgctgttagagatatgaatggccatgcgttacctttaacaaaagatggcaatttttatcaaacgaatgtagatgcaaatggtgttaatcatggtggtagtgaaatggtgcaaaataaaacaggtcatatgagtcaacaagaccatatgaatcagaacacacacatgaaccaacagccacaaatacaacaaggtcatatgcaatcatcaaaccatcaaatgatgagtccaaaagcaaatatgcattcatcaaatcatcaaatgaaccaaagtaacaaaaaagttttaccagctgctggtgaaagtatgacatcaagtattcttactgcaagtattgccgcactactattagtatctgggttattcttagcatttagacgacgttcaacaaataaataa

SEQ ID NO: 408100 - DNA, 972 bp, Staphylococcus aureus
ttggaaagagtcttgataactggtggggctggttttattgggtcgcatttagtagatgatttacaacaagattatgatgtttatgttctagataactatagaacaggtaaacgagaaaatattaaaagtttggctgacgatcatgtgtttgaattagatattcgtgaatatgatgcagttgaacaaatcatgaagacatatcaatttgattatgttattcatttagcagcattagttagtgttgctgagtcggttgagaaacctatcttatctcaagaaataaacgtcgtagcaacattaagattgttagaaatcattaaaaaatataatagtcatataaaacgttttatctttgcttcgtcagcagctgtttatggtgatcttcctgatttgcctaaaagtgatcaatcattaatcttaccattatcaccatatgcaatagataaatattacggcgaacggacgacattaaattattgctcgttatataacataccaacagcggttgttaaattttttaatgtatttgggccaagacaggatcctaagtcacaatattcaggtgttatttcaaagatgttcgattcatttgagcataacaagccatttacattttttggtgacggactgcaaactagagattttgtatatgtatatgatgttgttcaatctgtacgcttaattatggaacacaaagatgcaattggacacggttataacattggtacaggcacttttactaatttattagaggtttatcgtattattggtgaattatatggaaaatcagtcgagcatgaatttaaagaagcacgaaaaggagatattaagcattcttatgcagatatttctaacttaaaggcattaggatttgttcctaaatatacagtagaaacaggtttaaaggattactttaattttgaggtagataatattgaagaagttacagctaaagaagtggaaatgtcgtga

SEQ ID NO: 408101 - DNA, 627 bp, Staphylococcus aureus
atggaaaaaaatgtagaaaaatcattcataaagataggtttatattttcaaatagcttatatagtactcatggctataactttatgtgggtttgtaatttgctatggactaattttcggccttttctatttattatcaggtagcagagctgattatttaatagtaacaatagttatatcggcaataatttctatatttgtaattatactttcaatcgtacctgtcatcgtattggcatctgacttatttaaagaaaggatttcaaaaggtgtcatattaattgtattggctattattgctttagtattatgcaactttgtatctgcaatactctggtttgtttcagccatatctattttaggtagaaaaaaattagtagctgcagcagatactaccactattcaaaaaagtaaagggaacgcaaatcaagcatcacataaagacacgtgtaaaaaggaacttgatagtcaagacatgatggaacatcctgaggttaaaaatcccacgactaaaaaccttgaaggatttaacgaagaaatacataaagatgaagctacaactaaagttgtcagtgataacacggaaccgccgattgaatcaaaaggccatgtctcgaaaaaagattga

SEQ ID NO: 408102 - DNA, 768 bp, Staphylococcus aureus
atgaaacgtttaaataaattagtgttaggtattagtttcttatttttagtcattagtattactgctggttgtggcatgggtaaagaagcggaaattaagaaaagttttgaaaagacaatgagtatgtatccgattaaaaacctagaggatttatatgacaaagagggctatcgagatgatcaatttgataaaaatgataagggaacatggattgtaaattctcaaatggcaattcaaaataaaggagaacctatgaaatcaaaaggcatggttctgtatatgaatagaaatacaagaacaacaaatggctattattatgttaatgtgattaagggcgaggataaaggtaaacatcaagacaatgaaaaaagataccctgttaaaatggtcgacaataaaataatccttactaaagaaattaaagatgaaaacataaaaatagaaatcgaaaactttaagttttttgttcaatatggaaactttaaagatttggaaaattataaagatggagatatatcatataatccagaggtgccaagttattcagctaaatatcaattaactaatgatgattacaatgtaaagcaattacgtaaaagatatgacataccaacaaataaagcaccgaagttgttgttgaagggtacagggaatttaaaaggttcatcagttggatataaagacattgaatttacgtttgtagagaaaaaagaagagaacatttactttagtgatgggttaatttttaaaccaagtgaggataaataa

SEQ ID NO: 408103 - DNA, 804 bp, Staphylococcus aureus
atgaaatcgaacccggaaaaagagagtgatgaaatgataaaacgtgtaaataaattagtgctaggtattagttttctgtttttaatcatcagtatctttgctggttgtggtacagggaaagaagcggaaataaagaaaagttttgaaaaaacgttgagtatgtatccgattaaaaatctagaggatttatacgataaagaaggatatcgtgatgatcaatttgataaaaatgataagggaacatggattgttcgttcgtcaatgtcgattcaatctaatggaaaagatatgaatataaaaggcatggttttatatatgaatagaaatacaagaacaacaaatggctattactatgttgatgttatagaaagagaagataaaggtatacatcgtgataacgaaaaaagatatccggttaaaatggtcgataataaaatcattccaactaaagaaattaaagatgaaaaaataaaaaaagaaatcgaaaactttaagttctttgttcaatatggcgactttaaagatttgtcgaagtacaaagacggcgatatatcatacaatccagaggtgccgagttattcagcaaaatatcaattaactaatgatgactataatgtaaaacaattacgaaaaagatataatataccaacgaataaagcaccaaagctattgttgaaaggtacagggaatttaaaaggttcatcaattggctacaaaaaaattgaatttactttcgtagagaaaaagggagaaaatatatactttagtgatgggctacattttaatccaagtgaggataaataa

SEQ ID NO: 408104 - DNA, 3153 bp, Staphylococcus aureus
atgagtcaattgctaaatgatacgttatcggcttggttgttaattgaatctttaagtccaggagaagtaaattttacagcggaagatatactctcagctgaacattttaaaaatggtgcaaagcaagcacaacttcaaagttttgatgaatattttgaaatatggaattctgaacgctttattatatcagaagaaaaatcagagactggggaacttatatttaaattttatagacattgcttccgctataatgaaattaatttgaaaattcaggatatttttgatgattattctgatattcataatccaaatgggacacactgttatggttacacatttaacacagataaacacggcaaagtgatagttgattctatacatattccgatgattatgagtgcattaaaagaaattgaaaagaacaaaaatgccaatatagaagaaaaatttaatgattctgttgaaaaattttttcaaaaagtaaaagaaattttagcagatgaaccaattaatgaatttaaattgaagaagatggacaaagcttatgatgagtacttttctgtattaaattcaaagaaagatggattatttggacattatgtagcaatagaatatgtgaaagatagtgatttaccacagccggaatttaacagtttcttcataagtgatattgagaaagcaagaaaatctcccaaccaaactttaattgattacattgaaggtgtagaagaaagtcagcgcatagaagtagatgaaaataaagaaatgtttgacaaatttttacatccttcacgtttgcctgatggacgatggccatcacagactgagtttagattgtctttaatgcaacaacttgctgtaaaccaaattacgagtggtaatgaaagaataagttcagttaatgggccaccagggacaggtaagactactttattaaaagatatatttgctcatctagtagttgaaagaggtaaagagttagctaaactaaataatcctaaagatgcatttgtcaaaacaaaaattcatgaaacggatgataaatacgtatacttactaaaggaatctattgccaaatataagatggtagtcgcatctagtaataatggagctgttgaaaatatatctaaagatttaccgaaaattgaagaaattataagaaatcccgaaaaatgtaaattccctaaatatgaacagaattatgcaaatttagcacatgaattaaaagattttgctgaaatagctgaagatttgattggtgaaagtgcctggggcttattttctggagtttttggtaaaagtactaatattaaccaagtattgagtcatatgttaaaacaagatgcgaatgatattggctttgctaaattactacaaaatgagaataatcgtatgagttataacgagttaatgagtgaatggcaatcacatcaacgtgcatttttagaagagttgaggcatgttgaaatgttaaaagaagaatctattagagcatatgatgtttataaaaattgtgagtctttctctaagattgaacaggttattaatagtgaaaaaacaagtattgaagaacaggtatatcatttagataatgaaacgttacgagacaataaagaaatagaagatttggataatcgaattaattatattgttaagcaaatagaaactttaaatgagttaattaaatccatcaaagaaagcaacaaaggttttattaacaaactgaaagcgatgtttaattcagaagaagatgaaagctataaagatcataataaagagaagcaacaattattaacacaacagttagagttagagaaatgtaaaaaaaacaaacatgaagaccttgttagcaaactaaaagaaaaagagaaattaattaaacaattaactaaagtacagttgcaattagacgagttaaattcacagttacaagagttagaagcatatcgtattgagtcaaaaattacaattccagaaaaagatttttggagtgacaacaattatgatgagcgccaagttactaatctgtggacgagtgacgaacttcaatacagacgtgccatgctctttttaagagcaatgatattgcataaattattattgattgctaataatacaactatttattatgcgattaatgattttaaagatagaaggaaattaattgatgcaaatccagataaagtacacaacgcatggaatgtgatgcatttaatatttccagtagttagtacgacgtttgcaagctttaaatctatgtatgggggcataccaaaagatttcatagactacttatttattgatgaagcaggacaagcaatacctcaagcagctgtgggagcattatatcgttcaaaaaaagttgtagctgtaggtgatccgattcaaatagaaccggttgtgactttagaaagtcatttaattgataacattcgtaaaaattatcatgttccggaatatctagtttctaaagaagcttctgtgcagtctgttgcagacaacgccaatcaatatggtttttggaaatctgatgctactgatagtaatcaaaaaacctggataggcatacctttatgggtgcacagacgatgtttaaaacctatgttcacgatagctaaccaaatcgcttataataataaaatggtgttgccaagtaatattacaaaagtaggtaaaacaggttggtatgacgttaaaggaaacgcagttcaaaaacaatttgtgaaagagcatggtgaaaaagtagtgggattattagctgatgattggattgaagcaattaaggaaggtaaaaatgaaccgagctcatttgtaatatcgcctttttcagcagtacagcaacagattaaacgtatgttaaagcaacaactaccgactagaattgatattgaacgtacaaaaattaatcaatgggtcgataaatccattggtactgttcatacttttcaaggtaaagaggctcagaaggtgtattttgtaataggtactgataatacccaagatggtgctgtgaactggtcatgcgaaaaaccaaacttgttaaacgttgcagtgacaagagctaagaaagagttttatgtaattggcgacatgcaaagaatacagatgaaaccattttatgagacgatttttaaagaaagaaatgtaaaataa

SEQ ID NO: 408105 - DNA, 603 bp, Staphylococcus aureus
atgttaattagtctcgtaatcccagtttttgctttgttagttattggtggtattatttgggtgattatagaaggtatagtacatatttcaaaaaagaataaagcaatcgataactttttaaaccaagttaataaagtaagtgagacatataaattcgctactgcttttttatttctaatcttggctacggctggtatttctcaattttatctatattatatagtatcagcgtttcttttttggcttgtcatacttacctttggtattgcaggtatcatttttttaatgccatatggattatgtttcctaccactttataagcaaaaaaagaaaaaacagacatttaaaaaatacatggtttacactacgattggtttgtcaatttgtctaggcttatctctagttttggttcacactacgaaaatttatatggacgaaggtggcgtaagatactattacggtagttttgtaatgaaacaagcgggcggttatgcttatttagctttagcggtactttcaacgttgttaattgttgcgaaaaaagctacaaataaaaataaagaaatcgaaaccgtcgacaatacaaatataacggaaagataa

SEQ ID NO: 408106 - DNA, 987 bp, Staphylococcus aureus
atgaaagaaaatttttggagtgaattaccacgtccattttttattttggcgccaatggaagacgttacagatatcgtctttcgacacgttgtaagtgaagcagctagaccggatgtgtttttcactgaatttacaaatactgaaagcttttgccaccctgaaggcatacatagtgtgcgcggacgcttaacttttagcgaagatgaacacccgatggtcgctcatatatggggagataagccagaacagttccgtgaaacgagtattcaactagctaaaatgggctttaaaggcattgacttaaatatgggatgtcctgtagcaaatgttgctaaaaagggtaagggttccggcttaatcttaagaccggatgtcgctgccgaaattattcaagcaactaaagcaggtgggcttccggtaagtgttaaaacacgccttggctactatgaaatcgatgaatggaaagattggttgaagcacgtcttcgaacaagatattgccaatttatctattcatcttcgtacacgtaaagaaatgagtaaagtagatgcacattgggaattaatcgaagctattaaaaatttacgtgacgaaattgcaccaaatacattgttaacaattaacggtgatattcccgatagaaaaacaggacttgaactggcagaaaaatatggcatcgatggtgtcatgattggtagaggcattttccataatccattcgcttttgaaaaagaaccacgcgaacacacaagcaaggaactattagatctattgagattgcatttatcattgtttaacaaatatgaaaaagatgaaatacgacaattcaagagcttgcgtagattctttaaaatctatgtgcgtggcataagaggcgctagcgaacttcgccatcaattgatgaacacacaatcaattgcagaagcacgagcacttctagatgaatttgaagcccaaatggacgaagacgttaaaatagaattatag

SEQ ID NO: 408107 - DNA, 1194 bp, Staphylococcus aureus
atgaataagcattatcaaattgttattattggtggcggtacagcaggtgttaccgtagcatcaagactattaagaaaaaatcaaaacttaaaagagaaaatagcaattatagacccagcagaccatcattactatcaaccattatggacgttggttggtgcaggggtatctagtttgaaaagttctcgtaaagatatggaaagtgttatacctgaaggtgctaactggataaaacaggctgtttcaagttttcaacctgaaaataatagcgttattttaggagataatacagtcgtttattatgattttttagtagtagctccaggattacagattaattggtcttcaattaaaggactaaaagaaaatataggtaaaaatggtgtttgctctaactattcacctgactatgttaacgaaacttggaaccaaatttctaattttaaacaaggaaatgccatttttacgcatccaaacactcctataaagtgtggaggtgcgcctatgaaaattatgtatttagctgaagattattttaggaaacataaaatccgttctaacgctaatgtgatatatgcaacgccaaaagatgctttatttgacgtaggaaaatataataaagaattagaaaggattgttgaagaaagaaatataacagtcaattataattataaccttgttgaaatcgacggtgacaaaaaagtggctacattcgaacatatcaaagcatacgatagaaaaacaataagttatgatatgttacatgtaacaccacctatgggtcccttagatgtagtaaaagaaagtacactttcagatagtgagggttgggtagatgttaacccaaccacattacagcataaaagctactctaatgtatttgcacttggtgatgcttcaaatgtacctacttcaaaaacaggcgcagctattcgtaagcaagcacctatcgtcgctaataatttattgcaagtgatgaataatcaaatgttaacgcatcattatgatggttatacttcatgccctattgttactggatataataggttaatacttgcagagtttgattataataaaaatactaaagaaacaatgccgtttaatcaggccaaagaacgtagaagtatgtatatatttaagaaagatttattacctaaaatgtattggtacggcatgctaaaaggattaatataa

SEQ ID NO: 408108 - DNA, 1335 bp, Staphylococcus aureus
atgttttttaaacagttttacgataatcatttatctcaagcatcatatttagtgggttgtcaacgtacaggagaggcaataataatagaccctgttcgtgatttatcgaaatatatagaagttgcagattctgaaggtttaacaattacacaagctacagaaacacatattcatgctgattttgcttcaggaattcgtgatgtggctaaacgcttaaatgcaaatatatatgtgtctggcgaaggtgaagatgcattagggtataaaaatatgccatcaaaaacacaatttgttaaacatggagatatcattcaagtaggcaatgttaaattagaagttctgcatactccaggacacacgcctgaaagtattagctttttactcactgatttaggtggtggttcaagtgttccgatgggattatttagtggtgactttatttttgttggtgatataggtagacctgatttattagaaaaatctgttcaaataaagggttctacagaaattagcgcgaaacaaatgtatgagtccgttcaaaatattaaaaatttaccagactatgttcaaatctggccgggtcatggtgctggaagcccttgtggtaaagcattaggtgccatacctatatctacaataggttatgagaaaattaataactgggcatttaatgaaattgatgagactaaatttattgaatcattaacatcaaatcaaccagcaccaccgcatcattttgcacaaatgaaacaagttaatcagtttggtatgaatttatatcaatcatatgatgtttatcctagtttagataataagagagtagcatttgatcttcgtagcaaagaggcctttcacggtggccacacaaaaggaacaatcaatataccatacaacaaaaactttattaatcaaattggttggtacttagattttgaaaaagatatagatttaattggagataaatctactgttgagaaagcgaaacacactttacaattaattgggtttgataaggtagcaggctatcgtttgccaaaatcaggcatttcaacccagtccgttcatagcgctgatatgacaggtaaagaagaacatgtattagacgtacgtaatgatgaagagtggaataatggacacttagatcaagcagttaatattccacatggtaaattattaaatgaaaatattccttttaataaagaggataaaatatatgtacattgtcagtcaggtgttagaagttcaattgcagtgggtatattggaaagcaaaggttttgaaaatgtggtgaatattagagaaggctatcaagattttccagaatcattaaaataa

SEQ ID NO: 408109 - DNA, 1065 bp, Staphylococcus aureus
atgaaacaatacggagaaaagtttatcgatgaatttagtaaagcagaattggaaaaactagccaagcaagggcaattaattgatgttagaacagaagaggagtatgcattaggacatatcaatggttccatacttcatcctgttgatgagattgagtcattcaataaagaaaaaaataaaacctattatgtaatctgtagaagtggtaacagaagtgctaatgctagtaaatatttagctaaacaaggttataacgttataaatcttgatggtggttataaagcttatgaagaaaacgatagttatgatacacaagaagaatataaaagtatagaaattaaagcagatcgtaaacaatttaactatcgtggttttcaatgtccagggccaattgtaaaaattagtcaagaaatgaagaatattgaagtaggtgaccaaattgaagtcaaagtcacagaccctggattccctagtgatattaaaagttgggtgaaacaaacaaggcatactttagttaagcttgatgaaaataacaatggaattaatgcgattattcaaaaagaaaaagcaaaagatttagatataaattattctgctaaaggtactacaattgtattatttagtggagaattagacaaagctgtagcagcattgattattgcaaatggcgctagagctgctggaaaagatgtaactatcttctttactttttgggggcttaatgcattaaaaaaagtgcaaacagttaatgttaaaaagcaaggtattgcaaaaatgtttgatttaatgttgccccaaaagaatatacgaatgcctctttccaaaatgaatatgtttggtttaggaaatatgatgatgcgctacgtaatgaaaaagaaaaatgttgattcattaccaacacttatcaatcaagctattgagcaaaatatcaaattaatcgcttgtacgatgagtatggatgtcatgggtattcagaaagaagaacttagagatgaagttgagtacggtggtgtaggcacttatattggtgctactgaaaatgcgaatcataatttatttatctaa

SEQ ID NO: 408110 - DNA, 261 bp, Staphylococcus aureus
atgaattatgataaaaaaatgattaatcgtattaatagaatacaagggcaactaaatggaattattaaaatgatggaggaaggaaaagactgtaaagatgtcattacacaaataagtgcatcaaagagttcactccaacgcttgatgggtatcattattagtgagaatttaatagaatgtgtaaaagtagctgcggatgatgaagaaagctcccaagagttaattaatgaagctgtaaacttattggtgaaaagtaagtaa

SEQ ID NO: 408111 - DNA, 756 bp, Staphylococcus aureus
atggatattgttaatatagttatcatgttactcattggggtattcggtgggttcatatctggtctagtaggcgtaggtggtgctatcattatttatccagctattttattattaccaccattattcggagcccctgcatatagcgcatatatcgcatcaggtcttacttctagccaagtctttttcagtacattaagtggctcattaaaagctcgaaaaaaaacagagttctcaccacaattagttctttatatgggtggcggcatgattatagggagtatgttaggtgcatttctagcaaatttatttgatgctacatttgtaaatacggtatatatcattattgctttacttgcattaacattaatgtttattaaagtgaaacctagttccgaaaagtcttcatttaataaatatttattagttatcattggccttttcattggtattatttcaggtatagtaggtgcaggtggtgccttcattattattcctatattattggttttattcaaattaccaatgaatactgtagtcgctaatagtatagtaattgcttttatatcttcaattggtgcttttgtcatcaaacttattcaaggttatatccctttatatgacgccttattccttataatagggagtattatatttgctccaatagggttaaaattaagtaaaaaagtccctaacataatacaaaaatggattatcagtattttaatcgtttttgctatagttcaactcattttataa

SEQ ID NO: 408112 - DNA, 1746 bp, Staphylococcus aureus
atgaagattaatatttataaatctatttataattttcaggaaacaaatacaaattttttagagaatctagaatctttaaatgatgacaattatgaactgcttaatgataaagaacttgttagtgattcaaatgaattaaaattaattagtaaagtttatatacgtaaaaaagacaaaaaactattagattggcaattattaataaagaatgtatacctagatactgaagaagatgacaatttattttcagaatccggtcatcattttgatgcaatattatttctcaaagaagatactacattacaaaataatgtatatattataccttttggacaagcatatcatgatataaataatttgattgattatgacttcggaattgattttgcagaaagagcaatcaaaaatgaagacatagttaataaaaatgttaatttttttcaacaaaacaggcttaaagagattgttaattatagaaggaatagtgtagattacgttagaccttcagaatcttatatatcagtccaaggacatccacagaatcctcaaatttttggaaaaacgatgacttgtggtacaagtatttcattgcgtgtaccgaatagaaagcagcaattcatagataaaattagtgtgataatcaaagaaataaacgctattattaatcttcctcaaaaaattagtgaatttcctagaatagtaactttaaaagacttgaataaaatagaagtattagatactttattgctaaaaaaactatcgaattcttcaactacagaaaatatatctatagatatatcaagatttttagaactaagtaatatgatactcttgttagatgatatgctcgacgtcaatatatatataaattcttttaaaaataatacattagagacatttgatgcgactgatcctgaagttgattacatcactgaaataggagattacttattaaaatatgacgttaattctataaatgatgtcagaattgaagtgatagataatttggggcattcaaataatatgctactaaaaacgatactacatgcagaagttgaaatggaagatggaaagaaatatttattacaaaatgggaaatggggttattttaatagagaattttttgaccttttgaatgatcatttgaatgagatagaaattaggtataacacactaactcccacaggtttagtatttaaagaaggagaagaaggatatataaaagaaatagtaggaagattgccagaagaatatttaatgttacataaaaaattcataaaaccaataaataagaattttatagtaaaaggaaatggaatagagttggcagacttatacaatattaaaaacaaagagcttttcacgattaaaagaggaattaatacatctttatctctttatagtctagaacagaatataatagcaattaacgccttaaaatatccagaatcatataattttgaagaattaatagaagctattcctgataactcggaaaatatatttaatgatatacaacggagtacaaattttagtatagtatggattttaccgatatcatctattgataatatgcccataaaagatatggttcatactagtaacgtaataaataaaaactttcaattaactaatttaggttcagtattacttaaaaataaattagtagagtggtctctctatttaaaagatcaaagaattaatccaattatttatatggaaacgccaactgaagatagaaattaa

SEQ ID NO: 408113 - DNA, 1335 bp, Staphylococcus aureus
atgaataataaggaacatattaaatctgtcattttagcgctactcgtcttgatgagtgtcgtattgacatatatggtatggaacttttctcctgatattgcaaatgtcgacaatacagatagtaagaagagtgaaacgaaacctttaacgacacctatgacagccaaaatggatacaactattacgccatttcagattattcattcgaaaaatgatcatccagaaggtacgattgcgacggtatctaatgtgaataaactgacgaaacctttgaaaaataaagaagtgaagtccgtggaacatgttcgtcgtgatcataacttgatgattccggatttaagcagtgattttacattattcgattttacgtatgatttaccgttatcaacatatcttggccaagtactgaacatgaatgcgaaagtaccaaatcatttcaatttcaatcgtttagtcatagatcatgatgctgatgataatatcgtgctttatgctataagtaaagaccgccacgattacgtaaaattaacaactacaacgaaaaatgatcattttttagatgcattagcagcagtgaaaaaagatatgcaaccatacacagatatcatcacaaacaaagatacaattgatcgtacgacgcatgtttttgcaccaagtaaacctgaaaagttaaaaacatatcgcatggtatttaacacgattagtgttgagaaaatgaatgctatactatttgacgattcaaccatcgttcgtagttcaaagagtggtgttacaacctacaacaataatacaggtgtcgcaaactataacgataaaaatgaaaaatatcattataaaaacctgtccgaagatgaagcaagttccagcaaaatggaagaaacgattccaggaacctttgattttattaatggtcatggtggtttcttaaacgaagacttcagattgtttagtacgaataatcagtcaggcgagttaacatatcaacgtttccttaacggttatccaacgtttaataaagaaggctctaatcaaattcaagtcacttggggtgaaaaaggcgtctttgattatcgtcgttcgttattgcgcaccgacgttgtgttaaatagtgaggataataaaacgttgccgaaattagagtctgtacgttcaagcttagcgaacaatagtgatattaattttgaaaaagtaacaaacatcgctatcggttacgaaatgcaggataactcagatcataatcacattgaagtgcagattaacagtgaactcgtaccgcgttggtatgtagaatatgatggtgaatggtatgtttataacgatgggaggcttgaataa

SEQ ID NO: 408114 - DNA, 570 bp, Staphylococcus aureus
ttgaatctgagtaaacaaattaaaaagtatagggaacgagatggttattcacaagaatatcttgctgaaaagttatatgtatctaggcagagtatttctaattgggaaaatgacaaaagcttaccagacatacataacttattaatgatgtgcgaattgttcaatgtaactttagatgatttagtaaaagggactattccatttgtacctgatattaaagtgcaacgaagtcttaacttatggacatatgtgatgcttattttcatgacattagctgcaattttaatgggacctttagttgtttattggaattggacttggggtataacggtggcaatcattttgggaataggtttttatgcatctatgaaaatagaagatttaaaaaaagtgcataaaatggacaactacgatcgaattgttgcttttatgaatggaaaagatcctagtgaagtacaaacgactaaagctagaaatacgatgacaaatgcgctttctattatatcagcaattggtatactcagcctcataattttccttagtgtgtatatggcaaataagtttttataa

SEQ ID NO: 408115 - DNA, 1881 bp, Staphylococcus aureus
atgacatttaaccatatcgttttcaaaaacttacgacaaaacttaaaacattatgcaatgtatttattttcattattttttagcatcgtcttatatttcagttttacaaccttacagtttactaaaggtgtaaataatgacgactcgatggccatcattaagaaaggtgctttagtcggatcaatatttttatttatcattattgtcatctttttaatgtatgccaatcatttattcgtgaaacgccgtacacgtgaatttgcgctatttcagttgattggtttaacacgacaaaacattttgaaaatgttagcacttgaacaaatgattgtatttttaatcacaggtgttgtcggtgtattatgtggcattgcaggtgcacaattattgctttccatagtatctaaattgatgtcgttatcgattaacttatcgatacatttcgaacctatggcccttgttttaactattttcatgctaattattgcgtatgtactgattttatttcaaagtgctttatttctaaaaagacgtagtatcttatcaatgatgaaagattcaattaaaactgatgccacaactgctaaagtaacgactgcagaggttatttcaggcgtattaggtattgctatgattgcactaggctattatatggcgacagaaatgtttggaacatttaaagcactaactatggctatgacatcaccgtttatcattttatttttaacggtagtaggcgcctatttattcttcagaagttccgtgtcactaatttttaaaactttgaaaaaatctaaaaatggacgcgtatctattacagatgttgtatttacatcgtctattatgtaccgaatgaagaaaaatgcgatgtctttaactatcattgcaattatttctgcagttacagtaactgtattgtgtttcgcggcattatctaaatcaaatacagatcaaacccttacatctatggcaccaaatgaatttaacgtggtcgctactcaagatgctaaacaatttgaaactaaactaagccaacaacaaattacattttctaaaaatgcttacgaaactattactgtagataatgttaaagatcaggttattactttggaaaatggtagtgattcaggtcgcacgaattcaatattaagtgcaaataacaaggtaacaggcaacaatgccatcattacaaatacaaaatcacttcctaacattattaatatccatttaaacaaagatttagtagtaaaaggaactaagaatgaaactttccgtgttacacaagaagacaaaggtagggtttatcctttaaatctaagcttcaactcacctgtcgtcgaagtaagtcctgaaaagtatcagcagttgaaaacacaaaataacgttcatactttttatggatatgatattaaacaaacatcacaaaaggaaaaagctcaagcaattgcaaaacagtttggagacaaagtcatcacttatgatgaaatgaaaaaagaggtcgatgctactaacggtattctaatatttgttacatcatttttaggattagcatttttagtagcagctggatgtattatttatattaaacaaatggatgaaactgaggatgaactaagtaacttcagaatattaaaacgcataggctttacgcatacagatatgcttaagggattattattaaaaattactttcaacttcggtttaccattattgattgctatattacatgcagtattcgccgcaatagcatttatgaaattgatgggtaatatttccttcatgccggttattgtagtaattgttgtatacaccctcatttacattacttttgctttaattgcttttgtacattcaaacaaattgattaagaaaaccatttaa

SEQ ID NO: 408116 - DNA, 2634 bp, Staphylococcus aureus
ttgaaaaaaagaattgattatttgtcgaataagcagaataagtattcgattagacgttttacagtaggtaccacatcagtaatagtaggggcaactatactatttgggataggcaatcatcaagcacaagcttcagaacaatcgaacgatacaacgcaatcttcgaaaaataatgcaagtgcagattccgaaaaaaacaatatgatagaaacacctcaattaaatacaacggctaatgatacatctgatattagtgcaaacacaaacagtgcgaatgtagatagcacaacaaaaccaatgtctacacaaacgagcaataccactacaacagagccagcttcaacaaatgaaacacctcaaccgacggcaattaaaaatcaagcaactgctgcaaaaatgcaagatcaaactgttcctcaagaagcaaattctcaagtagataataaaacaacgaatgatgctaatagcatagcaacaaacagtgagcttaaaaattctcaaacattagatttaccacaatcatcaccacaaacgatttccaatgcgcaaggaactagtaaaccaagtgttagaacgagagctgtacgtagtttagctgttgctgaaccggtagtaaatgctgctgatgctaaaggtacaaatgtaaatgataaagttacggcaagtaatttcaagttaaaaaagactacatttgaccctaatcaaagtggtaacacatttatggcggcaaattttacagtgacagataaagtgaaatcaggggattattttacagcgaagttaccagatagtttaactggtaatggagacgtggattattctaattcaaataatacgatgccaattgcagacattaaaagtacgaatggcgatgttgtagctaaagcaacatatgatatcttgactaagacgtatacatttgtctttacagattatgtaaataataaagaaaatattaacggacaattttcattacctttatttacagaccgagcaaaggcacctaaatcaggaacatatgatgcgaatattaatattgcggatgaaatgtttaataataaaattacttataactatagttcgccaattgcaggaattgataaaccaaatggcgcgaacatttcttctcaaattattggtgtagatacagcttcaggtcaaaacacatacaagcaaacagtatttgttaaccctaagcaacgagttttaggtaatacgtgggtgtatattaaaggctaccaagataaaatcgaagaaagtagcggtaaagtaagtgctacagatacaaaactgagaatttttgaagtgaatgatacatctaaattatcagatagctactatgcagatccaaatgactctaaccttaaagaagtaacagaccaatttaaaaatagaatctattatgagcatccaaatgtagctagtattaaatttggtgatattactaaaacatatgtagtattagtagaagggcattacgacaatacaggtaagaacttaaaaactcaggttattcaagaaaatgttgatcctgtaacaaatagagactacagtattttcggttggaataatgagaatgttgtacgttatggtggtggaagtgctgatggtgattcagcagtaaatccgaaagacccaactccagggccgccggttgacccagaaccaagtccagacccagaaccagaaccaacgccagatccagaaccaagtccagacccagaaccggaaccaagcccagacccggatccggattcggattcagacagtgactcaggctcagacagcgactcaggttcagatagcgactcagaatcagatagcgattcggattcagacagtgattcagattcagacagcgactcagaatcagatagcgattcagaatcagatagcgactcagattcagatagcgattcagattcagatagcgattcagaatcagatagcgattcggattcagacagtgattcagactcagacagcgactcagaatcagatagcgactcagaatcagatagtgagtcagattcagacagtgactcggactcagacagtgattcagactcagatagcgattcagactcagatagcgattcagactcagacagcgattcagattcagacagcgactcagactcagacagcgactcagactcagatagcgactcagactcagacagcgactcagattcagatagcgattcagactcagacagcgactcagactcagacagcgactcagactcagatagcgattcagactcagacagcgactcagattcagatagcgattcggactcagacagcgattcagattcagacagcgactcagactcggatagcgattcggactcagacagcgactcagactcggatagcgactcggattcagatagtgactccgattcaagagttacaccaccaaataatgaacagaaagcaccatcaaatcctaaaggtgaagtaaaccattctaataaggtatcaaaacaacacaaaactgatgctttaccagaaacaggagataagagcgaaaacacaaatgcaactttatttggtgcaatgatggcattattaggatcattactattgtttagaaaacgcaagcaagatcataaagaaaaagcgtaa

SEQ ID NO: 408117 - DNA, 1425 bp, Staphylococcus aureus
atgttatcagttaaaaaagccacaaaatttgcagttgctaaccttattatcgtgtcaacagttttcagttctgtcacacctgcaattgcgcaatccgataaaagttctaaagatgaaagtttcgcggttggtaatactaaaaatccaaaaaatgttatctttttagttggcgatggcatgggtccatcatttaacacagcttatcgttattataaaaatgattcgcatgccaaagaaatgacccctactgcttttgattcatatttaaaaggcacaaatcgtacatattcaaatgacccaaaacagaatattactgattctgcagctggcggaacagcctttagttctggccataagacatataatggtgccatcggtgttgacagtaacaagcagaaagtaaagacagtgcttgaacgtgcaaaagaaaaaggtaagtcgactggtcttgtttcaacagctgaattaacagatgcaacaccagcagcatatgctgcacacgtgacttctagagatgataaaaacgaaatcgctaaacaattttataaagataaaatcaacggaaagcataaagttgatgttttattaggcggcggcgctaaatatttcggtaaaagtaatggcaatttagataaaaaattcaaaaaagatggttacgaccttgccacgaacagtaaggatttatcaaaatctgataaagataaagttcttggtttgtttgcagataaaaatatgccacttgcaatagatgcttctaaagacgaaccatcattagctgatatgcaacaaagtgcacttagtaagcttgagcgtaataaaaaaggtttctttttaatggtcgaaggtgcttctatagataaatcagcgcattccaacgatattacaggcgttatgtctgaaatggaaggttttgaaaaagcattcgatgacgccattcaatatgctaagaaacataaagatacacttgtcgttgcaacagcagatcactctactggtggtctaacaattggtaaagataaaggatacgaatggaatcctcaaccgattaaatcgatgaaacactctggatcatatatgacagaaaaaatggctaaaggtgaagaccctgaaaaagttattaatgaaggttatggctttgaattttcacaagatgatatgaaaaaggttaaaaaagagaataaaaagttgcaaaaattacttaaaaaagaaaaagacgaaaaatctgcagatgtagaaaaacaaacaaaagccttacaacacgcaattcagaagccagtaaatgataaatcttatacagggtggacttccgatggacatacaggcgaggatgttaatacctacgcttacggacctagatcagaatcatttagtggtaatatcgaaaatacagaaagcgcaaaaataatatttgatatattcaagtaa

SEQ ID NO: 408118 - DNA, 666 bp, Staphylococcus aureus
atgaaaatattaattgttgaagatgattttgttatagcagaaagtttagcatctgaacttaaaaaatggaattacggtgttattgtcgttgaacaatttgatgatatactgtctatctttaaccaacatcaacctcagcttgtattgctagatattaatttgccaacgttaaatggttttcattggtgtcaagaaatccgaaaaacatctaatgtgccaattatatttattagttcccgtattgataatatggaccaaattatggcaatacaaatggggggagatgattttatcgaaaagccatttaacttgtcattaacgattgccaaaattcaagcattattgagacgaacttatgacttgtcagtagctaatgattcattgacggttaaaggttgtacattaatattagatgaagcaaaagtcgtgtatcaagaacaaaacatacagctatctttgactgaattacaaatattaaagttattatttcaaaatgaagataaatatgtaagtagaactgctttaattgaaaaatgttgggaatcagaaaacttcatagatgataacacattagctgttaacatgacgcgcctgcgtaaaaaattaaatactattggcgttaatgattttatcattacaaagaaaaatgtcggatataaagtatag

SEQ ID NO: 408119 - DNA, 252 bp, Staphylococcus aureus
atgaggggttataacgaaagatattgtagctggactaatacagctatacaatgtgattattttaataaagtaagacaggtgaaaaaagacggtaaatcggataggttgagcaacaacataaactcgaacattatttatcgtgtgctcgaaaaatgtatcacgctatataatgtatgttcgcggtgtaaacgcgcacttattttatcagaacattctaaaaagaatatattcaatataaaaaaggctgtgtag

SEQ ID NO: 408120 - DNA, 1497 bp, Staphylococcus aureus
atggctaagtctaatagtaaagacatcgttttaattggagccggtgtacttagcacaacatttggttcaatgttaaaagaaattgagccagactggaatatccacgtttacgaacgcttggatcgtcctgcaatcgaaagttcaaacgaaagaaataatgctggtacgggtcatgcagcattatgtgagttgaactacacagttttacaacctgatggttctatcgacatcgaaaaagcgaaagtgattaacgaagagtttgagatttcaaaacaattctggggtcacttagtgaaaagcggtagcatcgagaacccaagagaatttatcaatccattaccacacatcagttatgttagaggtaaaaacaatgttaaattcttaaaagatcgttacgaagcgatgaaagctttccctatgttcgataatatcgaatatactgaagacatcgaagtaatgaaaaaatggattccattgatgatgaaaggccgtgaagataaccctggtatcatggcggcaagtaaaattgacgaaggtacagatgtaaacttcggtgaattaacacgtaaaatggctaaaagcattgaagcacatccaaatgctacagtgcaatttaaccatgaagttgttgattttgaacaattatcaaatggtcaatgggaagttactgttaaaaatcgcctaactggtgagaaattcaaacaagtaactgactatgtattcatcggtgctggcggtggagcgattccattattacaaaaaacaggtatccctgaaagtaaacatttgggtggattccctatcagtggtcaattcttagcttgtacaaacccacaagttattgaacaacacgatgccaaagtttatggtaaagagccacctggtacaccaccaatgactgtacctcatttagatacgcgttacattgatggtcaaagaacattattatttggaccatttgctaatgttggacctaaattcttgaaaaatggttctaacttagatttattcaagtctgttaaaacatacaacattacaactttattagcagcagcagttaaaaacttacctttaattaaatactcatttgatcaagtgattatgacaaaagaaggttgtatgaaccacttacgtactttctatccagaagcacgtaatgaagattggcaattatacactgctggtaaacgtgtacaagttatcaaagatacacctgaacacggtaaaggattcatccaattcggtacagaagtggttaactcacaagaccacactgtaattgcattattaggtgaatcaccaggggcttcaacttcagtttcagttgcgttagaagtattagaacgtaacttccctgaatacaaaactgaatgggcacctaaaatcaagaaaatgattccatcatacggtgaatcattaattgaagacgaaaaattaatgagaaaaatccgtaaacaaacttcaaaagacttagaattaggttactacgaaaactaa

SEQ ID NO: 408121 - DNA, 255 bp, Staphylococcus aureus
atgatgttaaaaatcatcttatatgcatatactcaatctgtattttctggtcgtagaatagagaaattacttcatgacagtattcgaatgatgtggttagctcaagatcaaacaccttcttataaaactattaatcgttttagagtgaatcctaatactgatgcgttaattgaatctttatttattcagttccatagtcaatgtttaaagcaaaatcttattgataataattcaatttttattgatggtacataa

SEQ ID NO: 408122 - DNA, 684 bp, Staphylococcus aureus
atgattcaaaataccttcggttatttaccagagtatattgtagctgatgcaggttatgatagtgagcaaaactatatggctattatagatgattttaataaaacgccacttattacgtatggcatgtttattaaagataaaactagaaagtttaaaagtgacatttttaacactcaaaattggaaatatgacgaacttaatgatgaatttatatgtcctaataacaaaagaataggttttaaaagatatgcataccgtaatgatagatatggttttaaacgtgacttcaagctatatgaatgcgatgactgttcagcatgttctttgaggcaacaatgcatgaaaccaaattcgaaatccaataagaaaatcatgaagaattataattgggaatactttaaagcccaaattaatcaaaagctttctgaaccagaaacgaaaaaaatctatagtcaaagaaaaattgatgtagagcttgtttttggatttatgaaggctattttgggtttcactcgaatgtcagttcgaggaataaataatgttaaacgagagctaggttttgtattaatggcacttaatataaggaaaatagcagctcaacgagctgtacattataaaatacatatcaaaaaagctgatttctatcaaataattaatagaaatcaacttttttacattgcctaa

SEQ ID NO: 408123 - DNA, 501 bp, Staphylococcus aureus
atgaaattatctttagacataaatactgattttgaagttactactcttacagatttaccaaaattaaaaattgtcatggagaacttaaacatgaaaataaacaaaagtgaaatagcgagacacatgggtgtttatagaagaacagttgataaatatttaaatggctttgagccaaccaaaaagagaaatcgtcagtctattattgacaagtattatcctatcatcgaaaaattactttcagactctagtgaacaaaagttctactataagcttattctttggcaatatttgaaagataaacatggattaacctgtgcatattctacatttagagcttatatccttaaacatgatgaatttaatcgttattttatgaaaggttatcaacggttgtcgcctaaaggcaaaacgagattcgagacaaaagccagtcatcaagcacagtttgactggaaagaaggcattaactttaaaacgaaggataatcaaatggtcctttag

SEQ ID NO: 408124 - DNA, 1230 bp, Staphylococcus aureus
atgagtaatacacaaacgaaaaatgtgccagagttgagattcccaggatttgagggcgaatgggaagagaagaagttagggaatcttactaccaaaataggtagtggaaagactcccaaaggtggaagtgaaaactatacaaacaaaggcataccatttttaaggagtcaaaatattagaaatggtaaattaaatcttaatgacttagtttatattagtaaagatatagatgatgagatgaaaaatagtagaacgtactatggtgatgttcttttaaatattacaggagcatcaataggtagaacagccattaattcgatagttgaaacgcatgctaatttaaatcaacatgtatgtattattagattaaaaaaagagtattattataatttttttggacagtatctattatcaagaaaaggtaaaagaaaaattttccttgcacaaagtggaggtagtcgagaaggactaaacttcaaagaaattgctaatttaaaaatcttcaccccaactatatttgaagaacaacaaaaaataggacaattcttcagcaaacttgaccaacaaattgaattagaagaacaaaaacttgaattacttcaacaacagaaaaaatgctatatacagaaaatcttctcacaagaattacgattcaaagatgaagaaggtaattactataaaggatggaacaaaaagcaattaaaagatgtattagaatttagtaataaaagaactattaatgaaaatgaatatcctgttttaacatcgtcaagacaaggtttaatacttcagtcagactactataaagataggaaaacttttgcagagagtaatattgggtatttcatactccctaaaaatcatataacataccgttcaagaagcgacgatggaatttttaagtttaatttaaatctaatgattgatgtaggtattattagtaaatattaccctgtctttaaagggatagatgcaaatcaatattatttaacattacacttaaactatcaactgaaaaaagaatatattaaatatgcaactggtacatcacaattggtactctcacaaaaagacttgcaaaacataaagactaaattgccatcttatgaagaacaacaaaaaatcggtgattttttcagtgaaatagatagattggttgaaaaacaatcttcaaaagtcggacgattaaaagtacgtaaaaaagaactattacaaaaaatgtttgtttaa

SEQ ID NO: 408125 - DNA, 1356 bp, Staphylococcus aureus
atgacaaaacgtaaattgcgcaataactggattattgttaccacgatgattacgtttgtcacgatatttttgttttgtttaattattatttttttcttgaaagatacactgcataatagtgagcttgatgatgcagaacgaagctcaagcgatattaataatttatttcattctaagcctgttaaagatatatctgcattagacttgaatgcatctttaggtaattttcaagagataattatttatgatgagcataataataaattatttgagacatcgaatgataacacagtgagagttgaaccaggttatgaacaccgttattttgaccgcgtaataaaaaaacgctataaaggcattgaatatttaattattaaagaaccaattacaacgcaagatttcaaagggtatagcttgttaattcattcactagaaaattatgataacatcgtaaaatcattgtatatcattgcgctggcatttggagtgattgcaacaattataactgccacaatcagttatgtattttcaacacaaattactaaaccgcttgtcagtttatcaaataaaatgattgagattcgacgagatggttttcaaaataaattgcaattaaatacaaattatgaagaaatagataatttagcaaatacgtttaatgagatgatgagccaaattgaagaatcatttaatcaacaaagacaatttgttgaagatgcgtcacatgaattacgaacaccattacaaattattcaaggtcatttaaatttgattcagcgatggggaaaaaaagacccagcagtattagaagaatcgttaaatatttctattgaagaaatgaatcgtatcataaaattagtcgaagaattacttgaattgactaaaggagatgtaaatgacatttcttctgaagcgcagaccgtgcatattaatgatgaaattcgctcgcgaatacactcattaaaacaattgcatcctgattatcaatttgatacggatctgacatctaaaaatctagaaattaaaatgaaacctcatcaattcgaacaattatttttaatctttattgataatgcaatcaaatatgatgtgaagaataagaaaattaaagttaagacaaggttaaaaaataagcaaaaaataattgaaattacagatcatggaattggtattccagaggaagatcaagatttcatttttgatcgcttttatcgagtggataaatctcgttcaagaagtcaaggcggtaatggactcggattatctattgctcaaaaaatcattcaattaaacggaggatcgattaaaattaaaagtgaaattaataaaggaacaacgtttaaaatcatattttaa

SEQ ID NO: 408126 - DNA, 1266 bp, Staphylococcus aureus; identical to SEQ ID NO: 407297

SEQ ID NO: 408127 - DNA, 213 bp, Staphylococcus aureus
atgaaccagtttaaagaaatttataatacaatagaaaaattactaaatgataaatcaatatctaattatagaattaatcaagacactggtgtttcttatggtggtataagtgaattaagaagcgggaaaagaaaagtgaataatttaactttagaaacagcggaaaaactctataattaccaaaaacaattagaaataatgattgaatattaa

SEQ ID NO: 408128 - DNA, 237 bp, Staphylococcus aureus
atgcttttttcattattcgttgaaaaagaagagtcacaaaagttaacatatttaaaagaacttggtgaagatgacgaatataaatatgttgccaaaatagatagtaaaacatctaaattatgtcattcactcaacggaaaaatatttatagttaaagatatgataccaggtgtgaatgcgccacctatgcatccttggtgtagaagtaccacagtgccacatgttggcaattggtga

SEQ ID NO: 408129 - DNA, 927 bp, Staphylococcus aureus
atgaaaaaattcattggatcagttttagctacgacattaattttagggggatgttccatgatggaaaatgaatcaagtaaagacacgaatacagaaacaaaatcagtaccagaagaaatggaagcttcaaaatatgtaggacaaggcttccaaccacctgcagaaaaagatgcgattgaatttgcgaagaagcatcgtaaagaatttgaaaaagtaggtgaacaattctttaaagataactttggactaaaagttaaagctacaaatgttgtaggtaaagatgatggtgtagaagtttatgtgcattgcgaagatcatggcattgtatttaatgcaagtctacctttgtacaaagatgccatccatcaaaaaggatcaatgcgcagtaatgacaatggtgatgatatgagtatgatggtgggtacagtgctgagtggctttgaatatcgagcgcaaaaagaaaagtatgataacttatataaattcttcaaagaaaatgaaaagaaatatcaatatacaggctttacaaaagaggcaattaacaagacacaaaacgttggatatcaaaatgaatacttttatatcacatatttatcaagaaacttaaaagaatatcgtaaatattacgaaccgttgattcataaaaatgataaagaatttaaagagggtatgcaacgagctagaaaagagttagattatactgctaatagtaatacagtagcaacgttgtttagtacgaatgataaaaaaaatagaaaagaaaagataaataatgtaatagatttatccgagaaaattgaaagaacaaaagatatgccaatcaagaatactataactactcaattaggaaataaacttattggcacaaaaaaagctcgttttgatgataagaaagtagtgtcgtttggagcatttgaagatgaataa

SEQ ID NO: 408130 - DNA, 933 bp, Staphylococcus aureus
atgtttaaaagaacaaaactaatcttaatagcaacgatactactatcaggatgttcaactaccaataacgaatccaacaatgaaacaaaatcagtgccagaagaaatggaagcttcaaaatatgtaggacaaggcttccaaccacctgcagaaaaagatgcgattgaattttcgaagaagcataaagataaaattgctaaacgtggcgaacaattttttatggataacttcggtctaaaagttaaagctacgaatgttgtaggtagtggcgacggcgtagaagtatacgtgcattgtgatgaccacgatatcgtatttaatgcgagtattccatttgacaaatcaattattgacagtgatagctcattaagaagtgaggataaaggcgatgatatgagtactttagttggtacagtgttgagtggttttgaatatcgagcacataaggaagagttggataatttaacagaagttttaaaagaatataaaagtaaatataaatatactggttatactgaaaatgcaattatgaaaacgcagaatagtggttttagaaatgagtattattatttgactgcaattccatatactttagatgaatataaaaggtattttcaacccttaatcaaagaggatgataagtcttttagggacggtatgagaaactcaaaaaaacaacttaaagataaatcacgtccatatgttgttacaactttatttagtactaaagataattttactaaagataatacaatagacgagatgattgatttttctgaagtactaaaaaagaaaaagaatattcctcatgatttgaatgtttctcttcaaatttctaataaatatataaatacaaaaagacctaactatagtaagaaggaagtaatagaagtaggtgtatttaatcatgaaaaagctaacacgaatgattaa

SEQ ID NO: 408131 - DNA, 1119 bp, Staphylococcus aureus
atgttagttgcagtagtcaaagaattaaaacaaggtgaaggacgtgtagcttgcacacccgaaaatgtgcgtaagttaacggatgcaggacataaagtaattgttgaaaaaaatgctggcattggttcaggattttctaacgatatgtatgaaaaagaaggcgctaagatcgtaactcacgaacaagcatgggaagctgatcttgttatcaaagtaaaagaacctcatgaaagcgaatatcaatatttcaaaaagaatcaaattatctggggatttttacatctagcatcttcaaaagaaatagtagaaaaaatgcaagaagttggtgtaactgcgattagtggtgaaaccattataaaaaatggaaaagcagaattattagcgccaatgagtgctatagcaggtcaacgctcagcaattatgggagcttactactctgaagcacaacatggtggtcaaggtactttagtgactggtgtacatgaaaatgtggatatacctggtagtacatatgtgattttcggtggtggcgtagcagcaacaaatgcagcaaatgttgccttgggactaaatgctaaagtaatcattatcgagttaaacgatgaccgcattaaatatcttgaagatatgtatgcagaaaaagatgtcacagtagtcaaatcaacaccagaaaatttagcagaacaaattaagaaagcagatgtatttatttctacaattttaattccaggtgcgaaaccgccaaaattggttactcgtgagatggttaaatcaatgaaaaaaggttcagtattaatcgatatagctattgaccaaggtggaactattgaaacaattagaccaactacaatttctgatccagtgtatgaagaagaaggtgtgattcattatggtgtaccaaatcaaccaggagcagtcccaagaacttcaacaatggcattagcacaaggaaatattgattatatattagaaatttgtgacaaaggcttagaacaagcaattaaagataatgaagccttaagtactggtgtaaacatttaccaaggacaagtgacaaatcaaggattagcttcatcacatgacctagattataaagaaatattaaatgttatcgaatag

SEQ ID NO: 408132 - DNA, 1206 bp, Staphylococcus aureus
atgtggttcgaaaaattcaaaaataaaaacaacgaaactaaatacagatactacgagaaatacaaagatccatacacagataaatggaagcgcgtaagtgttgtcttgaacaaaaatacaaaacaatcacaaaaagaggcaatgtttcgtttagaagaaaagataaaagaaaaactaaacaacaagtcgtcaagcgaattaaaaactttgacttttcacactctattagatgaatggcttgaatatcatataaaaacatcaggttcaaaggtgactactcttaataatatcaaaacgagggtcaaaaatataaaaaagaacagtgctaaagaattacttttaaacaagcttgatacaaaatacatgcaaatgtttattaataagttgtcaagcatctattctacaaatcaattaaggtaccaacttggacacatgaaagaagctattaaatacgcagttaaattctacgattacccaaatgaacatctactaaccggtgtcaaacttccaaagaaaagaaaaacgattgaagatattgaaaaagacgaagctaaaatgtacaactatcttgaattacaacaagtcattcaaatacgcgattttatattgaattataacagtttgcattacagaactcgtattttaattgctggtgctctagaagtacaagctttaacgggaatgcgtataggcgagttattagcacttcaaattaaagatgttgacctaaaaaataaaacaattgatattaacggaactcttcatagaattaaatgtaatactgggtttggatataaagatactacaaaaactacaggttcaaaaagaaacattaccatcaattccagaacagcaaaggttttaaaaaagataatgttagaaaataaaaagatgaaacaatggaaaccaagttatattgatagaggattcttattcacaactagtaaaggaaatcctttacaaattgataaaataaacaaacttttatctttagctgcagaatcattgaatataaataaaaaggtcactacccatactttaagacacacgcatataagtttattggtggaaatgaatgtatcgttaaaagcaattatgaaaagggttgggcataccgatgaaaaaacgaccataaaagtatacacccatgtaacggagaaaatggatagagaattagatcgaaaattagaaaagcttatatactaa

SEQ ID NO: 408133 - DNA, 624 bp, Staphylococcus aureus
ttgcaaattttactattgataattacaactgggataccaggattttatacttactatgctctatccaataagaatttggtgtatttcgatagtgataataagaaagttattctcgctttcttttctgtagtttctgtttttatttttttattaactcttagtctgttttcaggacaaaacaacgtaaatcagctatttcaaaaattaacttttacaaaaacattgtctgcactaatagtaagtatattaataatcatcatattaacagaattcgtgtatacaaaaattatagaaatatacaatatttttagtaatcataaccgtaaaagtaataatttaaaaaaagttgaaacgttacctgtacatctattaaagtatgaagataataaatataaaatgttcataactgtaaaagatttcgaaggtaacataattgaaaaaggattccttgataactattcaagaaaacacaatcgaaatatattacttgatactagatttaatgctaattacgaagacttcaaaacattgtctgaatacaatgattcatatttagattttgaaaacaaagttaaattagaatatctatatatcgataagaaaaaattaattatttcttcttag

SEQ ID NO: 408134 - DNA, 471 bp, Staphylococcus aureus
gtgtttatattgggattatacgaagaactttgcataaataacgaaaaaataaagatagaagaaactgaccagcttccaaatttccaacctggatgctatatgaacggaaaaatttatataaggcgtaatttatcagaaatacgtaaagcagaagtgttatatgaggaacttgcccaccacaagttgacgtatggcaacattttagaccaatcaaaatggattaatagaaaatttgaaaattatgcacgtagacatggttttacttcagctgtaccgctacatgaaattgtagaagctcacaactacggtgttcgtaatttgtacgagttgtcagagtatctgcagttgagtgaatcatacatactagaagctatagaacaatataaaaagatatatggtattggaactcactatggcgagtattctattacgtttgagccgttgagagtttttaaatataaggaaatataa

SEQ ID NO: 408135 - DNA, 261 bp, Staphylococcus aureus
atgactaaaaattataaagacatgactcaagacgaattaagggatttattggctgaaaagaatgcagaattgtttgatttagcgagcgaaatcgatgaagaaactgaatttgacgttttacttttttcaaatgtagggattagcaacggagattttacaccgtcgtcacattgtgtgattgggaatgttgttgatattgctaatttattgaaacgtagagctgtttaccgagatatcgctgatgttatcaaaatgcgttaa

SEQ ID NO: 408136 - DNA, 261 bp, Staphylococcus aureus
atgtattacaaaacgggtgacgtatgtcaaaaaataattaatgtagatggctttgattttcgattaagagttaagaaacgagcgtatagcgtcgaaatagttgttttagatcatgaaggaaattcaattgacgggttactagtttctgatgagaacgatctatacacagctttagatattttaaaacaaacaatttatgaatggattgaattcaacacagatgaacaggacaaattaatcaatttaatcatgaaatggtag

SEQ ID NO: 408137 - DNA, 243 bp, Staphylococcus aureus
atgacagatagtggacgcaaagaatacttgaaccaatttttcggatctaagagttatctgtatcaggataacgagcgagtggcacatactcatgtagtaaacggcaattattactttcatgggcatatcgtaccaggttggcaaggcgtgaaaaagacatttgatacagcggaagagcttgaaacatatataaagcaaagtgatttggaatatgaggaacagaagcaactaactttattttaa

SEQ ID NO: 408138 - DNA, 405 bp, Staphylococcus aureus
atgaaaatcaaagttaaaaaagaaatgagattagatgaattaattaaatgggcgcgagaaaatccggatctatcacaaggaaaaatatttttttcaacaggatttagtgatggattcgttcgttttcatccaaatacaaataagtgttcgacgtcaagttttattccaattgatatccccttcatagttgatattgaaaaagaagtaacggaagagactaagtttgataggttgttagaggtatatgagattcaagaaggagtctataaatccgcattacacaaaggtatcagtttgaacgaacgttttgaagacgacaatatttttcctactaaagcattctatatcttaaacgatgacatgacgatgacattgatttggaaagatggggagttggtagaatga

SEQ ID NO: 408139 - DNA, 309 bp, Staphylococcus aureus
atgacgttcaccttatcagatgaacaatataaaaatctttgtactaactttaacaagttatcagataaacttcacaaagcattaaaagattgtgaagagtacaagaagcaacgagatgagcttattggggatatagcgaagttacgagattgtaacaaagaactggagaagaaagcaagcgcatgggataggtattgcaagagcgttgaaaaagatttaataaacgaattcggtaacgatgatgaaagagttaaattcggaatggaattaaacaataaaatttttatggaggatgacacaaatgaataa

SEQ ID NO: 408140 - DNA, 249 bp, Staphylococcus aureus
atgaataatcgcgaaaaaatcgaacagtccgttattagtgctagtgcgtataacggtaatgacacagagggattactaaaagaggttgaagacgtgtataagaaagcacaagcgtttgatgaaatacttgagggaataacaaatgctatgcaacattcagttaaagaaggtattgaacttgatgaagcagtagggattatggcaggtcaagttgtctataaatatgaggaggagcaggaaaatgactaa

SEQ ID NO: 408141 - DNA, 663 bp, Staphylococcus aureus
atgggtaaagaatatgtagtcatcggtctaggtcgttttggaggtagtatcgttcgtgagttgaatgcattagacatggatgtaatggccatcgaccatgatgaaaatagagtgaatgaatatagtgatatcgctactcatgcggttgttgcagacacaacagatgaagcagttatgaaaagtttaggtatccgtaactttgatcatgtcattgtggcaattggtgaaaatattcaatcaagtacgttgacgactttaattttaaaagagttaggtgtaaaaaaagtaactgctaaagcacaaaatgattatcatgcaaagattttaaataaaattggagcagatacggttgtgcaccctgagcgtgatatgggtagacgtattgcgcataatgttgcgagtgcaagtgtacttgattatcttgagttggcagacgagcattctattgtagaattgaaagcaactgaaaagatggcggggcagtctatcattgatttagatataagagcacaatatggaattaacattattgcaattaaacgaggcaaagagttcatcatttcaccaaatccaaatattaatttagaaataggtgatattttaatcatgattggacatgataatgatttaaatcgctttgaaaaaaatattgcgacgagataa

SEQ ID NO: 408142 - DNA, 177 bp, Staphylococcus aureus; identical to SEQ ID NO: 405358

SEQ ID NO: 408143 - DNA, 570 bp, Staphylococcus aureus
atgtattctcaaaatatttatgtgatacgcaaaggagacatggttattcgaccagcatttgatgatgacgatcaaagaaacggtagtgaaataattcggtttgacaaaacgcgtattcaaaatccttttaaagtccagaaaatcattgaacgctcttgcaaattttatggtaatacttatcttggcaagaaagcagagacaaaccgcattactggcatttctagtaaaccacctattttactaacaccattatttccaacttattttttcccaacacattctgacagacaaaatgaaaatatttggttaaatatgcattatatcgaaagtattaaagaattaaaaaatcgtaaatgtaaagtgacatttattaataatgaatctatcattcttcatgtttcataccacagtttatggcatcaatataacaattccattttttactattacatggtagataaacaatctcgcatgatatcaaaaaatcccgaccaaccaatagattataataaagccacattgaatgtgtttgaagcattgacacgctattctttatttgaagataaataa

SEQ ID NO: 408144 - DNA, 1515 bp, Staphylococcus aureus
atgatggaaaaaaatgaaaacattaatgtagagattttaactacgtcagatatgcatagtcatttcttaaatggtgattatggttcaaatatttatagagctggtacttatgttaaccaaataagagcacaaaatcatcgcgtcattttattagatagtggcggaagtttagctggctcgttagcggcctattattatgctattgttgcaccttataaacgacatccaatgataaagttaatgaacagaatgcattatgatgctagcggtgtgagtccaagtgaattcaagtttggtttatcatttttaactcgttcaattgctttggcacgttttccatggttatcagcaaatattgaatacaatgttactaaggagccttatttttcaactccatattgtattaaacattttggtgacttaaaaattgctatcgtaggcgtcacagcagatggtttaatggaaaatgagtattctgaaatggagcaagatgtatctattgaaaagacattagtggcatcaaaacgttggattagatatatccatgaagttgaagagccagattttttgattgtaatttatcatggtggattgaataaaattagtaatagtacgaaaaataaaaaggcaagttcgaatgaagctgaaaaattaatggaagaactcggtgttatagatttaatgattacagctcatcagcatcaaacaatagtaggtcaagatcatgaaacgtattatgttcaggctggtcaggatgccaaagagcttgtacatctttcgattaattttaaaaagagaacaacaacttatgatgttgaaagcattgattctaaagtgattgacttaaatgagtatgaagaggatcaagaattattagatttaacattctatgatagaaaagcagtggcttattggtcacaggaaatcataagtgataaaggtttgatgttatcagtgaatgggttacaagatttagtctgtcaaacacatccattttcgcaattattacatgatgcaattcagcttgcatttgataatgatataacatgtgtccacgtgcctatgaacggagagaaggggttgagtggacagattcgaaatgaagatttgtatcatgcatacccatatccagataagccaatggatatgacaattagtggtcaaaatatcaaagatatattggagtatagttattcacatttagattttgttaacgagcaattaagcttaacaattattgatgaaacgttatgtacaatgtggcaaggattcaattatgagattgatatgaatcaagaacctgggcaacgagtaatgttagatcaaattgatttgactaagagttatagagttacaatgactgactattgttatcgtaactacaagaattatttaaaaaatgctattatacatgaatcgtacgatgaaacaatgagtacattaattgcagagaagttaagagatccgaattatcgtatttcatgtagtgataattttgtagttaaaaacaggtaa

SEQ ID NO: 408145 - DNA, 1218 bp, Staphylococcus aureus
atgagtaatttagagaaatctgtagctataaatttagaaaacacagcgcattatgaaaatatttcaaatctagatataacttttagaacaggagagagtgattcttctgttcttctttttaatatcactaaaaataatcaaccgttattcctgagtgaagaaaatatcaaagcacgaatagcgattcgaggtaaaggagttatggtggttgctccactagaaatattagatccatttaaaggcgtattaaaatttcaattacctaacgatgtaattaaacgagatggaagttatcaagctcaagtttcggttgcagaattagggaattcagacgtggtagttgtcgagagaactatcacatttaacgttgaaaaaagcttgtttagcatgattccatctgaaacaaaattacactatattgttgaatttcaggaattagaaaaaactattatggatcgtgcgaaagcaatggacgaggctataaaaaatggtgaagattatgcgagtctgattgaaaaagctaaagaaaaagggctatcagatattcaaatagcaaaatcgtcaagtatagatgaattaaagcaacttgcaaatagccgtataaccgatttggaaaataaagcgcaaacttattcaagagcattcgatgagcaaaagcgttatatggatgataaacatgaagcttttaagcaatctgtgaatagtggtggtttagtcacaagtggttcaacttcaaattggcaaaaagctaagattactaaagatgatggtaagataatgcagattactggatttgattttaataatccagaacaaagaataggcgattcgactcaatttatttatgtttcgcaagctataaattatccaagaggcgcaagcactaatggtactgtcgaatatttagtagtaacttccgactacaaacgtatgacatatcgtccaaatggtacaaataaagtatttgttaagagaaaagaaatgggttcgtggtctgattggtcagaattagcgcttaatgattacaacacaccttttgaaactgttcaaaacgcgcaatcaaaggctaacacggctgaaagcaatgccaaactatacacagatgacaagtttaataaaagatattcagttatttttgatgggacggcaaatggcgttggctcaacattatatcttaatgaaagtttagatcaatttattttgttaattttttattaa

SEQ ID NO: 408146 - DNA, 3156 bp, Staphylococcus aureus
ttgaaagaaaaagctttgagtgatggtcagatttcagaaaatgaaagaaaagaaattgaaaagcttgaaaatcaaagacgtgatatcactgttaaagaattgagtaagactgaaaaagagcaagagcgtattttagtaagaatgcaaagaaacagaaatgcttattcaatagacgaagcgagcaaagcaattaaagaagcagaaaaagcaagaaaagcaagaaaaaaagaagtggacaagcaatatgaagatgatgtcattgctataaaaaataacgtcaacctttctaagtctgaaaaagataaattgttagctattgctgatcaaagacataaagatgaagtaagaaaagcaaaatctaaaaaagatgctgtagtagatgttgttaaaaagcaaaataaagatattgataaagaaatggatttatccagtggacgtgtatataaaaatactgaaaagtggtggaatggccttaaaagttggtggtctaactttagagaagaccaaaagaaaaaaagcgataaatacgctaaagaacaagaagaaacagctcgtagaaacagagaaaatataaagaaatggtttggaaatgcttgggacggcgtaaaaagtaaaactggcgaagcctttagtaaaatgggcagaaatgctaatcattttggcggcgaaatgaaaaaaatgtggagcggaatcaaagggattccaagcaaattaagttcaggttggagctcagccaaaagttctgtaggataccacactaaggctatagctaatagtactggtaaatggtttggaaaagcttggcaatctgttaaatcgacaacaggaagtatttacaatcaaactaagcaaaagtattcagatgcttcagataaagcttgggcgcattcaaaatctatttggagaggcacatcaaaatggtttagcaatgcatataaaagtgcaaagggctggctaacggatatggctaataaatctcgcgcgaaatgggataatatttctagtacagcttggtcgaatgcaaaatccgtttggaaaggaacatcgaaatggtttagtaactcatacaaatctttaaaaggttggactggggatatgtattcaagagcccacgatcgttttgatgcaatttcaagttcggcatggtctaacgctaaatcagtatttaatggttttagaaaatggctatccaaaacatatgattggattagagatattggtaaagacatgggaagagctgcggctgatttaggtaaaaatgttgctaataaagctattggcggtttgaatagcatgattggcggtattaataaaatatctaaagccattactgataaaaatctcatcaagccaatacctacattgtctactggtactttagcaggaaagggtgtagctaccgataattcgggagcattaacgcaaccgacatttgctgtattaaatgatagaggttctggaaacgccccaggtggtggagttcaagaagtaattcacagggctgacggaacattccatgcaccccaaggacgagatgtggttgttccactaggagttggggatagcgtaataaatgctaatgacactctgaagttacagcgtatgggtgttttaccaaagtttcatggaggtacgaaaaagaaagattggctagaccaacttaaaggtaatataggtaaaaaagcaggagaatttggagctacagctaaaaacacagcgcataatatcaaaaaaggtgcagaagaaatggttgaagcagcaggcgataaaatcaaagatggtgcatcttggttaggcgataaaatcggcgatgtgtgggattacgtacaacatccagggaaactagtaaataaagtaatgtcaggtttaaatattaattttggaggcggagctaacgctacagtaaaaattgctaaaggcgcatactcattgctcaaaaagaaattagtagacaaagtaaaatcgtggtttgaagattttggtggcggaggcgatggaagctatctatttgaccatccaatttggcaaaggtttgggagttacacaggtggacttaactttaatggcggtcgtcactatggtatcgactttggtatgcctacaggaacgaacatttatgctgttaaaggcggtatagctgataaagtatggactgattacggtggcggtaattctatacaaattaagaccggtgctaacgaatggaactggtatatgcatttatctaagcaattagcaagacaaggccaacgtattaaagctggtcaactgatagggaaatcaggtgctacaggtaatttcgttagaggagcacacttacatttccaattgatgcaagggtcgcatccagggaatgatacagctaaagatccagaaaaatggttgaagtcacttaaaggtagtggcgttcgaagtggttcaggtgttaataaggctgcatctgcttgggcaggcgatatacgtcgtgcagcaaaacgaatgggtgttaatgttacttcgggtgacgtaggaaatatcattagcttgattcaacacgaatcaggaggaaatgcaggtataactcaatctagttcgcttagagacatcaacgttttacagggcaatccagcaaaaggattgcttcaatatatcccacaaacatttagacattatgctgttagaggtcacaacaatatatatagtggttacgatcagttattagcgttctttaacaacagatattggcgctcacagtttaacccaagaggtggttggtctccaagtggtccaagaagatatgcgaatggtggtttgattacaaagcatcaacttgctgaagtgggtgaaggagataaacaggagatggttatccctttaactagacgtaaacgagcaattcaattaactgaacaggttatgcgcatcatcggtatggatggcaagccaaataacatcactgtaaataatgatacttctacagttgaaaaattgttaaaacaaattgttatgttaagtgataaaggaaataaattaacagatgcattgattcaaactgtttcttctcaggataataacttaggttctaatgatgcaattagaggtttagaaaaaatattgtcaaaacaaagtgggcatagagcaaatgcaaataattatatgggaggtttgactaattaa

SEQ ID NO: 408147 - DNA, 3048 bp, Staphylococcus aureus
atgaatgaaaaagtagaaggcatgaccttggagctgaaattagaccatttaggtgtccaagaaggcatgaaaggtttaaagcgacaattaggtgttgttaatagtgaaatgaaagctaatctgtcagcatttgataagtctgaaaaatcaatggaaaaatatcaggcgagaattaaggggttaaatgataggcttaaagttcaaaaaaagatgtattctcaagtagaagatgagcttaaacaagttaacgctaattaccaaaaagctaaatccagtgtaaaagatgttgagaaagcatatttaaagttagtagaagccaataaaaaagaaaaattagctcttgataaatctaaagaagccttaaaatcatcgaatacagaacttaaaaaagctgaaaatcaatataaacgtacaaatcaacgtaaacaagatgcgtatcaaaaacttaaacagttgagagatgcagaacaaaagcttaagaatagtaaccaagctactactgcacaactaaaaagagcaagtgacgcagtacagaagcagtccgctaagcataaagcacttgttgaacaatataaacaagaaggcaatcaagttcaaaaactaaaagtgcaaaatgacaatctttcaaaatcaaatgataaaattgaaagttcttacgctaaaactaatactaaattaaagcaaacagaaaaagaatttaatgatttaaacaatactattaagaatcatagcgctaatgtcgcaaaagctgaaacagctgttaataaagaaaaagctgctttaaataatttggagcgttcaatagataaagcttcatccgaaatgaagacttttaacaaagaacaaatgatagctcaaagtcatttcggtaaacttgcaagtcaagcggatgtcatgtcaaagaaatttagttctattggagacaaaatgacttccctgggacgtacaatgacgatgggcgtatctacaccaattactttagggttaggtgcagcattaaaaacaagtgcagactttgaaggccaaatgtctcgagttggagcgattgcgcaagcaagcagtaaagacttgaaaagcatgtctaatcaagcagttgacttaggagctaaaaccagtaaaagtgctaacgaagttgctaaaggtatggaagaattggcagctttaggatttaatgccaaacaaacaatggaggctatgccaggtgttatcagtgcagcagaagcaagtggtgcagaaatggctacaactgcaactgtaatggcttcagcgattaactctttcggtttaaaagcatctgatgcaaatcatgttgctgatttacttgcgagatcagcaaatgatagtgctgcagatattcagtacatgggagatgcattgaagtatgctggtactcctgcaaaagcattaggagtttcaatagaggacacttccgcagcaattgaagttttatctaactcaggtttagagggttctcaagcaggtactgccctaagagcttcatttatcaggctagctaatccaagtaaaaatacagctaaggaaatgaaaaaattaggtattcatttgtctgatgctaaaggtcaatttgttggcatgggtgaattgattagacagttccaagataatatgaaaggcatgacgagagaacaaaaactagctacagtggctacaatagttggtactgaagcagcaagtggatttttagccttgattgaagcgggaccagataaaattaatagctatagtaaatccttaaagaattccaatggcgaaagtaaaaaagcagcagatttgatgaaagataatctcaaaggcgctctggaacaattaggtggcgcttttgaatcattagcaatcgaagtcggtaaagatttaacgcctatgattagagcaggagcggaaggtttaacaaaattagttgatggatttacacatctccctggttgggttagaaaagcttcagtaggattagcactttttggtgcagcaattggacctgcagttcttgctggagggttattaatacgtacagttggaagtgctgctaaaggatatgcgtcattaaatagacgtattgctgaaaatacaatcctttcaaatactaattcaaaagcaatgaaatctttaggtcttcaaacattatttcttggttctacaacaggaaaaacgtcaaaaggctttaaagggttagccggagctatgatgtttaatttaaaacctataaatgttttgaaaaattctgcaaagctagcaattttaccgttcaaacttttgaaaaacggtttaggattagctgcaaaatctttatttgcagtaagtggaggcgcaagatttgcgggtgtagccttaaggtttttaacaggacctataggttctacaataactgctattacaattgcgtataaagtttttaaaaccgcatatgatcgtgtggaatggttcagaaacggtattaacggtttaggagaaactataaagttttttggtggtaaaattattggcggcgctgttagaaagctaggagagtttaaaaactatcttggaagtatcggcaaaagcttcaaagaaaagttttcaaaagatatgaaagatggttataaatcattaagcgacgatgaccttctcaaagtaggagtcaacaagtttaaaggatttatgcaaaccatgggcacagcttctaaaaaagcgtctgatactgtaaaagtgttagggaaaggtgtttcaaaagaaacagaaaaagctttagaaaaatatgtgcattattctgaagaaaatagcagaatcatggaaaaagtacgtttaaactcgggtcagatatcagaagacaaagcaaaaaaacttttgaaaattgaaacggatttatctaataaccttatagctgaaatagaaaaaagaaataaaaaggaactcgaaaaaactcaagaacttattgataagtatagtgcattcgatgaacaagaaaagcaaaacattttaactcgaactaaagaaaaaatgacttgcgaattaaaaaagagcaagaactcaatcagaaaatcaaagaattga

SEQ ID NO: 408148 - DNA, 321 bp, Staphylococcus aureus
atgacgaaacaaaacaacacctataagcatggacgtaagtcttaccgatatgattggttctatcattctaaagcatggaaaaagctaagagaaatagcactagatagggataacaacctatgccaaatgtgcttgcgtgaagggaaaattacagatgcaaacatagtgcatcacattgtgtatgtaacagaagacttcagtaaagctttagatttagaaaatttgatgtcagtttgctatacctgtcataaccaaattcatgcaaatgataaaaacaaagataaatataaaaataaaaagtttcgagttgaaaagatttaa

SEQ ID NO: 408149 - DNA, 207 bp, Staphylococcus aureus
ttgaaaactttacgcgaaatcatttatgataaatacgaaaatgaaaacttgagaactttaattttattgcactcaggaaaagcctttcccgtaactaatataatctcagaaaattcaaccttcttaattatcaagacttcaaagacaatttcacataaattagttttaatttacaaaaacgaaataaaaaatatccgcttcttttaa

SEQ ID NO: 408150 - DNA, 525 bp, Staphylococcus aureus
atgaaagaacgactaaaagcatttttatattttttaatgtccatattccttttcccttttacgtttttgtatttgttagcttaccatcactttgaagacaagcaacattttttaacaacatgtatagagtatatagaacttgtttatatattatttatgcatagcattttaggcaaaaaagtaaatgaaccttttaacatcgacgaaatagatttttggttgaggtttggtttcaagctaaaaagatatacaggtttaagtaaagagggaataaagttgttacgtcaagaaatcccagttttacgctacgataaaccagaagtaacaagagactatatagaatacattgatattaattatacggcagacacgtattattgcttttataaagacgggacgtttaggttctatgatgattataccgaccaaaaactaaaaggaaatattgattcagaatttttcaaaaaactagaatcatggaacctcctagtacaaaaaggaaagagaataagtgatgatatttaa

SEQ ID NO: 408151 - DNA, 195 bp, Staphylococcus aureus
gtgacacaatacttagttacaacattcaaagattcaacaggactaccacatgaacatattactgtggctagagataatcagacgtttacagttgttgaggcagagagtaaagaagaagcgaaagagaagtacgaggaacaagttaaaagggatgcagttattaaattaagtagatataggagagggataaactaa

SEQ ID NO: 408152 - DNA, 174 bp, Staphylococcus aureus
gtgagagaacgcactaaaattatatatcgtggttggaataaggagatatttattttacagggtaaaaatatgaatgttattggtttgcgccaaatatttgatgaactcaaaagatcgtatgaaggttataaaatcgttgttattccaatagaagttgattttgaaatcaaataa

SEQ ID NO: 408153 - DNA, 645 bp, Staphylococcus aureus; identical to SEQ ID NO: 406109

SEQ ID NO: 408154 - DNA, 549 bp, Staphylococcus aureus
atgatcgatataataagcacttggattagtttattttttccttttattaattggttcatccccaaaagatacgtcaaaattagtagagaagagtttgaaaatttaaatattgttaaacctgctaaaaagaatgttttttggccagttgctagtatctctactttattcgcagttacattaagaaagtatacgcttttacttgacactcaacttgataaaaaattagttattgccatatgttgcaccacatttatagggattttaatattttatgtacgcctaattaaaaaatcatctttaaatatttataatactaaaaataaaaggtcgaaaatcatcttaataccaacactaaaaaatttttgtttcacattgttcggatatgtttttttaattttttggacagtgattttctcatatgctctattatcaatgagttatcaaaacataatagtatattttgcttggattacagcaataataggtttttttctagtgaatatagctttaattatagataaaaacattcatgtcatacttaaaaattaa

SEQ ID NO: 408155 - DNA, 633 bp, Staphylococcus aureus
ttgctttgcgaatctaaagttattaataaaaatcctaaatatcgaataatcaaatacgaaagtgaatacttaatgattgatttagcaagtaattggattgttttcttctttccatttattaactggctcataccgaaaacatatgtcaaaatcactaagaatgattatgaaaaattaaatattgtcaaaccagttaaaaataaatcgataggatggactatattcgcgggtattgtgttacttggtggtactgtaagaagaaatacttatttatttgattttcaattagaaaaactaattgtttggagcagctgttttattggttttttaggggttatatttttttattgttatctaaataagaaattaacattaaatgtttataaggaaaataaaaataatgaacttaaattaagattattaccctcctttaaaaatatgtgtttcacaattttttattacctctttactggtttcatgtcttatggggcattttacttgttggtgtttgaaaatgtacaaaatttaatcttatatatttcttggcttttcatgactatgctatttatgttaatgaatatgcactcaattatagataaaaaagtacatatatttttaaagtctaataaatag

SEQ ID NO: 408156 - DNA, 684 bp, Staphylococcus aureus
atggaatggatattatttgataaagatggtacgttaattgaatttgatagaagttgggaaaaaataggggtacgatttgtacaatcattgcttgagactttcccagtacataataaagaagctgctttaagacaactcggtgtcattaaagaatctattgatccaaaatcagtgatgggttcaggatctttacaacaaattatccaggcatttaatgatgtgacgggacaagatacaaccgactggtccaagtcaacaagtcaaaagctggtagatgaacgtattcctgaaattaattgggtagaaggtgttaaagaagcacttatcgatttgaaagcaaaaggctatcaacttggtattgttacgagtgatactaaaaaaggtgtagaacaatttttagcacataccaatgctatctcgttgttcgatttgatcatttctaccgaagcggatgcctatgagaagccaaatcctaaagtattatcgcctttatttgagcaatataatgtagatcctcagaaagtagctatagtaggagacactgctaatgatatgaagacagcaagtaatgcaaatttaggtatggcaataggtgtattaacaggtattgcaacaaaagaagaattacatgaagctgatattattttaaatagtgcggcagatattttagaagctttaaattaa

SEQ ID NO: 408157 - DNA, 1638 bp, Staphylococcus aureus
atgtcgtatagcattggaattgattatggaactgcttcaggccgtgtgtttttaattaatacaactaacggtcaagtagtatcaaaatttgtgaaaccatatacacatggtgtcattgaaagtgaattaaatggtttgaaaataccacatacatatgcacttcaaaatagtaatgattatttagaaattatggaagaaggaatatcatatatagtacgtgaatcaaaaatagatccagtcaatatagtaggtattggtatagactttacttcatctactattatttttactgacgaaaaccttaacccggtacataatttaaaacaatttaaaaacaatccacatgcgtatgtgaaactttggaaacatcatggtgcatataaagaagcagagaaattatatcaaactgctattgaaaataataataagtggttaggccattatggatataatgttagtagtgaatggatgattcccaaaataatggaagtcatgaatcgagcaccagaaattatggaaaaaacggcttatattatggaagcgggcgattggattgtaaataaattaactaataaaaatgtacgctcgaattgtggattaggtttcaaagcattttgggaagaagaaacagggtttcattatgatttatttgataaaatagaccccaaattatcaaaagtaattcaagataaagtatctgcaccggttgttaatattggtgaagtagtagggaaactggacgataaaatggcacagaaattaggattatcaaaagagactatggtaagtccttttattattgatgcccatgctagtttattaggtattgggtctgaaaaagataaagaaatgactatggtgatgggaacaagcatatgccatcttatgttaaatgaaaagcaacatcaagtgccaggtatatcaggttctgtaaaaggagcaattattccagaattatttgcttatgaagcggggcaatcagcagtaggtgatttgtttgagtatgtcgctaagcaagcaccaaagtcatatgtagatgaagcagcaaatagaaatatgactgtatttgaattaatgaatgaaaagataaaacatcaaatgccaggtgaaagtgggctcattgctcttgattggcataatggaaatcgaagtgtattaagtgatagcaatttaacaggttgtatctttggattaactttacaaactaagcatgaggatatttatagagcatatttagaagctacagcatttggtactaagatgattatgcaacagtatcaagattggcatatggaagtagaaaaggtatttgcatgtggcggtatacctaaaaagaatgctgttatgatggatatctatgcgaatgtactgaataaaaaactaattgttatggatagtgagtatgcaccagcaataggcgcagcaatattaggtgcagtcagtggtggcgcacataattcaattaatgatgcagttgatgctatgaaagagccaattttatacgaaattaatccagaagcggaaaaagtacaaaggtatgaaacattatttaaagcttataaggctttacatgatatccatggttataaaaaagctaatataatgaaagatatccagagtttaagagttgagggataa

SEQ ID NO: 408158 - DNA, 879 bp, Staphylococcus aureus
atgtcacaagatgtaaatgaattaagtaagcaaccaacgccagataaagcagaagataacgcatttttcccatcaccatattcccttagtcaatatacagcacctaaaacagattttgatggtgttgaacacaaaggtgcctataaagatggtaaatggaaagtattgatgattgctgctgaagagagatatgtattattggaaaatggaaaaatgttctctacgggtaatcatcctgttgaaatgttattacctttacatcatttaatggaagcaggttttgacgttgatgttgcgacattatctggttatccagttaaattagaattatgggctatgccaactgaagacgaggcagttataagtacttataataaattgaaagaaaaattaaaacagccaaaaaaattagcagatgtgattaaaaatgaattaggacctgattcagactatttatctgtctttatcccaggcggacatgctgcagttgttggtatttctgaaagtgaggacgttcaacaaacattagattgggcattagacaatgaccgctttatagttacattatgtcatggaccagcagcactactttcagcagggcttaacagagaaaaatctccattagaaggatactctgtttgtgtcttccctgactcattagatgaaggtgcaaatattgaaataggttatttacctggacgcttgaaatggttagttgctgatttattaactaaacaaggattaaaagtagttaacgacgatatgacaggaagaacgttaaaagatcgtaaattattaacaggtgacagtcctttagcttcaaatgagttaggaaaattagcagttaatgaaatgttaaatgcaatacaaaataaataa

SEQ ID NO: 408159 - DNA, 1188 bp, Staphylococcus aureus
gtggttcaatcattacatgagtttttagaggaaaatataaattatctaaaagaaaatggtttgtataatgaaatagatacaattgaaggtgcaaacggaccagaaatcaaaatcaatgggaaatcatacattaacttatcttcaaataattatttaggactagcaacaaatgaagatttgaaatcagctgcaaaagcagctattgatacacatggtgtaggtgcaggcgctgttcgtacaatcaatggtacattagatttacacgacgaattagaagaaacactagcaaaatttaaaggaacagaagctgcaatagcttatcagtcaggatttaattgtaatatggctgctatttcagctgtcatgaataaaaatgatgctattttatcagatgagcttaatcatgcatcaattattgatggatgtcgcttatctaaagctaaaattattcgagttaaccattcagacatggatgatttacgtgcgaaagcaaaagaagcagttgaatcaggtcaatacaataaagtgatgtatatcactgatggcgtttttagtatggatggtgatgtggctaaattacctgaaattgtagaaattgcagaagaatttggtttattaacttatgttgacgacgctcatggttcaggtgttatgggtaaaggcgctggtacggttaaacattttggtttacaagataaaatcgatttccaaataggtacgctttctaaagcaattggtgtcgttggcggctatgtagcaggtacaaaagagttaatagattggttaaaagcacaatcacgaccattcttattctctacatcattagcacctggggataccaaagcaataactgaagcagttaaaaagttaatggattcaactgaattacatgataaattatgggacaatgcacaatatttaaaaaatggattgtcaaaattaggatatgatacaggtgagtcagaaactccaattacaccagtaattattggtgatgaaaaaacaactcaagaatttagtaagcgtttaaaagacgaaggtgtctatgtgaaatctatcgttttcccaacagtaccaagaggtacaggacgtgtaagaaatatgcctacagctgcacatacaaaagacatgttagatgaagcaattgcggcttatgaaaaagtaggaaaagaaatgaagttgatttaa

SEQ ID NO: 408160 - DNA, 951 bp, Staphylococcus aureus
atgaaaaatatatctgatattgccaaattggcaggcgtttcaaaaagcacagtatctagatttttaaataatggatctgtcagtaaaaaaacaagtgaaaaattaacaagaattatagcagaacatgactatcaaccgaatcaatttgctcaaagtttaagagcgagacaaacacaccttattggtgccattatacctagaatgaattcatatgcagtagatgaaacaatcaaaggattggcaaaacaatgccaaaaatatgaatcacaattaattttaaattacacaggtttaaatatcgaagcagaaatacaagcgcttgaaacattagcacgcagtaaagtagatggtattgttttaatggctacagacataacagagagacatattgaagtcattaataaaatgaatgtaccaatcgttattgttggtcaacaacatgaacaacttcatagtattgtgcatgatgattataaagcaggtcaaattataggcgaatggattggtcaacagggatatcaacaagttgaagtgtttagtgtaagtgaaaaagatattgcagttggtatacatagaaaacgtggtttacttgaccagttagctaaataccaaattaaacctaatatacatgaaacaaattttacttatgtggaagcacaaaaagatgttgcaaatgttttggaaaatgtggagcaagtagatgcggttgttggagcaactgatacgattgcattagctgcctataaatattattctgataaaaatgatgttatgaaaccacatcaaatatatggttttggtggtgacccaatgacacaattagtgtctccatcgataaaaacaattcattataattattttgaagctggccaatgcgcgatggaagagatacaacagatgcttaaaaagcaagatatgccatatagcgtcacagtagatgttaatatttag

SEQ ID NO: 408161 - DNA, 144 bp, Staphylococcus aureus
atgaatacacttgttaatatgttttttgattttataattaaattagctaaagcaatcggaattgtcggtggcgtaaacgcttgcagcagtttatttgatgaacctaaagtacccgctgaattaacgaatttatacgacaaatag

SEQ ID NO: 408162 - DNA, 618 bp, Staphylococcus aureus
atgataaaagattgtactaaatcgtataataacagtgaggagagtggtgtaaaattgaattattttgataacaaaattgaccagtttgccacgtatcttcaaaagagaaataacttagatcatattcaatttttgcaagtacgtttagggatgcaaattatagttggtaatttttttaaaatacttgtaacatatagtatttctatattcttaagtgtatttttgtttaccttagttacacacttatcctatatgttaatacgctataatgcacatggtgctcatgcaaagtcttcgatactttgttacatacaaagtattttaacatttgtatttgtaccttattttctaattaatatagacattaattttacttatttactggccttatctattataggattgatttccgttgttatttatgcacctgcagcaacgaaaaagcaacctataccaataaaattagtaaaacgtaaaaagtatttatctataattatgtatttattagttttgattctatccttaataatacatccattttatgctcaatttatgttattaggaattttagtggaatctattacattattacctatttttttccctaaggaggattaa

SEQ ID NO: 408163 - DNA, 1260 bp, Staphylococcus aureus
atgtcatatcattggtttaagaaaatgttactttcaacaagtattttaattttaagtagtagtagtttagggcttgcaacgcacacagttgaagcaaaggataacttaaatggagaaaaaccaactactaatttgaatcataatataacttcaccatcagtaaatagtgaaatgaataataatgagactgggacacctcacgaatcaaatcaaacgggtaatgaaggaacaggttcgaatagtcgtgatgctaatcctgattcgaataatgtgaagccagactcaaacaaccaaaacccaagtacagattcaaaacaagacccaaataaccaaaacccaagtccgaatccaaaaccagatccagataacccgaaaccaaaaccggatccaaaaccagacccagataaaccaaagccaaatctggatccaaaaccagatccagataacccgaaaccaaaaccagatccaaaaccagacccagataaaccaaagccaaatccggatccaaaaccagatccagataaaccaaagccaaatccgaatccaaaaccagaccctaataagccaaatcctaacccgtcaccagatcccgatcaacctggggattcaaatcattctggtggctcgaaaaatgggggaacatggaacccaaatgcttcagatggatctaatcaaggtcaatggcaaccaaatgggaatcaaggaaactcacaaaatcctactggtaatgattttgtatcccaacgatttttagccttggcaaatggggcttacaagtataatccgtatattttaaatcaaattaataagttgggcaaagattatggagaagttactgatgaagacatttataatattattcgaaaacaaaatttcagcggaaatgcatatttaaatggattacaacagcaatcgaattactttagattccaatatttcaatccattgaaatcagaaaggtactatcgtaatttagatgaacaagtactcgcattaattactggtgaaattggatcaatgccagatttgaaaaagcctgaagataagccggattcaaaacaacgctcatttgaaccgcatgaaaaagacgattttacagtagttaaaaaacaagaagataataagaaaagtgcgtcaactgcatatagtaaaagttggctagcaattgtatgttctatgatggtggtattttcaatcatgctattcttatttgtaaagcgaaataaaaagaaaaataaaaacgaatcacagcgacgataa

SEQ ID NO: 408164 - DNA, 243 bp, Staphylococcus aureus
atggaaaactttaattataataacataaaaaaacttgttcttgaaaatgttgatatagataaagtaaaagaagtatacaaagattatgaattacttaattatacaataaaaaaccaaacactttacatgaacgattatgaagttgctaaagtttctgaaaaacatctaaacgaaaatattaataatctaagaggcacggttaatctagacgaaaaatgtattttgtcactaacctatctataa

SEQ ID NO: 408165 - DNA, 984 bp, Staphylococcus aureus
atgaaaaaagtaagtgttataatgccaacattcaataacggcgaaaaattacatagaaccattagttctgtattaaatcaaacaatgaagagtactgattacgaattaattattattgatgatcattcaaatgacaatggtgagactttgaatgttataaaaaaatataaaggattagttcgttttaaacaattaaaaaagaatagtggaaatgctagcgtacctagaaatacaggcttaaaaatgagcaaagctgaatatgtattctttttagattctgatgatttacttcacgaaagagcactagaagatttatataattacggcaaagaaaataatagcgatttaataattggaaaatatggagttgaaggtaaaggaagaagtgttcctaaagctatatttgagaaaggaaatgtagcgaaagctgatattattgataatagtattttttatgctttatcagtactaaaaatgtttaaaaaaagtgttatagataaaaacaagataaaattcaaaacattctctaaaactgctgaagaccaattatttactatagaatttttgatgaattcgaaaaattactcgataaaaaccgactatgaatactatattgtagtcaacgatttcgagtctagcaatcatttgtcagtaaataaaagtacaggaaatcaatattttgctactataaacgaaatttataaagctatttataaaagtccaatttataaaaaccaagaaaaaagacaccaacttgccgggaagtatacaactagacttttaagacacggtcagaaaaagaattttgcaaatagtaaaatgaaatatgaagataaaatcgaatggttaaacaacttttctaaaacaattaataaagtacctagagactcagataaatatgtcacacaaatattcaacttaaaattagaagcaataagacaaaacgatttattagctgtgatgattgcagataagctattatag

SEQ ID NO: 408166 - DNA, 162 bp, Staphylococcus aureus
atgagtaaaacttataaaagctacctagtagcagtactatgcttcacagtcttagcgattgtacttatgccgtttctatacttcactacagcatggtcaattgcaggattcgcaagtatcgcaacattcatattctataaggaatacttttatgaagaataa

SEQ ID NO: 408167 - DNA, 1944 bp, Staphylococcus aureus
atgaaaataaataagttaactatatcgaactttgctggaatcaaagaagaaaaatttaactttgacggtaaagatgcaaaaatatacggcaataatgcgactggcaagactacaacagcaaccgcattacaatggctgcttttcgataagggtttagacggttcaaccaaatcatttaaccctatacctttaaacgaaaaaaacgaagaaaattatgagttaattccgactgttttcgcagaatttgaaatcgacggaaaaattacgacttttaaaaaagagtcacatcctaagtacacaataaatcaaaaaacgaatcgcaaggaatactcacgaagtcgaacgaagaaacaatatatcaatgatgaatcaataaaagtaaaggattataaagctcgtattgatgaactgattgatgaagatgtattcaagttaattacgaaccctcaagcatttaacttactagattggaagaaacgaagaagtttgttgtttgaaatcgctaaaccaatcaatgatgaggatgtcattaaaacaaatgatgattttaaagaactaaataatattcttggagatcacgaaattgaaacaaagaaaaagattcttacagacaagataaaacagattaacaaagatatcaaagatattccgatacgtattaaccaaacgcaacaaaataagcaggatgtaccggaattcgataatgatagacacacaatcataaaacaagaaattgagcaacttgaaaatgagcgtatagatattcaaaacggtgcagaagaaattaatttgcgtaaccaattagctgataaacaatcagaattgaagcgcatagaagctaataatagcgccagtaatgagaacaaaatacatgctttaacaaatgagctacacgttgaaaatggaacggttgcgaatcttaaaacaagattaaagcaaaacaaacaacaaattacacatgaagaaaatcgacgtaatcaattattagaaaatcataaaggattaaaaagtgatttagaaaaagctaaaaatcaaaaatttgaatatcttgatgacaatgtatgtagttgttgtggtcaacagttaccagctgaacaagtgagtgaggtaagagaaaaagcattgcagaaattcaatgcaaacaaatcgaaagaattagaaacaatacaaacatctatcaatcacattatttcagagggcaagaaaataaagccaattatcgagaaattagaggatgacaacaataatttacaaattaaaatcaacgaagcagaagagcgttcagcaagaatacaaaacaaaattaataagttgaaaataactcacgttgacgttacgcaaactgacgaatacaaagcagtaatgttagagataaatgagattaatcaaaaacgctctaacatcaggaaaactattcaagataaagtttcaggaatagatgacaaaataagcgaacttactcaagaaaaatcagaaattgaagtgtcaatatcaatcgaaaaatcaaataaacatctagatgatgttatttctgaattaagaaatgaagaagacagattattggatgaaaaagaaaagtattcacatgacctttatatcttaaaagaatttacaacaacaaaagtcaaaatgcttactgaaaacatcaataacgaatttgatattgctgaatttaagctattcaataccttagttaacggcgaattagaagaaacatgttcaacaacggttaatggtgtcgagtatgacagcggtttaaataacgcctcaagaattaatgttggcttagatatcatcaacacactatcaaaacattttaaagttacagcgccaatatttattgataatgctgaatcagtaacagagcttatcaaaacagaatcacaacaaattcaattgatagtaaatgaacaagataaaaaattaagaatggagactatataa

SEQ ID NO: 408168 - DNA, 921 bp, Staphylococcus aureus
atgacgaatgaattactattaaaaaacaataaaatgggcgacaacgttctatctagagttaagacattagaagcacaaggagatttacagtttcctgcaaactattcgcctgagaatgcaatgaagtcagcaatgttacaactgcaagaattaaaaggatctaaaaaagatggttataaaccagcgctggaatttgcaacttcaaccagcatagcaaacgccttaatggacatggttgtacaaggtttaaatcctgctaagaatcaaggctatttcattatgtatggcgataaggttcaattccaaagaagttaccacggaacaatggcagtaactaaacgtgtagcaggcgcagaagaaattaatgcagaagtcatatttgaaggtgacgaagttaagtataaaactaaaaacggaaaaattgttgaacttgaacatacacagtcttttggtaacagaaacacacaaaacattatcggtgcatatgcaacagttgtatttaaagatgaaagtagaaattacactgaaatcatgacatttgaagagattgaagaagcgtggaagcaatcacaaatggtttataacggtgtatttaaagaagacggtacacacagaagattccctcaagaaatggctaaaaagactgtaataaaccgtgcatgtaaaaagattttaaacagcacggatgacgctagtcttttatcaaatcaaattaaagaatctgaacaacgtcaacgcaaagaagtattggatgcagaagttgaagaaaatgcaaatcaagaacaattggattttgaaccaccagtttttgaagaagcacaatacacagaattagaaaatgaaaaacctattgatgtatctgactttgaagaaataaaagaacctgcaacagaaaaagaaagcgaagaagagccattttaa

SEQ ID NO: 408169 - DNA, 486 bp, Staphylococcus aureus
atgactgctggaacacaacgagctatggattttgaaagtcatcgcttatgcacgattaaggcaaagcaagagctacgaattggtacgtggtcaattttaccatttgacattgaacatgatgctaacgagcctgtggctttcttattacaaagcacattaggttataaggtcctgtatgttactgatacgaagtatctgaaatacaaatttaacggcattacgcacatgatgttagaagttaattatatctatgaacaaatgcaagaaaacataaaaaacggcagtgtacacagcgcattagcaaacagaattatggagtctcattttagcttagaacatgctatcggaatgttgaaagcaaatgatttaactagactcgaagaaatacatttaattcatttaagtagtcaaaattcaaatgcaaaatacattaaaagtgaaatacaaaaagtgacgggcgcgcccgtttatgttggaggtttataa

SEQ ID NO: 408170 - DNA, 471 bp, Staphylococcus aureus
atgctaaacagaacaatattagttggtcgtttaactagagacccagaattaagaaccactcaaagtggtgtaaatgtagcatcattcacattagcagttaaccgcacatttacgaatgcacaaggagagcgcgaggcagactttattaatatcatcgtatttaaaaaacaagcagagaacgttaataaatacctatctaaaggatcgttggcgggcgtagatggtaggttacaaacgcggaactatgaaaataaggaaggtcaacgtgtatacgttacggaagttattgctgatagtattcaatttttagaaccgaaaaactcaaatgacactcaacaagatttatatcaacaacaagtacaacaaacacgtggacaatcgcaatattcaaataacaaaccagtaaaagataatccgtttgcgaatgcaaatggtccgattgaaatagatgacaatgatttaccattctaa

SEQ ID NO: 408171 - DNA, 894 bp, Staphylococcus aureus
atgactggttggataagtattgatcgctcaattcaaaatcattggctatttaaagaaaagagaacattttcaaagtttgaagcatggatatatttactcatggaagcgaatcattcaaaggcaaaagtgcctattggaaaccaaattgtaaccgtagaaagaggacaaagattaacatcgattttgaccttgtctgacctttttaactggtcgcgatttaaagtgaaaaccttccttgacttactcgagagtgatggaatgttagaagtcaaaacaacatcaaaatatacccttataaccattgtcaattatgacttttatcaaagtgagcagggcaggaaccaacatcaaaacgacatcaaaccaacatcaaaacaacatcagtcaaacatcaacccaacatcaaaacaacatcaaaccaacacaaacaataatgataataaagataataatgaaaagaatgtgaataatgagaagaagaagacaaccgccttcgacttcttccaagataacggattcggtttcataacttcttacaatttagacgatttaaattattatcttgattcatttgaaaatgattcagatgaaatagttaccgcatcacttaaaatcgctaaagacagaaacaaagttacttggggatatgctaaaagcattttgaatacatggcttaatgcaaacttgaaatctattgaacaagtacgtgcatttgaaaagcaacaacttgaaagcaaaaaacaaaattataaacctttcgttaaacaatcaaaagaaaaaacacccaaatggctcacagacagcacgagagaaacgaaaacgccggaagtagatgaaaaccttgagaaagacagagaagcttttattaagcgtctaaatagcaaatgggagtga

SEQ ID NO: 408172 - DNA, 405 bp, Staphylococcus aureus
atggagatagaaattaaatttaatgaagtgtttaatgcgccgatggggtcgcctcgtccacgctttcgtaatacaggtagatttgttcaaacttacatgccaacgtcttacacaaagcataaagcgtatatacaagggcaaatgcctaagttaaatctagagcgcgcactaaaaatcgaattagacttttactttccattgcttaaatcatggtcgaagaaaaagaaaagcgaaatggttgggcagtataaagtgactaagccggatatcgacaacttaattaaaacggtattagatgcttgtaatggccatgtatggaaagacgataaccaaattacagaaataactagctcaaagcgttatggaattgagcccaaaataatcatacgaatagaagaaatataa

SEQ ID NO: 408173 - DNA, 258 bp, Staphylococcus aureus
atgagtgtaatcagtaacagaaaagtagatatgaatgaaatacaagacaatgttaagcaaccagcgcactacacatacggcgacattgaaattatagattttatcgaacaggttacggcgcagtatccaccacaattagcatttgcaataggtaatgcaatcaaatatctatctagagcaccgttgaaaaacggacacgaggatttagcaaaggcgaagttttatgtccaaagagcttttgacttgtgggagcaatga

SEQ ID NO: 408174 - DNA, 1212 bp, Staphylococcus aureus
atgagtaatacacaaaagaaaaatgtgccagagttgagattcccagggtttgaaggcgaatgggaagagaagcagttgggggatcttacagatagagtaattaggaaaaataaaaacttagaatcgaaaaagcctttaacaatatccggacagttaggtttaattgatcaaacagaatattttagtaaatcagtttcgtcgaaaaatctagaaaattatacactaataaagaatggagaattcgcgtataacaaaagttattctaatggatacccattaggggctattaaaagattaactagatatgatagtggtgtattgtcctctttgtatatttgtttttctattaaaagtgaaatgtctaaagacttcatggaagcatattttgattcgacacactggtatagagaagtttctggaattgcagttgagggtgcaagaaatcacggattattaaatgtttctgtgaatgatttttttactattctaattaaatatccaagtttagaagaacagcaaaaaataggcaagttcttcagcaaactcgaccgacaaattgaattagaagaacaaaagcttgaattacttcaacaacagaaaaaaggctatatgcagaaaattttctcacaggaactgcgattcaaagatgagaatggtgaagattatccagattgggaaaatagcaaaatagaaaaatatttaaaagagagaaacgaacgttctgacaaagggcaaatgctttcagtaactataaatagtggcattataaaatttagtgaattggatagaaaagataattcaagtaaagataaaagtaattataaagtagttaggaaaaatgatattgcatataattctatgagaatgtggcaaggggctagtggtaaatcaaattataatgggattgttagccctgcatatactgtgctttatccaacacaaaatactagctcattatttattggatataagtttaaaacacatagaatgattcataaatttaaaattaattcacaaggattaacatcagatacatggaacttaaaatataaacaattaaaaaatataaatatagatatacctgtattggaggaacaagaaaagataggtgatttctttaaaaaaatggatatattgataagtaaacagaaaatgaaaattgaaatattagaaaaagagaaacaatcctttttacaaaaaatgttcttataa

SEQ ID NO: 408175 - DNA, 684 bp, Staphylococcus aureus
atgaaattaaaaaatattgctaaagcaagtttagcactagggattttaacaacaggtatgattacaactactgctcagccagtaaaagcaagtacattagaggttagatcacaagctactcaagacttgagtgaatattataaagggagaggatttgaattaacaaatgtaacaggatataaatacggaaataaagttacatttatagataattctcaacaaattgatgttacattgacaggaaatgaaaaattaactgttaaagatgatgacgaagtttctaatgttgacgtgtttgtagtaagagaaggtagtgacaaatcagctatcacaacatcgattggtggaattacaaagacaaatgggactcaacataaagatactgttcaaaacgttaatttgtcagtttctaagagtacaggtcaacacactacttctgtgacttcagaatactatagcatctataaagaagaaatctcattaaaagaacttgattttaaattaagaaagcatttaattgataaacatgatctttataagacagaacctaaagacagtaaaattagaattactatgaaaaacggtggctattatacatttgaattaaataaaaaattacagcctcatcgcatgggtgatacgattgatagtagaaatatagagaaaattgaagtgaatttataa

SEQ ID NO: 408176 - DNA, 1488 bp, Staphylococcus aureus
atgagagaaaattttaaattacgtaaaatgaaagtcggtttagtatcagttgcaattactatgttatatatcatgacaaacggacaagctgaagcatctgaaactaatcagaaggtaagtacaaatcaagaatcaaaagctgtttcgcagactgaacaaaattccaaagaaacaaaagcggcagagtcttctaaaaactttgtaaatttagatcctatcaaaccaggagctcaaaaagtaacaggtactacattaccgaatcatattattttacttaatatagatggtaaaagtgctgattcagttgaaggaggatatggtgattttataactgcaaatgacaaaggagagtttgagtatcctttaaataatcgtaaaattgtccataaccaagaaattgaggtatcatcatcaagccctgatttaggtgacgatgaagaggatgaagaagtagaagaatcttcaactgaaaaagctggtgctgaggaagaaagtacagatgctaaagctacatatacaacaccacgatatgaaaaagcgtatgaaataccgaaagaacaactaaaagaaaaagatggacaccaccaagttttcatcgaaccaattactgaaggttcaggtattattaaaggtcatacgtctgtaaaaggtaaagttgctctatctattaataataaatttattaattttgaagaaagagctaaaggtggaattagtaaagaagatactaaagctagttccgatggtgtttggatgcctattaatgaaaaaggatattttgattttgatttcaaaaaaaatccttttgataacttagagttaaagaaaaatgatgaaatctcattaacatttgcacctgatgatgaagatgaagcattgaagtcattaattttcaaaactaaagtaacgagcttagaagatatcgataaagcagaaacaaaatatgaccatactaaagtggaaaaagtaaaagtattgaaagatgttaaagaagatatacatgtagatgaaatttacggaagcttatatcatacagaaaaaggtaaaggtattcttgataaacaaggaactaaagagattacagggaagactaaattcgcgaatgcagtagtgaaagtatattctgacttaggtgatgcgcaattgttccctgatattcaagtagatgaaaatggtaaatttagctttgatgctgaaaaagctggtttcagattgcaaaatggagaaacattgaattttgcagtagttaaacctattactggtgacctattacatcaaggatttgtctctaaatatattgatgtatatgaatctccggaagaaaagaaagaacgtgaatttgaagaaaaacttgaaaacacgcctgcatatcataaattacatggtgataaaattgtaggatatgatgttcaaggtaatccatcaacttggttctatccattaggtgaaaagaaagttgaacgtacaacacctaaattagaaaaataa

SEQ ID NO: 408177 - DNA, 795 bp, Staphylococcus aureus
atgggatatctaaaaaagcttgcactgttcataagtgttattattttgggcatttttataataggttgtgatagttcaagcgatactgcggaaaaagcaaaagaagattcaaaagaagaacaaatcaaaaagagctttgcgaaaacgttagatatgtatccaattaagaatctcgaggatttatacgacaaagaaggatatagagatggtgaatttaaaaagggcgataaggggacttggactttactcacaagtttttcaaaaagtaacaaaccgggtgaaatagatgacgaaggcatggttttatatctaaatagaaataccaaaaaggcaacaggttattattttgtaaataaaatttatgatgatattagcaaaaatcagaatgagaaaaaataccgtgttgaacttaaaaataataagattattcttttggataatgtagaagacgaaaaacttaaacaaaaaattgaaaattttaaattttttagtcagtatgccgattttaaagatttaaaaaattatcaagatggaagtataacaactaatgaaaatgtaccgagatatgaagcagaatacaaattgaataatagtgatacaaatgtaaaaaaacttagagatatttatccaattacaacgaaaaaggctccaatattaaagttacatatagatggtgatataaaaggaagttcagttggatacaaaaaaatagaatataaattttcaaaagttaaagatcaagagacaacattaagagattatttaaattttgggccgtctgatgaagatagctaa

SEQ ID NO: 408178 - DNA, 789 bp, Staphylococcus aureus
atgatgggatattcaaaaaggtttgcattgtacataagcgttatgattttaatatttgcgatagcaggttgtggcaaaagtgatgaaacaaaagaaggttccaaagaagaacaaatcaaaaagagctttgcgaaaacgttagatatgtatccaattaagaatctcgaggacttatatgacaaagaaggatatcgagatggcgaatttaaaaagggtgacaaagggacatgggttatcagttcagtaatggttaaacagccaaaaggtgaaattatgaaatcaagagggatgtatctatttttaaatagaaatacaagaaccgcaaaaggatattttattgtagatgaaacaagtaatgatactttaaaaaaaacagaggataaagaaaaacgttatccagtaaagatggtgaataataaaatagtacctattgatccaattaatgataaaggtgtaaaaaaagaaatagaaaattttaagtttttctcacaatatggtgattttaaagaattaaaaaattataaaaatggagaggtttcatacaattctgaagcccctatctactcagcaaaatatcaactgaaaaataatgattataatgtaaagcaattacgtaaaagatatgatatatcaacagaaaaggctcccaaattgttgttgaaaggtactggagatttaaaaggttcatcaatcggacataaggacattgagtttacattcgtggagaatcaagaagagaatatattttttactgatagtttggagtttacctcaagtgagaactattag

SEQ ID NO: 408179 - DNA, 762 bp, Staphylococcus aureus
atgtgcgttgtgtataggacgtcagtcttaattctattagcatcaggttgcagtggcgtatttgacactcctgaagattcaaaagaaacacaaatcaaaaagagctttgcgaaaacgttagatatgtatccaattaaaaatcttgaggatttatacgataaagaaggatatcgagatggagaatttaaaaagggagacaaagggacgtgggttgttagatctgaaatgataattcaaccaaaaggtaaaagtttaacttcaagaggcatgatattatacatgaatagaaatactaggaccacaaccggttatttttcaatagaagaaatagattcaagaaaaagccttgatgaaagagaaacagaaaaaaagtatcctgtgaaaatgataaacaataaaattattccaactgaggagataaaagatgaaaagttgaaaaaggaaattgaaaactttaagttttttgtgcaatatggcagttttaaaggaatagagaattatgaaaatggtgacatttcctataattctgaagctcctatttattcagcgaaatataaactgaaaaatgatgattataatgttaaagaattacgaaaaagatataatattccaacagaaaaggcgcctaaattgttgttgaaaggttcgggggatttgaaagggtcttcagttggatataaggaaattgaatttatatttatagaaaataaaaaagaaaatatatatttttcagatggattaaacttaattccaagtgactaa

SEQ ID NO: 408180 - DNA, 786 bp, Staphylococcus aureus
atgagggattcaaaaagagtagtattgtacataagcattatggtgttgagtatttttataattggttgtggcaaaggtaatgaaataaaagaagacgcaaaggaagaacaaatcaaaaagagctttgcgaaaacgttagatatgtatccaatcaaaaatctcgaggacctatatgataaagaaggatatcgagatggcgaatttaaaaaaggtgacaaagggatgtggacgatttacacagatttcgccaaaagtaatagaccaggtgtattagataatgaaggtatggttttaaatttggatagaaatacacgaacggccaagggatattattttgtagatactatatatgacaatcatgaaaactcttatagtaaaaattatagagttgagatgaaaaacaataaaattattttattagacaaggtggaagatcaaaaacttaaagaaagaatagaaaactttaaatttttcggacaatatgccgatttcaagagtttgaaaagttacaaccatggcgacgtttcaattaatagtaatgttccaagttatgacgcgaaatttaaaatgagtaataaagatgaaaatgttaagcaattaagaagccgttataacattcctactgataaagctccaatattaaaaatgcatattgatggggacttaaaaggcagttccgttggatataaaaagttagaaatagacttttcaaaagaagaaaatagcgaattatcaatagtcgattcattaaattttcaacctgccaaaaataaagatgatgaatga

SEQ ID NO: 408181 - DNA, 795 bp, Staphylococcus aureus
atgatgggttatttaaaaagacttgtattgtacatagttattatggttatgagtgtttttataataggttgtgataaatcaagcgatactgcagaaaatccaaaagaaggttcaaaagaagcacaaattaaaaagagtttttcgaaaacgttagatatgtatccaattaagaatctcgagaatctatatgacaaagaaggatatcgtgatggcgaatttaaaaaaggtgataaagggacttggacaatatcaacagattttgctaaaagcaacaagcaaggtgaaatgaatagcgaaggtatggtactacattttaatagaaatacgaggacagcaacaggatattatactgtaagaacaacttatgatgaagtggataagttggcacgcgaaaaaaaatatcgtgttgaatttaaaaacaataagatagttctattggacaaagtagaagatgaaaatcttaaacaaaaaatagaaaattttaaatttttcgggcaatatgccgattttaaagacttgaaaaattataaaaatggaagaatatctagcaatgaaaatgttccttattatgaagcagagtacaaaaggaataatagtgatggaaatgtaaaaaaacttagagaaaagtacccaattacaaccaagcagtctccaatattaaaactgcatatagacggcgatattaaaggtagctcagttggatataaacagatagaatacacattttctaaggagaaagatgatgagacttttatgagtgattttttgaacttcggtccatcacacagtaaatag

SEQ ID NO: 408182 - DNA, 816 bp, Staphylococcus aureus
atgatggagtatataaaaaaaattgctttgtacatgagtgtattacttttaatcatttttattgggggatgtggaaatatgaaagaagaacagaaaaaagaagcaaatacaaataaaacagattcaaaagaagaaaaaatcaaaaagagttttgcgaaaacgttagatatgtatccaattaagaatctcgaggaactatatgacaaagaaggctatcgagatggcgaatttgaaaaaggtgacaaagggatgtggacgatatatacagatttcgccaaaagtaataaaccgggtgaactaagtaatgaaggcatggtcttgtacttagatagaaacacacgcacagctaaggggtactactttgtcaggacgttttatcgcaaggataaattacctgatagaaaaaattataaagttgaaatgaaaaataataaaattatcttattagacaaggtagaagatccaaatctaaaaaagagaatagaaaactttaaatttttcggacaatatgcaaatcttaaagaattgaaaaactacagcaatggtgatgtctcaattaatgagaatgttccaagttatgacgtgaaatataaaatgagtaataaagatgaaaatgttaagcaattaagaagtcgttataatattcctactgataaatcaccggtattaaaaatgcatattgatggtaatttgaaaggaagttccgttggagataggaagttagaaattgatttttcgaaacgtgaaaatagccatttatcagtaatagattctttggattaccagccagcgaaggtggatgaagatgaaagataa

SEQ ID NO: 408183 - DNA, 1194 bp, Staphylococcus aureus
atgacaaataatggtaatgagccgaacttaacgttaagtgatttatatgacaaagatgttgtctatacgtcaagaccttcgtatatatcgaatccatggttgaaaccggacgaacatcaatctaattttttaactggtagggagttattaatagcaaatcaattacctgttattgttcacgaagctagtgcgacagacaaattgcatcagctatttcaagttattggtaaggaagtaccgaactcaatttttacatttaacaatcagcaatcttacgaaaacttgatcaaacaattggcacataaggaaaataaaaagatttattttcaatatattcatgatgaaacaatcttgaatcagcaatattatgcattagataaaacgttatttgttgctttaaataataaagcaagaatacctgaatggacaaatgggaagtttttaccaaaaagaaaagttgtaaaaattgagcaattcgaaaacgagattaagaattgggaattcccgttagtaattaagccgggagatgatcttccgacagcaggtggctatggcgttatgatttgttatcatgatgcagatttacaaaaagcgataacgcgtattaaagaggcaactgctgaaacgaattcgcttattatcgaacagaagattgaagaaaaagcgaattattgcgttcagtttgcatactcggaatcgctaggcattcaatatcttggtgcggcaacgcaattaacggataagtacggattttataacggaaatgaaaatactactaatgtaccagagcacgttatagaagcaggtagacaaattatggaaaacggtgtgaatcaaggattctttggtgtagctggttttgacctactcgtcgatgaggatgataacgtttatgcgattgatttaaactttagacaaaatggttcaacgagcatgttattacttgctaacgagttgaattcaggatatcaaaagttttatagttatcattcaaaaggtgataacacacatttcttcaatacgattttgaaatatgtcaaagaaggtagtttatacccgttatcttattatgatggtgattggtacggtgaagataaagttaaatcaaggtttggctgtatttggcatggtgattcaaaagaaacagtactggagaatgaacgcgcatttttagctgaacttgaacactattag

SEQ ID NO: 408184 - DNA, 720 bp, Staphylococcus aureus
atgaataaaaatatagtcattaaaagcatggcagcattagccattctaacctcagtaactggaataaatgctgcagtcgttgaagagacacaacaaatagcaaatgcagagaagaatgttacgcaagttaaagatacaaataattttccatataatggcgtcgtttcatttaaggatgcgacaggttttgtaattggaaaaaatacaattatcaccaataaacatgtatcaaaagattataaagttggcgatagaattactgcccatccaaacggtgacaaagtaaatggtggtatatataaaattaaaagcatttctgattatccgggtgatgaagacatctctgtcatgaatattgaagaacaagcagttgaacgtggaccaaaaggctttaattttaatgaaaatgtccaagcattcaattttgcgaaagatgctaaagttgatgacaaaattaaagttattggttacccattacctgctcaaaatagttttaaacagtttgaatctacaggaactataaaaagaatcaaagacaatattttaaattttgatgcatacattgaacccgggaattcaggatcaccagttctaaattctaacaatgaggtcataggtgtggtgtatggcggtattggaaaaattggttctgaatataatggtgccgtatactttacgcctcaaatcaaagattttattcaaaagcacattgaacaataa

SEQ ID NO: 408185 - DNA, 984 bp, Staphylococcus aureus
atgaaaatgaaaaaattagtcaaatcatcagttgcttcatcaattgcactgcttttgctatcgaatacagttgatgcagctcaacatatcacacctgtaagcgagaaaaaagtagatgacaaaatcactttatacaaaacaacagcaacatctgataatgataaattgaatatttctcaaattttaacgtttaatttcattaaggataaaagttatgacaaagatacattagtacttaaggcagccggaaacattaattcaggttataaaaagcctaatccaaaagattacaattactcacagttttattggggcggtaagtataatgtttcggttagttcagaatcaaatgatgctgtaaatgttgttgactatgcacctaaaaatcaaaatgaagaattccaagttcaacaaacattaggttattcttatggcggagatattaatatatctaatggcttatcaggtggattgaatggatcaaaatcattttcagaaacaataaattataaacaagaaagttacagaactacgattgatagaaaaacaaatcataaatcaattggctggggtgttgaggcgcacaaaattatgaataatggttggggaccatatggtagagatagttatgacccaacatatggtaatgaactgtttttaggtggtagacaaagtagttcaaatgctggacaaaatttcttgccaacacatcaaatgcctttattggcgcgtggtaactttaacccagaatttataagcgtactttctcataaacaaaatgatacaaaaaaatctaaaatcaaagtaacttaccaaagagaaatggatagatatactaatcaatggaatcgactacactggattggtaataactacaaaaatcaaaatacagtaacgtttacatctacttatgaagttgactggcaaaaccatactgttaaattaatcggtacggattctaaagaaactaatcctggagtatag

SEQ ID NO: 408186 - DNA, 777 bp, Staphylococcus aureus; identical to SEQ ID NO: 407810

SEQ ID NO: 408187 - DNA, 402 bp, Staphylococcus aureus
atgaagttatttgcctttatcttcatatgtgttaagtcttgcagcttactatttatgttaaatggcaatcctaaaccagaacaattgaataaagcgagtgaattcactggtctaatggataatatgaggtatttgtatgatgataaacacgtatcagaaacaaacattaaatcccaagaaaagtttttacaacatgatttattatttaaaataaatggttctaaaattttaaaaacagaatttaataataaaagcctttcggataaatataaaaataaaaacgtagatttgtttgggacaaactattataatcaatgctatttttcattggataatatggaattaaatgatggtagattaattgaaaaaaacgtgtatgtatggcggtgtgaccgagcatga

SEQ ID NO: 408188 - DNA, 720 bp, Staphylococcus aureus
atgaaaagaatacttatcattgttgttttattgttttgctattcgcaaaatcatatcgcaaccgctgatgtcggagttttgaatcttaggaactattatggtagctatccaattgaagaccaccaaagtattaatcctgaaaataatcatctttcgcatcaattagttttttctatggataattcgacagtaacagctgaatttaagaacgttgatgatgtaaagaaattcaaaaatcatgctgtagatgtatatggtctaagttatagtggatattgtttgaaaaacaaatatatatacggtggagttacattagcaggtgattatttagagaaatctagacgtattcctattaatctttgggttaatggagaacatcaaactatatctactgacaaagtatcaactaataaaaagttagtaacagctcaagaaattgatactaaattaagaagatatctacaagaagaatataatatttatggctttaatgatacaaataaaggaagaaattatggtaataagtcaaaatttagttctggatttaatgcaggaaaaatattatttcatttgaatgatggttcatcattttcttatgacttatttgatactggaacaggacaagctgaaagtttcttaaaaatatataatgacaacaaaactgtcgaaactgaaaaattccatttagatgtagaaatatcttataaggacgaaagttga

SEQ ID NO: 408189 - DNA, 207 bp, Staphylococcus aureus; identical to SEQ ID NO: 404844

SEQ ID NO: 408190 - DNA, 1155 bp, Staphylococcus aureus
atgatctctaacaaattagcaaatatccctgatagttatttcgggaaaacgatgggacgtaaaatcgaacatggaccattgccattaattaatatggcagttgggatccctgatgggcccacgccacaaggtattattgatcattttcaaaaagcactaactattcctgaaaatcaaaaatatggtgcttttcatggtaaagaagcgttcaagcaagctattgtagatttttatcaaagacaatataatgtgacgttagataaagaagatgaagtatgcattttatatggtacaaaaaatggattagtggcagtaccaacatgtgttatcaatccaggagactatgtattactacctgatccaggctacacggactatttagcaggtgtacttttagctgatggcaagccagttccgcttaatttagaaccgccacattatttgccagattggtccacagttgattcacaaataatagataaaacaaaactcatttatttaacgtatccaaataatccaactggatcgacagctacgaaagaagtttttgatgaagcgatagctaaatttaaaggtacagacactaaaatcgtgcatgattttgcttatggtgctttcggtttcgacgctaaaaatcctagtatacttgcttcggaaaatgggaaagatgttgcgattgaaatttattccttgtctaaaggttataacatgtcaggttttagagtcggttttgcagttggtaataaagatatgattcaagctttgaaaaagtaccaaacgcacacaaatgctgggatgtttggtgcattacaagatgccgcaatatatgctttgaatcattatgatgattttttagaagaacaaagcaatgtatttaaaacacgtcgtgaccgattcgaagccatgcttgcaaaagctgatttgccatttgttcatgctaaaggtggcatatatgtatggttggaaacaccgcctggttatgacagcgagcaatttgagcaatttttagtgcaagagaagtcaatacttgttgctccagggaaaccatttggagagaatggtaatcgttatgtgagaatttcattggcgttagatgaccagaaattagacgaagctgcaataagattaacagaactagcatatttatatgaataa

SEQ ID NO: 408191 - DNA, 1509 bp, Staphylococcus aureus
atgaagattgcagtaattggtgcaggtgtcacaggattagcagcggcagcccgtattgcttctcaaggtcatgaagtgacgatatttgaaaaaaataataatgtaggcgggcgtatgaatcaattaaagaaagacggctttacatttgatatgggtcccacaattgtcatgatgccagatgtttataaagatgtttttacagcgtgtggtaaaaattatgaagattatattgaattgagacaattacgttatatttacgatgtgtattttgaccacgatgatcgtataacggtgcctacagatttagctgaattacagcaaatgctagaaagtatagaacctggttcaacgcatggttttatgtcctttttaacggatgtttataaaaaatatgaaattgcacgtcgctatttcttagaaagaacgtatcgcaaaccgagtgacttttataatatgacgtcacttgtgcaaggtgctaagttaaaaacgttaaatcatgcagatcagctaattgaacattatattgataacgaaaagatacaaaagcttttagcgtttcaaacgttatacataggaattgatccaaaacgaggcccgtcactatattcaattattcctatgattgaaatgatgtttggtgtgcattttattaaaggcggtatgtatggtatggctcaagggctagcgcaattaaataaagacttaggcgttaatattgaactaaatgctgaaattgagcaaattattattgatcctaaattcaaacgggccgatgcgataaaagtgaatggtgacataagaaaatttgataaaattttatgtacggctgatttccctagtgttgcggaatcattaatgccagattttgcacctattaaaaagtatccaccacataaaattgcagacttagattactcttgttcagcatttttaatgtatatcggtatagatattgatgtgacagatcaagtgagacttcataatgttattttttcagatgactttagaggcaatattgaagaaatatttgagggacgtttatcatatgatccttctatttatgtgtatgtaccagcggtcgctgataaatcacttgcgccagaaggcaaaactggtatttatgtgctaatgccgacgccggaacttaaaacaggtagcggaatcgattggtcagatgaagctttgacgcaacaaataaaggaaattatttatcgtaaattaggaacaattgaagtatttgaagatataaaatcgcatattgtttcagaaacaatctttacgccaaatgattttgagcaaacgtatcatgcgaaatttggttcggcattcggtttaatgccaactttagcgcaaagtaattattatcgtccacaaaatgtatcgcgagattataaagatttatattttgcaggtgcaagtacgcacccaggtgcaggcgttcctattgtcttaacaagtgcgaaaataactgtagacgaaatgattaaagatattgagcggggcgtataa

SEQ ID NO: 408192 - DNA, 768 bp, Staphylococcus aureus
atgaaaaaaatcgttacagctacaatcgctacagcaggacttgccactatcgcatttgcaggacatgatgcacaagccgcagaacaaaataacaatggatataattctaatgacgctcaatcatacagctatacgtatacaattgatgcacaaggtaattatcattacacttggacaggaaattggaatccaagtcaattaacgcaaaacaacacatactactacaacaactacaatacttatagttataacaatgcatcttacaataactactataatcattcatatcaatacaataactatacaaacaatagccaaacagcaacaaataactattatactggtggttcaggtgcaagttatagcacaacaagtaataatgttcatgtgactacaactgcagcgccatcttcaaatggtcgttcaatttctaatggttatgcatcaggaagtaacttatatacttcaggacaatgtacttattatgtatttgatcgtgttggtgggaaaattggttcaacatggggtaacgcaagtaattgggctaacgcagctgcatcatctggctatacagtgaacaatacaccaaaagttggtgctatcatgcaaacaacacaaggctattacggtcatgttgcttacgttgaaggcgttaacagcaacggttctgttcgtgtttcagaaatgaactatggacatggtgctggtgtggttacgtctcgtacaatttcagcaaaccaagcaggttcatataatttcattcattaa

SEQ ID NO: 408193 - DNA, 636 bp, Staphylococcus aureus
atgaaaaaagttataagtttatttgttgcaattttatcagtgttgatttttacggataatgcgaacgccgaaaataacaaacctgaaggtgtgaatgaaaacagcaatttaataccagttagacaaccggatgcaaattatccagggccagttagtgacatagcacgtgtgaaaaaacttgataatttaatagatggcacgaaagatccagatgttatcaagcagttgaaagatgataatgaggtgccgaataatgcggtaaaggcaaaagattctaaaatagtatccgactgcagacatttactaaaacatccagataatttaatagatggcacgaaagatccaaatgttattaatcagttgaaaaacgcaaatggaacatcgaataatagtgctgtaaatccaagtattaaagcaaatgatattcacacaaaaagtaataaacaaatggctaaacaacaaagtattcatttggatagcaagagcaagtcagtacataagcaacaattgaaagaattgccaaaaacaggagtaaacaacgaaagtaatacagcaataatggctttatttattggtttaatattgcttgtagtaagtttagtgacaagatttataaaattaaatagccatcaataa

SEQ ID NO: 408194 - DNA, 1077 bp, Staphylococcus aureus
atgacaaaaatttttaaaatatcatttttgattttgttagtagtaattgtttctagttattatggtgaaagttttgtcttagctgataataatcctatcgtcaattcagaaaatggtagtgataataattttgaatcaggaacaattgaacgtaatcaaaatgagctttatgaagtaggtgattatagtacgcccttaactgagcgagttttcggtaaagatcaaagaacggttgttaataatattttacaaagaccttataagcagactgtattattaaatatgacgttttcaaataaccgtgtatataaaggcaccggtactatgattggtaaggacattgtattgacagcggctcataatgtctattctaaagacgataagggttgggctaaaaagattgatgtctatgctggagtaaatgggcaaacatatacaataggaaaggccttttcgcataagttttttgtatctaaaacttggattaataatgctcctacaaaagaagatatagcaattattaagttaaatagtaatttaggaaataaaacaggttacttaactttgaacacacacattagcaaaggtgaaaatattgaaatttctggatttccaggagacaagtcagacaacagacaatataaaggtaaagggaaattagaaagttttgatgagaatgaaatgtattatacggtagacacattttcaggacaaagtggtagtgcgataagagattcaaaaaacaatatcatcggagtacatgcatacggcagatataatcataattcaggcgtgagaataaatgatttaaaattagattacataaattattggataggtaagtatagaagtcatccatataataagaaagtgaaagtaattaaaagtaagtatatatattggaaaaacattgaaattacaaaaaagggtgataataaattaattaaaaaagataaagcgtacacagctaaactctattacaatattccaaatgggtataaatattactctttatacgacgaaaaaaatagatggatgggttactttaatagcaatgatattaaggtagtaaaatag

SEQ ID NO: 408195 - DNA, 960 bp, Staphylococcus aureus
atgaaaacatttggtaaaaaggttgtattaatcggagatggatctgtaggatcaagctatgcctttgcaatggttacgcaaggtgttgctgatgaatttgtaattattgacattgcaaaagacaaagtaaaagcagatgttcaagatttaaaccatggtacagtccacagtccttcaccagttgatgtgaaagcaggtgaatacgaagactgtaaagatgcagatttagttgttattacagctggtgcacctcaaaagccaggtgaaacacgtttacaattagttgaaaaaaatactaagattatgaagagcattgttaagagtgttatggatagcggctttgatggatatttcttaatcgcggcaaaccctgttgacattttaacaagatttgtaaaagaatatactggtttaccagcagagcgtgttatcggttcaggtactgtattggacagtgcacgtttacaatatttaattagccaagaacttggtgttgcaccttcaagtgttgacgctagtattattggtgagcatggtgatactgaacttgcagtttggtcacaagcaaatgtagcaggtatttcagtatatgacacattaaaagaacaaactggtagcgaagctaaagcggaagaaatttatgtaaatacacgtgacgctgcttatgaaattatccaagctaaagggtcaacatactatggaattgcattagcattgatgcgcatttcaaaagccattttaaataatgaaaataatgtcttaaatgtttctatacaattagatggtcaatatggtggtcacaaaggcgtttacctaggtgtaccaacattagttaaccaacatggcgcagttaaaatttatgaaatgccattaagtgccgaagaacaagcgttgttcgataaatctgttaaaatattagaagatacatttgattcaattaaatatttattagaagactaa

SEQ ID NO: 408196 - DNA, 747 bp, Staphylococcus aureus
atgaatcgaattgaaaaacatgccaaaaacacttttattattctgatgctcattatgttattttggatttttatgagttttattttccagaaattattatttccaccttcgaaaaataatttaactacatatgaagcattaaaatattatacacatttaaagggatattacggtttggatcatatatcaaaaggaatagcatacattgcctgtgtgttaattccattcaatttcttttttagattcaatgacatcaaaaaagataataactataataatattataagtacgttattcctattattatactttttagttaatggaatttcgttgattattcaaggattcactgcagaatttacaattagtttaattagtgagtcaaatattcataataatcatgaatttgctgtgaacttatttagatatgtcatacaagaaggtggtatttcttttagtacatatctagtgtgtaacttttctataataatgtggttattcttttcgtgttctttattaaaagaacgaaaaccagttgtcagatgtttaccattaattatatcttgtttaaaattaatattaatcctactatttttactttcaatacttttggtcatatatcaaactcaatctgcacaaatcttatttatttttatagattttctaaattttgtcgcgttaattttagtttatttatgtactaatcctaataatagaggtattgataaaatagcatgtgttaaataa

SEQ ID NO: 408197 - DNA, 474 bp, Staphylococcus aureus
atgggattacttgatattgcaagtattcgttctatagaaagaggctttaattattatcaaagtgaatgcgtcattaacttaaaatcattttcagaaacgcagcatgaggctgaagtaaagggcagtggcaacaaagtatatcgttgttatattgatatggaacatcctagaaaatccaaatgtaattgtcctcatgctgatggaagacgagtgatatgtaaacatatgattgcattactctttacagctagtccagaagcagcaaataaacatataatgatgttaaacgaagttgaagaagactatcaattacgcagaaatatgtggattgatagtcttaaagaaatgattaatgatatgagtgaagaagaactccgcgatgcatatttaaacatgttaattgaacatggagaaatggcagaattatttggattagatgaagaggaagaaatgttcgaggacgaattttattaa

SEQ ID NO: 408198 - DNA, 702 bp, Staphylococcus aureus
atgattgagttaaaacatgtgacttttggttataataaaaagcagatggtgctacaagatatcaatattactatacctgatggagaaaatgttggtattttaggcgaaagtggctgtggtaaaagtacgctcgcttcattggttcttggcttgtttaaacctgttaaaggagaaatttacttaagtgataatgctgtgttaacgattttccaacaccctttaactagctttaaccctgattggacgattgagacctcattaaaagaagcgttatattattacagaggcctaactgataatactgctcaggatcaattattattacaacatttatctacttttgagttaaacgcgcaattattgactaaattaccaagcgaagtgagtggcggacaattacaaagatttaatgtcatgcgttcgttattagcacagcctcgcgttttaatatgtgatgagataacttcaaatttagatgttatagctgaacaaaatgtaatcaatatattaaaagcgcaaacgattacgaacttaaatcattttatcgttatttctcatgatttatccgtgttacaacgcttagttaatagaattatcgttcttaaggatggcatgatagtcgatgattttgcaatagaggaattatttaatgttgatagacacccttatacaaaagaattagtgcaaacattttcatattag

SEQ ID NO: 408199 - DNA, 777 bp, Staphylococcus aureus
atgatgagtctcattgatatacaaaatttaacaataaagaatacttgtgagaaatatcttattaaagggattgatttgaaaatttttagtcaacagattaatgccttgattggagagagcggcgctgggaaaagtttgattgctaaagccttacttgaatatttaccatttgatttaagctgcacgtatgattcgtaccaatttgatggagaaaatattagtagattgagtcaatattatggtcatacaattggttatatttctcaaaattatgcagaaagttttaacgaccatactaaattaggtaaacagttaactgcgatttatcgtaagcattataaaagtagtaaagaagaggctttgtcaaaaattgacaaggctttgtcgtgggttaatttacaaagcaaagatatattaaataaatatagtttccaactttctgggggccaacttgaacgcgtttacatagcaagcgttctcatgttggagcctaaattaatcattgcagacgaaccagttgcatcattggatgctttgaacggtaatcaagtgatggatttattacagcatattgtattagaacatggtcaaacattatttattatcacacataacttaagtcatgtattgaaatattgtcagtacatttatgttttaaaagaaggtcaaatcattgaacgaggtaatattaatcatttcaagtatgagcatttgcatccgtatactgaacgtctaattaaatatagaacacaattaaagagggattactatgattga

SEQ ID NO: 408200 - DNA, 831 bp, Staphylococcus aureus
atgcataaaatattttcaaagaataacctgatattttttgtattcgttgcatttatttttgtggtaattgtactgcaattctttgtcagtagtgaaaatgcaaccaaagtcaatttatcacaaacttttgaacctattagttggttgcatttattaggaactgatgattatgggagagatttatttacccgaattattatcggtgcacgttcaacattgtttgttactgttttaacattaatagctatcgttgtcataggtgttacactaggtctatttgccggatataaaaaagggtggattgaacgattagtgttaaggtttattgatgttggtctaagtattccagaatttatcatcatgattgctttagcaagcttttttcaaccatctttgtggaatttagttatctcaattacagtaataaaatggatgaattacacaaggttgactagaagtatagttaatagcgaaatgaataagccttatataaaaatggcacaattatttcatgtacctacaagaacaatattaatacgtcatttaacacctaaaattataccggctattatcgttttgatggtcgttgatttcggtaaaatcattttatatataagttcactatcatttattgggttaggtgcacaaccgccaacaccagagtggggcgctatgttgcaacaaggtcgtgattttatttcgtctcatccaattatgttgattgcacctgcttcagtcattgctataactattttaatttttaatttaaccggagatgcgctaagagatagattgctaaaacaacgaggtgaatatgatgagtctcattga

SEQ ID NO: 408201 - DNA, 522 bp, Staphylococcus aureus
atgattaatatcatttcagctataggatctattggaacatttattatggctttattttattttgtatcagtttcagttcaactttatcaaatgaaaattagctttctgccagctttaggttttaaccaaattttattagaaagggagaaggatcaacttaatataatgaattcggcaacagaagagcatcatcataaagattatattaaactatataatttaggtggcggtgctgctaaaaaaattgcaatagaggttttattgggtaatgataaagtcattcagaaaaaatacgtgaatattttacctagtaaagaagggtacatgttaccaattaataaaaatgtgtacgaagaattagaaagaacgattgagaataatggttatgaagctgatttgaatgtacgtatgacttattatcataatgtaagtcgcaaacaacaggaagttatattaaaaggtcaaatcgaccgttttaatacttataataataaagaaatttatgatttgcagtttatctaa

SEQ ID NO: 408202 - DNA, 1434 bp, Staphylococcus aureus
atgaaatttaagtcattgattacaacaacattagcattaggcgttatagcatcaacaggagcaaactttaatactaacgaagcatctgccgcagctaagccattagataaatcatcaagtacattacaccatggacattctaacatccagattccatatacaattactgtgaacggtacaagccaaaacattttatcaagcttaacatttaataagaatcaaaatattagttataaagatatagagaataaagttaaatcagttttatactttaatagaggtattagtgatatcgatttaagactttcaaagcaagcggaatatacggttcattttaaaaatggaacaaaaagagttatcgatttgaaatcaggtatctacacagctgacttaatcaatacaagtgacattaaagctatcagtgttaacgtagatactaaaaagcaacctaaagataaagctaaagcaaatgttcaagtgccatatacaatcacagtgaacggcacaagccaaaacattttatcaaacctaacatttaataaaaatcaaaatattagttacaaagatttagagggtaaagttaaatcagttttagaatcaaatagaggtattactgatgttgatttaagactttcgaagcaagcgaaatatacagttaattttaaaaatggaacgaagaaagttatcgatttgaaatcaggtatttacacagcgaatttaatcaattcaagtgatattaaaagtatcaatattaacgtagatacaaaaaaacatatcgaaaataaagctaaaagaaactatcaagttccatattcaattaatctaaatggtacatctacaaacattttatcgaatctttcattttcaaataaaccttggacaaattacaaaaatttaactagtcaaataaaatcagtactgaagcatgatagaggtattagtgaacaagatttaaaatatgctaagaaagcttattatactgtttattttaaaaatggtggtaaaagaatcttacagttaaattcaaaaaattacacagcaaacttagttcatgcgaaagatgttaagagaattgaaattactgttaaaacaggaactaaagcgaaagcagacagatatgtaccatacacaattgcagtaaatggcacatcaacaccaattttatcaaaactaaaaatttcgaataaacaattaattagttacaaatatttaaacgacaaagtgaaatctgtattaaaaagtgaaagaggtatcagtgatcttgacttaaaatttgcgaaacaagcaaaatatacagtatatttcaaaaatggaaagaaacaagtagtgaatttaaaatcagacatctttacacctaatttatttagtgccaaagatattaaaaagattgatattgatgtaaaacaatacactaaatcaaaaaaaaataaataa

SEQ ID NO: 408203 - DNA, 783 bp, Staphylococcus aureus
gtgagtaaaataaaaaaaacaacatttatactactttcatttattgccctaacgttgataacaagtccatttgtaaattgtagcgagaaaagcgaagaaataaatggaaaagatttacaaaaaaagtctgaattgcagggaactgctttaagcaatcttagacaaacctattatcataatggaagtgctataattgaaaataaagagagtaatgatcaatttttaaagaacactatattgtttaatgatttttttacaggtcatcaatggtataatgatttattagtagaccttggttcaaaagacaccgccaatatatacaaagggaaaaaagtggatttatatggtgtttattatggttatcaatgtactgggggtacaccattcaaaacagcttgtatgtatggcggtgtaacgttacatgataataatcaattggaggaagaaaagaaagtaccgattaacttatggatagatggtaaacaaaatacagtacctttgggaacggttaaaactaataaaaaagaagtaactgttcaggagctagaccttcagtcaagacattatttacatgaaacatataatttatataacacagatgcatttaatggaaaaatacaaagaggattaattgagtttcacccttcttctggtgattcggttggttatgatttatttggtgctcaaggacaatatccagatacacagttgaggatatatagagataataaaacgattaagtctaaaaatatgcatattgatatatatttatatacaacttga

SEQ ID NO: 408204 - DNA, 177 bp, Staphylococcus aureus
atggtattacacagctcaaaagacaggaagcatactgcaagtgaagttgggaagtgttgtcaataccaagtaagtaagatatctgaaatgtataatagagtaaaaatgaaatctttttattatattatagacaagtataaaaaaggtatagtaatatatgtatgtataagtaaataa

SEQ ID NO: 408205 - DNA, 207 bp, Staphylococcus aureus
atgacacaatacttagtcacaacattcaaagattcaacaggacaaccacatgaacattttactactgctagagataatcagacgtttacagttgttgaggcagagagtaaagaagaagctgagcgcaaatacgaggcacaagttaaaagaggtgcagttattaaattagggcagttgtttgaaaatataagggagtgtgggaaatga

SEQ ID NO: 408206 - DNA, 1071 bp, Staphylococcus aureus
gtgaaactacaatggataaatacatttaaactacattctaagaagcgacaattaagtaaggcccaacaaatcgatttactttcaaatttatgtaatttgttgaaatatggtttcactctgtatcaaagttttcaatttttaaatcttcaaatgacatataaaaataagcaattaggtaccaccattctaagtgaaatttcaaatggtgcaccatgcaatcaaatattatcactgataggttatagcgatactatcgtcatgcaagtatatttggcagaaagatttggcaatattatagacgttctagaagaaaccgtaaattatatgaaagtgaatagaaagtcagaacaacgattgttaaagacactgcaataccccttaatactagtttctatctttattgctatgattattatattaaacctcacagtaattccacagtttcaacaattatatacttctatgaatattcaactatcttcttttcaaaaaacattgtcttttttcattaccagcttacctactataattgtagtaatgctcataatagtatctatgttggctattattatgaaattaatttataacaatttaaatatgctcaataagataaactttgtgatgaaactaccgctaatatcaggctatttccaattatttaaaacttattttgtaactaatgaattagtgttgttttataaaaatggtattacacttcaatcaatagtagacgtttatattaaccatagtagtgatccatttagacagtttctaggtaaatacttattaacttattcagaaatgggatatggtttgcctcaaattttagaaaaactaaaatgctttaagcctcaattaattaagtttgtgctacaaggtgaaaagagagggaagctagaagtagaactaaagttatattcgcaaatattagtaaaacaaatagaagataaagcgataaaacagactcagtttttacagcctattttatttttgattttaggtttatttattgtcgcaatttatttagtaattatgttaccaatgtttcaaatgatgcaaagtataaaataa

SEQ ID NO: 408207 - DNA, 312 bp, Staphylococcus aureus
atgtttaaatttcttaagaaaactcaagcgtttacattgatagagatgctattagtgttattaatcatcagtttattattaattttaatcattccaaatattgctaaacaaactgctcacatacaatcaacaggttgtaatgcacaggtaaaaatggttaatagtcaaattgaagcgtatgcattgaaacataatagaaatccatcgtctattgaagacttaattgcagatggttttataaaagaagcacaaaagacatgtaaatcaggagagacaataacaattagtaatggagaagcagttgcaaattag

SEQ ID NO: 408208 - DNA, 2133 bp, Staphylococcus aureus
atgttattgagtacacgtgaaaaagaaatgatagccctattgattaagtaccacagtcaatatatcactatacacgacattgctcagcaacttgcggtgtcctctcgtactattcaccgtgaattaaaaggtgttgaagcatatttaacttcattttcattaactttagaacgcgcaaacaaaaaagggctacgcattgctggcgcagattctgatttaaacgatttgaagcaatcgattgcacaacatcaaaccattgacttatctgttgaagagcagaaagtaattattatatacgctttgatacaagccaaggagccagttaaacaatatagtttagcgcaagaaattggcgtttctgtccagactttagcaaagatgttagatgatttagagcttgatttaaataagtaccaactatctttatctcgaaagcgtggcgaaggcatttacttggtaggtactgaatcaaagaaacgtgaatttttaagtcaattaatggtgaataacttaaatagtactagcgtttattcagtaattgaaaatcattttgtctttcattcattaaatcaaatccacaaagactttgttgacttagagcgcatttttaatgttgaaagactattaatggactacctaagtgccttaccctaccaacttaccgaatcaagttatttaactttaactgtccatatcgtgctatccatttcacgtataaaaaatggagagtatgtcgcattaaacgatgatatttatgattctgtacaaaacacatttgaacacaaagtagcaagcgaacttgctgataaacttggtcaaatatatgacgtcacgtttaatcaggcagaaattgctttcattactatccatttacgtggagctaaacgaaaaaatcttaatgatacatcattaaataatcgttgtgaagaaaacaaaattaaagcgtttgttaacaaagtagaaatgatttccggtatgacatttgcagatttggatactttagtagatggactgacgctacaccttaatcctgcaatcaatcgtttgcaagctaatatcgagacctataatccgttaacagacatgattaagttcaaatatccaagactatttgaaaatgtaagattagctttaaatgattgttggcctgatttgatttttccagagagtgaaattgcttttatagttttacactttggtggctcgattaaaaaccaaggtaatcgatttttaaacatattagtcgtttgcagcagtggtatgggaactagtcgtctattatcaactcgtctagagcaagtttttagtgagattgagcgtattacacaagcatcagtcagcgatttgaagtcactagatttaagtcaatatgatggcattatttctactgtgaatttagacatcgactccccctatttaacggtaaacccattattaccagatagtgatatcagttatgtcgcacagtttttaaatacaaagtctacgttccaagagacgcatgataaatcatcaaacatgattgataaggatgatgttcatgttgaaacgaaagatgttgatggcaacacatcttttgaaaatgaacaaacttcatacttaacttcagttttcgaaaaacatttaagtgacgaaaaatcagaacaattattgcatcatatgcgttcgggtttaactttgcttgattcagtgaaaatagttagtaccgaagttaaacagtggcaaacatatatcgcagattatctatatcaatgcgatgtaataaacgatccaacgtcattcgctgaactactagagcaacgattgattgacaatccaggatggatattaagtccatatcctgttgcaataccacacctaagagacaatatgattaaacaccctatgattctaatcacagttttagaagaaccgttaacattgcctagtattcaaaatgacaatcaaacaattaaatatatgatttccatgtttattcctgacaatgattttatggcatcactggtaagtgacttgtccgaatttttaagtttgaaattagaatctattgatacttttatggaaaatccacaggaacttgaaacattattaagaaacaaatttttagaacgaattaaaaaacaatttatttag

SEQ ID NO: 408209 - DNA, 909 bp, Staphylococcus aureus
atgacaaagacaaaagcaattgatattataggtgcaccatcaacatttggacaaagaaaattaggtgttgatttaggaccgacagcaattagatatgctggattaatttcaagattaaagcaattagaccttgatgtatatgacaagggggatattaaggtacctgctgtgaacattgaaaaatttcatagtgaacaaaaaggattaagaaattatgatgaaattatagatgttaatcaaaaattaaataaagaggtttcagcatcaattgaaaataacagatttcctctagttcttggtggtgatcattctattgcggtaggttcagtatcagcaataagtaaacattataataatttaggtgttatttggtatgatgcacatggtgatttaaatatacctgaagagtcaccaagtggaaatattcatggtatgcctctaaggattttgacaggcgaaggtcccaaagaacttttagaattaaatagtaatgtaatcaagccagaaaacatcgtactaattggtatgagagatttagataaaggtgaaagacaatttatcaaagatcataatattaaaacatttactatgtcagatattgataaattagggataaaggaagtaattgaaaatacaatagaatatttgaagtcacgcaatgttgatggcgttcatttatctttagatgttgatgctttagatccgcttgaaacgccaggcactggtactagagttttgggtggtcttagttatagagaaagccattttgcattggaattactgcatcaatcacatttaatttcctcaatggatttagttgaagtaaatccattgattgacagtaataatcatactgctgaacaagcggtttcattagttggaacattttttggtgaaactttattataa

SEQ ID NO: 408210 - DNA, 483 bp, Staphylococcus aureus
atgaatcaaatagttttaaatattatcattgcattcttatgggtattatttcaagatgaagatcattttaaattctcgactttcttttctggatatctaattggtttaattgtcatttatatattacacaggtttttcagcgatgatttttatgttagaaaaatatgggtagctattaaatttttaggtgtttatttatatcaattaataacatctagcattagcacgattaattatattctttttaaaacaaaagatatgaaccctggattactttcatatgaaacaagactaacaagtgattgggcaataacatttttaacaattttaattattataactccagggtctacagtaatacgaatttctcaagactctaaaaagttttttattcatagtatcgacgtgtcagaaaaagaaaaagatagtttgttaagaagtattaagcattatgaagacttaatattggaggtgtcgcgatga

SEQ ID NO: 408211 - DNA, 1497 bp, Staphylococcus aureus
atgctaagtaacttattgattttaccaatgttattaccattcctttgtgccttaatccttgtatttttaaaaaataatgatcgtatttctaaatatttatacttaggtacaatgactatcaccacaattatttcattaatgctattaatttatgttcagcgtcaccgtccaattacgctagactttggaggatggtcagcgccctttggtatacagtttttaggagattctttaagtttgattatggttacaaccgcttcgtttgtgattactttaattatggcatacggatttgggcgtggcgaacataaagcaaatcgttatcacttgccatcgttcatattatttttaagtgttggcgtgataggctcttttctaacatcagatttatttaatttatacgtcatgtttgaaattatgttactagcgtcatttgtactcattacacttggacaatctgtagaacaattacgtgctgcaattatttatgttgtcttgaatattattggttcatggctattcttattaggtataggtttactttataaaacagtaggtacattaaacttttcacatattgcaatgcgtttgaatgacatgggagataatcgcactgttacaatgatttcattaatcttcttagtcgcatttagtgcgaaagcagcgctggtcctttttatgtggctacccaaagcctacgctgtgttaaatactgagcttgcagcattatttgcagcgttaatgaccaaagtaggggcctatgcattaattcgattcttcactttactatttgatcaacataatgatctcatacatccattgctagcaactatggctgctataactatggtcatcggcgctataggtgtcattgcttataaagatattaaaaagattgcagcttaccaagtcataatctcaataggatttatcattttaggtttaggaacaaacacgtttgcaggtattaatggtgcaatattttatttggtaaatgacattgttgtaaaaacattgctattctttattattggtagtttagtttacattacaggctatcgacaatatcaatatttgaatggcttagctaaaaaagaacctttatttggagttgcgtttattataatgatttttgctattggcggcgtgcctccatttagtggctttccggggaaagtacttattttccaaggtgcattgcaaaatggcaattatattggactagcgttaatgattattactagtctaattgcaatgtacagtttatttaggatacttttttatatgtattttggagataaagatggggaggaagttaattttaagaaaatcccgctatatcgaaaaagaattttaagtattttagtagttgtggttatcgcaatcggaattgctgcacctgttgtgttaaatgttacaagtgatgcaactgagttgaacacgagtgatcaattatatcaaaaacttgtaaatccgcatttgaaaggagaggactaa

SEQ ID NO: 408212 - DNA, 189 bp, Staphylococcus aureus
ttgtacgaacaaggtggcgacattgttaaagggtatgttaaatatcataatgatgatgaacaaaatgtagaatatgatttttataatttaaatggtgagtatggttatgaggtattaaaaatgtatgctgataataaaactatcaatagagacaaattgcatttagatatctatttattcaaatcataa

SEQ ID NO: 408213 - DNA, 975 bp, Staphylococcus aureus
atgagcgacaatattgtagctatttatggagatgtgcctgaattggttgaaaaacaaagtgcagaaatcatatcacaatttttgaaaagtgatagagatgactttaactttgtgaaatataatttatacgaaacagagattgcaccaattgttgaagaaacattaacattgcctttcttttcagataaaaaagcaattttggttaaaaatgcatatatatttacaggtgaaaaagcgccaaaagatatggctcataatgtagatcaattaatagaatttattgaaaaatatgatggcgaaaatttgattgtctttgagatatatcaaaataaacttgatgaaagaaaaaagttaactaaaactctaaaaaagcatgcaaggcttaaaaaaatagagcaaatgtctgaagaagaaataaaaaaatggattcaaagtaaattaaatgagaatttcaaagatatcaaaagagatgcattagatttatttattgagttgacaggtattaactttaatattgtctcacaagagatagaaaagttgattttatttttaggcgatagaccaacaattaataagcaggatgttaaccaaattattaatagaagtttagagcaaaatgtatttttactgactgaatacattcagaaaagaaagaaagaacaagcaattcatttagtaaaagatttaataactatgaaagaagaaccaattaaattacttgcactaattacaagtaattaccgattattttatcaatgtaagattctgagtcaaaaaggatatagtggacagcaaattgctaaaacaataggagtgcatccatacagagtaaaattagcgttaggacaagtaagacattatcaacttgatgaattattgaatattgtagatgcttgtgcggaaactgattataaacttaaatcatcatatatggataaacagttaatactggaattattcattctatctttataa

SEQ ID NO: 408214 - DNA, 462 bp, Staphylococcus aureus
atgccaccgacaccagaagtaccgagtgagccggaaacaccaacgccaccaacaccagaggtaccaagtgagccggaaacaccaacaccaccgactccggaagtaccaagtgagccggaaacaccaacaccaccgacaccagaagtgccgagtgagccagaaacaccaacaccgccaacaccagaggtaccagctgaacctggtaaaccagtaccacccgcaaaagaagaacctaaaaagccttctaaaccagtggaacaaggtaaagtagtaacacctgttattgaaatcaatgaaaaggttaaagcagtggcaccaactaaaaaagcacaatctaagaaatctgaactacctgaaacaggtggagaagaatcaacaaacaaaggtatgttgttcggcggattattcagcattctaggtttagcattattacgcagaaataaaaagaataacaaagcataa

SEQ ID NO: 408215 - DNA, 1320 bp, Staphylococcus aureus
atgtgtaatgataccttagaattactaagaataaaagatgaaaatataaaatatataaaccaagaaattgacgtcattatcaaaggaaaaaaagcaacagtggttaatgctgtactaacgtataagccttcggcctgttattgttgtggagttaaaaatgaaggacaaattcataaacatggtaagcgtgtttctcgtattactttacttaaaactcaagggtataacacatacctcaacttagctaaacaacgttttaaatgcttagaatgcaatggcacttttactgctaaaacgtcaattgttgatgagtcgtgttttatctcaagatgtgttactcaaaaagttatagaagaagctactaaagttaaaacagagattgatactgcagaagataactgtatctctccatctactgtaagtcgtattagaactaaagcggctaattcattacgaattaaaccgtttaattgtttgccagaacacatcgctatggatgaatttaaaagcgttaaaaatgtaactggatcaatgagtttcatttttatagataatgatactcatgatgttatagatattttagaaaatagaactacaagattcttgcgtgcctatttcgagcgattcgatttaaaaaatcgacaacaagttaagacggttactattgacatgtatgaaccctatgtccgattatttcgcgacctatttcctaatgcagctattatttttgacagattccatatcgttcaacatttaaatagggaacttaataagtatcgtgtacaagttatgaatgaataccgtaataaaaaaggacctaattatacaatttttaagaataactggaaagttctattgatggatactagtaaaaccatatttagtaaatacagatggaataaatcttttaaggcttataaacgctcatctgacattgtagaattcatgctttcaaaagacgatatactacgacgctcctacgaacttgtccaaggattaagaaaagatctaaggttatgtaattggcctaaatttattaatcgtttaaattcagttagtaaaaagtctgtgagtaaaggtgtatggaaagtggttaaatattatagaaaacatcaaaggatgttaagaaatacaatttattacccagcatttaataatggtgctatagaaggaattaataataagataaaattaatcaagcgaatttcttttggttacagaaatttcaacaactttaaagcacgtataatgatgattttcagcttatacaaaggagaaaaaaagaagacaaccaagcccaataatggactggccgcctaa

SEQ ID NO: 408216 - DNA, 477 bp, Staphylococcus aureus; identical to SEQ ID NO: 407374

SEQ ID NO: 408217 - DNA, 267 bp, Staphylococcus aureus
atggttccaagagaatattttcatcctaaacctaaagtgaatagctcacttatcagattaaatagaaaaaaatcaagaatatcacacaaagataaacagaagtataattatttcgttatgaaatgggttaacaaagaatacaagaaaatatttacaaaaaatcaatttaacaattccttaaaacatgcaggaattgacgatttaaacaatattagctttgaacaattcttatctcttttcaatagctataaattatttaataagtaa

SEQ ID NO: 408218 - DNA, 477 bp, Staphylococcus aureus
atgaaagaaagatatggaacagtctataaaggctctcagaggctcatagacgaagaaagtggagaagtcatagaggtagacaagttataccgtaaaaaaacgtctggtaacttcgtaaaggcatatatagtgcaattaataagtatgttagatatgattggcggaaaaaaacttaaaatcgttaactatatcctagataatgtccacttaagtaacaatacaatgatagctacaacaagagaaatagcaaaagctacaggaacaagtctacaaacagtaataacaacacttaaaatcttagaagaaggaaatattataaaaagaaaaactggagtattaatgttaaaccctgaactactaatgagaggcgacgaccaaaaacaaaaatacctcttactcgaatttgggaactttgagcaagaggcaaatgaaaaacaagaaaatgcattatctgattattattctttcaaggactag

SEQ ID NO: 408219 - DNA, 477 bp, Staphylococcus aureus; identical to SEQ ID NO: 407374

SEQ ID NO: 408220 - DNA, 267 bp, Staphylococcus aureus; identical to SEQ ID NO: 408217

SEQ ID NO: 408221 - DNA, 477 bp, Staphylococcus aureus; identical to SEQ ID NO: 407374

SEQ ID NO: 408222 - DNA, 267 bp, Staphylococcus aureus; identical to SEQ ID NO: 408217

SEQ ID NO: 408223 - DNA, 297 bp, Staphylococcus aureus
atggcagaagttgatatttctatattaagtatggttccaagagaatattttcatcctaaacctaaagtgaatagctcacttatcagattaaatagaaaaaaatcaagaatatcacacaaagataaacagaagtataattatttcgttatgaaatgggttaacaaagaatacaagaaaatatttacaaaaaatcaatttaacaattccttaaaacatgcaggaattgacgatttaaacaatattagctttgaacaattcttatctcttttcaatagctataaattatttaataagtaa

SEQ ID NO: 408224 - DNA, 267 bp, Staphylococcus aureus; identical to SEQ ID NO: 408217

SEQ ID NO: 408225 - DNA, 267 bp, Staphylococcus aureus; identical to SEQ ID NO: 408217

SEQ ID NO: 408226 - DNA, 267 bp, Staphylococcus aureus; identical to SEQ ID NO: 408217

SEQ ID NO: 408227 - DNA, 312 bp, Staphylococcus aureus
ttgcaattaactttgactattgttgatgaagaagatttggaagaaactactgaggttatggttgatttgattgaaaatgaagttactttacctaaactacattcagtttattttgttcatgtaatgcatacactaacagaacaatttgtaaaaggtattgataatagtattgtacaagttttaataatgccttttttgtacgccaatacttactatacaatcgaccaactcattgacgcatacaaaaagaaaatgaaaaggaaccacgaaagacaagatggaacagcagacgcaggaaaaggatacgtgtaa

SEQ ID NO: 408228 - DNA, 147 bp, Staphylococcus aureus
atgcgccgagcacatgcaaaaaagcccctaacaactaaaagttgtaaggtaaaagagggatacatgcaccgagcgcaagcaaaaaagcccctaacaactaaaggttgtaaggaagaagagggatacatgcaccgagcacatgcataa

SEQ ID NO: 408229 - DNA, 822 bp, Staphylococcus aureus
gtggatcaatataaagagatagaacttaataaaaaaattaaagttgataatgtaagagacattagagcgatttatgataaattagtttcaaatgaaattaacgaacaagataagttagatggagagctatttcgtaaaaattttgtcggtgtgcatgatgggtcaacgaataaatatatacatgttgggttacaacctgaaaccaaaattgttgaatatataggtgaaatgctaacatttttaaaatattttgatgcgcctcagccgttcaaaatcatggctagtcattatatgtttgaatatatacatcctttttatgatggcaatggtagagttggaagatttataattgccaagctcttgagtgattattatgataattatactgctttgacattttcatatgttataaataggaataaatcgaaatattacaaggcgtttatgactgcttcaaatcatttgaattgtggtgatttgacggaatttattgacacaatgcttgagttattgatagcaggacaagaaagaatacttgatgagttaataccaaaaatggatgcgactgaaaaattaacgctttatttaactagtcattataaaaagatagattatgaatttttgtatctcctttcaatggataaattgtttggaaataaaagaaatagattaacattaattgatttagaaaacatattgggagtaggaagagtaaaaattaataatacaattaaaaaatttggtaactacttagttaaaattaaaagtagaccaacaatttatgagataagtgatgaatttctaaattcgattataaaataa

SEQ ID NO: 408230 - DNA, 450 bp, Staphylococcus aureus
atgaatattgaaaaaatcgaacaaataatcaaattagtgaaggaaaatgatgttaagaaatttaaatataaaaattttgaagatgaaatagaaattgacttcactgattcgaatcatttggctgcacacagtaatcaatcaaatcaaagtatgaacaataatgatttgacagcttcaaaagtgaatgataactccgatgtttcgacaaatgattatcatgacattaaatcaccaatggtaggtacattctttttacaagacagtaaagaattaactgaaccaattgtgaaagtcggtgacaaagttaacaagggagatattataggatatgttgaagcgatgaaagtattaaacgaggtaacaacagatgttgctggagaaatcactgaaatagtagctgatcatggcacaaatgttgaatacgaccaagttttggtacgtattaagtaa

SEQ ID NO: 408231 - DNA, 243 bp, Staphylococcus aureus
atgtcagcttactataatgtgcaagttggggtggggccccaacacagagaatttcaaaaagaaattctacagacaatgcaagttgggctccaacatttgtgtgaaatctatcgtatgcctattttctctgctaagttcctatacttcgtcaaacatttggcatatcacgagagcgctcgctactttgtcgttttgactatgcatgttcacttctattttggcgaagtttcttccgacgtctag

SEQ ID NO: 408232 - DNA, 414 bp, Staphylococcus aureus; identical to SEQ ID NO: 406627

SEQ ID NO: 408233 - DNA, 690 bp, Staphylococcus aureus
atgaagttatcatttcacggtcaatcaacgatttatttagaagggaacaacaaaaaggttatcgtagatccgtttatttcaaataaccctaagtgtgatttgaatattgaaacagtgcaggtagactatatcgttttaacgcacggtcattttgatcattttggtgatgttgtagaactagcaaagaaaacagaagcaacagtaattggaagtgcagaaatggctgactatctttcttcatatcacggtgttgaaaatgttcatggtatgaatattggtggtaaagcaaactttgatttcggaagcgttaaatttgttcaagcatttcatagttcaagttttacacatgaaaatggtattccagtttatttaggtatgccaatgggtatcgtgtttgaagttgaaggaaaaacaatttatcatactggtgatacaggtctgtttagtgacatgtcacttattgcgaaacgtcatccagttgatgtatgttttgtaccaattggagataattttacgatgggtattgatgatgcaagttatgctattaatgaatttattaaaccaaaaatttctgtaccgattcattatgatacattcccattaatcgaacaagatccacaacaatttaaagatgctgttaatgtaggggacgtgcaaattttaaaaccaggtgaatctgttcagttttaa

SEQ ID NO: 408234 - DNA, 1170 bp, Staphylococcus aureus
atgcaacaacatttatcaaaaactgcatatgtatattcagataagttattacaatatcgatttcatgaccaacatcccttcaatcaaatgcgtttaaaattaacaacagagctacttttgaatgcaaatttattgtctccagaacaaatagtacaacctagaattgcaacagatgacgaattaatgttaattcataaatatgattacgtcgaagctattaagcatgcttcacatggcattatcagtgaagatgaggctatgaaatatggattaaatgatgaagagaatggtcaatttaagcatatgcaccgccatagtgccacaattgttggaggcgctttaactttagcagatcttattatgtcaggcaaagcattaaatggttgtcacttaggtggtggtttgcatcacgctcaacctggtcgagcaagtggtttttgtatatacaatgatattgcaattactgcacaatacttagctaaagaatacaatcaacgcgttttaatcatagataccgatgcacatcatggggatggtacacaatggagtttctatgctgataaccatgttactacttattctatccatgaaaccggaaagtttcttttcccaggctctggtcactatactgagcgcggtgaagatatcggctatggacacactgtaaatgtcccacttgaaccgtataccgaagattcatcatttttggagtgttttaaattaacagttgagccagtcgtaaagagttttaaacctgatattattctaagcgtaaatggtgtcgatatacattatcgtgatccactaactcatctaaattgtacgttacattcattatatgaaattccatattttgtaaaatatttagctgatacttatacgaatggaaagataattatgtttggtggcggaggctacaatatttggagagttgtaccacgtgcatggagtcatgtattcttaagtttaattgatcaaccaattcaaagtggttatttaccgttagaatggattaataaatggaaacattattcatctgaattattacctaaaagatgggaagatcgtttaaatgattatacctatgtcccccgcacaaaagaaattagtgagaaaaataaaaaattagctttgcatatagcgagttggtacgaatctactcgtcaataa

SEQ ID NO: 408235 - DNA, 3825 bp, Staphylococcus aureus
atgagctggtttgataaattattcggcgaagataatgattcaaatgatgacttgattcatagaaagaaaaaaagacgtcaagaatcacaaaatatagataacgatcatgactcattactgcctcaaaataatgatatttatagtcgtccgaggggaaaattccgttttcctatgagcgtagcttatgaaaatgaaaatgttgaacaatctgcagatactatttcagatgaaaaagaacaataccatcgagactatcgcaaacaaagccacgattctcgttcacaaaaacgacatcgccgtagaagaaatcaaacaactgaagaacaaaattatagtgaacaacgtgggaattctaaaatatcacagcaaagtataaaatataaagatcattcacattaccatacgaataagccaggtacatatgtttctgcaattaatggtattgagaaggaaacgcacaagtcaaaaacacacaatatatattctaataatacaaatcatcgtgctaaagattcaactacagattatcacaaagaaagtttcaagacttcagaggtaccgtcagctatttttggcacaatgaaacctaaaaagttagaaaatggtcgtatccctgtaagtaaatcttcagaaaaagttgagtcagataaacaaaaatatgataaatatgtagctaagacgcaaacgtctcaaaataaacatttagaacaagagaaacaaaaagatagtgttgtcaagcaaggaactgcatctaaatcatctgatgaaaatgtatcatcaacaacaaaatcaacacctaattattcaaaagttgataatactatcaaaattgaaaacatttatgcttcacaaattgttgaagaaattagacgtgaacgagaacgtaaagtgcttcaaaagcgtcgatttaaaaaagcgttgcaacaaaagcgtgaagaacataaaaacgaagagcaagatgcaatacaacgtgcaattgatgaaatgtatgctaaacaagcggaacgctatgttggtgatagttcattaaatgatgatagtgacttaacagataatagtacagaggctagtcagcttcatacaaatgaaatagaggatgaagctgtatcaaatgatgaaaataaaaaagcgtcaatacaaaatgaagacactgatgacactcatgtagatgaaagtccatacaattatgaggaagttagtttgaatcaagtatcgacaacaaaacaattgtcagatgatgaagttacggtttcggatgtaacgtctcaacgtcaatcagcactgcaacataacgttgaagtaaataatcaagatgaactaaaaaatcaatccagattaattgctgattcagaagaagatggagcaacgaatgaagaagaatattcaggaagtcaaatcgatgatgcagaattttatgaattaaatgatacagaagtagatgaggatactacttcaaatagcgaagataataccaatagagacgcgtctgaaatgcatgtagacgctcctaaaacgcaagagcacgcagtaactgaatctcaagttaataatatcgataaaacggttgataatgaaattgaattagcgccacgtcataaaaaagatgaccaaacaaacttaagtgtcaactcattgaaaacgaatgatgtgaatgatggtcatgttgtggaagattcaagcatgaatgaaatagaaaagcaaaacgcagaaattacagaaaatgtgcaaaacgaagcagctgaaagtaaacaaaatgtcgaagagaaaactattgaaaacgtaaatccaaagaaacagactgaaaaggtttcaactttaagtaaaagaccatttaatgttgtcatgacgccatctgataaaaagcgtatgatggatcgtaaaaagcattcaaaagtcaatgtgcctgaattaaagcctgtacaaagtaaacaagctgcgagtgaaagcaagactgcgactcaaaacacaccatcatcaagtactgattcacaagagtcaaacacgaatgcatataaaacaaataatatgacatcaaacaatgttgagaacaatcaacttattggtcatgcagcaacagaaaatgattatcaaaatgcacaacaatattcagagcagaaaccttctgctgattcaactcaaacggaaatatttgaagaaagccaagatgataatcaattggaaaatgagcaagttgatcaatcaacttcgtcttcagtttcagaagtaagcgacataactgaagaaagcgaagaaacaacacatcaaaacaatactagtggacaacaagataatgatgatcaacaaaaagatttacagctttcattttcaaatcaaaatgaagatacagctaatgaaaatagacctcggacgaatcaaccagatgttgcaacaaatcaagctgtacaaacttctaagccgatgattcgtaaaggcccaaatattaaattgccaagtgtttcattactagaagaaccacaagttattgagccggacgaggactggattacagataaaaagaaagaacttaatgacgcattattttactttaatgtacctgcagaagtacaagatttaactgaaggtccaagtgttacaagatttgaattatcagttgaaaaaggtgttaaagtttcaagaattacggcattacaagatgacattaaaatggcattggcagcgaaagatattcgtatagaagcgccaattccaggaactagtcgtgttggtattgaagttccgaaccaaaatccaacgacggtcaacttacgttctattattgaatctccaagttttaaaaatgctgaatctaaattaacagttgcgatggggtatagaattaataatgaaccattacttatggatattgctaaaacgccacacgcactaattgcaggtgcaactggatcagggaaatcagtttgtatcaatagtattttgatgtctttactatataaaaatcatcctgaggaattaagattattacttattgatccaaaaatggttgaattagctccttataatggtttgccacatttagttgcaccggtaattacagatgtcaaagcagctacacagagtttaaaatgggccgtagaagaaatggaaagacgttataagttatttgcacattaccatgtacgtaatataacagcatttaacaaaaaagcaccatatgatgaaagaatgccaaaaattgtcatagtaattgatgagttggctgatttaatgatgatggctccgcaagaagttgagcagtctattgctagaattgctcaaaaagcgagagcatgtggtattcatatgttggtagctacgcaaagaccatctgtcaatgtaattacaggtttaattaaagccaacataccaacaagaattgcatttatggtatcatcaagtgtagattcaagaacgatattagacagtggtggagcagaacgcttgttaggatatggcgatatgttatatcttggtagcggtatgaataaaccgattagagttcaaggtacatttgtttctgatgacgaaattgatgatgttgttgattttatcaaacaacaaagagaaccggactacctatttgaagaaaaagaattgttgaaaaaaacacaaacacaatcacaagatgaattatttgatgatgtttgtgcatttatggttaatgaaggacatatttcaacatcattaatccaaagacatttccaaattggctataatagagcagcaagaattatcgatcaattagagcaactcggttatgtttcgagtgctaatggttcaaaaccaagggatgtttatgttacggaagcagatttaaataaagaataa

SEQ ID NO: 408236 - DNA, 639 bp, Staphylococcus aureus
atgaatttattttacaatcctaaatatgtaggagatgtcgcatttttacaaattgaaccagttgaaggtgaattaaactacaataaaaaaggtaacgttgttgaaattactaatgaaggtaatgttgtaggttataatatttttgaaattactaatgaaggtaatgttgtaggttataatatttttgaaatttcaaaagatataacaattgaagaaacaggtcatattaaattaactgatgaacttgtaaatgtattccaaaagcgtatttcagaagctggttttgattataaattaaatgctgatctatcaccgaaatttgtagttggctacgttgaaactaaagacaaacatcctgatgcagataaattaagtgtactaaatgtaaatgttggaaatgacacattacaaattgtatgtggcgcgcctaacgttgaagctggacagaaagttgttgttgctaaagtaggtgcagtgatgcctagcggtatggtaattaaagatgctgaattacgtggtgttgcctcaagcggtatgatttgttcaatgaaagaattgaatttacctaatgcacctgaagaaaaaggtattatggtattaaatgacagctatgaaattggacaagcattttttgaataa

SEQ ID NO: 408237 - DNA, 315 bp, Staphylococcus aureus; identical to SEQ ID NO: 406588

SEQ ID NO: 408238 - DNA, 843 bp, Staphylococcus aureus
atgaaaatcggggatatatctattcattatctaaatggtggcaatacaaaaatggatggcggtgcaatgtttggtgttgttccgaagccgttgtggtcaaagcaatacaatgcaaatgaacgaaatcaaatcaatttaccgacacatccaattttgattcaaacggctcaatataatttgattatagatgcgggtattggtaatggtaaattatctgaaaagcaattacgtaattttggtgtagatgaagaaagtcatataactgctgatttggcaaattataatttaacgccaaaggatattgattatgtactaatgacacatatgcattttgatcatgctgccggtttgactgatcaagcgggacatgcaatttttgaaaatgcgattcatgttgtgcaacaagatgagtggcatgagtttattgcacctaatataagaagtaaatcaacttactgggataagaataaaggcgattatagtaacaagttgattttattcgaaaaacattttgaaccggttccgggtatcaagatgcaacatagtggaggtcatagctttggccacacaatcattacgattgaaagtcaaggagataaagcagttcatatgggtgatatattcccgactactgcacataaaaatcctctatgggtaacagcatatgatgattatcctatgcaatcaattcgtgaaaaggaacgcatgataccatattttatccagcaacaatattggttcttgttttatcatgatgaaaactactttgctgtaaaatacagcgatgatggcgaaagtatagatgcatatattttacgtgaaacattagttgataataactaa

SEQ ID NO: 408239 - DNA, 816 bp, Staphylococcus aureus
atgactaaaaatcagaatttcattgaaacgaaagagtataaacgatttgctgaattttgcgatgcttgtatcaaatatcaatatattgggatctgctatggtcaacctggtgtcggaaaaactttatcttctaggtattacacaaattggaatactattgaaaagcaagttaatcatagagggtgggaagatctagctagtaaaacgactgatgatatattatcggtgaataagatattttatactgcaccggctgaaaaacaaacaagattaagtaatgatctatatagtattagtgcaagtattgatttgggtcaaaaattacacatcgtaaataagtatggtcatgatcatagtaaacattatagtgatatgtttaaatatattgatttaattatagtagatgagattgatcgccttaaagtgcaacatttagagcaattaagagctatttatgatgaacataatttagcaatgatatttattggtatgccaggtatagagaaaaaactatctcgttatcctcaactatattcgcgtataggttttgcacatgaatttgataatctaagtaaagacgagacgcatcatatattagaatataagtggcaagatttaggatttgatctaaaactcgaagattttactgattatgaggcaataacgacgattattaaaattacaaaagggaattttaggctgattcatcgtttatttgcgcagatagatagaattatggatataaatggcttagataaaatcagtacagaagttgtagaaacagctagagatagtttagtcataggtattcgttaa

SEQ ID NO: 408240 - DNA, 1443 bp, Staphylococcus aureus
atgaaaaacaaggagaagtatctaactaatttttctgaagccaaacgtaaagaagctactcaaaagtacaatattataaaaccttttatcttgggcaagcaatctttatcaagcatttctaaaagcaaaggtattgcgttaagtacactttataggtggaataaattatataaggaacaaggtcttactggtctaattcataatacaagagttgataaaggtgagcataaattaaaacaaaacataatagacgagattaaacgccttgcactcaagaataaaagaaatagtattgctacgattcataggaaaatcgctaattattgtatagagaataatttttataaaccaagttataaacaagtttatagtattattaaagcaatgcctaagtctgttattgatttctctcaccaaggtgaaaaatactatcaaaataagtacgatttaatacaaataagagaatcctcaagacccaatgaaatatggcaagccgaccatactttgctagatatttatatattagatcaaaaaggtaatatcaatagaccatggctaaccattattatggatgactatagtcgtgcaattgcaggctactttataagttttgatgctcctaatgctcaaaacacagcattaacactacaccaagcaatatggaataagaataataccaattggccagtatgtggtatacccgaaaaattctacacagatcacgggagtgactttacctcgcaccacatggaacaagtcgctattgatttgaaaattaacttgatgttttcaaaagttggtgtccctcgtggtcgcgggaaaatagaacggttttttcagacagttaaccaaactttcttagaacaacttcctggatatataaacaataatgatacttctagcgatttaatagattttcaaaatttcgaagaaaaattacgatactttttaattgaagattataatcaaaaagagcacagtgctatccagagcactcctatcaatcggtggaacagtaatcatttttttcctaatatgccaagcagtttagaacaacttgatttattattattagaaatacctaaatctagaaaaattcattcagatggtattcattttcaaggctttagatacagtaatacaaacctaactgcttatgtaggtgagtatgtattaattcgttacaatcccaatgatatggctgaaatacgcgttttttatagagatgaatttctttgtacagcaatatcccctgatttagctgattattcaattgatataaaagagatacaacacgcacgtagtcagagaagaaaacacttaaaacaaaacattgctagtccaagcaccactgatttaattaaggaagaaaaaagttatggttactcacctcaagaaacgaccaaaaacgtcaaaaaattaaagaggtatcgtaatgactaa

SEQ ID NO: 408241 - DNA, 900 bp, Staphylococcus aureus
atgaaaaacagccaaaatattgtttgtattggtgcagcaaatatagataaacaattatatttaaaatctgaattggttaataaaagttcaaaccctgtatcttcgataagcgtatctggaggtgtagctaggaatttagcgtataatattggcaaattaagtaataaaaaaactattctattaactttattaggtaatgataaagaagctgattatattttaaatgaagctaataagtttatcgatttaaaacatataaaaattatagaaaatatgaacacaggaatgttcacttctgtaatagattataatggggaaatgatatgtggttttgcagatatggatatatataacttaataaataacaaatatttaaatgaaaaaatagaagtaataaaaaatgcagattgtgtggttgtagactctaatattcccaaggaaagtatacaatatttaattcagttgtgtggaaagagtaatattccaataggtataatcccagcatctataaagaaggtgagaaacatactaaaaaacttagcaaagatagactatttaatatttaataaaaaagaagctgaagctttttggaacgtttctttaaatactaaaagtgattataaaaaaataaaaaaaattagtaaaacttcagaaataaaaaatatagttatcactaatggaaatgatgatatcttttatacaaatggagaattaagcatatttaaaaatgttcaacagagttcaaatataattaatgacacaggtgcaggagatgttttttcagcatcagtatttcattattggcttgaaaactatgaagttgataattacttagaaatggcattgtttaatgcctgttctacagtgagcactatatataatacttccatgattaattag

SEQ ID NO: 408242 - DNA, 906 bp, Staphylococcus aureus
atgcttaaaaaggcaaaattaatcttaatagcaacgctactgctatcaggatgttcaactaccaataacgaatctaataaagaaacaaaatctgtaccagaagaaatggaagcttcaaaatatgtaggacaaggcttccaaccacctgcagaaaaagatgcgattgaatttgcgaaaaagcataaagacaaaattgccaaacgaggcgaacaattttttatggataacttcagtctaaaagttaaagctacgaatgttgtaggtagtggcgacggcgtagaagtatacgtgcattgtgatgaccacgatatcgtatttaatgcgagtattccatttgacaaatcaattattgacagtgatagctcattaagaagtgaggataaaggcgatgatatgagtactttagttggtacagtgttgagtggctttgaatatcgagcacaaaaagaaaagtatgacaatttatataaatttttcaaagataatgaaaagaaatatcaatatacaggatttacaaaaaaggcaattaacaagacacaaaataatggctatgaaaatgaatatttttatatagttgcaaatataccgacgctccaagaatatagaaaatattacgaacccctaataaagaagaataatctgaattttaaaaaaggtatgaaagaagcaaggaaaggagtaggctataaagctgaaatagaagtacatactacattgttttcgaaaagtagtaacttttcaaaggacaaaaaattagatgatgttatagatttgtctgaaagtacgaaaaagttacaccttaattttgaaaatacgaaaatatttttacaactagcaaaatctactattagtactaatcgagttaattacagtgataatgagtctataaggattgaggtcgaatga

SEQ ID NO: 408243 - DNA, 771 bp, Staphylococcus aureus
atgggaactttaattaaacaagaatgtttcaaattatttaaaaagaaatcaacttttatcgcacctattgtctttattctactaatggttgctcaaggttatattgctacaaaatacaatgaaatttttacaccacaggaatcttttacatctgcttataatggtttttcatggtttgcatttttattaattattcaagcaagtacaatcatttcaatggaatttcattacggtacgattaaaaatttactctatcgtgaatattcaagaacaactatgattgttagcaaaatcatcacattatttattatttctttaatttattttgttattacaattattgcttcaattgttattgggtctttattctttaatgatttaaatatatttgaaagtagcggtaatcaattatctttattgaatcaattattattagttagtttaggtacatttgttggtgtttggttagttttaagcttaacgttgctattatcatctgcaactaattcaacgggtgtagccattgctgtaggtattgttttttattttgcaagttctattttagcagttattcaaacggcacttttagaaaaaatagactggctaaagtggaatcctattaatatgatgaatattatgcttcaaacagttgaaaaaggctttagtaagtcgacgaaattagaacttcatgaattgtttattggtaatattgcttatatttctattttcttaatacttgtagtatttattttcaagaagaaaaatatttag

SEQ ID NO: 408244 - DNA, 1413 bp, Staphylococcus aureus
atgactaaatttcaatataaaaaaattattgatgatattattaataaaattaacaacggtattttatctcctggagataaattgtactcgcaaagaaaattagctaagtactataatgtaaataaatccacagttatacaagctttagatattctaaaaagctatggcatcttagatacaattgaaaaaaaaggtatttatgtatcccagtataaatggaattcttatattaccaataatattcattggcaagattatataggcaacagcttttctaaaaataaccagtattatattcaaaaaattaatgaaatagaatttaatactgatatcgtccgattaggtactggagaactatcaccaaaactaattccaaaccatatatttaaaaaaatattaactaatgatattgaagaatctttacaaactaactatgaagaacctaaaggaaatctaaagttaaggatagaaatagtaaagtatatgaagcgaagaggagttgattgtaatatcaataatatatgtattacatccggtgctgtacaaggtttaaaactaattgcagacggactgttaattccacaatctaaaattataattgaaacaccatcatacattaattccatacgtacttggcataatatcagagcgaaaattattcctttgtccatcaattacatcaaacagaatattaacaatatctttaaattaaatagtgattataggcacagtattttttactgtatacctacgctgcataaccctactcaaaatacttatagtaaagaagagaagcaaaaaattatagatcaatgtcataaagaaggtattccaattgtggaagatagtatatactctgatttatggttcagccctaaccaacaaatttctatgaaagctttaaaaaatagtgataatgttttatatttaggtagtttatctaaaactgtaagtcccggtttacgtattggttggattatagcagatgaaaaagtaattcatcatttagccgatttaaaaatgcaaaatgattatggtgcaagttctatatcacagtatattgccacaacgtggttaagtaattatcatgaagatcatttatataaattaaaaatcgaactaaaattacgaaaatctatttttataaagtcattaaagaaacatctatctaagtttggatattggaatgaaccccaaggctcattttatatctggtttaagctatctgttccagtaaatataaagctcttatttaacgaagcaataaaagaaaatatactaatacacccaggagaaatatatgacattaactctaaaagctatatccgcttttcatactcatatatcgacaaggaagaaattgaccaaagcttaaaaaaattaagtgaaattataaatagaatacgaacttag

SEQ ID NO: 408245 - DNA, 981 bp, Staphylococcus aureus
ttgacactaaaattagaaaaagctgtattttcaatggagataaaaaaagatttgaagttattaatgaaaaaggataattaccacaatattttcgctttgatttttgactggttggtaattctcgggagtgcatgtataagtatctatatgagtaatctcattatttatattataagtattattttaattggaagtcgaatgagggcgtttgataacttaatgcacgaagcatgtcatcgttcattatttacaaataagttttataataaatggattgcttgtcttttagtagcattccctatatttacaagctttactacatattgtaattctcattttaaacatcatagaaatttatgggatgaggaaaaagacccagatactaaacgatatcgcattgtaggtttagataagccgcaaaaagatgtgaaaaaatttataattaatcacattgtaaaggtactatttttattccatgtgcctaaatatgttttaggtacagtttcagctaacttatacagtagggatacacctaaatcagaaatatggactagaaatattttctgggtaacaattattacgttatcaattatgtttaatttttggttatatgttattctttattggtttataccacttttaacaacttttcagattattcgttattgggcagaaatggctgaacactctggattgaataatgatagtgagttaacagcaagtcggaatacttttggtatgccttggacaatatttttatttcatcctcaccatgataattttcacttagttcaccatttattcccagcaattccacattataatttgaaaaaagcacatattatattaatgaaagatcaaaaatatagagaagcacaccattgtactgggttcttcaagacgacactaccgggtttttatagtgtagtaaaagatatttgtacaccgaacattgttgggaagggggaggatgcgaattga

SEQ ID NO: 408246 - DNA, 618 bp, Staphylococcus aureus
ttgatacaaccagttttacacggtattttattagcattggggcttattttgcccctaggagcgcaaaacgtgtttgtatttaatcaaggtgctaatcaaaaaaaaatgataaacgcattgccggttgttataacggctggattatgtgacacttttttaataataattgctgtactgggtgtttcactaatattaatgtcattaccagttctacaattatttatttatatagttggtttgttttttctattgtacatggcttggtctttatggaaagaaaagcctaacactctagagaactatgaaccgatgagtacaaaaaagcaaataggttttgctatatctgtttcgttgttaaatccacatgcaattatggatacagttggtgtaattggatcaagcgcatctgtctattctggtttagaaaagatacttttttgtattgccacaattatggtttcttggctatggttttttctgttagcaatattaggtaaggttttaggttctatagatagaacaggtaaatatatattatttttaaataaaatctctagtataataataattgctgttagtattgttattgtaaaaaatatattaaagttaattttataa

SEQ ID NO: 408247 - DNA, 612 bp, Staphylococcus aureus
atggaacaaattatcactgaatttattagtcgttttgggtatgcagccatttttatattaattttattagaaaatgttttacctatcgtaccatcggaaattattctaacatttgctggtcttatgtctgttaaatcacatttatcaattttaaccttatttattattgcaaccatcgcatcgtttataggactgttaattttatattatatctgtcgtttgatttcagaagaacgtctatatcgctttattgatcgacacggtaagtggattaaattgaaaagtaaggatttaaagcgagcaaatgattggtttaaaaagtatggcgtatgggctgtatttatctgtcgttttatacctgtattacgtgtattgattaccattccagccggtgtaaaccgcatgaatgttgtgacatttaccgttatttcattaataggtacaacaatttggaacttcggtttaattttactaggacgcacgttgagcgatagctttggtatgttgatgactggtcttcatacatattcacgtattatgtatgttgtcatcattatcgcagtcatttactttgctatacgttacattggcaaacgtaagagagtaaaataa

SEQ ID NO: 408248 - DNA, 1278 bp, Staphylococcus aureus
atgaaggaaaaacgaactaacgtaaggtggatgttcgcgcttgcgttcttctttattggggttattgcgtatatggatagagcaaacatttcatatatcgctaagcaaatgatggatgatttagggatgacaaaaccacaatttggtttattggcatcattcttctctctaggttatgcattaatgcaagtaccatcggggatgttggctgaaaaattcggtccacgtaagatgattacaattgcattagtttggtggagtgcatttacaatcttaacgggtatgattaagaaccacggtttaatttatttagtgagattcttatttggtgtaggtgaggcgccaatgtacccttctaatgctgtgtttaactcattttggttctctaaaaatgaaaaaggtagagcatcaagtgcattattagcaggatcatatttcggacctgtattagcaccaatagttacaattgctattgttaacgcatttaactggcaagcagtattttatatttttggtgcagtagggattttaatggctgtattatgggcgattattgctaaagacttacctgagcaacatagaatggttaatgaagcggagaaacgtttcattatggaaaaccgtgatatcgtagctactgaaaagtcatcaccaccatggaatgatttctttaaacgttttagcttctatgcaattgcaattcaatactttgttgtacaatttatcattacattattcttaatttggttaccgacgtatttaacagaagtattccacgttaactttaaagaaatgagcattagttcattaccttggttattaatgttcttcttaatcttatcagcgggtgcaatttctgaccgtgtattaggattaggtcgttcaaaattcgtagctagaggtgtaattgcaatcgcaggatttattgtatttgcagtttcaattatctttgctgtacgtacaggaaatttatatgtaagtattttctggttatcactaggtcttggtggtatcggtatttcaatgggtatgagttgggcagcagcaactgatttaggacgtaacttctctggtacagtatcaggatggatgaacttatggggtaatataggtgcattaatcagtccgctattagcaggtctattcgtagaacatttaggttggacaatgacattccaattgttaatcgttccagcagtaatcgctgtgattatgtggttctatgtgaaaccagatcaacctttaattgttagtgatgataaagcaatagaaaaataa

SEQ ID NO: 408249 - DNA, 309 bp, Staphylococcus aureus
atgaccgtcaacatcgtattttctatcgtgttctgtatcagtatggttatattaggcatttatgtcgcaataactaaagatttcacactaatctcttttataaatcaaacgaccattgcagataaacacaagacccaaattgcatatatatttgcgctatgtatcagtttgagtgcagtatttttaatgtctgcaattctatgcttcgaatatgattttattgcattgtcattcttatttttaacgatagcattattacttatcgcattattctacgtttgcttttataaaattacaaaatatccataa

SEQ ID NO: 408250 - DNA, 267 bp, Staphylococcus aureus
atgaaaggctctaaacaaatacttttgattatgggcattatatctcttattgttttatttatttttacactattcatcatggcacaatatgcaaaacattatgaacaaaaatccgacagttccaacgcacatactttaaattcatcatcagccataattgagcaacatactatgtcgaatttagcgtctctagatttatacgctcctgttcgtaacattacttctagtcgtgatattcatcccatttatttcatgacaaaagattaa

SEQ ID NO: 408251 - DNA, 1638 bp, Staphylococcus aureus
atggataaagagttatggataaaaagagctaatgatagtttagttaaacatttttatgagcaacaatctgacattgaacagcgagaaggttttgaaagtaaattaacgtttggtactgcgggtatacgcggaaaattcggtcttggtgaaggtcgacttaataagtttactattgaaaaattggcattaggtttagcgcgttatttaaatgcccaaacaaacaatccaacaatagtcattcattatgatattagacatctttcaactgaattcgcccaaatcattgctaatgtattagcaaaccatcaaataatagtttatttacctgatacatataaaacgacaccggaattatcgttcgcggtgcgcaatcttaatactactgctggcattatgattacagcaagtcataatccgaaagactataacggcattaaagtatatagttctgatggcgcgcaactatcgaccgatgcatctgagcttgtaagtcgttatatcgaagaagttggcgatccattacagattgatatacctatttcaaaacaaaatacatcttatatcaagcctttcccgaaatctgtaactgatgactatatgaaacacattcaaaatatgattggctatattcctaaatctgatttacaagttgtgttcactagtttgcatggtacaagtgttccgattgtacctgagttattaaaatctttgaatttcaatcaattcaatcttgtagaagcacaatgtaaacctgatccgaattttagctcagttcaaagtgctaatcctgaagatcatcgcgcttttgatcaagcagtcgaacttgcaaataaaagtcatgcagacttattaatatcaactgaccctgatgcggatcgtcttggtattgctgaacgtgatgcacacggtcatatcacatattttaatggcaaccaaattggtgcgctgttacttaattatcgtattcaacaaacgtctcaattacgtcaccgcttaatgattcaatctattgtaagtagtgagttaacaaagtcattagcacgctataataatgttgaatacaaagaggtgctgacgggctttaaatttattgctcaggaaataagacaactggacgatcatcaaaatatgattttcgcatttgaagagagttacggttttctatcagagccttttgtacgtgataaagatgccgtacaaattgtgccactcattataaaatacgcttctgagttaaaattatatggcaaaacattgaaagatgaattagaacagatttatcaaactgttggtagacatgaggatacattattctcgcatacgctagaaggtttagaaggtaagaaaaaaattgaatcaattatgacacatttccgttcaaatccaccgcaagagattcaaggactgaaagtgaaagcaattgaagattatttaactagcgaggtttatcagttggataaagatacaacgtcgcagattgattctcctaagtcaaatgttattcgtgtcttatttgacgaaggatttatcgctttacgtccttctggtactgaacctaaaattaaattatatgtgtcgttaaaatgtccggattttgatgatgtagctcaaaaaattaatgcgatgatttttagctaa

SEQ ID NO: 408252 - DNA, 2862 bp, Staphylococcus aureus
atgagtagattactaaatgatttcaatcaatctttacataaagggtttatagacaaacatatttctcataaagggaattatacaccgaagcttttagtaaataataaaaatgaaaaagttctttcaacaattatagatgaacttcaaaaatgtgaaacgttctatttttctgtggcttttataacagaaagcggtttagccagcttaaaggctcaactattagatttaagcaataagggtgttaaagggaaaatattaacatctaattacttagggtttaatagtcctaaaatgtatggagaattacttaaattaaaaaatgtagaggtaagattaaccgatattgctggattccatgccaaaggatatatttttgaacataaggattatagttctatggtaataggaagctctaatttaacatcgaatgcgttaaaggttaattatgagcataatgttttactgtctactatgaaaaatggggatttggttgatagtgtaaaaaatgaatttgacttgttatggcaaaacagtacccaactgactcagcaatggattaattcatataaagaatcatttgagtaccgctccttagaaaaattggcggaggttgaacaaactcaaatgctgctagctgataaggtgaaaaaatcagtggaaattgtaccgaatttaatgcaagcagaagcattaaggtcattaaaagctattagggataaagccaaagataaggcgttaataatatctgcaactggtacaggtaaaacgattttatgtgcattagatgttagagaagtaaaccctaataaatttttatttattgttcataatgagggaattttaaatagagctaaggaagaatttaaaaaagtattacctacaaaaaatgatagtgattttggattgttgacaggcaaacatagagatgtcgatgccaaatatttatttgcaacaattcaaacattatctagagatgataattttaagcagtttgatgaaaaagaatttgattatattgtttttgatgaagcacatcgttctgctgcatctacttatcaacgagtatttaattacttcaaacctaagtttatgctgggtatgactgcaacaccagaaagatcagatgaattaagtatatttgaaatgtttgattataatattgcttatgaaataaggttacaagcagcattagaaagtgatattttatgtccatttcattattttggtgtgactgattatgtacatcaaggtattaaagaagatgatgtaactaaactgagatatttaacttctgatgaaagagttaattatattattcaaaagacagattactatggatattcaggtgaaattttacaaggattaatttttgtaagtagcaaaaaagaagcttatgatttagcggataaactaagttcaaaagggattaaaagtgttgctttaacaggagacgatagtgttaattatcgccaaattgtaatagaaaaattaagagaaggtaagattaactatattataactgtagatctatttaacgaaggtattgatattccagaagtcaatcaagttgtaatgctgagaccaactgagtctagtattatattcattcagcaacttggtagagggttaagaaaaagttcaaataaagagtatgttacagtaattgattttattggtaattataagacaaattatttaattccgattgcgctttctggggatcaatcgcaaaataaagataattataagaagtttttaacgaataacgattcgattaatggagtatctacaattaattttgaagaagttgctaaaaaacagatttacaattcattggatgcagtatcattgaatcaaaataaattaatattaaaagcttatgaagaagttgaaaatagattgggacacatgccgttactaatggattttatacaacaacattcaatagatccaagcgttatattttctaaatttagtaattattacgaatttttagtaaggtataaaaaaatagatgctttattgacggaaaatgaatctaaaaatctggttttcttttcaagacaaatagcacctggattgaaaagaatcgatagtatagttttagaagaacttttaaaaaatgaattaacatatgatgaattaaaaaataaaatgttgaacgaagttaaggatataacagaagatgatatagatacttcattaagaattttagatttttcattttacaacgcaggaattgaaaaaatctatggaagtcccattatagaatgtaatgaaagaatgataagactaagcgatgcatttactaatgctctaagtaatcaaacatttaaaatatttttagaagatcttattgaattatcaaagtataacaatgaaaaataccaaaaaggtaaaaatggactgattttatataataaatattcaagagaagattttagtaaaatatttaattggagtaaaaatggttcgtctgtaatcatgggatacatgataagaagccaagaaatgccaatatttatcacttatgataagcatgaggatataagtgatagcacaaaatatgaagatgaatttttaagtcaagatgaattaaaatggtttactaaatctaatagaacgctaaaatcaaaagaagttcagaaaattttgtcccatagagcaaaaggaattaaaatgtatatttttgtacagaaaaaagatgatgatggtatatatttttattatttaggaactgctggatatatagaaggttcagagaagcaagataaaatgccgaatggttcaaacgtagtaactatggatttagcactcgataaagctgtcagagatgatatatatcgctatataacaaattaa

SEQ ID NO: 408253 - DNA, 435 bp, Staphylococcus aureus
atgattcattcaaagaaattaacgctcggtatatgtttggtattactcattatattgattgtaggttatgtcattatgacaaaaataaatagtcgaagcgcccaaattaaagacacatttaatcaaacattaaaattatatccaaccaaaaatctcgatgatttttacgataaagaaggctttcgagatcaagaatttgacaaaggagacaaaggtacatggataatcagctctgaaatgaatattcaattaaagggagaaagtttaaaatcaagaggaatgattctatatatgaatagaaatacaaaaaggacaacaggttatttttttgtaagtgaaacaaaaggaaaaacgtatgaaaaagaaaaaaatatccagtcaaaatggaacataatcaaattatcccaacgaagccaatacaagatgacaagttga

SEQ ID NO: 408254 - DNA, 378 bp, Staphylococcus aureus
atggaacataatcaaattatcccaacgaagccaatacaagatgacaagttgaaaaaagaaattgaaaactttaaattttttgtacaatatggcaattttaaagatattaatgattataaaaatggtgatatttcatataatcctaatgtgccaagttattccgaaaaatatcaattgaggaatgatgattataatgtgcaacagttaagaaaaagatatgacataccaacgaaacaagcaccgaaaatgttattaaaaggcgatggtgatttaaaaggctcatctgtagggtctaaagagttagaatttacttttgtagaaaataaaaaagaaaacatctatttttctgatagtattaatttcaaacctactgaatag

SEQ ID NO: 408255 - DNA, 795 bp, Staphylococcus aureus
atgattcaatcaaagaaattaacgctcggtatatgcttggtattactcattatattgattgtaggttatgtcattatgacaaaaacaaatggtcgaaacgcccaaattaaagacacatttaatcaaacattaaaattatatccaaccaaaaatctcgatggtttttacgataaagaaggctttcgagatcaagaatttaaaaagggtgataaaggtacttggatagttaattctgaaatggtaatcgagccaaaaggtaaggatatggaaacgagaggaatggtgctctatatcaatcgcaatactagaaccacaaaagggtattattttataagtgaaatgacagatgacagtaacggcagaccaaaggatgatgaaaaaaggtatccggtaaaaatggaacataataaaatcataccaacgaagccactaccgaatgacaagttaaaaaaagagattgaaaaccttaagttctttgtacaatatggcaactttaaagatattaatgattataaagatggtgatatttcatataatcctaatgtaccaagttattcggcaaaatatcaattgaataatgatgattataatgtccaacagttaagaaaaagatatgatattccaaccaaacaagcgccgaaactattattgaaaggtgatggtgatttaaaaggatcatcagtaggatcaaaaaatatagaatttacctttgtagaaaataaagaagaaaacatctattttacggattctgtacaatatactccaagtgaggatacaaggtatgagtcaaactga

SEQ ID NO: 408256 - DNA, 282 bp, Staphylococcus aureus
gtgacatatcatgagcgtgtgttagcactgagagcagaaagtaaaagaactgcatttgattttagattcgaggatttatttagcaaagaagaatggctaagtatgtcgcttgcagaaagacaaaaagccgagaaagcatttcgacacgaaatcaaaaaattagatgatgtaagaatgcccttctcaagtgcacatgatgcccaagtgaaactgtataatgttgtgtattcatacaatggcattaaacgtaatttcaaacaagttgaaaatgaaggattctaa

SEQ ID NO: 408257 - DNA, 414 bp, Staphylococcus aureus
atgtccaaaaaacatgtttttataattattggtgttattttatgtatatgtatagtcgctacggtcatacattttaaaatgaaatatgatgaaaaagaaaagcaaaaagcaatttattataaagaacaacaagcgcgtattacactttatctcaagtataacactaaagaaccgaatacgatcaaatctgtacacttcacaaagttggaaacaagtcctatgggaagtgcagtgattgaaggatacataaacgaaaacaaaaaagatgattttgttgcttatgcatcgcctgaaaataactttcaatttgtaggtgatataatactaagcaaaaatttatcggaaataattaaaataaaaacaaaatcacctgacgaaatcaaagaagaattagacaaaaaagaaggccgctag

SEQ ID NO: 408258 - DNA, 768 bp, Staphylococcus aureus
atgaatattagacatataagaaatgccacggccgtgattgagtatggaggtaaacgcgttttgattgatccaatgctaagtgacaaaggcgcatttgaaccatttccaaattcaccgagacaagatgaaaacaatccacttgtagaactaccattagcaattgaagatatcattaacaacatcgatttagtaattttaacacatttgcatattgatcattttgatccgaaagcgattgaagtattgccaaaagatattaaaatttatacacaaaacgaagcagacgctagtgaagtggagggttatgactttacaaacgtttcggtatttaatgatgtgacacacattggagaaattgagttgattaaaacagatgctcaacatgggcatggtgaaatcttgaaaatgacaggacatgttcacggtttagtgctgaaacattctgaagagccaacgttatatttagctgctgatacggtttggttcgacggtgttgagaagactttaaaagcgcatcatccagatatcatagtacttaatggtggtgcaaatcaattctttgaaggcgggccgttagtgatggatgaacatgatgtattgaaagtcgctcatacattgtcgcttgctcaaatagttgttgtgaatatggaagcggtcaatcattggcatttatctcgtgaagagctgaatgaatttataaattctaacgacttaggtaatagagttgttgtaccaaatgacggggaattattaacctttgaaaaataa

SEQ ID NO: 408259 - DNA, 186 bp, Staphylococcus aureus
ttgattgttattgcacatcggttatctacgattcaacatgcagatcaaattattgttttaggtaaacaacaaattttagaaaaagggtcacatcacttattgctaaaattaaacggtaattataagaaaatgtgggatacgcacatgcatacaaaagattggggaatcaatactggacataattaa

SEQ ID NO: 408260 - DNA, 1734 bp, Staphylococcus aureus
atgtttcaaattacatttaaaattttaaactggataagaccatataaagcaagaatgattttaggatttagcatgtcatttttaaatgctatttttattgcgttacctatctttttagttgcaaaaatatttaataatgtgctatctcataaacctatttatatgaaagatatattgaatgttgtaattatcatggttttattagtgattggacgatttattacagcatatttcaaaagcaaaagccatgagagcatcgcttatgaaatgagtgcgaaagaacgtttagatataggggataaattgaaaaatgtaaggttaggttattttaattcgcatcattcaaatgagttaacaacaatagtaacaacagatttaacctttttagaaaactttgctatgaaaatggtggacgttgttgttaatggatacatattaattacagtactcatattgtctctacttgtagtttcgtggcaagtatcattattagcatgcattggcgtattactatcattttttgcgattcaattattagaaagaaagagtcgacaaaatgcgccagcgtatcataatgtacaaaaccaattagtggaaaaggtattggaggttattcgtggtattcaagtaataaaatcattcgcgaaagaaaatacgagtcttaaaagttttaaccaagcagtcaatggaagtaaacgtataaatacaaaaatagaaatgcaatttatcccattcaatttattgcatttacttagtttaaaagttgtttcaataatgattgtattagttgcatgcttattatatatgaatcatagtattgatttacctccccttattatgatttcaattttttcatttgtgatatttgatagtgttgaaaatattaatagtgctgcacacgtacttgaaatgatagatatgacgatagatgatattgaaaagataaaaaatgctccagaactggatgagaatggaaaaaatttgacgattaaaaatgaaaatatcgcttttcaaaacgtgaatttttcatatgatgataaacaagtgataaagaatgtgaattttgagatacctacacaaacatcaacagcaataattggaccttcaggaagtgggaaatctacattatgtcacttactcttgcgcttttatgatatcgatgatggaaatattcgcatcgatggtgttgatattaaagatatgacattaagtacgttaatgtcgaaaattagtgcagtatttcaaaaggtgtatttatttaatgatacgattgaaaataacatattgtttggcgatccaggtgcaacgaaagaagaaattattcgtgcagcgaagcaagcatgttgccacgacttcatcatgtcattacctgagggatatcaaacaatgctaaatgaaaaaggtagtaatttatctggcggagaaaagcaaaggatttctattgctagggcgatattaaaagatgcaccaataattattttagatgaagcaactgcaagtattgaccctgaaaatgaacagctgattcaaacggcaattaatgaattaagtaaaggcaaaacagtaattacaattgcacataaacttgaaactattaaaaatgcagatcagattatagtgctcaatgaaggtgaaataattcaaaaaggtagtcatgatgaattaattcgaaaaccaggaatgtatcaagactttataagaataaaaagtaaatcagcaggctggaaattataa

SEQ ID NO: 408261 - DNA, 978 bp, Staphylococcus aureus
atgaacatgaataaattagtcaaatcatccgttgctacgtctatggcattattattactttctaatactgcaaatgctgaaggcaaaatcacaccagttagcgtcaaaaaagtagatgataaagttactttatacaaaactacagctacagcagattcagataaattcaaaatttcacagattttaacattcaatttcatcaaagataaaagttatgataaagatactttagtgcttaaagctgcaggtaatattaactcaggttatgaaagaccaaatcctaaagactacgacttttcaaaaatatattggggtgcaaaatacaatgtgtctatcagttcacaatctaatgattcggttaatttagtagactatgcacctaaaaatcaaaatgaagaatttcaagttcaaaacactttaggctatacatttggtggtgacatcagtatctctaatggtttatctggcggacttaacggaaacactgctttttctgaaacaattaattataaacaagaaagttacagaacaacattaagtcgcaacacaaattataaaaatgtcggttggggtgtagaagcacataaaattatgaataatggttggggaccttatggacgagatagcttccacccaacatatggtaatgaactcttcttagctggcagacaaagcagtgcatacgctggccaaaacttcatagcgcaacaccaaatgccattattatctagaagtaacttcaatccagaatttttaagcgtactatcacacagacaagatggcgctaaaaaatctaaaattacagtaacttatcaacgtgaaatggatttataccaaattcgttggaatggcttctactgggcaggcgcgaattataaaaactttaaaactagaacatttaaatcaacatatgaaattgattgggaaaatcacaaagtgaaattgttagatacaaaagaaactgaaaacaataaataa

SEQ ID NO: 408262 - DNA, 264 bp, Staphylococcus aureus
ttgattgataaaacagttttaacaactatcggtagtggctatggttcatacattaaacctcttgaagtaagcaaagaaagcgggaacttagctaaatcatatgcacaagtaagaaactatgtaactgagtcaatcaacactggtaaagtgttatacgcattctaccaaaaaccagaattagtaaaaacagctattaaagctcaagaaacagcaacaactttcaaaaacgctttaacaggcatattcaaatcattctggaaataa

SEQ ID NO: 408263 - DNA, 678 bp, Staphylococcus aureus
atgcttaatcagtttttatgggttatatttccgtatttatgtttagttgtctttgtcgcaggtcatattgcacgttatcgttatgataaattttcgtggacagcaaaatctagtgaattaattgaaagaaaaagattgatgtggggtagtttgctatttcacttaggtatcattccggtattttttggacatgttgtaggattattaatacctaagtcgtggatggatgctgccggtgtgtctgagcatttatatcatattggtgctgtttatatagggagtatctttggtataattacattggtagggatgtttttattaacagcgagacgtgttactacgaaaagtattcgcagattaagttcagcgtccgatatctttgttaatttcttattattacttattgtatttatgggatgttatgcaacattagtaacaaacgtacagcatccagattttaactatagaacttcattatcaatttggtttagacaattatttatgttgaaaccagatgcatcattaatgagtggtgtaccaattgcatttaaaattcatatattattaggtttcactattatggcttgttggccattcacacgtttagtacatgtttggagtgtacctttgacatatataaatcgcagatatattatttaccgtaagaataaagtgtaa

SEQ ID NO: 408264 - DNA, 474 bp, Staphylococcus aureus
gtgttgcacttaatattacaatccgtcgagtataaaaatgaaatagataaaattaaatctaaaattttaaatgaagaagacgagttagtaaaaaaatcattgatgttaacaatatttgtattatcggagagctatgttagttcattaattgtttctaatttacctgaaagagatgaaaatttaatagataaagcgtatgaaaaaattattcaacagtatataagtaaaaatatacgtacaagaaatggtagaaaagaactagtaaaaaatttttacaatacagatctaccagcaatacctcataccaaattgagagatgcccttgctcacgaaataaataaagttgatttaaaaaacaatcgttttaaatatgataatagtagaggtaatagaaatgaaaatattatagaagttagtattgacgaaataattaatgagttagaagaatggtttttaaatttagaatttccgtaa

SEQ ID NO: 408265 - DNA, 1701 bp, Staphylococcus aureus
atgaagtgtatagataaaacgtgggttagctattataaagaattagctgataagttaacagattatcaaaataaacgttatgaattaattgaaatagtgaaggaagtatataaaaaaacgggaataaaattccctactttagcaagtgataatgtattgatggacatagatccttttacaatatttgcattatttaataaaaattccatgagagaaactaataaggtaaaaatattaacagaattagcttcggaattgaatattaagtccaaaattccgtcagtttttgacagtattccaacagtcaataatctgaatgctacatattataattttaaagattatggaaaagataatgatatagagaccttgtggaccttatttactgctgcattaaattttgcgaattatccttcagaagataataaattaaaatttatacatagttttgataagaatattactaaaacaggaaatgggaatagtaagattacgagtggtttgtactggattgcacctgaaacttttgctaactttgattcacgttcaatttggtacatttttgatacatataaactccctaaagaattgattaatgaacaacttaaaccaaaagaaaaactaacaggtcgacattatttagaattgataaatatgttaaagcaagttttgaagtgccaggaagtagagattaatgattttattgatttaagttatgagtcttggcattattcagaaatgataaatgaagctaatagaaacaaatttgattctaatatcaaagaaattgttgtcagtgaaaatgacaatataatacaaaatagaagtagaacaactaaagttataccatatggaaaacaagaattcttagatgaagtttttattgatgaaagtgattatgataggttagtacaacttttaagaagaaagcgaaatgtcattctacagggaccgcctggtgtaggaaaaacttttcttgcaaaacgtcttgcttattcattgattggcagtaagtgtaaagaacgaattaaattaattcaatttcatcaaagttattcatatgaagattttattatgggatatagacctactagttcaggttttgaactgactacagggacgttctatgatttttgtaagaaagctgataaagaccgcgataatgaatattttttaattattgatgaaattaataggggtaatctgagtaaaatttttggtgaattatttatgttgattgaaagtgataaaagagatgaagaactaatattactttatagcggtgagagattttctgtacctagaaatatttatattgtgggaatgatgaatacagcagatcgtagtttagcaattttagattatgcattacgcagacgctttgcgttttataatatgcaaccggcgtttcatacaactaaattcaaaaaacttcttaaagcaattaataatactgaattagagtcagtaattaattgtattgaaggattaaataaagagattgttcaagacgatatgttaggtaatggctttgttattggtcatagttattttagcaatattgaatgtatcgacaaagatgagctttctaatattatagaatttgagattattcctatgttagaagaatattggtttgatgaaccttcaaaaataaatgtatggtctgaaaagttaaggaattcaataaataatgattaa

SEQ ID NO: 408266 - DNA, 1041 bp, Staphylococcus aureus
atgattaatattaaaaatatttattatatgttatcttatgcatttacagtacttaacaaaaaaggctatcagaagttagcaacagaacaatttgaaaatatatttgatttatattcagctattcttataaaaggtatatcaagtcagttaaatagtggacttcatcatgaatatatagaacagacagattctctaaaagttattaggggaaaagttgatgttaagaattctatacaaggcttaggagttttaagtcaacgtattaattgtatttatgatgaattttcattaaatacatacatgaacaagattttaaaaactacaatgaaatgtttaataaaaacagatatttctagaaagaataagataaagctccgaaagttattagttcattttaataatgttgatactttagattatagaaatattcaatggtatcattcgtttgatcgaaataatcagacgtataaaatgttaatatctatatgctatttaatttttcaaggagtaatacaaactgaaagcaagggacaaaatgatcttatggtatttgtagacgaacaacaaatatctcggctatatgaaaaatttattctagagtactataaaaaagaatttccagagcttgttgtaacatcatcaaatattcaatggtcattagataatgatgataacgtgaatatgcttcctgtaatgagaagtgatattatgttgagatataaagataaatgtctaattatcgatgcaaaattttataaaaatacattacacaattattatgatactaaaaagatccattcaactaacctgtatcaaatatttacttacgtgaaaaaccaacaattaaatttaaaaaagaaagcaatacaggtctcaggaatgttgttatatgctaaaacagacgaaaatattgttttgaacgataaatttcatatgagtggtagtcaaatcattattaagacattagatttgaactgtaattttactattattaaaaaacagttgaatgggatagttaatgatatatttttactaaaataa

SEQ ID NO: 408267 - DNA, 159 bp, Staphylococcus aureus
atgattactattgattcaaagattaataaacaaatcgctaaaaacctttcacttgaaggtatgtatgttacacgagaacagcaaatacaaattcttcatgcaattaataatgagaaagaaattacaaatgaacttattcgtaaaatcgcttttaaataa

SEQ ID NO: 408268 - DNA, 972 bp, Staphylococcus aureus
atgactgaaacaaaagcgattgatacacacgcacatttatggaatgaagactatttagacaaacttggcaaattaggtagtcaaggtactgaagttgctaaagggattaatcaatctgcgtctaaagaagatttagagaaacgcttcaaaatgatggacgatgctggcgtagatttacaaattatttctgcgacaccacaatctccacaatggggtactaaagaagaagctcaccaaagtgctcaagaaattaatgacttatatgaaagattagttcaacaatatccggatcgtttcttggcatatggtgctgtctcactaccctatgtcgatcaagctattgaagaagcccaagcccttttgaaaaaagatgaatttgtgggcattgccattccaactatagtaaaagataaggtctctgttgctgataaacaatttgaacctttctttgcagcgatgaatgagctcaatgctacaatttatattcatccaacaggttgtggcgctcaaagtccgttagtcaatgactatcaattagaatgggttattggtgcaccgttagagtctacctttattacattacaattgattaaaaatgaaattccgcaaaaatatccaaatattaaattccatatttcacatttaggtggcgctttaccattcttcatgactcgtattaaagacaattatgaagattggaatgcctttaatattgatccttatgaagtattaaatcgacaattttggtatgatacagcaaacttccacgaaccttcattgattaactctattgagacatttggtaaggataaatttatgatggggtcagacttcccttacttccaagatgaaaaatatacacgcggcgtagactatattaaaaacagtaatattgaccctgacacgattaatggtatattaagaggcaatgcgattgaattttatcaaattgaagaaaaccataatcactag

SEQ ID NO: 408269 - DNA, 372 bp, Staphylococcus aureus
atgttattaagacacgtcattaacacatatgtaggtagtaaaatttttaaaagcagtttaccaaaagtacaaaatagtgatgaaatggctcaacaattcgaacaaggctttggtttatctcgtagatcaatgagattagctggcgctttcgaaatgattggttcacttcttttatttacttctattttcggtaaattagggaaaaaattagtagttgttggtacgattatgattaatattgttatgggtacagctatttataaccattataaagctgggcatggttataaaggtgcacaagctgcttctaaatttttctttttaaatgtattaagcttactagaagtgttaagcttaactcgtaataaataa

SEQ ID NO: 408270 - DNA, 1329 bp, Staphylococcus aureus
atgattggtgcttttgttggtgtgctgaatcaaactttgatgactacgatacttccagaaattatgaaagattttacggtatcaagtagtacagcacaatggctcacgacaatttttatgctagtcaatgggattatgattcctatcacagcatttttaattgaacgttttacattacgttctttattttttaatgcaacatgctttttaatgattggttcatttatttgtatgctaggaatcaattttccaatgttattattaggacgtagtattcaagccttaggtgctggtatactgatgccactcacacagacactccttttcattatgtttccacctgaaaaacgtggaatggcaatgggaatgttcggtcttgtaataggttttgcacccgcgattggaccaactgcagctggttggttcgtcaatattttcgattggcgctatctgttcctagtcgtattactaataggtatgattgattttgtattcgggtatctatcattgccaaatataacggaactaagtaaaccaaacttagacaaactatccgttattttatcgacggttagctttggtggcttactatatggttttagtacagcaggaaacttaggttggtcacatccaatggtttatataactattattgctgccatagttatattaacggtatttattttccgacaattaaaactggaatcgccattgttagagtttagagtatttaaatataacgacttttcagtggcaatgattttaattgtactaatgttcatgttatttatagggaatttaacaatcttaccaatttatatgcaaacgatgatgaaatggtccccgttagagtcaggacttattttattacctggtgggttaattatgggactgttatcgcctgtcactggtaaattattcgataaaattggtggacgtatcttgagtattatggggatgctaacgattatgattggtgcattattaatggctcaatttagtcaaaatacaacacaactatatgtgattatttcattttcagttaccatgttaggtaatgctatgatcatgacgccaatgacaactcaagctttaaatgctttgccacgtcaatacattgcacatggtacagccatgaataatacgattagacaagtgtcagctgcaataggtactggtatcttggtcacattgatgacaggattaggaaaaacctcttcattaagtggtagtcaaggacttattcatggtctagatattacattctatgtcgtcgcattgattgcctttataggtactatcattgcattctttattcgcaaacattaa

SEQ ID NO: 408271 - DNA, 204 bp, Staphylococcus aureus
atgaaaaacgcaataatgaaggaggtagtttatataaattttgaaggattagaacaatatttaaatggtgataatacaagatataacacgcttagtttagagacgcttaattattatttaaaacaatatgtgttaactgtcccgttcaaaaatatggatgttcaaaatgggatgaaagtttctgcagaagtaaaagatatttaa

SEQ ID NO: 408272 - DNA, 366 bp, Staphylococcus aureus
gtgaaccatcaacacggtgacttttattatgaaatgaataatttctttaacgtgtattttgaatataaaggatttactgtaaatatagtttcttcaactatccatacccatggtgatggaaaaagcttaaaaggttctcacgtgtctttaatcatacctattgatggcgttgattatgttacaggtgctgactttggagacttgccatttagtgtcatgccaattgttccaaaagataatagtccagtcattcatgatatgaacggtgatttccatgcaatttacgtcaacgattatttattttatgttcgaaaaatggggaaagataatgacaataacttggatcacactatgaagtggaattaa

SEQ ID NO: 408273 - DNA, 576 bp, Staphylococcus aureus
atggaaaaaaatcaacgaaaaaaacgcagtgatgccgaatataaccaacagattatcttaactacaatggaagatttactagaacagggtgaagatataagtactaagaaaatgtcagatattgctaaaatatcaggtgttggagttggtacattatatcgtcattttgaaagtaaaacattgttgtgtcaggctattatggataaaaaagtcgatcaaatgtttatagaaatagaagatattttagcggaaaatacacagtggcccgtgcgagataaaatcaatgttatattaacaaagtatctagatttaaaagaagcaaatttcacaacattaaattttatagaaaaatccagttcacactctagttctgtaattaatattccattctttgagcgactaaaaaacttattaattcaacaattcgaaaatgttcattccatagcagacttggattttaaacttaatctaatgctcaatgcattttcttcagatttctattattttgtaaaacataaccaaaaattaacaaaacaacaatttttagacaaattactagatttatatctaaaataa

SEQ ID NO: 408274 - DNA, 3153 bp, Staphylococcus aureus
atgagtcaattgctaaatgatacgttatcggcttggttgttaattgaatctttaagtccaggagaagtaaattttacagcggaagatatactctcagctgaaaattttaaaaatggtgcaaagcaagcgcaacttcaaagttttgatgaatattttgaaatatggaatgatgaacgctttattatatcagaagaaaaatcagagattggcgaaatcatttttaaattttacagacactgtttccgctataatgaaattaatttgaaaattcaggatatttttgatgattattcagatattcataatccaaatgggacacactgttatggttacacatttaatatagataaacacggtcaagtgatagttgattctatacatattccgatgattatgagtgcattgaaagaaattgaaaagaataaaaatgctaatatagaagaaaaatttaatgattctgttgaaaaatttgttcaaaaagtaaaagaaattttagcggatgaaccaattaatgaatttaaattgaagaagatggacatagcttatgatgagtatttttctgtattaaattcaaagaaagatggattatttgcacattatgtagcaatagaatatgtgaaagatagtgatttaccacagccagaatttaatagcttcttcataagtgatattgagaaagcaagaaaatctcccaatcaaactttaattgattacattgagggtgtagaagaaagtaagcgcatagaagtggatgaaaataaagaaatgttcgacaaatttttacatccttcacgtttgcctgatggacgctggccatcacagactgagtttagattgtcattaatgcaacaacttgctgtaaaccaaattacgagtggtaatgaaaggataagttcagttaatgggccaccagggacaggtaagactactttattaaaagatatatttgcgcatctagtagttgaaagaggtaaagagttagccaaactaaataatcctaaagatgcatttgtcaaaacaaaaactcatgaaacagatgataaatatgtctatttacttaaggaatctattgctaaatataagatggtagtcgcatctagtaataatggagctgttgaaaatatatctaaagatttaccgaaaattgaagaaattataagaaatcccgaaaaatgtaaattccctaaatatgaacagaattatgcaaatttagcacatgaattaaaagattttgctgaaatagctgaagatttgattggtgaaagtgcctggggcttattttctggagtatttggtaaaagtactaatattaaccaagtattgagtcatatgttaaaacaagatgcgaatgatattggctttgctaaattactacaaaatgagaataatcgtatgagttataacgagttaatgagtgaatggcaatcacatcaacgtgcatttttagaagagttgaggcatgttgaaatgttaaaagaagaatctattagagcctatgatgtttataaaaattgtgagtcttactctaaggttgaacatgaactaaatagcaaaaaaatgaatgttaaggaaaagttgaatcatttagaaattcaaatatcttgtgacaataaagaaattgaagatttggatgatcgaattaattataatacaaagcaactcgaaactttaaatgagttaattaaatccatcagagatagtaacaaagggtttgttaacaagctgaaggcgatatttaattcagaagaagatgaaagatataaaaaacataatgcagagaagcaacaattattaggacaacagatagagttagagaaatgtaaaaaaattaaaaatgaagaccttgttagcaaactaaaagaaaaagagaaattaattaaacaattaactaaagtacagttgcaattagacgagttaaattcacagttacaagagttagaagcatatcgtattgagtcaaaaattacaattccagaaaaagatttttggagtgacaacaattatgatgagcgccaagttactaatttgtggacgagtgacgaacttcaatacagacgtgccatgctctttttaagagcaatgatattgcataaattattattgattgctaataatacaactatttattatgcgattaatgattttaaaagtagaaggaaattaattgatgcaaatccagataaagtacacaacgcatggaatgtgatgcatttaatatttccagtagttagtacgacgtttgcaagctttaaatctatgtatgggggcataccaaaagatttcatagactacttatttattgatgaagcaggacaagcaatacctcaagcagctgtgggagcattatttagatcgaaaaaagttgtagccgtaggtgatccgattcaaattgaacctgttgttactttagaaagccatttaattgataatattcgtaaaaattataatgttccggaatatctagtttctaaagaagcttctgtgcagtctgtcgctgacaacgctaatcaatatggcttttggaaatctgatgctactgatagtaatcaaaaaacgtggataggcatacctttatgggtgcacagacgatgtttaaaacccatgttcacgatagctaatcaaattgcttataataataaaatggtgctacctagtaatattacaaacgtaggtaagaccggttggtatgacgttaaaggaaactcagtacaaaaacaatttgtgaaagagcatggcgaaaaagtattggaattactagctaatgattggtttgaagcgattaaggaaggtaaaaatgagccgagttcatttgtaatatcaccattttcagcagtacaaaaacaggttaaacgtatattaaagcaacaactaccgactagaattgatattgaacgtacaaaaattaatcaatgggtcgataaatccattggtactgttcatacttttcaaggtaaagaggctcaaaaggtgtattttgtaataggtactgataatactcaagatggtgctgtgaactggtcatgcgaaaaaccaaacttgttaaatgttgcagtgacaagggctaaaaaagagttttatgtaattggtgacatgcaaagaatacagtcgaaaccattttatgagaccatttttaaagaaagaaatgtaaaatga

SEQ ID NO: 408275 - DNA, 1179 bp, Staphylococcus aureus
atgaatcaacaattaattgaagctttaaaatcaaaagaagacaaaatgattgagatcagacgttatttacatcagcatccagaattatcttttcatgaggatgaaacggcgaaatacatcgctgaattttacaaaggtaaagatgtagaagtagaaacgaatgtcggaccacgtggaattaaagtaacgattgattcagggaaacctggtaaaacattagcaatccgtgcagactttgatgcattacccattactgaagatacaggattatcttttgcatcacaaaataaaggtgttatgcacgcatgtggtcacgatgcacatacagcatacatgcttgtattagcagagacgcttgccgaaatgaaagatagttttacaggaaaagtcgttgtgatacatcaaccagctgaagaagtaccaccaggtggtgctaaagcaatgattgaaaatggtgtattagacggtgttgatcatgtattaggtgtacacgtcatgagcacaatggaaacaggtaatgtgtattacagacctggttatgttcaaacaggacgcgcattcttcaaattgaaagttcaaggtaaaggtggtcatggttcatcaccacatatggccaatgatgccattgttgcaggtagctacttcgtcacagcgttacaaacagttgtatctagacgactaagtccatttgaaaccggtgttgtcacaatcggttcatttgacggtaaaggtcaattcaatgttattaaagatgttgttgaaattgaaggtgatgtacgtggattaacagatgctacaaaagcaacaattgaaaaagaaattaaacgtttatcaaaaggattagaagcattgtatggtgtaacttgcacattagaatataacgatgattatcctgcattatataatgatccagagtttactgagtacgtggctaagacgctaaaagaagcagaccttgaatttggtgtcgaaatatgtgaaccacaaccaccttcagaagactttgcatactatgctaaggaacgaccaagtgcctttatttatacaggtgcagctgtggaagatggtgaaatttacccacatcatcatcctaaatttaagatttcagaaaaatcattacttatttcggcagaagctgtagggacagttgttttagattaccttaaaggagataactaa

SEQ ID NO: 408276 - DNA, 717 bp, Staphylococcus aureus
atgatttatgcaggtattttagcaggaggtattggttcgagaatgggaaacgtgccattaccaaaacaatttttagatattgataataaaccgattttaattcatacaattgagaagttcattttagtgagtgaatttaatgagattattatcgcaacgccagcacagtggatttcgcatacgcaagatattttaaaaaaatataacattacagatcaacgtgtcaaagtagttgcaggtggtacggatcgaaacgaaacaattatgaacattatcgaccatattcgcaatacgcagggtatcaacgatgatgatgtgattgtaactcatgatgccgtaagaccatttttaactcaacgtattattaaagagaacattgaagtagcagcaaaatatggtgcagtagatacagtcattgaagcaattgatacgattgtaatgtctaaagataaacagaacatacacagtatccctgtaaggaatgaaatgtatcaaggccaaacaccacaatcatttaatattaaattattacaagatagttatcgtgccttaagtagtgcacaaaaagaaatcttatcagatgcatgtaaaatcattgtcgaatctggacatgcagttaaattggtacgcggagaactatacaacattaaagtgacaacaccgtatgatttaaaagtagcaaatgccattattcaaggtgatattgccgatgattaa

SEQ ID NO: 408277 - DNA, 1422 bp, Staphylococcus aureus
atgaacggggataatcagcaaatactcagagaaattgtattgaatcctactattcatggtaaagaacttgaatcgatatttggtttgtctcgtagacaactaggatatcgcattcaaaaaatcaatttgtggcttgaacaagagggttatccaaaacttgaaagaacaagccaaggaaattttattgtaagttctgaaatcatgacgttattcaaacgagatgtatcggagcagcaaatgttaaacggcaacaatgtcatttttagcatagaaacacgtcgttattatttaatgctcatgctttttagtaaggaaaacgcaatgtctctaaaccatttttcaattgatttacaagtcagtaaaaatactgtcattcacgatataaatcatgtgaaagagcaattggaagatcatggtttgtcacttaagtattctcgaaaacatggttatgaaattgttggtgatgaatttgaagttcgccgtttcttcattaagttgattgatcaaaggttaaatcatgatattactaaaagtgaagttttaaaggcgctcaacttaacattcgaagatatcgcatatcaaaaagacaagatcaaacaggtagaacaatttttgaagagtcgctttatagacaaatcactgagttcattgccttacgtcctttgtgtgattcgtagacgaattcaaagtggtcatgtgattaatccattaaatattaattatcagtatttgagggatacgaaagaatatcaagcaacggagattatgacgcaacatgagccggatttgccagaagcggaaaagttatatttgacgctacacttactttcaacaagtgtgcaatggactgatttgcaggaatcagataacatatcgaatttaacgatggccattgatcaaatgattcaccattttgaacaaattacttttattaacattgaagataaggagaaattatcacagcaactcttgttacatttaacgcctgctttttataggattaaatataacttaacggatcgtgatgaattaataaatcctttacaaggaaattatcaatccttatttcatatggtgaaacaatcatgtcaatcgttaactgaatatttcggaaaatcattgcctgataatgaaatagcatatttaaccatgttgtttggaggtagtttgagacgtcaagatgaaaacttcgatggcaagataaaagctattatcgtgtgtacacaaggtacgtcagtatcacaaatgatgttatacgagttgcgaaacttatttccagaaattattttcttagatgcgatttcacttagaacatttgaaaattacacattagattatgacatcgtcttttcaccaatgtttgtcttaacacataaaaaattatttatcacaaaagtagctttatctgaaaatgagcaatga

SEQ ID NO: 408278 - DNA, 969 bp, Staphylococcus aureus
atgaaaataggtgtattttcagtattattttacgataaaaatttcgaagatatgttagattatgtcgcagaatctggattggatatgattgaagttggaacaggtggtaacccaggagataaattttgtaagttagatgagttgttagaaaatgaagacaagcgacaagcatttatgaagtcaatcacagacagaggcttacaaataagtggtttcagttgtcataacaatccaatttctccagatccgacagaagcgaaagaagcggatgaaacgttacgtaaaacaatccgtttagcaaatctattagacgtgccagttgttaatacattttctggcattgcaggatcagatgataccgctaaaaagcctaattggcctgttacaccttggccaacagcctactctgaaatttatgattatcagtggaatgaaaagttgataccatattggcaagatttagctgagtttgcaaaagagcaagatgtaaaaattgccatagagttgcatgcaggatttttagttcatacaccatatacgatgttgaagttacgtgaggctacaaatgaatacatcggtgctaacttagatcctagtcatttatggtggcaaggtatcgacccaattgctgcgattcgcatattaggccaagcaaatgcaattcatcacttccatgctaaagatacgtatattaatcaagaaaatgtaaatatgtatggtctaactgatatgcaaccatatggtaacgttgcaacaagagcatggacgttccgtacagttggttatggacatagtccatatgtatgggcagatatcataagccaacttattattaatggatatgattatgtattaagtattgaacatgaagatcctattatgtcagtagaagaaggtttccaaaaagcttgtcaaactttgaaatctgttaatatttacgacaagccagcagacatgtggtgggcataa

SEQ ID NO: 408279 - DNA, 1077 bp, Staphylococcus aureus
atgacgattaaagttggaatcattgggtgtggtggtattgcgaatggcaagcacatgccaagtttacaaaaagttgaaaatgttgaaatgatcgcattttgtgacgtagacatttcgaaagcagcgtgtgcggcagaagcatacggtactgacaatgcaaaggtttatgatgattacaaagcattgttaaaagatgacacgattgatgttatccatgtttgtacgccaaatgactcgcattgtgaaattactgtagcagggttgcatgccggtaaacatgtgatgtgtgaaaaaccaatggctaaaacgacagcagaagctcaaaaaatgatagatacagctaaatcaacaggtaaaaaattaacaataggttatcaaaatcgcttcagaccagatagtcaatttttatataaatcagcgcaacgtggcgacttaggtgacatttatttcggaaaggcacatgctattcgtcgtcgagcagtaccaacatggggtgtatttctagacgaagaagctcaaggtggaggaccattaatcgatatcggtacacacgctttagatttaacgttatggatgatggataattatgaaccagaatcagtgatgggttcaacattccataaattaaataaacagcatgatgcggcaaacgcttggggttcatggaatccagatgaatttacagttgaagattctgcgtttggctttattaaaatgaagaacggagcgacgatcattttagaatccgcttgggcgattaattctttagaagtggatgaggcaaaatgttcattatcaggaacgaaagcaggtgctgatatgaaggatggtctacgtattcatggtgaagatatgggcacactttataccaaacacgttgaattggaaaacaaaggcgtcgacttttatgaaggtaatgaagtggatgaagctgaagaagaagcaaaagcttggattgatgcagttgtaaatgatactgaaccagttgtgaaaccggaacaagcaatggtagttacaaaaattcttgaagcgatttatcagtctgcaaaatcaggcaaagcaatttactttgaataa

SEQ ID NO: 408280 - DNA, 579 bp, Staphylococcus aureus
atgacaaagcgaccaaaacgtattttggcaacaattatcatttttctttcactattatttacgattatttatatagatgacatacaaaaatggtttaaccaatataccgataaattgacacaaaatcataaaggacaaggacactcaaaattggaagacttttttagagggagtcggattactgagacttttggtaaatatcaacattcaccatttgatggtaagcattatggtattgattttgcattgccaaaaggtacaccaattaaagcgccgacgaatggtaaagtaacacgtatctttaataatgaattaggcggcaaggtattacagattgccgaagataatggagaatatcaccagtggtatctacacttagacaaatataatgtcaaagtaggtgatcgagtcaaagcaggtgatattattgcatattcaggcaatacaggtaaacaaacgacaggcgcacatttacattttcaaagaatgaagggtggcgtaggtaatgcatatgcagaagatcctaaaccgtttatcgatcagttacctgatggggaacgtagcctatatgatttgtag

SEQ ID NO: 408281 - DNA, 2007 bp, Staphylococcus aureus
atggtcattaacttaaatgacaaacagacaaaaacatctaaagaagggttaatttccgtatcacatcctcttgcggctaaaattggtaaggatgtattagatcaaggtggcaacgctatggatgccgtgattgcaattcaactggcattgaatgtggtagaaccatttgcatcaggtattggtggtggcgggtacttgctatattatgagcaaagtactggcagtataactgcgtttgatgcgcgtgagacagcccctgcacatgtagacaaacaattttatctagatgattcaggcgaatataaatcattttttgatatgactacacatggtaaaactgtcgctgtgccagcaattccaaagctgtttgattatattcacaagcgttatgctaaattgtcattggaagatttaattaatcctgcaattgaactagccattgaaggtcattcagctaattgggctactgaaaaatattcgcgccagcaacacgcgcgattgacaaagtatcacgaaacggcacaagtatttacccatgaaaatcaatattggcgtgaaggtgattggattgtacaacccgaattaggtaagacatttcaaatattaagagaacaagggtttaatgcattttataaaggtgacattgcgaaacaattagtcaatgttgtcaaagcatgtggtgggacaatcactttagaggatctagccaattatgatattcagattaaagcgccaatcagtgcgacatttaaagactatgacatttattcaatgggaccatctagttctggcggtatcacggtaattcaaatattgaagttattagaacatgtcgatttacaatctatgggtccaagatctgttgattacttgcatcatttgatacaggcgatgcatttagcatatagtgatcgcgcgcaatacttggcggatgataattttcatgaggtgcctgtacagtcattaattgatgacgattatttaaaagcacgcagtaagctcattgatagcaataaagcaaatattgatatagagcatggtgttgtgtctgattgcattagtcatacagatgttgaagaaaatcataccgaaacaactcatttttgtgtgattgataaggaaggtaatattgcttcatttacgacatcaatcggtatgatttacggatcgggtatcacgattccaggctacggcgtgttattgaataccacaatggatggttttgatgttgtgacgggtgggatcaatgaaattgcaccttataaacgaccactaagtaacatggctccaacgattgtgatgcatcacgggaagccaatattaacagtaggtgcacctggtgctataagtatcattgctagtgttgcgcaaacattaatcaatgtattagtgtttggcatggatattcagcaggctatagatgaacctagaatttatagtagccatcctaatcgcattgaatgggagcctcaattttcacaatctacaattttagcattgattgcacgtggacatgcaatggaacataaaccagatgcctatattggagatgtacatgggctacatgttgacttgaatacacgtgacgcatcgggaggtgctgatgatacgagggaaggtacagtgatgggtggtgaggtattatcaattagaaaacaaccattaccatatcgtcaaatgtatggtagtaatgtatatcgtgtatatttcaatgatgtgcagttacctttattggcagatcaagtgcgatggatgcatgacaaatattgggttgatgaaagtgtcgttagaatcatcttctctgaagttagtgcacatattgaagatttaagaagttatgaaaacgcaggagaaaattatatagatattacctggttagcacgaaagaaaggttatcaagtaacattgaaggatgacggtttatacttaactgatgatacatatacttcagtgaaacggaacacaaatgcatactatagatatgatcgagatagtatcacaagatag

SEQ ID NO: 408282 - DNA, 1164 bp, Staphylococcus aureus
atggtaaaacttacaacaaagatagcttccttaaaactattcgcaagttatgctattgcaacttatattttagttatattaacgagtgcattaaatctttttaaaggttatgtggccgatacgttctatattgctgaaacattgctaatcgttttaaccatcattttaattatcatcttaacaacggaacaaacatggaagcatcatgacctatggcgacgtatcgtcgaagtgttgttattgttgatgacattaacagggaacgtatttacattattaatgtttgtaagtattagacgttaccaacgtacatcgcaaatacatagttataatggctgggaatcgtttatacgaaaaactactagacatcgtattgcgattatcgggttacttattttagtctatatgctgacattatcaattgtgtcacaatttacatttgatacgacattggctactaaaaatcagttcaacgcactgttacatggaccgagtctagcctatccgtttggtactgatgatttcggtagagacttatttacacgcgtagttgtcggaacgaagctgacattttcaatttcaattatttcagtagttattgcagttgtttttggtgtgttactaggcactatcgcaggttattttaatcatattgataatttaataatgcgaattttagatgtagtgtttgcaattccatcattattgttagcggtggcaattattgcatcgtttggagcaagtattccaaatttaattattgctttaagtatcggtaatataccatcatttgcacggacaatgcgtgccagtgttttagaaattaaacgcatggaatatgtagatgcagcacgtatcactggtgaaaacacttggaatatcatatggcgttatattttgccgaatgcgattgcgcctatgattgtacgtttttcattaaatataggtgtggttgtattaacaacaagtagtttaagtttcctaggacttggtgttacacctgatgtagctgaatggggcaacattttacgtaccggtagtaactacttggaaacgcacagtaatttagctattgtacctggtatttgtattatgttcgtcgttttagcatttaattttataggtgatgcagtgcgtgatgcgctagatccaagaattcattaa

SEQ ID NO: 408283 - DNA, 864 bp, Staphylococcus aureus
atggataatagaaatatgattaatcgtgtttttagtcaaaagatattacatcaaattgcaatcaaaaataaaagtgatgttgttgatgaggcatatgatttttatatacaagggcctaaaaatatcaatgtaatacagaaaatgaagtctttatataactatcttaaaaagtcttatcgtaacgaatatttttataaaaacacaatgcttaataaactccttttaggactacattctgttaatacaactactgcactttctgagatgcctataggaaatagtattgctgattttatattgttaaatggtaaaggcgttgtctacgagattaaaacagaattagataagttggatagattggataatcaaattaatgattattatgaagtatttaattatgtagtagtcattacaaatgacaaacacttgaataaagttatggctagatacaaagatacaacagtcggaattttagtattaacatctagaaatacactgagtgaagttcaaaaaccaaaagaaaacaatagtctcttaaactcaaaagcgatgtacaactttttacgaaaagaagaaagaaaaagagttattgcacaaaatcatatggatgtgccaacttataatgatttcacagagtatgatgtgttatttgacgtgtttaaagaaataccaatgacgaaactgcataacaatatgatttttgagttgaaaaaaagaggcaacatgaaagaatacaaagatgaatttttagcagctccgactgaaattaagttcttgttatatttcgcaaaaatgacaaagaaagataaaaataaactatatcattttcttaaggatacaaataatcccccgcacttcacatag

SEQ ID NO: 408284 - DNA, 2790 bp, Staphylococcus aureus
atggcataccaaagtgaatacgcattagaaaatgaaatgatgaatcaacttgaacaattgggttacgaaagagtaacgatacgtgataataagcaattgcttgataattttagaacgattttaaatgagcgtcatgcggacaaattagaaggcaatcccttaacagataaagaatttcaacgtctgttaacgatgattgatgggaaaagtattttcgaaagtgcccgtattttacgtgataaattaccacttagacgtgatgatgagtctgagatttatttgtcgtttttagatacgaaaagttggtgtaaaaataagtttcaagtgacgaatcaagtatcggtcgaggatacatataaagcacgttatgatgtaacgatattaatcaacggactaccccttgtccaagttgaattgaaacgtcgaggcattgatattaatgaggcgtttaaccaagtaaaacgttaccgtaaacaaaattacacaggcttattccgctacatacaaatgtttatcattagtaatggtgttgaaacgcgatacttttctaataatgatagcgaactattgaagagtcacatgttttattggagtgataaacagaataaccgaatcaatacattgcaatcgtttgctgagtcatttatgagaccttgtcaattagctaagatgatatcacgctatatgattattaatgaaacagatagaatactgatggcaatgcgtccgtatcaagtgtatgcggtagaagcacttattcaacaagcgactgagacagggaataatggatatgtgtggcatacaacgggaagtggtaagacgttgacttcttttaaagcgagtcagattttatcacaacaagatgacattaagaaagttatctttttggttgaccgtaaagacttggatagtcaaacagaagaggaatttaataaatttgctaagggtgctgtcgacaaaacatttaatacctcgcaactggtacgccaactaaatgataaaagtttgccacttattgtaacgacgattcaaaaaatggctaaagcgattcaaggtaatgcccatttattagaacagtataaaacaaataaagttgtatttattattgatgagtgtcatcgcagtcaatttggtgacatgcatcgtctagttaaacaacatttcaaaaatgcccaatattttgggttcactggtacgccacgtttcccagaaaatagtagtcaagatggtagaacaactgcagatatttttggtagatgtttacatacgtatttaattagagatgccattcatgatggtaatgtacttggtttctcagttgactatattaatacttttaaaaataaagctttaaaagcagaagataacagcatggttgaagcaattgatacggaagaagtatggttagcggataaacgtgtggaattagtaacacgacatatcatcaataatcatgataaatatacacgtaatcgtcaatattcaagtatatttacagttcaaagtattcacgcgcttattaaatattatgagacatttaagcgacttaacaaaaagttggaacaaccattaacggtagctggtatatttacgtttaaacctaatgaagatgatcgtgatggtgaagtgccatatcattcacgtgaaaaattagagataatgattagtgattataataaaaagttcgagacgaatttttcaacagacacaactaatgagtattttaaccatatttcaaaaaacgttaaaaagggcgttaaagatagtaaaattgatatcttaatcgttgttaatatgttcttaactggttttgatagtaaagtactgaacactttatatgttgataagaatttaatgtatcatgatttaattcaagcgtattcacgtacaaatagggttgaaaaagaatcaaagccatttggtaaaattgtaaactatcgtgacttgaaaaaagagacagacgatgcactgagagtattctcacaaacaaatgatacggatacaattttaatgcgtagttatgaagagtataaaaaagaatttattgacgcttatcgtgagcttaaaatgattgtgccgacaccacacatggttgatgacattcaagatgaagaagagctaaagcgctttgttgaagcttatcgtttattagctaaaataatattacgtttaaaagcatttgacgagtttgagtttacaattgatgaaattggaatggatgaacaagagaatgaagactataaaagtaaatatttagccgtgtacgatcaagtaaaaagagcgacggctgagaaaaataaagtatccattttaaatgatattgatttcgaaatagaaatgatgcgtaatgatacgattaatgtgaattatattatgaatatattgagacaaattgatcttgaagacaaagcggaacaacgtcgtaaccaagaacaaattagacgtattttagatcatgcagatgatccgacattgaggttaaaacgagatctaattagagaattcatcgacaatgttgtaccttctttaaataaggatgatgatatcgatcaagaatatgttaatttcgaaagtattaaaaaagaagcggagttcaaaggatttgctggagagagatctatcgatgaacaagccctaaaaacaatttcaaatgactaccagtatagtggtgttgtaaacccacatcaccttaaaaaaatgattggtgatttgccattgaaagaaaaacgtaaagcaagaaaagccattgaatctttcgtggcagaaacaactgaaaaatacggtgtgtaa

SEQ ID NO: 408285 - DNA, 879 bp, Staphylococcus aureus
atgatgacaaatattttatatcgcattgataagcagttgagtgattttacgaagacagaaaagataatcgctgattacattttaaagaatccacataaaatcattgatatgactgtgaatgatttagcagatgttacgaatgttagtacagcatcaattgttagatttagtcggaaaatgacacatcaaggttttcaagagctaaagattgcgatatctcgatacttacccgaagatattgcaaccaatccacatttagaattgattgaaaatgaatctgtagaaactttgaaaaataaaatgattgctagagcaacgaatacgatgcgatttgtagctactaatattatggatgcgcaaattgatgcaatttgtgatgtgttgaaaaatgccaggacaatatttttatttggatttggcgcatcgagtttgactattggtgatctttttcaaaagttatctcgtattggcttaaatgtcaggttattacatgaaacgcatttacttgtgtcaacatttgcgacgcatgatgatagagattgcatgatttttgtgacgaatcaaggtagtcatagtgaattgcagtcaattgcacaggtggccacacattacagtattcccatcataactatatctagtacagctaataatccagtggctcaaattgcagactatgcattgatttatggcagaactgatgaaaatgaaatgcgtatggcggctacaacgtcactatttgcacagttattcacggtagatatattgtactatcgatttgtagcattaaattatcatgcgattctagattgtataacccaatcgaaaatggcacttgataattacaggaagcatcttgcgacgatagattttaaacattag

SEQ ID NO: 408286 - DNA, 1455 bp, Staphylococcus aureus
atgaccaaagaacaacaacttgcagaacgaattattgctgcagtaggtggtatggataatatagatagtgtcatgaactgtatgacacgtgtgcgtattaaagtattagatgaaaataaagtagatgaccaagaactaaggcacattgatggtgtcatgggtgttatacacgatgaacgcattcaagttgtagttggacctggtacagtcaataaagtggctaatcatatggctgagttaagtggtgttaaactaggtgacccaataccacacaatcacaatgatagtgaaaaaatggactataaatcatatgcagctgataaagcaaaggcaaataaagaagcacataaagcaaaacaaaagaatggtaagttgaataaagtattgaaatcaattgccaatatctttataccgttgattcctgcatttattggagctggattaattggtggtattgcagcagtactgagtaacttaatggtggcaggctatatttcaggtgcttggattacgcaacttataacagtatttaatgtcattaaagacggtatgttagcatacttagctattttcactggtattaatgcggctaaagaatttggtgcgacaccaggacttggtggcgtgattggtggtacaacgttattaacgggtattgctggtaaaaatattttaatgaatgttttcactggagaaccattgcaacctggacaaggtggaattattggtgttatttttgccgtttggattttaagtattgtcgaaaagagattgcataaaattgtgccaaatgcgattgatattattgtaacgccgactattgcattgttgattgtaggactattaactatctttatctttatgccattagcaggttttgtttcagacagtttagtttcagtagttaacggaattattagtattggtggcgtatttagtggatttatcattggtgcaagcttcctaccgttagttatgttagggcttcatcatatttttacgccaattcatatagaaatgattaaccaatctggtgctacttacttattgccaattgcagcgatggctggtgctggacaagtaggtgccgcattagcactttgggtaagatgtaaacgcaacacaacattacgtaatactttaaaaggtgcattgccagttggtttcctaggtattggagaaccattaatctatggtgtgactttgccattaggtcgacctttcttaactgcttgtattggcggtggtattggtggcgctgtaataggtggaattggacatattggtgccaaagcaataggcccaagtggtgtgtcactattaccattaatctcagataatatgtatttaggttatattgcaggattacttgctgcgtatgctggtggattcgtttgtacatatttatttggaacgacaaaggcgatgcgacagacagatttgttgggtgattaa

SEQ ID NO: 408287 - DNA, 135 bp, Staphylococcus aureus
atgaagggggatttaattgatgattttaaaattcaaaatttaaggggagagcgaactatcaatgatgctgcaaaacacaatcgcaatgaaaaaacaggcgcgtcaccttatgaaggtatacgcacctgtttatag

SEQ ID NO: 408288 - DNA, 1035 bp, Staphylococcus aureus
atgatgattaaagtaggtatcgttggcggtagcggttatggcgcaattgaattaattcgattattacaaacacatcctcatgtaacgattgcacacatctactcacattcaaaagtagatgagccgttgaaattaacatttccacatttacaacatattatgcaacatttcgaagcacttacagtggacaataatgactgtgatgtaattttctttgctacaccagcacccgtgagtaaaacatgtatccctcctttagtagaaaaaggaattcatgttattgatttatctggtgcattcagaattaaaaaccgtgaaatatatgaagcatattacaaagaaactgctgcagcacaagatgatttgaatcatgctatttacagcatttcagaatggcaatctttagataacaatggaacgaaactcatttctaaccctggctgtttccctacagcaacgttattagcattacatccacttattagcgaaaaaattgtagatttgtcatctattattattgatgctaagaccggcgtgtcaggtgctggtcgttcattatcacaacgtgttcatttttcagaaatgaatgaaaatctaagcgcttatgcaatcggaaaccataaacacaaaccggaaatcgagcaatatttatctatcattgcgggtcaagatgtatcagtcatatttacaccacatctcgtaccaatggcacgaggtattttatcaacaatatatgtcaaattatcatctgaatatacgactgaatcattacataaattaatgacctcttattatgctaatcagccatttgtcagaattagagatattgggacttttccaaccacaaaagaagtactcggtagtaactactgcgatatcggtatctatgtagatgaaacaacgcaaacagcaattttagtatcagtgattgataaccttgtcaaaggggcaagtggtcaagccattcaaaacttaaatatattatatgattttgaagttacgactggcctaaaacaatcaccagtttatccataa

SEQ ID NO: 408289 - DNA, 495 bp, Staphylococcus aureus
ttgacaaaacgacaaatgggtatattcatttatgctggaattatcggtggcttgttatctggaattgtaaaattaggttgggaggtcatgtttccacctcgcacaccagaacgtaatgcaacgaacccacctcaagagttattgcaacaattaggatttagtagtgagtttacgcatcaaacatatacattttcaaatatgcaattgccttgggtaagctttattgtccactttagtttttctatcgtcattgcaattatttactgcatattagttaaaaaatacgcttacttagcaatgggacaaggtgctgtttttggtattgctatttgggtattattccaccttatcattatgccaatcatgcatactgtacctgctgtgtgggatcaaccattccaagagcatctgtcagaattctttggccatatcgtctggatgatgacaattgaattagtgcgacaacattttgtctatcgctataaattaaattaa

SEQ ID NO: 408290 - DNA, 1176 bp, Staphylococcus aureus
gtgctgtttgctaacttcgctttgaatttaacaataattcaagggggtggtatgtcaaacagtgccgttttttttgtcatatttttaaaacaagcaacatgcaacacgtactttaaggaagtcaaaatttatcatttaggagagatggatatgaaaatcgtagcgttatttccagaagcagtagaaggtcaagacaatcaattacttaatactaaaaaagcattaggattaaaaacatttttagaggaaagaggacaagagttcattatattagcagataatggtgaagacttagataaacatttaccagatatggatgtgattattagtgcgccattttatcctgcatatatgactcgtgaacgtattgaaaaagcaccgaacttgaaattagcaattacagcaggtgtaggatctgaccatgtagatttagcggcagcaagtgaacataacattggtgtcgttgaagttacaggaagtaatacagttagtgtggcagaacatgcagttatggatttattaatacttcttagaaactatgaagaaggtcatcgtcaatcagtagaaggtgaatggaacttgtctcaagtaggtaatcatgcgcatgaattacaacacaaaacaattggtatttttggatttggacgaattggacaacttgttgctgaaagattagcgccatttaatgtaacattacaacactatgatccaatcaatcaacaagaccataaattgtctaaatttgtaagctttgatgaacttgtttcaacaagtgatgcgattacaattcatgcaccattaacaccagaaactgataacttatttgataaagatgttttaagtcgtatgaaaaaacacagttatttagtgaatactgcacgtggtaaaattgtaaatcgcgatgcgttagttgaagcgttagcatctgagcatttacaaggatatgctggtgatgtttggtatccacaacctgcacctgctgatcatccatggagaacaatgcctagaaatgctatgacagttcactattcaggtatgactttagaagcacaaaaacgtattgaagatggagttaaagatattttagagcgtttcttcaatcatgaacctttccaagataaagatattattgttgcaagtggtcgtattgctagtaaaagttatacagctaaatag

SEQ ID NO: 408291 - DNA, 1035 bp, Staphylococcus aureus
atgatgactttagaaacacttatcaaagaacaattagatcctcatttagtagaagttgatgaagggacgtattatccgagaacatttatccaacaattatttgtagatggctattttggtgaagcgacactgagaaaaaatgctgaagtaatcgaagctgtatcgcagtcttgtttgacaacaggattttgtttatggtgccaattggctttttcaacgtatttagaaaatgccacacagccacatttaaataatgacttacaacagcaattgttatctggagaaatattaggtgctaccggattgtctaatccgatgaagtcatttaatgatttagaaaagttgaaccttgaacacacttatgttgatggacaattggttgtcagtggacgtatgccagctgtaagtaatattcaagaagaccattattttggtgcgatttcgaagcatgaatcatcagatgaatttgtcatgttcattctacgtgccaatcaagatggtatcacgcttgttgaaaaaacaaattttttaggggtaaacggctcagcaacgtatcaaattactttgaatcaagtcgcagtgccacaatcacaaattatcacgcatgatgcgaagcagtttgcggcaactattcgcccgcaatttattgcttaccaaattccaataggattaggctcaattaaaagttctttagagttaattgatgcattttcaaatgcgcaaaacggaataaatcaatatttagagtatgatgttgaaggttttaaaaaacgctatcgtcaacttagagaggaatattatgcaatattagatgacggtaacttaacttcacatttaaatgaattaatatcattgaagaaggacattggctacttattgttagatgtaaatcaagcttctgttgtcaatggtggttcaagagcgtacacaccatattcgccacaagtacgtaaattaaaagaaggattcttctttgcggcattaacgccaacattaagacatttaggtaaacttgaggcagagttgaaggggtaa

SEQ ID NO: 408292 - DNA, 513 bp, Staphylococcus aureus
atgacattatttttattagaagctaacaatcttgattttgcatcaacgaaagaagaactagaagcaaaggcatcatcactatctacgaagacaattccaacattaattgaagtacaagctactgaaaatttaactcatggttattttattgtggaagcaaatgacgaagcagaagctaaacaatttttaacagaagcaggtattagcattcaattagtcaaagaagtacgcttagttggtaaagatttagatgaagtaaaaaatggtgatgcacatgttgattaccttgtaacttggaacattccggaaggcattacgatggatcaatatttagcacgtaaaaagaaaaattctgttcattatgaagaagtgccagaagttgaatttaaacgcacatatgtatgtgaagatatgtctaaatgtatttgtttatacaacgcacctgatgaagaagcggtacgtcgcgcgcgcaaagcagttgatacaccgattgatggcatcgaaaaactttaa

SEQ ID NO: 408293 - DNA, 960 bp, Staphylococcus aureus
atgaacgggaaaaaggcgaatacgataaacagatacaaatattttcatcatgtcgatcatcaaaaaattcaacaaagttctaaaaagacgctatgggcatcacttatcatcacactattatttacagtgattgaatttgttggaggtttagtatctaattcattagcattgctgtcagactcatttcatatgcttagtgatgtattagcactcggtttgtcaatgttggcaatttattttgctagtaagaagccgactgcacgctacacattcggatatttaagatttgagatattagcggcatttttaaatggtttagcattaattgtaatttcaatctggattttatatgaagctattgtacgtattatttatccgcaacccattgaaagtggcattatgtttatgattgctagtattggtttactcgtcaatattattttgactgttatccttgtaaggtctttaaaacaagaagacaatatcaatattcaaagtgcattatggcatttcatgggagacttattgaactctattggtgtcatcgttgcagttgtattgatctactttacaggatggcgcatcattgactcaatcattagtattgtaatttcactcatcattttacgtggtggttataaaattacgcgtaatgcgtggttaattttaatggaaagtgtgcctcaacatttggatactgatcaaattatagcagatataaaaaacatagatggcatattagatgtacatgaatttcatttgtggagtattacaacagaacattattcattaagtgcccatgttgtgttagataaaaaatatgagggggatgattatcaagcgattgatcaagtatcatcattgttgaaagaaaaatatggcattgcacattcaacgttgcaaattgaaaacttgcaattgaatccattagatgagccatacttcgacaaactaacataa

SEQ ID NO: 408294 - DNA, 1146 bp, Staphylococcus aureus
atgaaaaaaattatggttattttcggtacgagacccgaagcaataaaaatggcaccattagtaaaagaaattgatcataatgggaactttgaagcgaacattgtgattacagcacaacatagagatatgttagatagtgtgttaagtatatttgatattcaagctgatcatgatttaaatattatgcaagatcaacaaacgttagcgggcattacggcgaatgcgcttgctaaacttgatagcatcattaatgaggaacagccggatatgattttagtacatggtgatactacaacgacttttgtaggaagcttggcagcattttatcatcaaattccggtcggacatgtagaagctggacttcgaacacatcagaaatactcaccatttcctgaagagttaaatcgagtcatggtaagtaatattgctgaattgaattttgcgccaacagtaattgcagctaaaaatttactttttgaaaacaaagacaaagagagtatctttattaccggaaatacagttattgacgcattgtcaacaacagttcaaaatgagtttgtttcaacgattattaataaacataaaggcaagaaagttattttactaacagcgcatcgtcgtgaaaatattggagaaccgatgcatcagatttttaaagcagtaagagatttggcagatgaatataaagatgttgtcttcatttatccaatgcatcgtaatccaaaggtaagagcgattgccgaaaaatatttatctgggagaaatcggattgaattaattgagccattagatgcgcttgagttccataattttacaaatcaatcgtacctcgtgctgacagattctggtggtattcaagaggaggctcctacatttggaaaacctgtgttggtattaaggaatcatacagagcgtcccgaaggcgttgaggcgggaacatcgagagtaattggcacagattatgacaatattgttcgaaatgtgaaacaattgattgaggatgatgaagcgtatcaacgtatgagtcaagcgaataatccatatggtgatggacaagcatcacgacgtatttgtgaagcaatagaatattattttggattgcgttcagacaagccggatgaattcgtacctttacgtcgcaaataa

SEQ ID NO: 408295 - DNA, 1263 bp, Staphylococcus aureus
atgaagttaacagtagttggcttaggttatattggtttaccaacatcaattatgtttgcaaagcatggcgtcgatgtgcttggtgttgatattaatcagcaaacgattgataagttacaaagtggtcaaattagtattgaagaacctggattacaagaggtttatgaagaggtactgtcatcgggaaaattgaaggtatctacaacgccagaagcatctgatgtttttatcattgccgttccgacaccgaataatgatgatcagtaccggtcatgtgacatttcgctagttatgcgtgcattagatagtattttaccatttttagaaaaaggaaataccattattgtagagtcgacaattgcgcctaaaacgatggatgattttgtaaaaccagtcattgaaaatttagggtttacaataggtgaagatatttatttagtgcattgtccagaacgtgtactgccaggaaaaattttagaagaattagttcataacaatcgcatcattggcggtgtgactaaagcttgtattgaagcggggaaacgtgtctatcgcacattcgttcagggagaaatgattgaaacagatgcacgtactgctgaaatgagtaagctaatggaaaacacatatagagacgtgaatattgctttagctaatgaattaacaaaaatttgcaacaacttaaatattaatgtattagatgtgattgaaatggcaaacaaacatccgcgtgttaatatccatcaacctggtccaggtgtaggcggtcattgtttagctgttgatccgtactttattattgctaaagaccctgaaaatgcaaagttaattcaaactggacgtgaaattaataattcaatgccgtcctatgttgttgatacaacgaagcaaatcatcaaagcgttgagcgggaataaagtcacagtatttggtttaacttataaaggtgatgttgatgatataagagaatcaccagcatttgatatttatgagctattaaatcaagaaccagacatagaagtatgtgcttatgatccacatgttgaattagattttgtggaacatgatatgtcacatgctgtcaaagacgcatcgctagtattgattttaagtgaccactcagaatttaaaaatttatcggacagtcattttgataaaatgaagcataaagtgatttttgatacaaaaaatgttgtgaaatcatcatttgaagatgtatcgtattataattatggcaatatatttaattttatcgacaaataa

SEQ ID NO: 408296 - DNA, 888 bp, Staphylococcus aureus
atgagaaaaaatattttaattacaggcgtacatggatatatcggtaatgctttaaaagataagcttattgaacaaggacatcaagtggatcaaattaatgttaggaatcaattatggaagtcgacctcgttcaaaggttatgatgttttaattcatacagcagctttggttcacaacaattcacctcaagcaaggctatctgattatatgcaagtgaatatgttgcttacgaaacaattggcacaaaaggctaaagctgaagacgttaaacaatttatttttatgagtactatggcagtttatggaaaagaaggtcaggttggtaaatcagatcaaattgatacacaaacaccaatgaaccctacgaccaactatggtatttccaaaaagttcgctgaacaagcattacaagagttgattagtgattcgtttaaagtagcaattgtgagaccaccaatgatttatggtgcacattgcccaggaaatttccaacggttaatgcaattgtcaaagcgattgccaatcattccaaatattaataatcagcggagtgcattatatattaaacatctgacagcatttattgatcaattaatatcattagaagtgacaggcgtgtatcatcctcaagatagtttttactttgatacatcgtcagtaatgtatgaaatacgtcgccaatcgcatcgtaaaacgctattgatcaacatgccttcaatgctaaataagtattttaataagttgtcggtctttagaaaattattcggcaatttaacatacagcaatactttatatgaaaataataatgcgcttgaagttattcctggaaaaatgtcacttgttattgcggacatcatggatgaaacgacaaccaaagataaggcataa

SEQ ID NO: 408297 - DNA, 1239 bp, Staphylococcus aureus
atgagattaaataaatttattggcgattcgttcttaatgattttaagcagtggcatcgctcaagtcatattaatcatcactaccccaattattacaagactatattcacctacagaatttggtgagtttacaattttttcaaatatcgcaatgattttaataccaataataaatgcaagatacgatttgttgattgtgaatactaaaaatgaccgtagtgctaatatactttcacaaatcagttttttgatatcattgcttattttattaatactgataccaatatttgcgattagtgcatggttatacccaaactttatattagattttattttcattattattatgttgtttttggtaagtttaacaaacatttttacaaattatctaaataaggaaagaaaatataaagtgttaagtttgattaatgtgtttagagctggatcaatggctttacttcaaattattttcggacttttagcattaggaagtctaggattaattattggtttttcattatcctatatcgcaggcattacactaggatataaaacgtttaaaaagcactttaatattgtgagagataaagaagaaactaaagcattatttttagaaaataaaaatcagttagtttattcaacaccatcaatattattaaatagtttgtctttctcggttgttgtgttctttataggtattttgtataccaatacagaagtaggtatttatggtatggccataagagtactaggcataccagtgacaattatttcattagggttatcaaaaatatttatgcaacaagctaatgactattatattgaatatggtaacttccgaaatttattacttaaatttagttccatactggttatagtttctataattctttatgtgccactttatttgttcagtgaagaattagtcaatatattattaggacatagctgggttgacgcaattacagttataaaaattgttattccattatttgttataaggctgattgtatcaacggtatcactttctgtgattgtattacaaaaacaacagttagaattaatactgcaagcgttatttttaataggtactactgcaacatttgttatatcaaaaatgcttaatttaacttttttaaactttgtatctattaatacagttgttttaatcgtatcgtacatgatatttttcatagcactctattattttgctaaaaataaacagttcaaaaattcttag

SEQ ID NO: 408298 - DNA, 558 bp, Staphylococcus aureus
atgattgtaaaaacatttatgaaatcgaaaatatttagattaatgaatacaccactattattattttataagaaagaatatttaactggatattattttgaaaataaagtggctggatggttatgggcatggaaagctgttccgttcaagttgttaggaataaatacgagcttgccatttcctgcagatataactgttagaatgcataaccctaataacattgtttttgataaaaatgatattcatattttccaatcgcccgggacgtattttaataatttttcagcagttatatatataggtagaggtgtttatatagcgccaaacgtaggtattattacagctaatcataatattaaaaatttgaagtcacatgcaccaggtgaagatgtcaaaatagggaattatagttggattggaatgaactcagttatattaccaggagtagaattgggggaacatacaattgtaggggctgggtcggttgtaacaaaaagttttccagaaggtaacgttgttataggtggcaatccagcgaaagtcatcaagaaaatctga

SEQ ID NO: 408299 - DNA, 1395 bp, Staphylococcus aureus
atgaataagatatataatgtcacttcatatgttattgccattttaatgtttccttgccttatgttaggtgataaacctttattgtttttagcacctataagttatggagtaggaaagctctttataagcttctcaaataatccgaattttaaattttcgaaaattgtatacgatgttttaggttttcttagattagtatttatacctgctatgatagtgtttttccaggattcaactatagataatttaccattaggacaagattattttaatcaagcggttatttatatgagtgtggagtttatcataggctcgctatttatattgatactatctaaattattcaaacatgaagtggtatcaagaaatagctttacactttctggatcatcaatttattacattgtgtttggtcttgttatttgtgggatttttgtagcttttcccgaagtgcgcaaaaacatatcatttttaattattaaaacagatgcaatgggaagaggaaccgaagcaacaagtggtttaaatgtcctttttgtaatgctatttcaacttgccttagcgttattattcttaataatcgcatatgcttcatataaaaagtataaagagaatcctaaaattatttatgttatattgccgctagctatagggattttaaatattagtttaattgttggtgaaagaagaagttatcaactttatacgatggttgctgttttaacagtggtgtcactcttgttttctaagcacaaaagacgtatcaatatcattattatatctgttggtattttcgtattagcattgatgacactatataaagaattgtatgtgtttaattatagttcatatagcgaggcgttaaatagtacgagtgtaagtaatcttaagatagttgacacgttgcagtcatatttttatggacctagcaatattgcagcttctatagactatttgaattactataatggttcgtttaaacaatatttatttgataatactagagctgtttttgggtttaatttctttgtagataaaaagcagttgattactagccaactttttaaccaattgatatatggtagtaaacaattgactggtcatctaatttcgagtgctggatatggaattatttattttggacccttattcttctatttgaatttaattgcaaatatcttttttgcatttctgagtgagtatattattcggaagagtcattcgttagaagtgatatttattggtacatatatttatatgagacttattacgagtatttttagtcacccgacaccattaatcacattgatttctatgattttagttgtatatgttatagctattatcccaggcattataataaaaaaatttactaaaaaagtagggatagaatga

SEQ ID NO: 408300 - DNA, 1080 bp, Staphylococcus aureus
atgaggatagcgattcttggcgctactaacattaagcatatgtcattattatcacattatttaaaccacattgatttgaatatcaatgaggtggacattatatacactgacaaatatgatatcgaagaaaatatccaaggcatcaataattactataaatataaagtagatattaaagaagattggacatttatcaaaaaagctattgcttactatcgatttaggccatacgctatgaaaattctcaaagaaaatcattatgattttgtcatagtatggggaagttatacaggacacttatttaaaagttttttagaaaaacactataaaaataaattcattttaaatataagggactacttttttgaaaataataaacttattaagtatagaatgaaaaaaatcgttgatgctagcaggctgacaacattatcttcagaaggttttcttaaatttttacctaaatctgaaaaatatagaattatttatagttataacatgagtattattagagaaagtaatgtgaccgatgaattcaaaaaaagatggccaattaatataggttttattggtaatgtcagatttaatgagataaatcaaaaattgataaaggaactggcaaatgattcaaggttccatatgcaatattttggaacagggtcggaaaaattagaagtctttgctcgagaaaattttattaataatattacattttctggcggttttgacttggaagaaacaccgaaatatttaaatgaaattgatatacttaataatttgtttggtaataaaaatattgctttagatactgctttatccataagaatgtattatgcgttgtttttaaacaaacctattattacaacagatgatacattcaccgctacagaagctaataaattcggactgggttttagtgttaatccagaaaatttaaaaggtattggtgatgaattgatggattggtataacaatttgaatgtaatggacattaatcataaaagagaagcttatagaaacgatgtaattgaaaataataaacagttctatcaagagataggcaggatatttaatgaataa

SEQ ID NO: 408301 - DNA, 765 bp, Staphylococcus aureus
atgattgatattcataaccatatattgccgaatatcgatgacggtccgacaaatgaaacagagatgctggatcttttaagacaagcgacaacacaaggtgttacagaagtcattgtaacatcacatcacttacatcctcgatataccacacctatagaaaaagtgaaatcatgtttaaaccatattgaaagcttagaggaagtacaagcactaaatctaaagttttattatggtcaggaaataagaattaccgatcaaatccttaatgatattgatcgaaaagttattaccggtattaatgattcacgctatttactaatagaatttccatcaaatgaagttccacactatactgatcaattatttttcgaattacagagtaaaggctttgtaccgattattgcacatccagagcggaataaagcaataagtcaaaaccttgacatactatacgatttaattaacaaaggtgctttaagtcaagtgacaacggcgtcattagcgggtatttccggtaaaaaaattagaaaattagcaattcaaatgattgaaaacaatctgacacatttcatcggttcagatgcgcataacacagaaatcagaccgttcttaatgaaagacttatttaatgataagaaattacgtgattattatgaagatatgaacggatttattagtaatgcgaagttagttgttgatgataaaaaaattcctaaacgaatgccacaacaagattataaacagaaaagatggtttgggttataa

SEQ ID NO: 408302 - DNA, 669 bp, Staphylococcus aureus
atggaaagtacattagaattaacaaaaattaaagaagtattacaaaaaaacttgaagattttaattattttaccgctattatttttaattattagcgctattgttacatttttcgtcttatcacctaaatatcaagctaatactcaaattttagtgaatcaaactaagggtgacaatcctcagtttatggcgcaagaggttcaaagtaatattcaacttgtaaatacgtataaagaaattgttaaaagtcctagaattttagatgaggtgtcaaaggacttaaatgataagtattcaccatctaaattatcgagtatgttgacaattacaaaccaagaaaatacacaacttatcaacatccaagttaaaagtggtcataaacaagattcggaaaaaattgcgaatagcttcgctaaagttacaagtaaacaaattccgaagattatgagtgtggataacgtatcaattttatctaaagcagacggtacagcagttaaagtcgcaccaaaaactgtagtgaatctaatcggtgcactctttttaggattagttgtcgcgcttatatatatcttcttcaaagtaatttttgataagcgaattaaagatgaagaagatgtagagaaagaattaggattgcctgtattgggttcaattcaaaaatttaattaa

SEQ ID NO: 408303 - DNA, 2610 bp, Staphylococcus aureus
atgttaactatacctgaaaaagaaaatcgtggatcgaaagaacaagaagtggcaattatgattgatgctctagctgacaaagggaaaaaggcattagaagcattatctaaaaagtcacaagaagaaattaatcatattgttcatcaaatgagcttagcagctgttgatcaacatatggtgctagcaaaattagcacatgaagaaactggaagaggtatatacgaagataaagcgattaaaaatttatacgcttctgaatatatatggaattcaataaaagacaataagacagtagggattattggtgaagataaagaaaaaggattaacgtatgtagcggaaccaattggtgttatttgtggtgttacgccaacaacaaatcctacgtcgacaactatttttaaagcgatgattgcaattaagacaggaaatccaatcatttttgcattccatccaagtgcgcaagaatcgtcgaagcgtgcagcagaagttgtattagaagcggcaatgaaggcaggtgcacctaaagatattattcaatggattgaagtgccctctatcgaagcaacaaaacaattaatgaatcacaaaggtattgcattagttctagcaacaggtggttcgggcatggttaagtctgcatattcaactggcaaaccggcattaggtgtgggaccaggtaacgtgccgtcttacattgaaaaaacagcacacattaagcgtgcagtaaatgatatcattggttcaaaaacatttgataatggtatgatttgtgcttctgaacaagttgtagtcattgataaagaaatttataaagatgttactaatgaatttaaagcacatcaagcatactttgttaaaaaagatgaattacaacgcttagaaaatgcaattatgaatgaacaaaaaacaagtattaaacctgatattgtcggtaaatctgcagttgaaatagctgaattagcaggtatacctgtccccgaaaatacaaaacttatcatagccgaaattagcggtgtaggttcagactatccgttatctcgtgaaaaattatctccagtattagccttagtaaaagcccaatctacaaaacaagcatttcaaatttgtgaagacacactacattttggtggattaggacacacagccgttatccatacagaagatgaaacattacaaaaagattttggactaagaatgaaagcttgtcgtgtacttgtaaatacaccatcagcggttggaggtattggtgatatgtataacgaattgattccgtctttaacattaggttgtggttcgtacggtagaaactcaatttcacataatgttagtgcgacagatttattaaacattaaaacaattgctaaacgacgtaataatactcaaattttcaaggtgcctgctcaaatttattttgaagaaaatgcaatcatgagtctaacaacaatggacaagattgaaaaagtgatgattgtctgtgaccctggtatggtcgaattcggttatacaaaaacagttgagaatgtattaagacaaagaacggaacagcctcaaattaaaatatttagcgaagtcgaaccgaacccatcaacgaatacagtatataaaggtctggaaatgatggttgatttccaaccggatacaatcattgcacttggtggtggttcagcgatggatgctgcaaaagcaatgtggatgttctttgaacaccctgagacatcattcttcggtgctaaacaaaagttcctagacatcggtaaacgtacttataaaataggcatgcctgaaaatgcgacgttcatttgtatccctacgacatcaggtacaggttcagaagtaacaccatttgcagttatcacagatagtgaaacaaatgtaaaatatccgttggctgattttgctttaacacctgatgttgcaattattgaccctcaatttgtgatgagtgtgccaaaaagcgttacagcagatacaggaatggatgtactaacgcatgcaatggaatcatatgtatctgtaatggcttcagattacacaagaggtttgagtctacaagcgattaaattgacgttcgaatatttaaaatcatctgttgaaaaaggtgataaagtttcaagagagaaaatgcataacgcatcaactttggctggtatggcatttgcaaatgcattcttaggcattgcacactcaattgcgcataaaattggtggggaatatggtattccgcatggtagagcgaatgcgatattactaccgcatattatccgttataatgccaaagacccgcaaaaacatgcattattccctaaatatgagttcttcagagcagatacagattatgcagatattgccaaattcttaggattaaaaggtaatacgacagaagcactcgtagaatcattagctaaagctgtctacgaattaggtcaatcagtcggaattgaaatgaatttgaaatcacaaggtgtgtctgaagaagaattaaatgagtcaattgatagaatggcagagctcgcatttgaagatcagtgtacaactgctaatcctaaagaagcgctaatcagtgaaatcaaagatatcattcaaacatcatatgattataagcaataa

SEQ ID NO: 408304 - DNA, 1545 bp, Staphylococcus aureus
atgaaaaatatatataagtcattaactgtctctgcaattgttgcaacggtatcattaagtgctttaccgcaatctttagctataacgcatgaatcgcaacctacaaagcaacagcaaacagtattattcgatcgttctcatggtcaaacagctggtgctgcagattgggttagtgatggtgcattttcagattatgcggattcaatacaaaaacaaggttatgacgttaaagctattgatggtcattcgaacataacagaagcaagtttgaaaagttccaaaatatttgtaattcctgaggctaacattcctttcaaagaatcagaacaggcagcaattgttaactatgtgaaacaagggggaaatgttgtctttatttcagaccattacaatgctgaccgaaatttaaatcgtattgattcatcagaggcaatgaatggttatcgacgtggagcgtatgaagatatgtcgaaaggtatgaatgcagaagaaaaaagttctactgcaatgcaaggtgtgaaaagttcagattggttatctacaaactttggcgtacgttttcgatataatgcactaggtgatttaaatacgagcaatattgtttcttcaaaagaaagttttggtattactgaaggtgtgaaatctgtatctatgcatgccggttcgacattagcaattactaatccagagaaagcaaaaggtattgtgtatacaccagaacaattgccagcgaaaagtaaatggtcacatgctgtagatcaaggtatttataatgggggcggtaaagcagaaggtccctatgtagcaatttctaaagttggaaaaggtaaagcagcatttatcggtgattcatcacttgtggaagatagttcgcccaaatatgtgagagaagataatggagaaaagaagaaaacatatgatggttttaaagaacaagacaacggtaagctattaaataatataacagcttggatgtctaaagataatgatgggaaatcacttaaggcgagtggcctaacattagatacaaagactaagttgcttgattttgaacgaccagagcgttcaactgagcctgaaaaagagccatggtcacaaccgccgagtggttataaatggtatgacccaacaacatttaaagcaggtagttatggcagtgaaaaaggcgcggatcctcagccaaacacaccagatgatcatacgccaccaaatcagaccgaaaaagtatcatttgatatcccgcaaaatgtttctgtaaatgagccatttgaagtgacaatacatttaaaaggatttgaagcaaatcaaacacttgaaaatcttagagttggtatttacaaagaaggaggacgtcaaatcggacaattttcaagtaaagataacgattataacccgccaggttacagtactttgccaacagttaaagcagatgaaaacggaaatgccacaattaaggtcaatgccaaagtactcgaaagtatggaaggttcaaagattcgtttaaaactcggtgacaaaaccttgattacaacagacttcaaataa

SEQ ID NO: 408305 - DNA, 957 bp, Staphylococcus aureus
atgaaaaattttaagtgtttatttgtattaatgttagcagtcattgtttttgcagcagcatgtggaaattcaagttctttagataatcaaaagaacgctagtaatgattcggattctaaatcaggaggatacaaacctaaagaattaacagttcaatttgtaccttcgcaaaatgctggaacattagaggctaaagcaaaaccattagaaaaattactatctaaagaattagggattccagttaaagtgtctgtatcaactaactacaatacaattgttgaagctatgaagtctaaaaaagttgatgttggtttcttaccaccaacggcatacacattagcacatgatcaaaaagcagctgatttattattacaagcacaacgttttggtgtaaaagaagatggttcagcaagtaaagaacttgtagatagttataaatcagaaattcttgttaaaaaagactcaaaaattaaaagcttgaaagatttaaaaggtaagaaaattgccttacaagatgtaacatcaactgctggatatacattcccacttgcgatgttaaaaaacgaagcaggtattaatgcaactaaagatatgaaaattgtgaatgttaaaggtcatgaccaagcagttatctcattattaaatggagatgtagatgctgcagctgtatttaacgatgcacgtaatactgtgaaaaaagaccaaccaaatgtatttaaagacacacgaattttaaaattaacacaagctattccgaatgacacaatttctgtaagaccagatatggataaagacttccaagagaaattgaaaaaagcttttatagacattgctaaatcaaaagaaggtcacaaaattattagcgaagtttattcacatgaaggatacacagaaacgaaagattcaaatttcgacattgtaagagagtacgaaaaattagttaaagatatgaaataa

SEQ ID NO: 408306 - DNA, 774 bp, Staphylococcus aureus
atgagtcaaatcaaatttaaaaacgtcagtaaagtctatcctaacggtcatgtaggcttgaaaaatattaacttaaatattgaaaaaggtgaatttgcagtcattgtcggactatctggtgctgggaaatccacgttattaagatctgtaaatcgtttgcatgatatcacgtcaggtgaaattttcattcaaggtaaatcaatcactaaagcccatggtaaagcattattagaaatgcgccgaaatataggcatgattttccaacattttaatttagttaaacggtcaagtgtattacgaaatgtactaagtggacgtgtaggttatcaccctacttggaaaatggtattaggtttatttccaaaagaagacaaaattaaagcaatggatgcactagaacgggtcaacatcttagataaatataatcaacgctctgatgaattatcaggtggccaacaacaacgtatatctattgcacgtgcgctatgccaagaatccgaaattattcttgcagatgaaccagttgcttcattagacccattaacaacgaaacaggttatggatgatttaagaaaaatcaaccaagaattaggcatcacaattttaattaatttacattttgttgacttagcaaaagaatatggcacacgcatcattggtttacgtgatggtgaagttgtctatgatggtcctgcatctgaagcaacagatgacgtatttagtaaaatatatggacgtacaattaaagaagatgaaaagctaggagtgaactaa

SEQ ID NO: 408307 - DNA, 801 bp, Staphylococcus aureus
atgcctttagaaacacctacaaagtatgactcccttttaaagaaaaaggtttctttaaaaacgagttttaccttcatgttaatcattgtgcttatcatttggagcttcatttatacggggtttaattttggagatttaatgataggaatacctcaaataggtgatctattcaaacaaatgattccacctgatttcgagtatttacaacaaattacaacgccaatgttagataccattcgaatggctatcgtaagtacagtattaggtagcatcgtttcaataccaattgcgttattatgtgctagcaatatcgttcatcaaaagtggatttcaataccctcgcgctttattttaaatatagttcgtactattccagatttgttattagcagcaatctttgtggctgtatttggaatcggtcaaattccagggatattagcattgtttattttaactatctgtattattggaaaattattatatgaatcattggaaacgatagatccaggtccaatggaagcaatgacggctgttggcgctaataaaataaaatggattgttttcggtgttgtaccacaagccatatcgtcatttatgtcatacgtattatatgcatttgaagtaaatatacgtgcttcagctgtgcttggattagtcggcgctggcggtattggattgttttatgatcaaacacttggtttatttcaatatccaaaaacagcaacgattattttatttactttagttatcgtcgtcgtcattgattacatcagtacgaaagtgagggcacatctcgcatga

SEQ ID NO: 408308 - DNA, 816 bp, Staphylococcus aureus
atgacacaggaaatagaaaaatataatgttcacacaaaagcacacaaacgaaaattgattaaaagatggcttattgcaattgtcgtcttagctattatcatctgggcatttgcaggtgtaccaagtttagaacttaaaagtaaatcattagaaatcttaaaatccatattcagcggattattccatcctgatatcagctatatctatataccagatggcgaagacttattacgtggtttacttgaaacctttgcgatagccgttgtaggtactttcatcgccgcaattatctgtattccattagcatttctaggtgcaaataatatggtaaagctacgcccagtttcaggtgttagcaaatttattttaagtgttatacgtgtcttcccagaaattgtaatggcacttatatttatcaaagctgttggcccaggttcattttcaggtgtattagctttaggtatccattccgtaggtatgcttgggaaacttttagctgaagatattgaaagtctagatttcagtgctgtagaatcattaaaggccagtggtgcgaataagattaaaacactcgtatttgcagtcataccacaaattatgcctgcctttctatcactcatactttatcgctttgaactaaacttacgttcagcttctatactggggctaattggggctggtggtatcgggacaccactcatatttgccattcaaacacgttcttgggaccgtgtaggtattatattaatcggtttagtactaatggtcgcaattgtcgatttaatttccggttcaatccgaaaacgtattctttaa

SEQ ID NO: 408309 - DNA, 1179 bp, Staphylococcus aureus
atgacaagaccatttaatcgtgtacatttaatcgtaatggattcagtaggtattggtgaagcgccagacgcagctgattttaaagatgaaggttcacatactttaagacataccttagaaggcttcgatcaaactttaccaaaccttgaaaagttaggtctagggaacatcgataaattaccagtagtaaatgcagttgaacaaccagaagcatactatactaaattgagtgaagcttcagttggtaaagatacaatgactggtcactgggaaattatgggattaaatattatgcagccttttaaagtataccctaatggattccctgaagagttaattcaacaaattgaagaaatgacaggtcgtaaagttgttgctaacaaaccggcatcgggtacgcaaattatcgatgagtggggcgagcaccaaatgaaaactggtgacttaattgtttatacaagtgcagacccagtattgcaaattgctgcacatgaagacattatcccattagaagagttatatgatatttgtgaaaaggttcgtgagttgacaaaagaccctaaatatttaattggtcgtattatcgcacgtccatatgttggtgaaccaggaaactttacacgtacatctaatcgacatgactatgcgttaaaaccatttggtaaaactgtcttagatcatttgaaagacggtggttatgatgtcattgccatcggtaaaattaatgacatttatgatggtgaaggtgtaacagaagcggttcgtacaaagagtaacatggacggtatggatcaattgatgaaaattgttaagaaagatttcacaggtattagcttcttaaacttagtagactttgatgcattatacggtcatcgtcgtgataaaccgggttatgcacaagcaattaaagatttcgatgatcgcttgccagaactgtttagcaacttaaaagaagacgatttagtaattattacagcagaccatggtaatgacccgacagcgccaggtacggaccatacgagagaatacatcccagtaattatgtacagtccgaaatttaaaggtggtcatgcactagaaagtgatactacattcagctctatcggtgcaactatagcagataatttcaacgtaacattaccagagttcggtaaaagttatttaaaggaattaaaatag

SEQ ID NO: 408310 - DNA, 663 bp, Staphylococcus aureus
atgaaatttgagaaatatatagatcacactttattgaagcctgagtcaacacgtacgcaaatcgatcaaatcatcgatgaagcgaaagcatacaattttaaatctgtatgtgtgaatccaacgcatgttaaatatgcagcagagcgactagctgattcagaggtgctagtttgtacggtaataggattcccattaggtgcgtcgacaactgcaacgaaagtatttgaaacagaagatgcaattcaaaatggtgcagatgaaattgacatggtcatcaacatcggcgcattaaaagatgggcgttttgatgatgtacaacaagacattgaagcagtggttaaagctgcggaaggtcacacagtaaaagtgattattgagacggtattgttggagcatgacgaaatcgtaaaagcgagtgaattaacaaaagcggctggtgcggacttcgttaaaacttcaacaggttttgcaggtggcggtgcgactgcagaagacgttaaattaatgaaagatacagtaggtgcagatgtagaagtaaaagcatcaggtggcgtacgtaatttagaagatttcaataaaatggttgaagcgggtgcgacacgtattggtgcgagcgcaggcgttcaaattatgcaaggtttagaagcagattcagattactaa

SEQ ID NO: 408311 - DNA, 1359 bp, Staphylococcus aureus
atgattatgaatgttgaatattctaaaataaagaaagcagtacctattttattattcttatttgtattcagtttggttatagacaactcattcaaattgatttctgtagccattgctgatgacttaaacatttcagtaacgacagtaagttggcaagcgacattagccggtttagtaattggtattggcgctgtagtatacgcttcattatctgatgccattagtatacgcacactatttatttatggcgtgatattaatcattatcggatcaattattggttacattttccaacatcaattcgcattacttttagttggacgtattattcaaactgcaggtttagctgctgcagagacattatatgtgatatatgttgcaaagtatctttctaaagaggaccagaagacttaccttggcttaagtacgagcagttattccttgtcattagttatcggtacattatcaggtggatttatttctacgtatttacactggacaaatatgtttttaattgcattaatcgtagtatttacgttgccattcctatttaaattattaccaaaagaaaataatacaaataaagctcatttagattttgttggcttaattctagtggcaactatcgctacaacagttatgctgtttattacgaactttaattggttatatatgattggtgccttaattgcgattatcgtttttgcgctatatattaaaaatgcgcaacgtccattagtaaacaaatcatttttccaaaataaacgttatgcttcatttttatttatagtatttgtaatgtatgccatccaattgggttatatttttacgttcccattcataatggaacaaatttatcatcttcagctagacacaacatcactgctattagtaccgggttatattgtagcagtcatcgttggtgcactaagtggtaaaatcggcgaatatcttaattcaaaacaagcgattatcacagcaattattttaatcgcactgagcttgattttacctgcatttgcagtaggtaatcacatttcaatcttcgtcatttctatgatattctttgcaggtagctttgctttaatgtatgcacctttacttaacgaagccattaaaacaatagatcttaatatgacaggtgtggctattggtttttataatttaattattaatgtggcggtatctgtaggtattgcgattgctgcggctttaatcgattttaaagcattaaatttcccaggcaatgatgcattaagttcacatttcggtattattttaattattttaggtttaatgagtattgtcggattagttttattcgtcatcttaaatcgttggacacaatctgaaaaataa

SEQ ID NO: 408312 - DNA, 708 bp, Staphylococcus aureus
atgaaatcaacaccacacattaaaccaatgaatgacgtcgaaattgcagaaacggttctattgccaggagatccgttaagagctaagttcattgcagaaacatatttggacgatgtggaacagttcaatacagtgcgaaatatgtttggttttaccggaacatataaaggtaaaaaagtttctgtcatgggttcaggaatgggtatgccatctattggcatttactcttatgaattaattcatacatttggttgtaaaaaattaattcgcgttggttcttgtggcgcgatgcaagaaaacattgatttatatgatgtgattgttgcacaaggtgcctctactgattcaaattacgttcaacaatatcaattaccaggtcattttgcgccaattgcttcttatcagttattagaaaaagctgttgaaacagcacgtgacaaaggtgtacgtcatcatgtaggtaatgtgttatcaagtgatattttctataacgcggatacaacagcgagtgaacgttggatgcgtatgggtattttaggtgtagaaatggaatcagctgcattatacatgaatgcaatttacgctggtgtcgaagcattaggtgtgttcacagtgagcgatcatttaattcatgaaacgtcaacaacacctgaggaaagggaacgtgcatttacagatatgattgaaattgcactgtcattggtgtag

SEQ ID NO: 408313 - DNA, 741 bp, Staphylococcus aureus
gtgacgcaaacacaaccaaaatttttaacgatttataatacgttatataaagaaattcaaataggaaaatatccgagtggccatgcattacctactgaaaaggaactttgtgcgcgctttgatgtcagtcgtatgactttgcgccaagctataaaattgttagccgaagatggcatcgtagagagtacaagagggaagggacactttgttattccacaaacaaatgcccaacacgcttcaagtatggatcaatttaagcatccacttgatcaaatattattagatcgtgtatctatgtcatcaattaattatcgtgttgatttagaaagtgaatatacaaatcatttgtttgcaaaccatccttctgccgtcattgcaatggaacgctattatcaaaaaaaggacaaccattctaagcaagctgatgcattttgttttacctttataccgttaaatgtcattgacacatttaaagtgaatacacaaaacgaagacgacatgaagacgttcgttgagcaaacgatttatagcaatgcatatcaatcagatttaaaaatgtctattaccaaagcgccccacttcaaaaatcatagtcacgtgtttgatggtgatacacattgttggctgattattgaaacattgtacgcacaaacgccctatccgattatgattaataagtggtatattccacaggaaatatctgaattaacactgacacgtataagacaatcggattattaa

SEQ ID NO: 408314 - DNA, 666 bp, Staphylococcus aureus
atgaaaaaattagcaacagtaggttctttaattgtaacaagcactttagtattctcaagtatgccttttcaaaatgcgcatgctgacacaacttcaatgaatgtgtcgaataaacaaagccaaaatgtacaaaatcatcgcccttatggcggagtagtaccacaaggaatgacgcaagcacaatatactgaattagagaaaactttaccccaattaagcgctggcagtaatatgcaagactataatatgaaattgtatgatgcgacgcaaaatattgctgataaatacaatgtgataattacaactaatgtaggggtatttaaaccacatgctgttagagatatgaatggccatgcgttacctgtaacaaaagatggcaatttttatcaaacgaatgtagatgcaaatggtgttaatcatggtggtagtgaaatggtgcaaaataaaacaggtcatatgaatcagaacacacacatgaaccaacagccacacatgcaacaaggtcatatgcaatcatcaaaccatcaaatgaaccaaagtaacaaaaaagttttaccagctgctggtgaaagtatgacatcaagtattcttactgcaagtattgccgcactactattagtatctgggttattcttagcatttagacaacgttcaacaaataaataa

SEQ ID NO: 408315 - DNA, 600 bp, Staphylococcus aureus
atggcatttaaattaccaaatttaccatatgcatatgatgcattggaaccatatatagatcaaagaacaatggagtttcatcacgacaaacatcacaatacgtacgtgacgaaattaaacgcaacagttgaaggaacagagttagagcatcaatcactagcagatatgattgctaacttagacaaggtaccggaagcgatgaggatgtcagtccgtaataatggcggtggtcattttaaccattcattattctgggaaatactatcacctaattctgaagaaaaaggtggcgtaatagacgacattaaagcgcagtggggcactttagatgaatttaaaaatgaatttgcaaataaagcaacaacattatttggatcaggttggacttggttagttgttaatgatggaaaattagaaattgtgacaacgccaaaccaagataatccattaacagaaggcaaaacaccaatcttactatttgatgtttgggagcatgcctactatctgaaatatcaaaataaacgtccagactatatgactgcattttggaatattgttaactggaaaaaagttgatgaattataccaagcagcaaaataa

SEQ ID NO: 408316 - DNA, 1431 bp, Staphylococcus aureus
atgaagagtgattcactaaaagaaaatattatttatcaagggctataccaattgattagaacgatgacaccgctgattacaatacccattatttcacgtgcatttggtcccagtggtgtgggtattgtttcattttctttcaatatcgtgcaatactttttgatgattgcaagtgttggcgttcagttatattttaatagagttatcgcgaagtccgttaacgacaaacggcaattgtctcagcagttttgggatatctttgtcagtaaattatttttagcgttaacagtttttgcgatgtatatggtcgtaattactatatttatagatgattactatcttattttcctactacaaggaatctatattataggtgcagaactcgatatttcatggttttatgctggaactgaaaagtttaaaatacctagccttagtaatattgttgcgtctgttattgtattaagtgtcgttgttatctttgtgaaagatcaatcagatttatcattgtatgtatttactattgctattgtgacagtattaaaccaattacctttgtttatctatttaaaacgatacattagctttgtttcggttaattggatacacgtctggcaattgtttcgttcgtcattagcatatttattaccaaatggtcaactcaacttatacactagtatttcttgcgttgttcttggtttagtaggcacataccaacaagttggtatcttttctaacgcatttaatattttaacggtcgcaattataatgattaatacatttgatcttgtaatgattccgcgtattactaaaatgtgtatccagcaatcacatagtttaactaaaacgttagctaataatatgaatattcaattgatattaacaatacctatggtctttggtttgattgcaattatgccatcattttatttatggttctttggtgaggaattcgcatcaactgtcccattgatgaccattttagcgatacttgtattaatcattcctttaaatatgttgataagcaggcaatatttattaatagtgaataaaataagattatataatgcgtcaatcactattggtgcggtaatgaatttagtattatgtcttgttttgatatatttttatggaatttacggtgctgctattgcgcgtttaattacagagtttttcttgctcatttggcgatttattgatattactaaaatcaatgtgaagttgaatattgtaagtacgattcaatgtgtcattgctgccgttatgatgtttattgtgcttggtgtggtcaatcattatttgcctcctacaatgtacgctacgctgctattaattgcgattggtatagtagtttatcttttattaatgatgactatgaaaaatcaatacgtatggcaaatattgaggcatcttcgacataaaacaatttaa

SEQ ID NO: 408317 - DNA, 1239 bp, Staphylococcus aureus
atggaaaatcaacacaatagtaaatatctaacattgttacttatcggtttagcggtttttattcagcaatcttcggttattgccggtgtgaatgtttctatagctgactttatcacattactaatattagtttatttactgtttttcgccaaccatttattaaaggcaaatcattttttacagtttttcattattttgtatacatatcgtatgattattacgctttgtttactattttttgatgatttgatatttattacggttaaggaagttcttgcatctacagttaaatatgcatttgtagtcatttatttctatttagggatgatcatctttaagttaggtaatagcaaaaaagtgatcgttacctcttatattataagcagtgtgactataggtctattttgtattatagctggtttgaacaagtcccctttactaatgaaattattatactttgatgaaatacgttcaaaaggattaatgaatgaccctaactatttcgcgatgacacagattattacattggtacttgcttacaagtatattcataattacatattcaaggtccttgcatgtggtattttgctatggtctttaactacaacggggtctaagactgcgtttatcatattaatcgtcttagccatttatttctttattaaaaagttatttagtagaaatgcagtaagtgttgtgagtatgttagtgattatgttaattctactttgttttaccttttataatataaactactatttattccaattaagcgaccttgatgccttaccgtcattagatcgaatggcgtctatttttgaagaggggtttgcatcattaaatgatagtggatctgagcgaagtgttgtatggataaatgccatttcagtaattaaatatacattaggttttggtgttggcttagtggattatgtacatattggctcgcaaattaatggtattttacttgttgcccataatacatatttgcaaatttttgcggaatggggcattttattcggtgcgttatttatcatatttatgatttatttattatttgaattatttagattcaatatttctgggaaaaatgtaacagcaattgttgtaatgttgacgatgctgatttactttttaacagtatcgtttaataactcaagatatgtcgcttttattttaggaattatcgtctttattgttcaatatgaaaagatggaaagggatcgtaatgaagagtga

SEQ ID NO: 408318 - DNA, 1167 bp, Staphylococcus aureus
ttgaaaattatatattgtattactaaagcagataatggtggtgcacaaacacatctcattcaactcgctaaccatttttgcgtacaccatgatgtttatgtcattgtaggcaatcatggaccaatgattgaacaactagatgcaagagtcaatgtaattattatcgaacatttagtaagtccaattgactttaaacaagatattttagctgtcaaagtgttagcacagttattctcgaaaattaaacctgatgttatccatctacattcttccaaagctggaacggtcggacgaattgcgaagttcatttcgaaatcgaaagacacacgtgtagtttttactgcgcatggatgggcttttacagagggtgttaaaccagctaaaaaatttctatatctagttattgaaaaattaatgtcacgtattacagatagcattatttgtgtttcagatttcgataaacagttagcgttaaaatatcgatttaatcgattgaaattaaccactatacataatggaattgcagatgttcccgctgttaagcaaacgctaaaaagccaatcacataacaatattggcgaagttgttggaatgttgcctaataaacaagatttacagattaatgactcgacaaaacatcaatttgttatgattgcaagatttgcttatccaaaattgccacaaaatctaatcgcggcaatagagatattgaaattacataacagtaatcatgcgcattttacatttataggcgatggacctacattaaatgattgtcagcaacaagttgtacaagctgggttagaaaatgatgtcacatttttgggcaatgtcattaatgcgagtcatttattatcacaatacgatacgtttattttaataagtaagcatgaaggtttgccaattagcattatcgaagcgatggctacagggttgcctgtcatcgctagtcatgttggtggcatttcggaattagtaactgataatggtatatgtatagtgaacaatcaacctgaaactattgccaaagtcctggaaaaatatttaatagacagtgattacatcaaaatgagtaaccaatctagaaaacgttatttagaatgttttacagaggagaaaatgattaaagaagtggaagacgtttataatggaaaatcaacacaatag

SEQ ID NO: 408319 - DNA, 690 bp, Staphylococcus aureus
ttgaagaagttacagcgaaagaagtggaaatgtcgtgaaattggcattgaagctgtccgtaataagggttacgcctatcaaagaaaattagacacactagaagaagtaaaaaagggctattttccaatcaaacgtgcgattgacttggtattaagtatcgttttattatttttaacatttccgattatgttcatattcgccattgctatcgtcatagattcgccaggaaaccctatttatagtcaggttagagttgggaagatgggtaaattaattaaaatatacaaattacgttcgatgtgtaaaaacgcagagaaaaacggtgcgcaatgggctgataaagatgatgatcgtataacaaatgtcgggaagtttattcgtaaaacacgcattgatgaattaccacaactaattaatgttgttaaaggggaaatgagttttattggaccacgcccggaacgtccagaatttgtagaattatttagttcagaaataataggatttgagcaaagatgtcttgttacaccaggattaacaggtcttgcgcaaattcaaggtggatatgacttaacaccacaacaaaaattaaaatatgacatgaaatatatacataaaggtagcttaatgatggaattatatatatcaattagaacattgatggttgttattacaggggaaggctcaaggtag

SEQ ID NO: 408320 - DNA, 972 bp, Staphylococcus aureus
ttggaaaaagttttgataactggtggggctggttttattgggtcacatttagtagatgatttgcaacaagattatgatgtttatgttctagataactatagaacaggtaaacgagaaaatattaaaagtttggctgacgatcatgtgtttgaattagatattcgtgaatatgatgcagttgaacaaatcatgaagacatatcaatttgattatgttattcatttagcagcattagttagtgtcgctgagtcggttgagaaacctatcttatctcaagaaataaacgtcgtagcaacgttgaaattattagaaaccattaaaaaatataacagtcatataaaacgattcatctttgcatcatctgcagccgtttatggtgatttacctgatttacctaaaagtgatcaatcattaattctaccattatcaccatatgcaatagataaatattacggcgaacgtacgacattaaattattgctcgctatataacattccaacagctgttgttaaattctttaatgtatttgggccaaggcaagatcctaagtctcaatattcaggtgtgatttcaaaaatgttcgattcatttgaacataacaagccttttacattttttggcgatggtctgcaaacgagagactttgtttatgtttatgatgttgttcaatctgtgcgcttaattatggagcataaagatgcggttggacatggttataacattggtacgggtacatttacgaatttgctagaggtttatcgcattattggtgaattatatggaaaatcagtcgagcatgattttaaagaagcaagaaagggagatattaagcattcttatgcagatatttctaatttaaaagcattaggatttgttcctaaatacactgtggaaacaggcttaaaggattactttaattttgaggtagataatattgaagaagttacagcgaaagaagtggaaatgtcgtga

SEQ ID NO: 408321 - DNA, 777 bp, Staphylococcus aureus
atgacaaacaacaaagtagcattagtaactggcggagcacaagggattggttttaaaattgcagaacgtttagtggaagatggtttcaaagtagcagttgttgatttcaatgaagaaggggcaaaagcagctgcacttaaattatcaagtgatggtacaaaagctattgctatcaaagcagatgtatcaaaccgtgatgatgtatttaatgcagtaagacaaactgcagcgcaatttggcgatttccatgtcatggttaacaatgccggccttggaccaacaacaccaatcgatacaattactgaagaacagtttaaaacagtatatggcgtgaacgttgcaggtgtgctatggggtattcaagccgcacatgaacaatttaaaaaattcaatcatggcggtaaaattatcaatgcaacatctcaagcaggcgttgagggtaacccaggcttgtctttatattgcagtacaaaattcgcagtgcgaggtttaacacaagtagccgcacaagatttagcgtctgaaggtattactgtgaatgccttcgcacctggtatcgttcaaacaccaatgatggaaagtatcgcagtggcaacagccgaagaagcgggtaaacctgaagcatggggttgggaacaatttacaagtcagattgctttgggcagagtttcacaacccgaagatgtttcaaatgtagtgagcttcttagctggtaaagactctgattacattactggacaaacaattattgtagatggtggtatgagattccgttaa

SEQ ID NO: 408322 - DNA, 627 bp, Staphylococcus aureus
atggaaaaaaatgtagaaaaatcattcataaagataggtttatattttcaaatagcttatatagtactcatggctataactttatgtgggtttgtaatttgctatggactaattttcggccttttctatttattgtcaggtagcagagctgattatttaatagtaacgatagttatatcggcaataatttctatatttgtaattatactttcaatcgtacctgtcatcgtattggcatctgacttatttaaagaaaggatttcaaatggtgtcatattaattgtattggctattatcgctttagtattatgcaactttgtatctgcaatactctggtttgtttcagccatatctattttaggtagaaaaaaattagtatctacatcagatactaccactattcaaaaaagtaaagggaacgcaaatcaagcatcacataaagacacgtgtaaaaaggaacttgatagtcaagacatgatggaacatcctgagtttaaaaatcccacgactaaaaacctagaaggattaaacgaagaagtacataaagatgaagctacaactaaagttgacagtgataatacggaaccgccgattgaatcaaaagaccatgtctcgaaaaaagattga

SEQ ID NO: 408323 - DNA, 765 bp, Staphylococcus aureus
ttgaatcatattcatgaacatttaaaattggtaccagtagataagattgatcttcacgaaacattcgaacctttaagattggaaaaaacgaaaagtagtattgaagcagatgattttatacgtcatcctattttagtgacagcgatgcaacatggtagatatatggttatagatggtgtgcatcggtatacaagtttgaaagcgttaggatgtaagaaagttccagtgcaagaaatccatgaaacacaatattcaattagtacatggcaacataaagttccatttggtgtgtggtgggaaacgttacaacaagaacatcgcttaccatggactactgagacaagacaagaagcgccatttattacgatgtgtcatggtgatacagaacaatatttgtatacaaaagatttaggcgaagcacattttcaagtatgggaaaaggttgtcgcaagttatagtggttgttgttctgtagagagaattgcacaaggtacatatccttgtctttctcaacaagatgtactcatgaagtatcagccattgagttataaggaaattgaagcggttgttcataaaggggaaactgtgccagcaggtgtgacacgctttaatatttcaggacgatgtcttaatcttcaagtaccactggcattacttaaacaagatgatgatgttgaacaactgcgcaattggaagcagtttttagcagataagtttgccaatatgagatgttatactgaaaaagtatacttggtggagcaatag

SEQ ID NO: 408324 - DNA, 1203 bp, Staphylococcus aureus
atgcgtatagttcaacctgttattgaacagttaaaagcacaatctcatccagtttgtcattatatctatgatttagtcggactggaacatcatttgcaacatattacatcgtcattgcctagtaattgtcagatgtactatgcaatgaaagcaaatagtgaacgaacaatcctagatacaattagtcagtatgttgaaggattcgaagttgcatctcaaggtgaaatagcaaaaggtcttgtttttaaaccagcaaatcatattatttttggtggccctggtaagacagacgaggaactaagatatgcagtaagtgaaggtgttcagcgtattcatgttgaaagtatgcatgaattacaacggctaaatgccatcttagaagatgaagataagacacaacacattttattgcgtgttaatttagcaggaccatttcccaatgcaacgttgcatatggcaggacgcccaacacaatttggtatttctgaagacgaagttgatgatgtcattgaagctgcgctagcaatgccaaatattcatctagatggatttcattttcattctatttctaacaatttagactcgaatttacatgtcgatgtagtgaaactttattttaaaaaagcaaaggcatggtctgaaaaacatcaatttcctctcaaacatatcaatcttggtggtggcataggcgttaactatgcagatttaactagccaatttgagtgggataattttgtagaaaattttaaaacacttatcgttgagcaagaaatggaagatgtgacattgaactttgaatgtgggcgctttattgtggcacatattggttactatgtgacagaagtgctagacattaagaaagtacatggtgcttggtatgccattttaagaggaggtacgcaacaatttagactgccggtatcttggcagcataaccatccttttgacatttatcgctataaggacaatccatattcatttgaaaaagtttcaatttcgagacaggacacaacgttagtcggtcaattatgtacaccgaaagatgtctttgctagagaaatacagatagaggcaatcagtacaggcgacgttattgttttcaaatatgcaggtgcatacggatggtctatttcacatcacgatttcttaagccatccacatcctgaatttatttatttaacgcaaacaaaggaggatgaataa

SEQ ID NO: 408325 - DNA, 777 bp, Staphylococcus aureus
atgcaacaactatctctgaaacatagattaaacaatggtgattcagtttatggcatttttaattctataccggacccattgatgatagaggttatcgcagcaagcgggtatgactttgttgtgattgatacagaacacgtggcgattaatgatgagacactagcgcatttaattcgtgcagctgaagcagcgcatattataccaattgtacgtgtcactgcagtgatagatagagatatcattaaagtgttggatatgggtgcgagaggtattattgtgccacacgttaaagatcgtgagacagttgagcatattgtgaaattaagtcgttattacccgcaaggattaagaagtttgaatggtggtcgcatggcaagatttggacgtacaccattacttgatgcaatggagatggctaatgagcatattatggtgattgccatgatagaagatgttgaaggggttatggccattgacgatatagcacaagtcgaaggtttagacatgatagtcgaaggtgccgcagatttatcccagtcacttggcataccatggcaaacgcgtgatgatcaagtaacatcacatgttcaacatatttttgaagttgtgaatgcacatggtaaacatttttgtgcattaccacgtgaagatgaagatattgcaaaatggcaggcacaaggtgtacaaacatttattttaggtgatgatcgcggaaaaatatatcgccatttaagtgcatctctagcgacgtctaaacagaagggggatgaagactaa

SEQ ID NO: 408326 - DNA, 1779 bp, Staphylococcus aureus
gtgaatcaaacaattcttaatcgtgtaaagactagagtgatgtaccaattggtatcatcgcttatttatgagaatattgttgtgtataaagcgtcatatcaagatggtgtcggttattttacaatagaaggaaatgattcagagtatcgttttactgctgaaaagacacatagctttgatcgtatacgtatcacatcaccaattgagcgtgtcgtaggagatgaggcagatacaacaacagactatacacaattactgagagaggttgtatttacatttcctaaaaatgatgaaaagctagaacaatttattgtcgagttattacagacagaactaaaagatacgcaaagtatgcagtatcgagaatcaaacccaccagcaacacctgagacatttaacgactatgaattttatgcgatggaagggcatcagtatcatccaagttacaaatcacgtttaggatttacgttgagtgataatttgaaatttggtcctgactttgtaccaaacgttaaactgcagtggttagctatcgacaaagataaagtagaaacgacggtatcaagaaatgttgtagttaacgaaatgttacgtcaacaagttggcgataagacttatgaacattttgtacagcaaattgaagcgtctggcaaacatgtaaatgatgttgagatgatacctgtacacccatggcagtttgaacatgtcattcaagttgatttggctgaagaaaggcttaatggcacagtactatggttaggggaaagtgatgagctatatcaccctcaacaatcgattcgtacgatgtcgccaatagacacgacaaaatattatttaaaggtaccaataagtataacgaatacttcaacgaaacgagtgttggcacctcatacaattgaaaatgcagcgcaaattacggattggttaaagcagatacagcaacaagatacgtatttaaaagatgaattaaagacagcttttctaggggaagtcttaggacagtcttatttaaatacacaactttcgccttataaacaaactcaagtttatggtgcgttaggtgttatatggcgtgaaaatatatatcatatgttaatcgatgaagaggatgcgataccatttaatgcactttatgcgagtgataaggatggtgtaccattcattgaaaattggattaaacaatatggttctgaagcttggacaaagcaatttttagctgtagcgattcgtccaatgattcatatgctttattatcacggtattgcctttgaatcgcatgcacaaaatatgatgctcattcatgaaaatggttggcctacacgtattgccttaaaagatttccatgatggtgttcgttttaagcgtgagcatttaagtgaagctgcttcacacctgacattaaagccaatgccagaagcacataaaaaagtgaatagtaattcatttattgaaacagatgatgaacgtttagtacgtgactttttacatgatgcatttttctttattaatatcgccgaaatcatcttatttattgaaaagcaatatggtatcgatgagaagctgcaatggaaatgggttaaaggcatcattgaggcgtatcaagaagcatttccagagctgaataactatcaacattttgatttgtttgaacctacgattcaagttgaaaagttaacgacacgtcgattattaagtgactccgagttaagaattcatcatgttacaaatccattaggtgtaggaggtattactgatgcaacaactatctctgaaacatag

SEQ ID NO: 408327 - DNA, 1737 bp, Staphylococcus aureus
gtgcaaaataaagaattaatacaacatgcagcgcatgcggctatcgaacgtattttaaatgaatattttagagaagaaaatttatatcaagtaccacctcaaaatcatcaatggtctatacaattatctgagctcgaaacgttaacaggtcaattcgcttattggtctgcgatggggcatcatatgtatcatccagaagtatggcttattgatggtaaaagtaagaaattaacaacatataaagaagccattgcgcgtattttgcaacatatggctcaaagtgcagataatcaaacggcagtgcaacaacatatggcgcaaattatgtctgacatcgataatagcattcatcgcacggcgcgttatttgcaaagtaacacaatagactacgcagaggatcgctatatcgtttcagaacaatctttatatttaggtcatccatttcatccgactcctaagagtgcaagtgggttttcagaagcagatttagagaaatatgcacccgaatgtcatacatcattccaattgcattatttagctgtgcatcaagatgttctgctcacgcgctatgtagaaggtaaagaagatcaggttgagaaagtgttgtatcaattagcagatatagacatatcagagatacccaaagattttattttattaccaatacatccttatcaaatcaatgtgttgcgacagcatccacagtatatgcaatatagtgaacaaggtttgataaaagaccttggcgtttccggtgattcagtgtacccgacgtcttcggttagaactgtattttcaaaagcattaaacatttatttgaaattaccgatacacgttaaaatcactaattttatacgtacgaatgaccttgaacagattgaacggacaattgatgccgcgcaagttatcgcatcagtcaaagatgaggttgaaacaccccattttaaattgatgtttgaagaaggatatcgtgcattgttaccgaatccattagggcaaacagttgaacctgaaatggatttattaacaaatagtgccatgattgttcgtgaagggataccgaattaccatgctgataaagatattcatgtattggcgtcattatttgaaacgatgcctgattcaccgacctctaagttatcacaagtgattgagcaaagtggtttagcaccagaagcatggcttgaatgttatttggatcgtacattattgccgatattaaagctgtttagtaacacaggcattagtctagaagcacatgtacaaaatacattaattgaattaaaagatggcataccagaagtgtgctatgtcagagatttagaaggtatttgtctatctagaacgattgctactgaaaaacagcttgtgccaaatgttgttgcagcatctagccctgttgtatatgcacatgatgaagcgtggcatcgtcttaaatattacgttgtagtaaatcacttaggacatttagtatcaactattggtaaagcgactagaaatgaagttgtgttatggaaacttgtagcgcatcgtcttatgacttggaaaaaagaatatgcgaataacgcagtatttattgactgtgtagaagatttatatcaaacgccgaccattgcggctaaagcgaatttgatgagtaaattgaatgattgtggtgcaaaccctatttatacacatataccaaatccaatttgtcataacaaggaggtatcgtattgtgaatcaaacaattcttaa

SEQ ID NO: 408328 - DNA, 1173 bp, Staphylococcus aureus
gtgccattattgccaatttatatggcatcactacaaaatctatcagtcgtagaaatacagttgtggagtggtatagcgattgctgctccagctgtaacgacgatgatagcttcgccgatatgggggaagctaggtgataagatcagtcgaaaatggatggtgctacgagcgttacttggtttggcggtatgtttatttttaatggcattgtgtactacaccattacagtttgtacttgtgaggttattgcagggactatttggtggtgttgttgatgcatcaagtgcgtttgcgagtgcagaggcgccagctgaagatcgtggaaaggtattaggaagactgcaaagttcagtcagcgcagggtctcttgtgggaccattaattggcggtgttacagcttcgatattaggttttagtgcgttactgatgagtattgccgttattacttttattgtctgtattttcggtgcattaaaattgattgaaacgacacatatgccaaaatcacaaacaccaaatattaataaaggtattcgccgttcatttcaatgtctattatgcacacaacaaacatgtcgatttattatcgttggcgttttagcaaactttgctatgtatggcatgctaactgcattatcaccacttgcttcatcagtgaatcatacagcgatagatgaccgtagtgtgattggatttttacagtccgcattttggacggcttcgatattaagcgcgcctttatggggtcgctttaatgataaatcatatgttaaatcagtatatatatttgccacgattgcatgtggttgtagtgcgatactgcaaggtttagcgacgaatgtagaatttttaatggctgcaagaatacttcaaggattaacatatagtgcattgattcaaagtgtcatgtttgtcgtcgtgaatgcgtgtcatcaacaacttaaaggcacatttgttggtacgacaaatagtatgttagttattggtcaaattattggtagtcttagtggcgctgccattacaagttatactacaccagctactacgtttatcgttatgggcatagtatttgctgtaagtagtttatttttaatttgttcaaccatcactaatcaaatcaacgatcacacattaatgaaattatgggagttgaaacaaaaaagtgcaaaataa

SEQ ID NO: 408329 - DNA, 1755 bp, Staphylococcus aureus
ttgcagaatcatacagcagtcaatacagcacaaacgataatattaagggatttagttgatgcattattatttgaagatatagccggtattgtatcgaatagtgagattactaaagaaaatggacaaaccattttgatatacaaacgtgaaacacaacaaataaagatacctgtttattttagtgctttaaatatgtttcgttatgaaagttcacaaccaattacgatagagggaagggcgtctaagcaacctttaacggcagctgaattttggcaaacaatcgctaatatgaattgtgatttaagtcatgaatgggaagtggctcgcgttgaagaaggactgactactgctgccacacagcttgctaaacaattatcagaattagatttagcgtcgcatccttttgtgatgtccgaacagtttgcaagtttaaaagatcgtccatttcatccattagctaaagaaaaaagaggattaagagaagcggattatcaagtgtatcaagctgaattaaatcaatcatttcctttaatggttgcagcagttaaaaagacacaaatgattcatggcgatactgcaaatattgatgaattagaatcattgacagcacctataaaagaacaagcgacagatatgttacatgatcaagggttatcaatagatgactatgtactatttcctgtacatccttggcaatatcaacatattttgccgaacgtctttgcgaaagagattagggaaaaattggttgtaccattaccattaaaatttggagattatctatcggcttcaagtatgcgttcattaattaatatcgcagcgccgtataaccatgttaaagtgccatttgcaatgcagtcattaggcgcattaaggctaacgcctacgcgttacatgaaaaacggagaacaagccgaacgattattacgtcaacttatagaaaaagatgccatgttagctaagtatgtcacagtttgtgatgaaacagcttggtggtcatatatgggtcaagataatgatattttcaaagatcaattaggtcatttaactgttcagctaagaaaatatcccgaagtgctagccaaaaatgatacgcaacagctagtgtcaatggcagcactcgcggcaaatgatcgcaccttatatcaaatgatttgtggaaaagataatatttctaaaaaagatgtcatgacgttatttgaagatatcgcacaagtctttttaaaggtaacactatcatttatgcaatacggcgcattaccagagttgcatggtcaaaatatattgttgtcatttgaagatggacgtgtacaaaaatgcgtgttacgtgatcatgatactgtcagaatttataaaccatggctaacagcacatcagctttcattgccgaagtatgtcgtcagagaagatacacctaatacgctaattaatgaagatttggaaacattctttgcttattttcaaacattagctgtatcggtaaatctatatgccattattgatgcaattcaagatttatttggtgtaagtgagcatgaacttatgtcgttgttaaaacaaattttaaaaaatgaagtggcaactatttcctgggttacaactgatcagctagctgtcagacatattttatttgataaacagacgtggccatttaaacaaattttattaccattgctatatcaacgtgatagtggtggaggtagtatgccttcaggtttaactaccgtaccaaatccaatggtgacatatgattaa

SEQ ID NO: 408330 - DNA, 1011 bp, Staphylococcus aureus
atgaatagagagatgttgtatttaaatagatcagatattgaacaagcgggaggaaatcattcacaagtttatgttgacgcattaacagaagcattaacagcgcatgcgcacaatgattttgtacaaccgcttaagccgtatttaagacaggatcctgaaaatggacacatcgcagatcgaattattgcaatgccaagtcatatcggtggtgaacacgcaatttcaggtattaagtggataggtagtaagcacgacaatccatcgaaacgtaatatggagcgtgcaagtggtgtcattattttgaatgatccagaaacgaattatccaattgcagttatggaagcaagtttgattagtagtatgcgtactgcagcagtttcagtgattgcagctaagcatttggctaaaaaaggatttaaagacttaacaatcattggttgcgggctaatcggagacaagcaattacaaagtatgttagagcaattcgatcatattgaacgcgtttttgtttacgatcaattctctgaagcgtgtgcacgctttgttgatagatggcaacaacagcgtccggaaattaattttattgcgacagaaaatgctaaagaagcagtatcaaatggtgaagtagtcattacatgtaccgtaacggatcaaccatatattgaatatgattggttacaaaagggtgcatttattagcaacatttctatcatggatgtgcataaagaagtctttattaaagctgacaaagtcgtagtagatgactggtcacaatgtaatcgagaaaagaaaactattaaccaattggtgttagaaggtaaattcagcaaagaagcacttcatgctgaactagggcaacttgtgacaggtgacacaccaggacgtgaagacgatgatgaaatcatattacttaatccgatgggtatggctatcgaagatatttcaagtgcttactttatttatcaacaggcacaacaacaaaatattgggacaacattgaacctatattaa

SEQ ID NO: 408331 - DNA, 981 bp, Staphylococcus aureus
ttgattgaaaaaagtcaagcatgtcacgattcattgttagattctgtagggcaaacacctatggttcaacttcatcaactatttccgaaacatgaagtgtttgcaaagttagagtatatgaatcctggaggcagcatgaaagatcgacctgccaagtacatcattgaacatggtattaaacatggtttaatcactgagaatacacatttaattgaaagtacttctggtaatttaggcattgcgttggcaatgatagctaaaatcaagggattaaaactcacgtgtgttgttgatcctaaaatatcaccaacaaatttgaaaattattaaaagttatggtgccaatgtagaaatggttgaagaacctgatgcacatgggggttatttaatgactcgtattgcaaaggtgcaagaactgttagccactattgacgatgcatattggattaatcaatatgcgaatgagttaaattggcaatcccattatcatggtgcaggcacagagattgttgaaacaattaagcaacctatagattattttgtcgcgccagtcagcacgacaggtagcattatgggtatgagtagaaaaattaaagaagtgcatccaaacgcacaaattgttgctgttgatgcgaaagggtcagtcatttttggtgacaaacctattaatagagaattacctggtatcggtgctagtcgtgtacccgaaatattgaatagatcagaaattaatcaagtgatccatgtagatgattatcaatctgctttgggctgtcgaaaactgattgattatgaaggtatatttgctggaggttcaacaggttcgattattgcagcgattgagcagttgataacgtcaattgaagaaggtgcaacaattgtcacgattttaccagatcgaggcgatcgttacttagatttagtttattcagatacatggttagaaaaaatgaaatcaagacaaggagttaaatcagaatga

SEQ ID NO: 408332 - DNA, 996 bp, Staphylococcus aureus
atgctacttaaaccaaaataccaaatcgttattgctggtttatgtcttgcaatagtagctatcttaagtttaatgattggaaatacgcttgtgtcaccaggtacggtgatacaggcgttattcaactttgatagtgaaaacgatttacatgatgttgtcactggtgcacgggcgtcgagaacaatcattgcgctattgacaggcgccgcactagcagtctcaggtttgttgatgcaagcacttacacgaaacccaatagcatcgccggggcttttcggtgtcaatgcaggcgcagtattttttgtcatctttagtattacatttatccaaattcaatcttttaaaatgattgttgtcatcgcgtttttgggtgctattgttgttacagtcttagtcgttgcactagggatgtttagacaaaccctattttcacctcaccgtgtcattttagcgggtgccgcgattgcgatgttatttacagcttttactcaaggcattctcattatgaatgaaacagacttacaaggcctattattctggttgagtggctccgtttcattacgtaacatttgggatatcccatggattattccgcttgtattgatacttattttaattgcatttagcatggctgcacacatcaacatcttgatgacaagtgacgacattgccactggactcggacaaaacataaaattaatcaaatggatgattataatgctcattagtatgctagcaggcatctcggttgctgtagctggatcaatcgtctttgtaggacttattgtaccgaatattagtaaacgattattaccaccaaactataagtatttaattccttttactgcattaaccggcgcaatcctaatgattatctcagacattgttgctcgtattattattaagccactagagttgcctatcggtgtcgttaccgctgtcattggcgctattgtcttaatctatcttatgaagaaaggacgtcaacgcttatga

SEQ ID NO: 408333 - DNA, 753 bp, Staphylococcus aureus
atgaaatataataaccatgacaaaattagagattttataatcattgaagcatatatgtttcgttttaagaaaaaagtcaagcctgaagtcgatatgactataaaagaatttatattactgacttatttatttcatcagcaagaaaacacacttccatttaagaagattgtttcagatttatgttataaacaatcggatttagtacagcatataaaagtacttgtgaaacattcatatattagtaaagttcgaagtaaaattgatgagcgtaatacttacatttcaatatctgaagaacaacgagagaaaattgcagaacgtgttacattgtttgatcaaatcattaaacaatttaatcttgcagatcaaagtgaatcacagatgataccaaaagatagtaaagaatttctaaacttgatgatgtatacaatgtatttcaagaatattatcaaaaagcatctaacattaagttttgtagaattcacaattctagctattatcacttctcaaaataaaaacatcgttcttcttaaagatttaattgaaacaatccaccataaataccctcaaactgttagagctctcaataatttaaaaaagcaaggctatctaataaaagaacgctcaactgaagatgaaagaaaaattttaattcatatgaatgacgcgcagcaagaccatgctgaacaattattagctcaagtgaatcaattattggcagataaaaatcatttacatcttgtttttgaataa

SEQ ID NO: 408334 - DNA, 654 bp, Staphylococcus aureus
atgccagattttgcacctattaaaaagtatccaccacataaaattgcagacttagattactcttgttcagcatttttaatgtatatcggtatagatattgatgtgacagatcaagtgagacttcataatgttatttttgcagatgattttagaggaaacattgaagaaatatttgaagggcgattatcgcatgatccttctatttatgtgtatgttcctgcggttgctgacaaatctcttgcaccacaaggacaaacaggtatttatgttttaatgccaacaccagaacttaaaacaggtagcggaatcgattggtcagatgaagcattaacagaccaaataaaagatgttatttatcgtaaattagcaactattgaagtatttgaagatataaaatcgcatattgtttcagaaacaatctttacgccaaatgattttgagcaaacgtatcatgcgaaatttggttcggcattcggtttaatgccaactttagcgcaaagtaattattatcgtccacaaaatgtatcgcgagattataaagatttatattttgcaggtgcaagtacgcatccaggtgcaggcgttcctattgtcttaacgagtgcgaaaataactgtagatgaaatgattaaagatattgagcaaggcgtgtaa

SEQ ID NO: 408335 - DNA, 1419 bp, Staphylococcus aureus
atggaaaacacggttaaatatcgtaagtttatactccctatcgttgtaggtctcctaatttgggcacttacaccttttaaaccggatactgtggatccaacagcatggtatatgttcgcaatattcgtcgcgacaatcattgcttgtattacacaaccgatgccaattggggctgtctctataattggatttacaatcatggtactcgttggcattgttgacatgaaaacggctgtcgctggttttggtaataatagcatttggttaattgctatggcctttttcatttcaagaggatttgtgaaaacaggtcttggtagacgtatcgcacttcatttcgtcaaattatttggtaaaaaaacattaggcttagcatattctatcgtcggtgtagatttaattctagcgcctgctacaccaagtaataccgcgcgtgcaggtggaatcatgttcccaattatcaaatcactttctgaatcatttggttcgaaaccgaaagacgaatcatcacgtaaaatgggtgcatttctagttttcacagaattccaaggtaacttaattactgcggctatgtttttaactgcaatggccggtaatccccttgcacaaaatttagcatctagcacatctaatgttcacattacatggatgaattggttcttagctgctttagttcctggacttgtttccttaattgttgtaccttttatcatttataaaatttatccaccaactgttaaagaaacaccaaatgctaaaagttgggctgaaaatgaattagcgactatgggtaaaatcgctttagctgaaaaatttatgattggtatttttgtcattgctctaacactatggattgtcggaagtttcattcatattgatgcaactttaacggcctttattgcgctagcattgttattattgacaggcgtcttaacatggcaagacattttaaacgaaacaggtgcttggaacacattagtatggttctcagtgttagtgttaatggccgaccaattgaacaagcttggatttattccttggttaagtaaatccattgctacaagtcttggtggattaagctggcctatagtactggtcattttaatattgttctacttctattcacattacttatttgcaagttctacagcacatatcagtgctatgtatgcagcattactaggcgttgccatcgcagccggtgcaccaccattattcagtgcattaatgttaggtttctttggtaacctattagcttcaacaacacactatagtagtggtccagcgccgattctcttctcttcaggttacgtgactcaaaaacgttggtggacaatgaacttaatattaggtttcgtctactttattatctggattggtttaggatcactttggatgaaagtaattggtatattttaa

SEQ ID NO: 408336 - DNA, 354 bp, Staphylococcus aureus
atgaaaccattattacccaaaagtataactatggatagaggtaaggagtttgctctatttgaacaaatagaagatgaattgaattgtagtatttattttagtgatttgggttgtccatatcaacgtggttctattgaaaatgcaaatggacttttaagacagtattatcctaaaggtacggattttgcaaatataacacaaaagtcattagatgaagctgttaaacaaattaatgcacgacctcgaatgatatttgactataaatcgagtgaggaaatgctaaagtaccatgtaagcacacaaaattgtgaacctatattaaatgactgtgtgaggcacgaacccgtcaattaa

SEQ ID NO: 408337 - DNA, 2292 bp, Staphylococcus aureus
atgagtatgcaaagttcatataaacgtttagttaaagtgctactaacgattttagtgattgtgttttcaattttactagtaggtggttggtatatttttaaaaatgaagcacctcgtccaacaaagatagtagatcaacaaggtcatacgcttgttacaaaaggcgagctaatcagtgggcaagcgatatatgagaaatatgggttaacagattatggctcctacctgggcaatggttcctacttaggcccagattatacagcagaggcattacatcattacctgattggtatgcgtaaatattatgcacaagatatttatcataagcaacttcataaattaaatcatgcagagttagccgtagttaaagataaagtgatgaaagaaatacggattaatcgttattctgaaaaagaagatcaacttgtattaacgccaggacaagtatacggtctaaaatatttgcaagattattataaaaaagagtttgttaataaccctaaacaagtagggttaaatgaaaatatgattaaacagtttcaaaatgatgattatatggtcgcaggaaataaagttgaacatttaagtcaattctttttctggggtgcttggctatcatcaacagatagacctggaaaaacattttcatatacaaataattggccatacgatgtggatgcaggaaatacgttgcctagtgcaggaattttatggactgctatatctgtaacattactgattgcaggcttggcattcattatatatattcaaaagcgttatgaatttgacatgaagccgacgtatgagtcggaacgggaactaccaaagattgaagtagatagtaaaatcactgatagtcagcgaaaagttgggaaatatttagtcgttgtcatgttactatttttggttcaaatattattaggcgaattactggcacattattatgtagagaataaattttttggtatagaaatacaaaggctctttccatttaatattgcgaagacatggcatgtgcaattagttattttctgggttgctacgacttggttagcagcaggaatatacattgtacctaaagtattgggcaaagaaccaaagaaacaaggcgtattagtagatatcttgttttgggccttaatcatagttgtgatgggcagcatgattggagaatggggtcatattttaggttggattgattctcattggtggctattcgggcactttggttgggaatatatagaattaggtaaattttggcaaatattatttatagtaggtatggtcttatgggttatcattctttgtcgagggtttttaccagctattcgcaacaaagtacaagcgaatcatgataaacgtcacttattgacgctattgtttgttggagcaattgcaattccgttattttatcttgcatcattatttataatgccgaattcacatgtgacgtttgcagattactggcgatggtggattgttcacttatgggttgaaggtatatttgaagcatttgccgtagtgttgattggtttcttaatggttaatatgaaattaactaccattgaaacgacgattcgtgcattatattttcaattaatcctattactaggtacaggtattgttggtatgggtcatcattactattggcaaggtgatcattccatatggctagcactgggttcttgtttttcagcattagaagtcgtgccactttgtttattaatttgggaagcatacacacactatcgcttatataagaaaagtgacatcgcttttccttacaaaggtacatttatttttcttgcttcaacaggattgtggaatgcaattggtgctggagcattaggctttttaattaacacaccagcagttaactactttgaacatggtacgcaatggactgcagcacatgcccatggttctatggctggcgtgtatggtatgttctcaattgcaattgcgttgtatgtttttaaaaatattactaaaaaagaattttggacaccgaaagttgaaaaatggattaaaatatcatgttgggctttaaatgttggcttggcaggtatggtgttcattacattaatgccagtaggttatatccaacttaaagatgcattagaacatggttattggcattcaagactaacgtcattttatgaacaaccacttgtaaaagcaatcatgtggggtagaatgccttgggacattatattcacagtaggtgtcattatattagtagttatttttataaggggatacagacacttaaaaccaaaatacagagtatag

SEQ ID NO: 408338 - DNA, 792 bp, Staphylococcus aureus
atgggcaataaatataaagattatgctcaagacatccttacagctgtggggggtgtcgaaaatattgttaatgtatcgtatgatacggtacgcatgaccattcatatgcatcatgcaattccttctactgctaatgaagtaacacaaatagatggcgtggcgtcagttgatgaaaatgaaacacagttagttatcgtatttaatgaagaagtaaaatatgtatatcaacaattacaattgttaatggacgacgccaagcatcaagaagatacgaatcatgatgctgtggatactcaagaaacagaacagaaagcgcaagcaaaagtgacaacaccaattttagtgaaagcaccaatcgctggtcgtcgtattttacttaaagaagtaagagattcaatttttagagagaaaatggtaggcgaaggcttggcaatcaaagctcatgaagaatccaaagtaatcgcaccgttcaatggtttagtatctatgattgtaccaactaagcatgcagttggtattcaatcagaagacggtgtggacatagtcattcatattggtgtgaatacagttgacttggaaggtaaaggattcgagtgctttgtaaagcaaaatgatcgtgttgaagcagggcaaacgttgttacaattcgaccagcaatatatacaacaacaaggctacaatgctgacgttattgtcgttattagcaattctgccgatttaggaaaagtagaactgacaatgaatgaaatcattacgactgaagatgttatttttaaaatatttaaaaactag

SEQ ID NO: 408339 - DNA, 267 bp, Staphylococcus aureus
ttgataaagttaaaccaagcctctgtcagcaaagaaatttcaagcattcgaacaaatggacaaggcttaaaacaatcaaatgggaatgtaaatttaagtaaaacgaatctcgttacttttaaagaatatgtaaatatgtttgaagattatcaatcagctctatctaattatgaaaacataattgaacaagatacgacggctatggatacaacggtaacagaaattgttgaaaacgatagagaaatagcaggacaaattaataaataa

SEQ ID NO: 408340 - DNA, 396 bp, Staphylococcus aureus
atgagtaataagggagaaataagaaggcaaattgctaataaagaaagagaaaaagcaagtaaagaagcacaactaacagatttaaaagaggatttaagaaggttgaaagacgcttcgaaaaaattggatacagcaggagaagattttaacaaaggacagagtagttataacaaagtagaaattagtacttcagattggaaaggagaaagaaggactaaaagtgacagcaaaaagaaagatgtcgattctgaattaaaaaaagttgaacaagactttgatgatgcgaagaaggctattaaaaaagatattcaggataaagaagaagaaatcaagggagtcgaaggagaaatcagtactataaatgcagctatagatgcacttaaatcaaaattataa

SEQ ID NO: 408341 - DNA, 1671 bp, Staphylococcus aureus
atggggtacaaagttgatatgtctgaagtgcacaatatgcaaaagtctattgattcaagcttaagtgcaataaatacaaaggttagcacgcttagcagtagcataaacaaccttataaatactgaaggattcgaaggtcagacagcaagtagtgtcaaaaactatagtaagacatttcatttacaatcaataaaaaagattgaaacaataaacaaagattttaaatcagatattgcgaaatctatacgtaaattccaaagtgaagttgataataatgcttcagctatattggatgaagacgaaataaaaaaatacaaaaaagatattgatgatgcattaaaagatgttttcaaatcttctaaagatgcaaacggagctatttcagatgtttcagatttaacaacagccaaaaaaataaagacagaaaacttggccaataaaatgggagattttaataaagatattgatcaaacggtggaaagattaacgaccttcgacgccaacaattctatagatggtgataagacagataacttaataactgaattaagtggtgtaaattcatatgtcaaaaacatgaagccaaaccgtgcaagaattagttctacaagtggaaaaattgaaggtgcaattgcaaggcataaaacaagtgaagagttagtaagatggcaaacttacatggaaacgttaagtgaaaatctttataaaacaccaggtctaagtaaagcagcttctgacataattacccaagctggacgcgagtactatgctatcaaagctgtagggaatggcagtgctttaagaggatataaagaatatctgaaaacacgagatattaataaattaattaacaaaatgaataaaaaccaattaaaaagaatgtcattggtattaaatacagatagaggtaatattaaaataaaaaatgcagtaaaaatggcaagtgaatttgcccgtaataatccttttaaaaaaggaaatttagtaaattggatgagcaaagtccaagggtatcaaagtgtaagtgctcaaatattaaaaaaggggttgcaagataagaactttaaatatacatttggagatgcaaagaaattttttgatacagctgatatgaaaaaagcagcagtcacagaatttaaaaatacctttgtaccacaaaatataagagaaaccttctttaagaaagaaaatttaacatctaagacagcattaaagaaaaatatgagtaaattctggaatgaagatattaagggtggaatcaaagagtttaaattagactttgctaacaaaaatatcattggtaaactcggcaaattgttgaaactaggaggcaaggctttaaaaccattaggatttattactgcaattactgacaacataggaaagaaatcttggcaagaaaaattagttggtatgggggtagatttaagtgctattggtgcaagtgcagctgcaggtgcagctgttggaacggcaataccattacctgtagtaggaacagttgcaggtgcattagctggagcagcagtgggtatagctttagattataaaataccgtatcttgataagtctgcaacagaattagctaaagatggtattaactcgggtattaacaaagttaaaagtggatttggaaaagtaacttcaggatttaaaacagttttcggataa

SEQ ID NO: 408342 - DNA, 645 bp, Staphylococcus aureus
atgaaaatacaagagattgtaggaaatataaagagagcttatctgacaccattaataatttttgtgattttgttttcattattttttgatttgataatgtatttttatggaaaccttcaagggaaattgccaatatatttagatgtatttctaatatttgcagcagttgtatttattttaatgtacttccaagagaaaagtggagaagttaaggttgaaaaatcaaacgttattcgttatttaacattaaatgttgtagctgggtattcaatggtactacttgttgcctctatttatgtttttggggtagcaggctatggttttgatgtatttaattactggttaggtattatattaatgctatttgtatcgtggtttgctctatttttgttttataaaaatgaatttgatagtgaaaatccaaataaaacagttaatgttatagcaattattataaagttatctgcttttggaggacttttctatatcagaacagtcgttcctaatactgcagatgaagagaaatttataactctaagtatcttaattaatatagctgttgatttattgctggttagatcatattttaactatgcattatataagagtgtaaaaaaagatatcgaaaacggagtggatgattaa

SEQ ID NO: 408343 - DNA, 456 bp, Staphylococcus aureus
atggaagtaggaatgttaattatgccgttttgtgtgaagattacatttgaaattgataaaaatgataattggttaaatgcattagatacagtaaatgaatttttcatggacaaagatatatatccaactggtcctataattttccaaagagaattagcaggtttgggtgaatataaatatacagcatatatagctcttaatgatgaacttcaagatatacctgaattgaacatcaaatatattgattgtttagaggtaggacctacgttatcaactaagtgttttgaagaagaggaatttgaaagagcttataaagaaattgaatatgtagctaacgaaaataatattaagatcctaaatcaaccatattatcatgtaatggtagattattttggtggtacggcttttgaaatttatgctcaagtagatttggatgagagtgaagtatatggataa

SEQ ID NO: 408344 - DNA, 459 bp, Staphylococcus aureus
atggataaaaatggatactcatatattatgatgaaaaatgtagcttacaaaacttattttgatgtgactatggatgactatgaagatatattaaaagactttacaaatcttgcaatttctaaaggtaaaacaattacagggccattaacctttgcagtcacgcaaatagacttgcaaaaaaggatgaatattgatttatttatttcagttggaaaatgttttaaatcaaatgaagaactatcatatagaacatatttttgtctagataacatgttacatggtcgtatcacttccaacaattttataacagatgaaatagcgttacttgaggatatgaacgaatttgcttctgacaacaatttaacgtttacttcgccttattatcacacaatgagaaaaagttttagcggtgaacaaggttggattgatgtaaaggccaaagtgtatgaaaatgattaa

SEQ ID NO: 408345 - DNA, 588 bp, Staphylococcus aureus
atgataatttttattttattaacagtttttgcactcttttatatagcgatgattgctagtttatttaaaagtgaaggtttttcaataataggcttaatattggatatagttattttgacaacgttaatattttattattttgtaggtgcgagttttgttgataatgatttaagtaactttttagcattcatgaattttgggtcatttgtgtatatgtactatgcaattaagagcttgtgggtgaagcctaagttagtaaattatataattgcaaaagaaataggcgaatcaaaagatgtcattgaagaacaggaattagatttacagacatcaaagataagaggtatctactttttcattattgcaattgccttgttaataattactaaattaagaatgcaacctgagttacaggcagatgctatatcgatgaatccagtttttatttttataggagttattatcattttaatttggctagtactggatatatatcgtaagaaaaaatacggtatattcttattcaagacgatagtgccattagttgttacgacttggattattatagctactattgtactttcataa

SEQ ID NO: 408346 - DNA, 501 bp, Staphylococcus aureus
atgactttcgaagagaagttaagtcaaatgtacaacgagattgcgaatgagatcagtgggatgataccgatagagtgggaaaaagtatatacaatggcttatatagatgatgaaggtggagaagtgttctactattacacagaacctggaagcaatgaattatactactatactagtgtattaaataaatatgatatatcggaatcagaatttatggactcagcgtatgagttgtataaacaatttcaaaatttaagaaatatatttaaagaagaaggatatgaaccatggacatcatgcgaatttgattttacaaaagaaggtgaattaaaagtttcatttgattatatagattggatcaatacagagtttgatcaattgggccgtcaaaattattatatgtacaaaaaatttggggttataccagaaatggaatatgaaatggaagaagttaaagaaatcgagcaatatattaaagagcaagatgaagctgaacaatag

SEQ ID NO: 408347 - DNA, 501 bp, Staphylococcus aureus
atgactttcgaagaaaaattaagtgaaatgtacaatgaaattgcgaataaaattagtagcatgataccagtagaatgggaaaaggtatatacaatggcttatatagatgatggaggaggtgaagtattctttaattatactaaaataaacagcgatgaattgaattattacaccgatatacctaaggagtataacatttctgtgcaagtatttgatgatttatggatggatttatatgatttgtttgaggaattaagaaatttatttaaagaagaaggacatgaaccatggacatcatgcgaatttgattttacaagagacggcaaattgaatgtttcatttgattatattgattgggcgaattcagagtttgggccaatgggaagagaacattattatatgtataaaaaatttggaatttggcctgaaaaagaatatgccataaattgggttgaaaaaataaaagattatgttaaagagcaagaagaagctgaactatag

SEQ ID NO: 408348 - DNA, 927 bp, Staphylococcus aureus
atgaatatagtagggcatcatcacatatccatgtatacaaaagatgcaaaacgtaataaggatttttacacaaatgtccttggattacgattggttgaaaagtcggttaatcaagacaatccttcaatgtatcatttgttttatggggacgaagtaggtacagccggaacaattttaagtttttttgaaattcccaatgcgggtcataagcagccaggtactgaaacgatttatcgattttcattattagtaccaaatcaagcggcacttcattattttgaaaaacgtcttgagaataatggtattaagtctgaacgtttgtactatcttggacaagaaggtgttgtttttaaagatgaagacgacttagaaatcatactgcttgttaatgatagttttgaagtaccacatcaatggcaacataacgcttatagtgaaatacctcaagcatatcaaattttaggaatagggccagtcgaattaagagttagaaatgcagcgcgtacggtagaatttttggaaaatgtcttaggttatcgcaaaagagataataaatcattcgatgtgctgacattagcaccacaaggtttatattcggattttgtagttattgagcaacagggacaacgtgaaagacctggacgaggttatatccatcatattgcagttaatacaccacaaatgaatgacttagatgcaatttacaagaaactacaacaacaaccacaaagtaattcaggtataattgatcgctatttctttaaatcattatactatcgccataattcaattatgtatgaatttgcgactgaagcgcctggatttactattgatacacctgttgaacaattaggaagtcaattgaacttgcctgactttttagaagcagaacgtgaacaaattgaaagtaagttacacgaaatataa

SEQ ID NO: 408349 - DNA, 1062 bp, Staphylococcus aureus
atggcaaaattagaaatgaataaaaatacgcctcttgagtttggtttgtattccttaggtgatcatttattgaatccatttaaaggtgaaaaagttagttatgagcaacgtattaatgaaattattgaagcaagtaaattagcagatgaagcgggtattgatgtttttgcagttggtgaaagtcatcaggaacattttacgacacaggcacatacggttgtgttaggtgcaattgcccaagcgacaaagcatattaaagtttcaagttcttcaacgattattagtgcaacagatcctgtaagagtatttgaagacttcgcgacattagatttgatttctcatggtagagccgaaattgtagctggcagagcatcaagaacaggtgtttttgacttgtttggctatgatttaaaagactatgatgaattgtttgaagaaaaattaggtttacttttagagttaaataaaactgagcgtattacttggtctggaaaatatcgtccagaacttagaaatatgaaaatattcccaagaccaatcgataatacattgccaatatggcgtgctgttggtggtccacctgcaagtgctatcaaagcgggaaaacaaggtgtgccaatgatgattacaacccttggtggcccagcaatgaactttaaaggttctatagatgcttatcgtcaagcagcaactgaagcaggtttcgatgcttcgcctaagtctttaccagtaagtacagcgagtctgttttatacagctaaaacaactcaggatgctatgagagaattttatccacatttgaatacagggatgtcatttattcgtggcgttggttatccgaaacagcaatttgctaattcgtcagattatcgagaagcgctaatggttggaagcccgcaacaaattattgaaaagatattgtatcaacacgagttatatggtcatcaacgttttatggcacagcttgattttggcggtgtgccatttgaaaatgttatgaagaatattgagttaattggcaacgacattataccagcgattaaaaagcatttatcaaaatag

SEQ ID NO: 408350 - DNA, 855 bp, Staphylococcus aureus
atgaaaaagttaacaacgctattattagcatcaacgttattaattgctgcatgtgggaacgacgatagtaagaaggatgattcaaagacatcgaaaaaagatgatggtgttaaagcagaattaaaacaagcaacaaaagcatatgataaatatactgatgaacagttaaatgaatttttaaaaggtacagaaaaatttgttaaagcgattgaaaataatgatatggcccaagcaaaagcgttatatccaaaagttcgtatgtattatgaacgctctgaaccagttgcagaagcatttggagatttagatcctaaaattgatgcacgtcttgcagatatgaaagaagagaaaaaggaaaaagaatggtcaggatatcataagattgaaaaagcattatacgaagataagaaaattgatgatgtgactaaaaaagacgcacaacaattattgaaagatgcaaaagaattgcatgccaaagctgatacattagatatcacaccaaaattaatgttacaaggttctgttgacctattaaatgaagttgcaacttctaaaatcacaggtgaagaagaaatttattcacatacagatttatatgattttaaagcgaacgttgaaggcgcacaaaaaatttatgacttatttaaacctattttagagaaaaaagataaaaaattaagtgatgatattcaaatgaacttcgataaagtgaataaattattggataagtataaagataacaacggcggttatgagtcatttgaaaaagtatcgaagaaagaccgtaaagcatttgcggatgctgttaatgcattaggagagccactaagtaaaatggctgtgattactgaatga

SEQ ID NO: 408351 - DNA, 720 bp, Staphylococcus aureus
atggagcataataacaatataaacaaaaaatacaaaaaattctcaaggggatctattatatatttagattttggcatcaatattgggcatgaattttctggcagacattttggaatagtattaaacaaaaatgatagtccatataattctttagtaacagttgtaccattaagttcaaaaaataaaaaacactatttaccattacaaaatattgtatttaaaacatcattatcaattttgaacaagacagttgataatatcgaatttgatttagacgttataaatcacgtaatttttacggttatagaaattattaataaaaataatttacaaaacactttggaacaaaacactatagattatttagatgattttgcaattaaaacacgcttccctacagaaagagaagtaattaataaaagtaaaaacatagtagaatcatttaatttatacaatgacccgaaaaatttttctgctttgtttaattatttgctaattgatgtaaacgatagaaaatcaaaagttaataaccttagagaagttattaataaatataaaaaatttgataaaaatacatttgcctgcacacagaatgtagtaactattagcaaattaagaattttaaaaattaacgctgaagatccttctggtagaatgaaactcgattttgatagtatgaaattagtagataatgaaattaaaaataagctaatcaattag

SEQ ID NO: 408352 - DNA, 273 bp, Staphylococcus aureus
atgcctagaacaaagttacaagattttccatcaaaagaaaatacagttacagaaccggaacaagttgtagtaaatccgttgtttgcgaaacctaatacactagctggtatttttggaatttcatacagttcggtcaatcgtattttaaaagagtgggaaaaagatcataaaggtattaatgatttatattattcactatcatcaacaatgattgttatcagtattccgcgattcgaggagtacatgaaggcgcgtcataaaaaatggatgtag

SEQ ID NO: 408353 - DNA, 174 bp, Staphylococcus aureus
atgaaaatgtacttaacttatatctgcttagtttcattgttaacaattttattactagcaatatctaacatgtatgtcgcttttagtgtgtacggcatgatggtaacttatggatttaatttaacaggagagattacaacgtgcgaaaacaagttattattacaaaaacagtag

SEQ ID NO: 408354 - DNA, 1662 bp, Staphylococcus aureus
atgagaaaaattcaagcaaaaaaaggtttgagtattgagtgtaaaggttgggaacaagaagcagtacttagaatgttatacaacaatttagacacagaagttgctgaaagaccagaagatttagttgtttatggtggtattggaaaagcagctcgtaattgggaagcttttgaagcaatagagaaaacgttacgcgaattagaatcagatgagacaatgttagtacaatcaggaaagccagttgctgtatttaaaacacatgaagaagcgccacgtgtattaatttcaaattcagtattagtgcctgaatgggcaaactgggatcattttaatgaattagataaaaaaggtttaatcatgtatggacagatgacagccggtagttggatatatattggttctcaaggtattgtgcaaggtacttatgagacatttgctgagctaggtaatcaacactttaatggagatttagcaggcactgttacactgacagcaggtttaggtggtatgggtggtgcgcaaccgttagcaattactatgaatcatggggtagcaatttgtgtggatgttgatgaaacacgtgttgataagcgaattgctacgaaatattgtgatattaaaacagctaatttagatgaagcattaaaattagcagaagaagcgaaagaacgtggagaaggattgtcaatcgggttagttggaaatgctgtagacctccatcaagcgattctagaaaaaggatttaaaattgacattattactgaccaaacaagtgcacatgatccgctaaatggatatgtgccacaaggatactccgtagaagaagcgaaagtattgcgtgaaaaagatccgaaaaaatatgttgaactgtcacaagcttcaatggcaaagcatgttgaattaatgcttgaattccataaacgtggagctgtagcatttgattatggtaacaatattcgtcaagtagccttcaataacggagtgagaaatgcttttgacttcccaggctttgtaccagcttacattagaccattattctgtgaaggtaaggggccattccgctttgctgcattgagtggtgatccaaaagatatcgagcgtgcggatgaagaaatgcgtaaacttttcccagaaaatgaaaagttattaagatggcttgatttagctgaagaaaaaatttcatatcaaggactaccatcacgtattgcttggttaggctatggagaaagagcaaaaatgggcttagctttaaatcgtcttgtacgtgacggtgaaatttcagcaccaattgttattggacgagaccatttagatgctggttcagttgcgagtcctaaccgtgaaacagaaagtatgaaagatggtagtgacgcggttggtgattgggctgtattgaatgcactcattaacacggctgcaggtggttcatggatttcattccatcatggtggcggtgttggcatgggatattcacttcatgcgggtatggttgtcgtagcagatggatcagagcgtgctgaaagaagattggaacgcgtattgacgactgatccaggtatgggtgttgcacgacatgttgatgctggctatgacattgctattcaaacagctaaagaaaaaggtattcatattccaatgattgataaagcaggtgataagtaa

SEQ ID NO: 408355 - DNA, 189 bp, Staphylococcus aureus
atggaacagccgcttacgattggagaagatttttcaggttatagtcaacattttccaagtgtatttgcgttaattggttctcatagtgaatatgatttacatcaccctcaatataaaccggatgaaaggattctagaaaaagtacctgagtattttgttgaatttgtaaagagactattgcatgagtaa

SEQ ID NO: 408356 - DNA, 342 bp, Staphylococcus aureus
ttgccgattatatcagttgttgctatttcattaattttagcaatagttgtaggtggcagtaagcaccaaatcttaactacaggattgttaatatttttagtagttatgttacataacgtattagggtatacgattggatattggttagctcgtcttttaaaattagatcgacaagatcaaaaagcagtcagtattgaagttggaatgcagaactctggtttagctgtgtcattagcagcattgcattttaatccaattgcagcagtaccaggcgcagtgtttagtttcattcataatataacagggcctattttagcaaagtattggtcaaaaaagttataa

SEQ ID NO: 408357 - DNA, 351 bp, Staphylococcus aureus
atgaaatttaaaaaatatatagtagcaggaacattagcagtactattatcaacaacagcagtatcaacgttagatgggaataaagcagatgcaagtagtaagaaagactatataattcaaagtgagtttcatgataaacgaattgctgaagaattgaaatcattacttgatcaatcttatgtaaatgatttagctgcaggaagcttaaacccatactacaaacgtatgattatgatgaaccaatatagagcaaaagcagcactaaaaagtaataatttcgcaaaaatggctgaagctaaagttggattagaaaacatttacaaagaaattgatgaaattataaatagataa

SEQ ID NO: 408358 - DNA, 537 bp, Staphylococcus aureus
atgcacaacaaaaatgaattcaacaaaaaactgaaagattttataggtagcgataaacggatggctttagtaaagggttatattaacgagtataaattaacaactgttttaagagctttaaataattccgattacacaaaagggacgatacacactcgttcaataggcaacctaaaacaaatagtagataatcgaattattcctaaaaatataactcaaaacacaatcttcaaattgagtaatttaaccttagaggttaacctctatgaaagaaacacaatttatcacggagactttgctatttactatcctgtagaatctgctctaataatagaaacagatactcctaggctaattaatcatataaataacaacccagtccaaaaaatatttataataacaacaaatgactggagctttaatacacttgaattagaaaaaatagtagacgaaactataatttatgatttaaaacaagaagatcctaaacaatatgaaattttatataaaaataaacacggaaaattgccttattga

SEQ ID NO: 408359 - DNA, 699 bp, Staphylococcus aureus
atgaaattaaaaaatattgctaaagcaagtttagcactagggattttgacaacagggatgattacaactactgctcagccagtaaaagcaagtgagcaaagcagattatcagttacttcaaacgacacgcaagaattaaaaaaatactacagtggaacaggatataattttcaaaatgtgagtggttatagagaaaaggataaaatgaacattattgatgggacacaacttaatgtagttactttacttggtacagacaaagaaagatttaaagattatgactatgattatgaagggttagatgtctttgtagtcagagaaggatcaggtaaacaagctgaaaatatttcaataggtggaattaccaagacgaataaaaacgattataaagatttcgtaaataatgtaggtctagaaataactaaaccaacaggacataatacagcaacaagacaagcagaaacttatagaattaataaagaagaaatttcattaaaagaattagatttcaaattaagaaaacatttaattgaaaatcatgaactttataagacagagcctaaagacggtaaaattagaattactatgaaaggtggcggctactatacttttgaattaaataaaaaattacagcctcatcgtatgggtgatgtaattgatggtagaaatatagaaaaaattgaagtcgatttatattaa

SEQ ID NO: 408360 - DNA, 1488 bp, Staphylococcus aureus
atgagggaaaattttaagttacgtaaaatgaaagtcgggttagtatctgttgcaattacaatgttatatatcatgacaaacggacaagcagaagcatcagaggctaatgagaagccaagtacaaatcaagaatcaaaagttgtttcacagactgaacaaaattcaaaagaaacaaaaacagtagaatctaataagaactttgttaaattagatactattaaacctggagctcaaaagataacgggaactactttaccaaatcactatgttttattaacagttgatgggaaaagtgcggattcagtagaaaatggcggtttgggttttgttgaagcaaatgacaaaggagaatttgagtaccctttaaataatcgtaaaattgttcataatcaagaaattgaggtttcgtcgtcaagccctgatttaggtgaagatgaagaagatgaagaggtggaagaagcttcaactgataaagctggcgttgaggaagaaagtacagaagctaaagttacttacacaacaccgcgatatgaaaaagcgtatgaaataccgaaagaacaactaaaagaaaaagatggacatcaccaagtttttatcgaacctattactgaaggatcaggtattattaaagggcatacgtctgtaaaaggtaaagttgctttatctattaataataaatttattaattttgaagagagcgttaagggcggagttagtaaagaagacactaaagctagttcagatggtatctggatgcctattgatgacaaaggatactttaactttgacttcaaaacgaaacgtttcgataatttagagttaaaagaaggtaatgacatttcactaacatttgcacctgatgatgaagaagatgcattaaaacctttaattttcaaaactaaagtaacgagcttagaagatatcgataaagcagaaactaaatatgaccatactaaactcaacaaagtgaaagttttagataatgttaaagaagatttacatgttgatgaaatatatggaagcttatatcatacagacaaaggtaaaggtattcttgataaagaaggtactaaagtaattaaaggaaagactaaattcgcgaatgcagtagtgaaggtagactctgaactaggtgaagcacaattattccctgatttacaagtaaatgaaaaaggtgaatttagctttgactcacatggtgctggttttagattacaaaatggagaaaaattaaacttcacagtggttgatcctattacaggtgacttgttaagtaatgagtttgtttctaaagagattgatattgaagaaacacctgaacaaaaagcggatcgtgagtttgacgaaaaacttgaaaatacgcctgcttactacaagttatacggcgataaaatagttggattcgatactaacgatttcccgattacttggttctatccattgggtgaaaagaaagttgaacgtacaacacctaaattagaaaaataa

SEQ ID NO: 408361 - DNA, 411 bp, Staphylococcus aureus
atgggacatctaaaaaagcttgcactgttcataagtgctattattttgagcatttttataataagttgtaatagttcaagcgatactgcggaaaaagcaaaagaagattcaaaagaagaacaaattaaaaagagctttgcgaaaacgttagatatgtatccaatcaaaaatctcgaggatttatacgacaaagaaggttatcgagatgacgaatttaaaaaaggcgataagggtacatggactttactcacaagttttgctaaaagtaacaaaccaggcgagatagatgacgaaggtatggttttattccttaatagaaatacaaagaaggcaacaggatattattatacgagcaaagttcatgatgaatttaatgaaaaagatcaacaaaaaaatatcatgttgaattaa

SEQ ID NO: 408362 - DNA, 372 bp, Staphylococcus aureus
ttggataaagtagaagatccaaatctcaaaaataaaatagaaaattttaaattctttagtcagtatgctgattttagagatcttaaatattataaaaatggaaatatatcaagtacagataatgtgccaagctacgatgcagaatataaaatgagtaatacggataaaaatgtaaaaaaacttagagaagtttatcctattacaaccaaaaagtcgccagtattaaaattacatatagatggcgacataaaaggaagttcagttggttataaaaatatagaatataatttttcaaaagtaaaagaccaagaaacagctgtaagagattttgtgaattttggaccatctgatggaggagctaaagtttattag

SEQ ID NO: 408363 - DNA, 129 bp, Staphylococcus aureus
atgagtgaagcaaatgcagctatcaatgtactattactgcttacagtcacacgagtgtttcagcctaaacgtgcaatgaaattctgcacgcgtccaatatatcatgcgctagatcatgaagatcattaa

SEQ ID NO: 408364 - DNA, 1485 bp, Staphylococcus aureus
gtgttaagttttcaattgctattttcactgtttgttattgcgcttatcattgcattgataagtggcttgttgtttttagcaccagttatgccaatgagatatattaaattacatttatacatactagtcatgccagtattatttgcagtcattggctttttcggtattcatggtcaacatgtcttaggtccatttaaaatagatcgtttatcttggttattagctggctttgtaatggcgcttggctttattattcaaaagttttcaatgcgatatttactaggtgatcatcattatagacattactttccattgttcactgcgattacatcgtttgcatctttagcatggatgtctgaagacttaagactgatggcactctgctggggtatgacattattatgtttaacattgctgatgaacgttaatcgtttttggaaagtgccacgtgagtctgcgaaattatcaagcatgacatttttatgtggttggcttgcattcgttggagcaattgtatctatttatattgcaactggcgagtggcgggtaccacaacatatagcgcatccgacatggtcattgttgacgaatgtactacttgtattagctgtcatgataccggcagcacaatttccttttcatcgatggttgattgaatctgtaacagcaccaacgccagtatcggcaattatgcatgcaggaattgtgaatgcaggtggtgttattctaactcgttttgcgccgatatttgataatggatttgcgttatcattattacttatcctttcaagcatttctgtattgttaggatcgggtattagcttggttcaagttgactataaacgccaattggtgggctctacgatgagtcaaatgggctttatgttagttcaatgcgcacttggtgtatattcagcagcgattatacatttaatattgcacggtatttttaaagcaacattatttttacaatcaggttctatcgtgaagcgattcaatattccaaaacaagcatctgctaaagacgcttatggctggattgtcatgggacgtgtattagctattatcgtggcatttctgttttggatgagtagtgacagaagtgcatatgaagtgttaagtgcactcattctagcatggtcattacttgtatcttggaatcaaatggtagcctttagtaaagggcgtatggcacgtctggttggcatgattttgatttcaattgtgacatttatctacatcatcacacataattatttttacgatgtattacaaaatataacaacacatgcgacaacgccgcctacaattagtgtcatcattagtgttgtcatattaatatttggtagtttattaagtatctgggtagcgcgtcatcgatactctaagacttttgcggtattgtacgtgtggttagttaatctaggagaagcacgctcgaaagcgatagaaagtcatccgaattatttgaagaagtatttatag

SEQ ID NO: 408365 - DNA, 435 bp, Staphylococcus aureus
atgttttcaaaagtgattgatccagagatgttagaagattgcttttatataagaaagaaagtgtttgtagaagaacaaggcgtcccagaggaaagtgaaattgatgaatatgaatctgaatctattcacctcattggatatgataatggacagccagttgccacagctcgtatacgtcctatcaatgaaacaactgtcaaaatagaacgagtggctgtgataaaatcacatcgcggacaaggcatgggtaaaatgcttatgcaagctgtagaatcattagctaaagatgaaggtttttacgtagctaccatgaatgcccaatgtcatgcaatcccattctatgaaagtttaaattttaaaatgagaggtaatatatttcttgaggaaggcatcgagcatattgaaatgacaaaaaagttgacctcgcttaattaa

SEQ ID NO: 408366 - DNA, 189 bp, Staphylococcus aureus
atgaatgctgatatattatttgagtgcttaagtttcgaagaacaattatcagttagcatattaaaagcttttgatagaatcattttgagtgaggtgtttaaaggagaggaatataactcggtagtatttacagtctctttagagtattatttaaaacatatagaatataaaaaactgaacgtactatga

SEQ ID NO: 408367 - DNA, 1074 bp, Staphylococcus aureus
atgaaaggtaaatttttaaaagttagttctttattcgttgcaactttgacaacagcgacacttgtgagttctccagcagcaaatgcgttatcttcaaaagctatggacaatcatccacaacaaacgcagacagacaaacagcaaacacctaagattcaaaaaggcggtaaccttaaaccattagaacaacgtgaacgcgctaatgttatattaccaaataacgatcgtcaccaaatcacagatacaacgaatggtcattatgcacctgttacttatattcaagttgaagcacctactggtacatttattgcttctggtgtagttgtaggtaaagatacacttttaacaaataaacacgtcgtagatgctacgcacggtgatcctcatgctttaaaagcattcccttctgcaattaaccaagacaattatcctaatggtggtttcactgctgaacaaatcactaaatattcaggcgaaggtgatttagcaatcgttaaattctcccctaatgagcaaaacaaacatattggcgaagtagttaaaccagcaacaatgagtaataatgctgaaacacaagttaaccaaaatattactgtaacaggatatcctggtgataaacctgtcgcaacaatgtgggaaagtaaaggaaaaataacgtacttaaaaggtgaagcaatgcaatatgatttaagtacaactggtggtaactcaggttcacctgtatttaatgaaaaaaatgaagtcattggcattcattggggtggcgttccaaatcaatttaacggtgcagtatttattaatgaaaatgtacgcaacttcttaaaacaaaatattgaagatatcaatttcgcaaatgatgaccaccctaacaaccctgataatccagacaatccaaataatccggacaatcctaacaaccctgataaccctaacaaccctgataatccagacaatcctaataatcctgataaccctaacaacccggacaatccaaataaccctgaccaacctaacaacccaaataacccggacaatggcgataacaataattcagacaaccctgacgctgcataa

SEQ ID NO: 408368 - DNA, 1182 bp, Staphylococcus aureus
atgaatagttcatgtaaaactagagtattcaatattataagcatcataatggtttcaatgcttattttatcactaggcgcatttgctaataacaataaagccaaagccgattcacactctaaacagctagaaattaatgttaagagtgacaaagtacctcaaaaagtaaaagatctagcacaacaacaatttgctggttatgctaaagcattagataaacaaagtaatgcaaaaactggtaaatacgaacttggtgaagcatttaaaatttataaatttaatggcgaagaagataatagttactattatccagttataaaagacggtaaaattgtttatactttaacacttagccctaaaaataaagatgatttaaacaaatcaaaagaagacatgaattacagtgttaaaatttcaaacttcatcgctaaagatttagaccaaattaaagataaaaattcaaatatcactgttcttactgatgaaaaaggattttattttgaagaagatggcaaagttagattagtaaaagctacgccactagctaataacatcaaagaaaaagaaagtgctaaaacagtttcaccacaattaaagcaagagctaaaaactacagtaacacctacaaaagttgaagaaaacgaagcgatacaagaagatcaagttcaatatgaaaacacactaaaaaacttcaaaattagagaacaacaattcgataactcatggtgtgcaggattcagtatggcagcgttattaaatgcaactaaaaatacagacacttataatgcacatgatattatgcgtacattataccctgaagtaagtgagcaagaccttcctaattgtgcaacattccctaatcaaatgattgaatacggtaaatcacaaggtagagatattcattatcaagaaggcgtaccatcatataatcaagttgatcaacttacaaaagataatgtgggtattatgattcttgcacaaagtgtatctcaaaatcctaatgacccacatttaggacatgccctagcagttgttgctaatgctaaaattaatgaccaagaaaaacttatttactggaatccttgggatacagaattatcaatccaagatgcagattcaagcctattacatttatcattcaatcgtgattataactggtatggttcaatgataggttactaa

SEQ ID NO: 408369 - DNA, 804 bp, Staphylococcus aureus
atgacacattataattactatgaagcaaacgttgagaccaatcaagttttagtatttctgcatggatttcttagcgacagtcgtacttatcataatcacatcgataaatttactgataactatcatgtcatcactatagacttaccaggacatggcgaagatcagtcttcaatggatgaaacgtggaattttgattatattacgacgttgttagaccgaattttagataaatataaagataaatcaataacattgtttggatattcaatgggtgggcgtgttgcattatattatgcaattaatggtcatatccctatatctaatttgatattagaaagtacgtcaccaggtattaaagaagaagcaaatcaattggaacgtcgccttgttgatgaagcgcgtgctaaagtattagacatagcaggtattgaattatttgttaatgattgggaaaagttgccattatttcaatcgcaactagaattaccagttgaaatacaacatcaaataagacaacaacgattgtctcaatcgccacagaaaatggccaaagcattaagagattatggtacaggtcaaatgccaaacttatggccgcgcctgatagaaattaaagtactaacattaatattagctggagaatatgatgaaaaatttgtacagattgcgaaaaaaatggcaaatttaattcctaatagtaaatgtaaattaatttctgctacaggtcatacaattcatgtggaagatagtgatgaatttgatacaatgatattaggatttttaaaggaggagcaaaatgactaa

SEQ ID NO: 408370 - DNA, 1362 bp, Staphylococcus aureus
atggctacgggcgtattagaggacgatattgtcaaagagatatatgacagctcaaaggaatgggtttcagttgaagtgaaattatcacagtcactagacccgagcacattatttcatctcactgacaatgaggcaggagatcgcttttatatgcgtttgaatgataatcgaacgtcatattttggctacaaagcaattcaattattcaaaaataattctaaaaataaacaatctatttttaaagactgggaaaaattaaaacataacatcacatttatacatccgcaatctgagaaacatcatcttcgagttgttggagggttccaattttcaagtcataaatcagatgatgaatggcgagagtttggactaaatcattttgtattacctgaagttttaatttcaacagataataatgggacatttttaacttatacagttaaaagggaatgttttactgttgaggcattgaacgatttaacggatttgttcaacaatatatcggatatagatgtggacgagcaaattggggaaattactagaaatgaagatatttataaagatgactggcgtcaacttgtagtagaagcaatagaatctattaataatgaagaaaaaattgtactagcacgtagacggttaataaagttcgataaagatatcagtattccatatattctaaagcaagcatattctaaagaaaaaaacagttatatattcttgttagaatcacaagattctatattcttttcacagacacctgaacaattaataaaggtcaataataaaatactatcgactaaagctgtagcaggtacaattaaacgttcacaagatgaggacgaagatacaaaaaatgttgaagcatttttaaaagataataaaaacttaatcgaacatcgatttgttgttgacagtattttacatgatattaaaccttatatcactgaattacattatgataagacgcctaaaattctaaaaaatgatcatttatatcacttgtacactgaaataaaggcgccactgaaggatgattcgtatattagtttaattgataatttacatccaacacctgctttaggtggctatccaaaagaatttgcgatggattttattgaacagaaagaatttggtacacgaggattatatggtgcgccggttggctatatagatatatatgatgattgtgaatttattgttgcaattcgttcaatgcttattaagaaagcacaagcaactttatttgctgggtgtggcattgttaaagattctgatccagatagtgaattggcagaaacgaaccttaagttcacacctatgatgaatgcattaggagtcgatatgaatgggaaatcataa

SEQ ID NO: 408371 - DNA, 315 bp, Staphylococcus aureus
ttgaagactatcgaagaaagaatgaacgaatatttcaactggttaaaacaaaattatatcttcaaagaattagatagttctacagaaattactactccctttaagaaccatttgaatgattttattagaatatatgctgatacactacctaataatgaaatttgtctatcagataacggattgacgattaatgaattagaaatgttgggtattgatataaacacaaaaacgagaactaaacttatacagaatattttaaatcaatttaatttaaaattagttgataaagaaattacagcggatgttaaaaattag

SEQ ID NO: 408372 - DNA, 1347 bp, Staphylococcus aureus
atgaaaaaagaaattttaaaaaagcaatgggtattatggacaatcttagtaacatctttctttagtataggcacaccaggtatagcaataatcccgttcagtttatcaatatatgcattatctaaattaatacttgttaataaatttgtagaacccgatttagtaacacttcaaaacttgaaagaaaaaaataaaagtatcaacattgaaaatcaaaaaatcaagcgtgaaatacaagaattgaagaatctaaaaaaagatttaatatctagtatagaagaaggtactaaagaacttgaacacattactagttatttaaatgatgaattatttaaatatgatatagaattaacttatcccttcgatttagttgaagtagactcatctcaaattaatacatatattaaaaaattacaaatgaaagaaaaagaattactaaatcttgaagaagtgaaaatatttaatgtttctacagagaataagagacatcaaaatgcacaggccaagcaaataatacgattatttaatgctgaaacttctcaattaataaataaagtaaatagcaaaaatatcgaaagcatgcagaacaaaatatttaaaagttatgaagggataaataaaatatttgaaacggataatgtacgtattcctgaaactttacttgacataaaacttgagatgttagatttaatgcacaagtatcaagttaagatagaagatgaaaagatcataagaagagaagaacgagctagactgaaagaaatagaacaagcagaaaaagaaatggagaaaaaactaaaagagcttgataaagacattagacaccacaataatgaaatcaaaaagctgacaatgtatttaaataacacagatttacaagtcgaaaaagaattatatattgaaaagattagagaattagatcaatcactcaagaatttaaattctgaaagagaaaatgtagaggacagaaaagataatgctcaatcagggtttgtttatataatatcaaatatcggttcatttggagaaaatgtttataagattggtgtaacccgtagattagaaccaatggatagaattaatgaattaagtagcgcatctgttccctttgaattcgatgtgcacgctttaattttctctgaaaatgcttttgagcttaaaaacaaattacacgaatactttaaaaaatataaagttaataaagttaacggaagaaaagaattctttaaggttaatattaatgaaattaaagataaagttttatcagaacacaatagcacagttcaattcattgatgaaccaaaagctatacaatacagagaaactttaagattaacttcactctaa

SEQ ID NO: 408373 - DNA, 516 bp, Staphylococcus aureus
atgataaaacaggttctaagaaaaagtttacatacagtaaaagaacatatcgataaaagtaacttccaaaaaaacttaatattttcacttgtcatattcccattcttatttgtgccttacattataatagatatactcgttcatttatctaataatcaagaatactttaagttattatcatctatttcacatatatttttaatgttctttgtaacagcaataagtttatacgctatactttctatacctttaacatctaattcatgtaggaaatcaagctttagaaagattagtaaagtaataatttattttttagtatttttttatatcctaagccatcatatcaatatagatatttctaaaatggactcttcttggcatttttatgcgctttttttatgtttttttattatttcatataaattaactgaaaaaataatgaaggtatgcaaatggatatttaatgaagaatcaaataacgatgaaggtttaagaactcaaaaattatttttataa

SEQ ID NO: 408374 - DNA, 246 bp, Staphylococcus aureus
atgtcaaataatgctaattatggtaagttaatattacatttagtaacatcaaagttaacaaatatagaagaaaatcctcaactttctaattatgaatcagaatattatcttcttgaaaaaaatttaattaagacacaatttatcaaaagtactaaaagtagatgtctatatgaagaaaccacttatcacatattgacgaatggagacatcttaaaccaacccggaaatttgaaattatggacgtag

SEQ ID NO: 408375 - DNA, 342 bp, Staphylococcus aureus
atgaataaaaatataatcatcaaaagtattgcggcattgacgattttaacatcagtgactggcgtcggcacaaccattgttgaaggtattcaacaaacagcaaaagccgaacataatgtgaagcaagtacaaaacacaaatatttctccgtataaaggaattgttagaattggatcagctacaggatttgtggtaggaaaaaatacaattttaacaaataagcatgtattacctggtgttcaagttggtagcacaattcttgctcatccaaatggcgaaaatgataccggtggatactataaagtaaaaaaatcattccatacgcaggatctgaagatttag

SEQ ID NO: 408376 - DNA, 225 bp, Staphylococcus aureus
atgtttgaatcaacaggaaagatattatccatcgatggtaatcaaatgacttcagatgcatttgctgaaggtggcaattcaggatccccagtgtttaattcaaatcatgaggtcattgcaattgcatatgctgtcgatgtcaaaaatgatgcaacaaaaaaatcatatttagtttatttcacacccgagatcaagaaattcattgcagataacacagaaaaataa

SEQ ID NO: 408377 - DNA, 720 bp, Staphylococcus aureus
atgaataaaaatataatcatcaaaagtattgcagcattgacgattttaacatcagtgactggtgttggcacaacaatggttgagggtattcaacaaacagccaaagccgaaaatagtgtaaaacaaattacaaatacaaatgttgcaccatacagtggggttacatggatgggcgcaggaacaggatttgtagttggaaatcatacaatcattactaataaacatgttacctatcacatgaaagtcggtgatgaaattaaagcacatcctaatggtttttataataatggtggtggactttataaagttactaagattgtagattatcctggtaaagaagatattgcggttgtgcaagttgaagaaaaatcaacacaaccaaaaggtagaaaattcaaagatttcactagcaaatttaatatagcatcagaggctaaagaaaatgaacctatatcagtcattggttatccaaatcctaatggaaataaactacaaatgtatgaatcaactggtaaagtattatcagtgaatgggaatatagtgtcatcggatgcaataatccagcctggtagctctggatcacctatattaaatagtaagtacgaagctattggtgtaatctatgcaggtaataagccatcaggtgaaagcacaagagcattcgctgtttatttctctcctgaaattaagaaattcattgcagataatttagataaataa

SEQ ID NO: 408378 - DNA, 1557 bp, Staphylococcus aureus
atgtctattactgaaaaacaacgtcagcaacaagctgaattacataaaaaattatggtcgattgcgaatgatttaagagggaacatggatgcgagtgaattccgtaattacattttaggcttgattttctattgcttcttatctgaaaaagccgaacaagaatatgcagatgccttgtcaggtgaagacatcacgtatcaagaagcatgggcagatgaagaataccgtgaagacttaaaagtagaattaattgaccaagtcggttacttcattgagccacaagatttattcagcgcgatgattcatgaaattgaaacgcaagatttcgatatcgaacatctggcgacggcaattcgtaaagttgaaacatcaacactaggtgaagaaagtgaaaatgactttatcggactgttcagcgatatggacttaagttcaacgcgtttaggtaacaatgtcaaagaacgtactgcgttaatttccaaagttatggttaatcttgacgatttaccattcgttcacagtgatatggaaattgatatgttaggtgatgcatatgaattccttatcgggcgctttgcggcgacagcgggtaaaaaagctggcgagttctatacaccacaacaagtatctaagatactggcaaagattgtcacagacggtaaagataaattacgtcacgtgtatgacccaacatgtggttcaggttcattactgttgcgtgttggtaaagagacacaagtatatcgttatttcggacaagaacgtaacaataccacatacaacttagcacgcatgaacatgttgttacatgatgtacgttatgagaactttgatatccgtaatgatgatacgttggaaaatccagcctttttaggcaatacatttgatgcggttattgcgaacccaccatacagtgcgaaatggacagcagattcaaaatttgaaaatgatgaacgttttagtggttacggcaaacttgcgccaaaatccaaagcagactttgcctttattcaacacatggtacattacttagacgatgaaggtaccatggccgttgtactcccacatggtgtcttattccgtggtgccgcagaaggtatcattcgtcgttatttaattgaagaaaagaactacttagaagccgtgattggtttgccagcgaatattttctatgggacaagtattccaacatgtattttagtatttaaaaaatgtcgccaacaagacgacaacgtattatttatcgatgcatccaatgattttgaaaaaggaaaaaatcaaaaccatttaagcgatgcccaagtcgaacgtattatagacacatataagcgtaaaaaaacgattgataaatatagctacagcgcgacattacaagagattgccgataacgattacaacttaaacataccgcgatatgtcgatacattcgaagaagaagcgccaattgatttagatcaagtccaacaagatttgaaaaatatcgataaagaaatcgcagaaattgaacaagaaatcaatgcatacctgaaagaacttggggtgttgaaagatgagtaa

SEQ ID NO: 408379 - DNA, 1155 bp, Staphylococcus aureus
atgagtaatacacaaacgaaaaatgtgccagagttgagattcccagggtttgaaggcgaatgggaagagaaaaagttaggggatcttataaaagttaattctggaaaagattataaacatttggaaaaaggtgatataccagtctatggtactggcggttatatgacaagtgtttcagaaccactaagtgaaattgatgctgttggtattgggagaaaagggactataaacaaaccatatttgcttgaggcgccgttttggacggtggatacattattttattgtacacctaaaaaagaaacagacatactatttatattaagtttatttagaaaaataaattggaaagtatacgatgaatcaacaggtgtgccaagcttaagtaaacaaaccattaataaaataaatagatttgtcccttcaaataaagagcagcaaaaaataggcgaattcttcatcaaactcgaccgacaaattgaattagaagaacaaaaacttgaattacttcaacaacagaaaaaaggctatatgcagaaaatcttctcacaggaattgcgattcaaggatgagaatggaaacgattatccgaattgggaagagaagaaaatagaagatatagcaagccaagtatatggaggcggaacaccaaatacaaagattaaagaattttggaatggagatattccatggattcaaagctctgacgtaaaagtaaatgatttgattctacgacaatgtaataaatttatttccaagaattcaattgagctttcttctgcaaaacttattcctgccaattcaattgcaatagttacaagagtcggggttggaaaactgtgtttggtagaatttgattatgctacaagtcaagattttttatcattaagtagtcttaaatatgacaaattatactcattatattcattgctatatacaatgaaaaaaattagcgctaatctacaaggaacttcaattaaaggtataacaaaaaaagagttgttagatagtataataaagataccccataatctagaagaacagcaaaaaataggtgatctattttataaaattgataaatatatcagttttaataaatgtaaaattgagatacttaaaagtctcaaacaaggattacttcaaaaaatttttatataa

SEQ ID NO: 408380 - DNA, 1806 bp, Staphylococcus aureus
atggaaaaattaaatgaagcaattaaaaactatatagatagtgatgaattgttcgccctttttatagatggacaatggggagtagggaaaacttattatattaaaaataaaatattaaaggaatttgatgataaaatagaaattaggtatataagtttatatggcctgcaaaacttatatgaaattaagagtataatcataagtaaattgataaatacatctactaaaaatcttaggaaagtcctaaaaagcatgaaaaatttccaagtagtaccttatttaaatatgaataacttttctgataacatattacgttatattgatgataattcattaaaaaagataaaaaattccctgatgaaaaataataaaagtgctttgctaataatcgatgatgttgaaagaatgagtgacaaagtaagttttgaagaatttttgggatttattagaaatgatttaattgattatttagactgtaaagtgctatttataggaaatttagatgagctaaataaaaaagcggattttcataagaatagtgagaaaataatttctagaatattaaagtttcctaataatagagaagtagcaatggatatagtaaaaagtaatttacctaagttatttgtaaagaacatctctactaaagagctatttaatggtttttttgatataagtgatgaaaaaaaagaaattattttcgaaaaatctaaacaaaataatttaaattataaatattaccatttgaatatgagaactttgaatttagtagtttcaaacttcaagttaattattaataaaatgcaagatgagattaaatataaatcaaaagattttaaaatcaccttgtacatttcattattcattctgtataatgaatttcgaagcggaaatttaggtgaatctgaaattaaggatcttcaatttacatataatgattttaacaatttaaatacgaaaacatctattgctttgtttaaatacttatacaaaaataatgaactagcaaattatgtcttttttgatatagagctaaagaacttattattatatggtatttttgatgaatcaatttttttgaaaaatataacgaataacttcaaagaagaagatgctaaagctgatttattaaatgtattaaaagaattctttaaattaagtgaaagtgaactacttgaaaaagaaattcaagctatagaaataataaaagataaaaacaatgaaaattttaattataaagtaaaagcttatttatctttattaaatttaaaaggaaaaaacttatatttaatagatggcattaaaattagcgaattagaagatgaattagtggataattacgatttgcatcagaataatttaatagttggagatacgataaatagactagatttagttagcttttcaaacgagcaactatatgaagaaatcaaaagtttaaaagaccgtttaataaataaaagaacaactttgatgacttctatatataaccaatacttagaaactattttaaatggtgactttacaaatagaactaaattaaaagaagcgtatattggaatgaaagatatagatactatagaaataatctataataatttaaacaaagtatcaaatgagcttaaaagtagtaatgagaaaattattaatttaagtgcattcattaaagataatcattgtaataatgatgataatattcaattagaatatattataggtgagatgaaaaaattaaaagatggtactaaagatagagttacacaaatgtgttttagcatgttgatcgatacactgaaagatatatag

SEQ ID NO: 408381 - DNA, 300 bp, Staphylococcus aureus
atgagctcaaaagatgcaaagaaaagtcaagaagaagctagattacaacaattaaagcaagaaatgcgtaatagtactgataatatggttagcaatgctaaaaataatgtagcattaaaatttcaaacattaaatgaaatcattgaaacaattaataattcttcgcaaagtttagaaggtacatttgaaggaaaagcaagcgaagcagcccaacaaagtataaataaactcaaaaacaataacgaaaatcttaaacaaaaatttgagaccctattaaatacattgaagataaatggatga

SEQ ID NO: 408382 - DNA, 1611 bp, Staphylococcus aureus
ttgaatctttcagacgctctttcaagaagtgtttccgatatgtcttatgaaaatttagataaagatcaaacatacgactttcttggccaagattacaaagtcatcgaaaaacgcgacgatacccagaatgggtttagagcatatgttttcgctccagtaatcaaaggtaaagttgataagagtcaacttttaataggttacgctggcactgacccatatagtctaaatgatattcgtactgatttacaacttcccattcatcataacacaaataatctaaaaattaataatcattataaagatttaaaaaactcaactattcacaaaaaatacaatacaataaaagataaaaatgacctttttagtttttcttctaatttaaataataaagcacttttcggtgatctatgggcagctaagtttgcaccgactcaaatggacgaaagtgatgcttttactgaatcagttaaaaagaaatatccagatagtgaaattcacccattaggacatagtttaggtgcgtttttagctcaatataatttaataaaacataatctggataacggtacaacgtttgcagcacctaacgtataccattcatttactggagactttaaaaaagacattgataatggtgtctatgattcaaaaatacgcaatattggccattttgatgatcctattaataatttgaatttttttaatcctcgtattggcaaaaatattacatcaatgccacattatgatggatttataactaaccttcctttgattggtcaacacacgcttaaatcttacaatgatttcgatgcagatggtaatgtgaaggaaatgccagaacttgaacaatttaatgatgaccaatctcttaataatagatttcaattatttgacccatttggtataaaaagcagatttttcgactctattaaaatcgatagttctatattaaatagaacaagtgaaaatgattttgatccttttgctattctcaataaaaaagataaattattcgaatcaaatgaccttgatatagaaggatttaataataaacaaaaagaagatttaagcattgatttaaatccttttgatgatgaattaaatgatgaggacgaaccattaattcccaaaagaggcgatagtaaaaaattaaaagcagaaaagaaaatctctgttaaaaaaaccaaaagtagttccaaaaattcaggcaaaaaagtaataattcagcctgatgaagtgcgtaatatcgctagcacaattcgtgatagactatttttgtatacacaaataattactgcattggatgaatatagagaagaaacaatgtcaggggctaatcgcattttagataaatatcaatcagagcttctaagcggttcacatgaatttataacacctaacgatcttgaacagtatatggagattttatcagttgagggaagttcaggtaatttcaagttttataatagtggtttaatggatgacttaattcaggcattagatcaaaacaaaaaagacttgctacaatttgctgaaaaactagaatttgctgcaaataaattcgaagaaaaagatttagaagaaagcgatgtttttggactatttagttaa

SEQ ID NO: 408383 - DNA, 450 bp, Staphylococcus aureus
atgattcggaaaactaaagttattattttaattattattttaattatagcaatattaatgatgtttgcatatatgtcgcacaagcaaaaaaaagaacattatatcgccattcaagaaaaaagaattgatttgttttttaaacataacttaaataattataaaaatatgaaagtgacagatttccataaaactccaatgggtgggtatttcattgtaggttatataaatgatgataaaaaatataaattccaagcaagtatagattcgggaagcaataatcaatatcagaaaaatattggttaccatgatgataaattaggcaaattatttaaagaaaaagaccctaaatataaactctcagtcgatgaaataattgaaaaagaacacttggacaaaaatgaatatgaagccgatccaccgttatttttcttttcaggtccaattgaataa

SEQ ID NO: 408384 - DNA, 321 bp, Staphylococcus aureus
ttgtattttaagcataatcttaacaattataaaaatatgaaggtgacagatttccataaaactccgatgggtgggtatttcattataggttatataaatgatgataaaaaatataaattccaagcaagtatagatccgggaagcgataatcaatatcagaaagatattggttaccatgaagataaattaggcaaattattcaaagaaaaagatcctaaatataaactctctgtcgatgaaataattgaaaaagaacacttagacaaaaatgaatatgaagcggaatcacctttattcttcttttcggggagattagagtga

SEQ ID NO: 408385 - DNA, 225 bp, Staphylococcus aureus
atggttagattatatgaaaatggtaagccaaggaatgaaattatacgcgagtatgatttaacatctttgatgttaggaaaaacagcattttcatttcgccattttcctacattttataaacccatatataacagcgttattttatgtatttataattatgtcaagcaaataatttttaaaagtattttgaaacaacgtttcatgaggggcgtaaacggaacatag

SEQ ID NO: 408386 - DNA, 447 bp, Staphylococcus aureus
atgaaaaagagatatgtatttgtggtagttgttgcattattaatagtactaattgttattgcatacgcgtttcacaaaagtaaaaaagaacattatattgagacacaagaaaagcgaatcgatttatattttaagcataacctgaatcactataagtctatgaaaataacaaagtttcaaaaaagccctgtgaatgcttactttattaaaggatatataaataatgataaacaatataaatttcaggcatatataaatacaggagatgaaggaaatcagtttaatagtagcataggatataaggaagaaaaaatagggcgattattgaaagagaaagatgctaaagaccgattaacagtggatgaaataattgaaaaagaacacttagacaaaaatgaatatgaagccgagccaccgttgttcttcttttcgggatcgttggattag

SEQ ID NO: 408387 - DNA, 570 bp, Staphylococcus aureus
atgactgccattgacaaagtttattatgaagatgtattagaagatgacatacttaatctgcttaaaccatatatacaggggaaagaaaaggaactttatatcacttctgataattttgcaattgatttaaataaagtgaccgcattactggatttaaaaattcagtatgaagatttggatgatgatgtttcgggttatattgatgaaagaactatttatgtaaataaaaatcattctagtaatagaaaaagatttacaattgcccatgaaataggacattttttacacaatcataaaaataaaatcaaatatagaaataatagttatgcatatgacactgaagaaatgattgaagaaagggtggctaatgacttttcagctaatttactaatgcccaaaaagcaaatggaagctttagtatataagttttacaaggaaaataatattaatttaacttctggtttatcaatttcagaaagagaagagttaattaactatattgcaattaagttggaagtttctaaaatagcagctgggattagactttataatttagggttggataaataa

SEQ ID NO: 408388 - DNA, 1368 bp, Staphylococcus aureus
atgaatactaaatatttatatttaaatttcgataaaatttatgaagaaaaagattttttcaacgttttacatgtagacattaaccttaaaatatcagaaataaaggaaagtaatgaagtattatatagtattgattcaattacttgtaagaaattgaatcattatgatccaaaattagaatcatacagagacagtatatatttattgaatgaacgtctaaataattataattttaatggtaaaaaagaatggaaattattttacttgtataaagaattaatccaaacttttgaaatattatatgatgatacttcaaccacgaattattatagaggtcaagcaaatgattggccaatgaaagcaggattattaagaaatgatataatagatgatttaaaaaaagagtttgagaatatatacgaagatatggcttataagtacccagatttaatagagtatacgtgcttaaataaaaaagaatataaagcagaagattttaaaaaaagagaaaacaatatggcttatttacaacattatgggctaagaactacattaattgatattactgaaaacccctttatagcgctcctatttttaacttctaactcacaagtgtttaacaatgcaaccttagacatgtataatatcaatcctaaaatacacagcgaacaaaatttgttttcaagagtaaaaatgattagtaaaaacaaaagaataatagctcaaaagggtgcgttttttaacttcgaaaagctattgatttttcagaatgaacaaaatgtaaatagagataaaattaataaaatacctctagttcgtttaaagttaaatttttcatatgactataaagaaaaattaaaaagggagttaaatcaaacgcaatctgcttttcaaaaactaaaaataactagagaagagaaattgaaaaatcataagagtagaattaaagaagacctcaaaagaatacgcaatttaactatgaaaactgaacatgacatggatagtgaaaaatctaatgattacaaagaggaattggaatatttaattaaacgaatcttaaaagatgaaagcgttattaaaatagataaagaaatggaagacttaaaaaagaaaaaactatatttagatgcaaggttgaaaaaagaggaaatcttgactagtgaatatttaaggcctgagatttgtaaagaattaagggagaaattaaaacagtatcattatgttgaaagtgaattattccctgacgtatacagacatataggttatattcaatctaattttctatcaaatcaaacaaataatcgtactattaataaaaataatatatcagaaaatctagtcgatttattaaaactaaaagaaaactaa

SEQ ID NO: 408389 - DNA, 1044 bp, Staphylococcus aureus
ttgagtcaatttatggattatgcgattcaacttgcaaatatggtacaaggtcaaacaggtgttaatccacccgttggcgctgttgtagttaaagaaggtaggattgttggtattggtgcacacttgagaaaaggtgacaagcatgcggaggttcaagcacttgatatggcacaacaaaatgctgaaggtgcgacgatttatattacgttagagccatgtagtcattttggttcaacgccaccctgtgttaacaaaataattgattgtaagatagctaaagtagtttacgcaacaaaagacaattcgttagatacacatggtgatgagacgatacgggatcacggtattgaggttgaatgcgttgatgatgaacgtgcatcacaattataccaagacttttttaaagcaaaagcaaagcaactgccacaaattacagtgaaagtatctgcaagtttagatggtaaacaagcgaatgataatggacaaagtcaatggattactaacaaagaggttaaacaagatgtctataagttaagacatcgacacgatgcagtgttaactggaagacatacagttgaattagatgatccacaatatactacacgtattcaagatggaaaaaaccctataaaagtaatattgtctaagtctgggaatattcattttaatcagcaaatttatcaagatgaatcaacaccaatttggatatatactgaaaatccaaatttaacaaccaatcaaacacatattgaaattatttacttgaagtcttgtgatttaacaacaattcttcacaatttatataaaagaggagttggaactttgctagtcgaggcaggtccaaccactacttcagaatttctccaatctaattatatagacaaatttattctctattatgccccgaaattaattggcggatctggaaattatcaattttatcaaacaaatgatgtgattgagataccagatgcgaaccaatttgaaattgttcattccgagttattaaatcaaaatgtcaaattaactttacgaaagaagtga

SEQ ID NO: 408390 - DNA, 984 bp, Staphylococcus aureus
atggataaagaaactaatgacaacgaatatagacgtcaaagtgaacatcgcacttcggcgcctaagcgaaaaaagaagaagaaaattaggaaattacctatcattcttctgattgttgtaattttacttatcgcattagttgtatatattgtacatagttacaatagcggtgtagaatatgccaagaaacatgcgaaagatgttaaagtacatcaatttaatggaccagtaaaaaatgatggtaaaatttctattcttgtactcggtgcagataaagcacaaggtggacaatcaagaacagattctatcatggttgttcaatatgactttatcaataaaaagatgaaaatgatgtctgtcatgcgtgatatttatgcagatattccagggtatggaaaacacaaaattaattcagcatacgctttaggtggtccagagctacttagaaaaacacttgataaaaatttaggaattaatcctgaatattatgcagtagttgattttactggatttgagaaaatgattgatgaattaatgccagaaggtgtaccaattaatgtcgaaaaagatatgtcgaaaaatattggtgtatctttgaaaaagggtaaccataggttgaatggtaaagaattacttggttatgcaagattccgtcacgaccctgaaggtgacttcggacgcgtgcgacgtcagcaacaagtaatgcaaactttgaaaaaagaaatggttaattttagaacagttgttaaattaccaaaagttgcaggtattttaagaggctatgtgaatacaaacattcctgattcagggatcttccaaacaggtttgagttttggtatccgaggtgaaaaagatgttaagtcattgactgtgccaatcaagaactcatacgaagatgtcaatacaaatactgatggtagtgcattacagattaataaaaacacaaataaacaagctattaaagactttttagatgaagattaa

SEQ ID NO: 408391 - DNA, 126 bp, Staphylococcus aureus
atgattgattcacaattagatggaaatgtaactgcaaaagaattgagtgaatcttttaaagaattagttgaagaatttgaacgcatagaaaaagcgaataagaattcaaattcaaaagataaatag

SEQ ID NO: 408392 - DNA, 267 bp, Staphylococcus aureus
atgttacataactatcctggccaatcaggattttcagaatatgatttatttacattttttaagcatccatcaataaaatcaatgacaatcgttactaataaggaacaagtaaaatttattaccaagtcagataggtttcaaggtaaaatagtgagtaaattttgtactaaatattttacgcatattaatatcattaatgatagctatattgaaaaattattaaaaaaactttatagtataaatatgattaaatataaagtgagatga

SEQ ID NO: 408393 - DNA, 279 bp, Staphylococcus aureus
atggaaaataatgaaagtaatattactgatgtaactcagaacgaagagcaactagataacagtgatgaacaatcacaacagaatgagaaaacattttctcaagaagaagtatcacaattgattaaagagcgtatagctagagaacgcaaaaaatcagatgaacgtattaaagatgccaaagaaaacaatgatagcaatgaagtagcttatttattaaaaggtggtaaagttacaaaagtagatggcaatcaaaatagtgtatcttttgtgccagggtaa

SEQ ID NO: 408394 - DNA, 249 bp, Staphylococcus aureus
ttgctaatattaaaaataaaagaaattaatgataaaagtgttacatataaatattttcctaataatgatgaaaatattaagccgggtattattcaaatggatatagatagccttgaagttatcaatgctgaaaaatctagtttagaaaaaaatacaagagacaattattttattcatgccatagacagaatatacataaatactagtaaagggctatttcctgaatctgaactcgtagcatggggataa

SEQ ID NO: 408395 - DNA, 234 bp, Staphylococcus aureus
atgataccaggtgtgaatgcgccacctatacatccttggtgtagaagtaccacagtgccagatgtcggtaattggcgagacaagttctttaaagagcgtgaaggtaaatatcgggtagaaggttcttttattgaatcgggtgcacttaataataaaagtgatgaatacggtatcaaaaggaacaggcatgctcaaatttattataattcagttagaaatcaagaaaacagatag

SEQ ID NO: 408396 - DNA, 252 bp, Staphylococcus aureus
ttgattattatgaggaagttaaaagaagataatcaagttatagtatatgaatatattccacaagataaaatagaaaaagggaaaggcgaaataacagtaaataaattagattcaaaggtaattgactataaattatcaaaagttgaaaatgaaaaaggtattttaatttatagagataaatcatttcatgcaatattaaattttattgatgaaaataaatttccgaatgaatatatatatgcatggtattaa

SEQ ID NO: 408397 - DNA, 417 bp, Staphylococcus aureus
atgttcaaagtgaattattcgattttaagttattatccagatatttatctccatagtaatttagctgtaggtgtggcatttgaaattataggagaaagttatcataagaatgaaattaaatttataacccaaagaagaaaaattttatcatttgatgatgaaatagacaatttagaacttattaatatgtttttggatgggcttaaatgtgaattcgaacaaactaatcaatcattaaaaagttataagaaaaagtttgttaataatttctactttgagaatattgaatataaaatgtttgactcattaaaagaagttaataattttattgaaaatacatataaatatgtattacatcatggtttagataaaaaagaaagacttaagaaaactgagaaagaacttttgaatagctaa

SEQ ID NO: 408398 - DNA, 1881 bp, Staphylococcus aureus
atgacatttaaccatatcgttttaaaaaacttacgtcaaaacttaaaacattatgcaatgtatttattttcattattttttagcatcgtcttatatttcagttttacaaccttacagtttactaaaggtgtaaataatgacgactcgatggctatcattaagaaaggtgctttagtcggatcaatatttttatttatcattattgtcatctttttaatgtatgccaatcatttattcgtgaaacgtcgtacacgtgaatttgcgctatttcagttgattggtttaacacgacaaaacattttgaaaatgttagcacttgaacaaatgattgtatttataatcacaggtgttgtcggtgtattatgtggcattgcaggtgcacaattattgctttccattgtatctaaattgatgtcattatcgattaacttatcgatacatttcgaacctatggcccttgttttaactattttaatgctaattattgcgtatatactgattttatttcaaagcagtttatttttaaaaagacgcagtatcttatcaatgatgaaagactcagttaagactgatgttacaactgcgaaagttacagttatagaagtcatttcaggcgtattaggtattgctatgattgcactaggatattatatggcgacagaaatgtttggtacgttcaaagcactaactatggctatgacatcaccgtttatcattttatttttaacggttgtaggtgcctatttattcttcagaagttccgtgtcactaatttttaaaactttgaaaaaatctaaaaatggacgcgtatctattacagatgttgtatttacatcttctattatgtacagaatgaagaaaaatgccatgtctttaactatcattgcaattatttctgcagttacagtaactgtattgtgtttcgcagcattatctaaatcaaataccgatcaaacccttacatctatggcacccaatgattttaacgtggtcgcctctcaagatgcgcaacaatttgaatctaaactaagccaacaacatattacattttctaaaaattattatgaaactattactgtagataatgttaaagatcaggttattactttggaaaatggtagtgattcaggtcgcacgaattctattttaagtgcaaatacaaagttaactggtaacaatgccatcattacaaatacaaaatcacttcctaacgtgattaatattcatttaaacaatgatttagtagtaaaaggtacaaagaacgagacttttcgtgttacacaagaagacaaagacaaggtttatcctttaaatctaatctttaattcacctgtcattgaagtaagtccagaaaagtatcagcaattgaaaacacaaaataacgttcatactttttatggatatgatattaaacaaacatcacaaaagaaaaaagctcaagcaattgcaaaacagtttggagacaaaatcatcacttatgatgacatgaaaaaagaggtcgatgctactaacggtattctaatattcgttacttcatttttaggattagcatttttagtagcagctggatgtattatttatattaaacaaatggatgaaactgaggatgaactaagtaacttcagaatattaaaacgcataggctttacgcacacagatatgcttaaaggattattactaaaaattactttcaacttcggtttaccattattgattgctatattacatgcagtattcgccgcaatagcatttatgaaattgatgggtaatatatccttcatgccggttattatagtaatcattgtatacacactcatttacattgtttttgctttaatcgcttttgtacattcaaataaattgattaagaaaaccatttaa

SEQ ID NO: 408399 - DNA, 750 bp, Staphylococcus aureus
atgaaaaacaagataattatcctatttctagcaattattataacttttacttacggaaactttgcagaagcttctgtggttataaaagaagctaatattaacaattcgaatagtaaaataaacacaaataaaattaacgagaatatttacagtaaaaataatcgtaattacattgacaataactttaaatctaaagatttaaacattgaaagcagtttagaacacgacctaaatacagataaaattactgtagatgcttcattaaaagataattataataataaacttgataaaacttatgatgttaaatttttaaggattgttaatgaaaatgactttaaggcagaatttaccgaccaagatacgggagaaaaaataatatatgatacgaatgaggttaaagcttcaattgcacctgtagtggctgtattagtaggattcatcgccaaacaaggacttaagaaagctattcaaaaatatggtaagacagttgtaacatcaatgattcgtacaagccctcaagttgccgcgcaggcagctaaaaaattgggttattctgctacaaagcatgtatcccatggcaaaaaagtgttcaagaaaaatagtaaagggcgtcctcaatatatatctgtcgataaagatggacaccgaggaggagcatggaaaggtgcaagcagtattaagaatttaggtagcaagaaaacaagaagtggtacatacgatgctaacctaaaaagaattggagattaa

SEQ ID NO: 408400 - DNA, 804 bp, Staphylococcus aureus
atgagtcgtaatttaatacatttatccataggggtcgctatatttataatttctttctcgttttatttattaaatcaaccaaataattgggcatggagcagtctaaatatatgtataaatgattcaaagccatccaatgtaaaagttgctattttagatacgggtattaataatacaagaataaacaataattttgttacaaaaagatacaatgctataaacaatcataatcaaataactacagatagtaatcacgccactcaagtagcaagtattatcacatatggagaacataaagaaaagttgattggtatcagtaaatcagtaagtatttatgacgttaaagtattagatgataaccttaaaggcgatatagacaacataataaaaggcataacttggagtatcaaaaatgacgtaaatattattcatatgagttttggctttcagcgttacaataaagaattacatgatgctataaagaacgctaaaaataaaggtattatcttagtagccgcagcagggaataacatggatgattatagtgactatccagcacgttttaacgaagtatattctatcacagcaatagacaaaaacaataagccatttatatatgcacctactaaaaaaatcgattttaaagctcctggcgtagacgtatatacaaaaggatcaaaagatgagttacttactgtaaatggaacatcttttgcagccgcctatttcactgcttatctgacaaataatcttgaattccgaaatgacttaccacatattttaaaagaatatccaataaaataa

SEQ ID NO: 408401 - DNA, 2121 bp, Staphylococcus aureus
atgttggaattaattactgatttttcaaaaaagtcttttaaaaattacagtatgaaggaagaattaaaattcaatgctataaatataatatacggagttaatgggaggggaaaaacttcattagctagaggtattaaagaaataatagaagaaaataatccagatagcttgaggtatttttacactgattatattcatgaacttcttttactagaagattccaataaatttaaaggggtaaaagcgacatttggtacaaaaaatgtagaaattgaaaataaaataatcaagctgaaaaatgaagttgttgatatgacggatactaaaaagttactagttgagaagagaaggaagttaagagaactaataaacgaaatacataagtcaagaaaagggaatcttaaaataccattaaaatcatcaaataaaagtatagaagaagtaatagctatttatgaaaaaaatttaaaagatgctaaaaaaatagagcataatatagaaagtataagaaattttgtagcgaatgatgaaacactttataataaatataatagcatttatgaagttatgattccaagcctaaaaattgaaacttatgatgtagatagattaacaaagattttacaaaataattatacagatataaaaattcctagttttgaagttatagattggttgcgtaatggtttagaattgcataatgttgaagagagtatatgtaaattttgtggaaacaatttaaattataatttgattaaagaaaaaatagaaatatatttattaaatgaaaagaaaaaagattttgattatcttaaagatgtcgaaaaatcaattgaacaattatcggataattatgaacaatatttatctaatattgatatatttgttaatgaattaggggtccaaaagtcagtagaagaaagtttgggagactcaattgatgaaattaagagaattttaaaacaaaaattaggaaatatggagaatgacaatcttaaatttccttctgatgattacattacattaataagcagattatctgaaattgaagaggaatgtaaggaaaagaagaaaataaaattaaaagaattaaataaaaaaacagaaaatataaatgtaatagttactggctctataagtttagaaatattagagaatcaaagtataagagaagaactttcaagtattcaatatgaagaaaatgaatgtaagaagcaagaacaactaaatgaggaaattaatgcaaaaatatcgaaattacatgaaaatcaatcggattataatgattttaaaatttacttaaatggtgtatttgaaagtattaatttacatattaggttgaaatctgatgaaactacacaaaattattatctttatcatgatttagaaaatatatcactaaatataaaagatataagtgaaggagagaaaaatctaatagcatttttattcttttattttgaactttttgaggatgagaaacaagaaaccattaaaagtaacattaaaacgttaatcattgatgatcctattaatagcttcgacgaagcaaatagattttacgttttagaattaattaaaaaagtacttaaaagcaaatttaatcaaatatttatatttacccattcttggaatgacttttgtgatataacttatagattaaaaggggaagatcataatttttatgaagtgtacaaagatcatcagggaactagttttttagaaaaatttaagaaagtaaagacgccttataaaaagttatttcaagagatttacgagttatcgagaaaaagtcaaaaggacatagttgaggaagattgttattactatcattcaataaatagcattagaagagtgtttgaagaatttttaagttttaagttaaaaaatagtgacctagctcagaaatcaaaccaaccagaaattgaagaagtttatagaaaaatgacaggcaatgaaatgagtaataacaaaaaaataaagttaggatcatttttaacaattataaatgtattgtcacataaaccatacagagcaatagatgtaattggttcagcaaaatttttgatgaggtatattgaagatgtagataaagctcattatgatgctatgaaggattga

SEQ ID NO: 408402 - DNA, 237 bp, Staphylococcus aureus
atggttagattatatgaaaatggtaagcctaggaatgaaattatacgcgagtatgatttaacaccttcgccgttaggaaaatggataaagcaatatcaaaacacgggtacattcaatcaccaagataacttatcagatgaagaaaaagagctgattaaattacgtaaagaagttcaacatttaaaaatggagaacgatattttaaagcaagcagcgttgatcatgggacgaaaatag

SEQ ID NO: 408403 - DNA, 807 bp, Staphylococcus aureus
atgggtaacgtcttaaaaatactaagaagtacctattatgattctataaaaagaaaagataataaaatcactaaagatgattcaaacgtagaacgtgccgtcataaatatttttaatgctaatagaaaagtctttgctacaagacgaattaaaaatcatttaaatgacaagggtcatactgtatcaagacgaaagataggtcgtatcatgaaaaaatataatctagtttctgtttatacgaaagctaaatacaaaaatcatccaaaagaaactaatgaaaaactaattaaaaatcatttgaatcgcgcttttaatagagaacaaccaatggagacattagtaagtgatttgacatatgtaaaagtcgcaggaacatggcattacatatgtttatttatagatttatttaatagagaaattgttggttacagtgcaggtaaaaataaggacgcaaatttagtatcaaaagcaatcagcagaataaatcataatcttgaacaaatcaaactattccacactgatagaggcaaagaatttgataatcatttgatagatgaagtcctagaaacatttaaaatcaaacgttcattaagtaccaaaggttgtccttatgataacgcagttgcggaagcaacgatgaaagcaatgaaaaccgaatttgtaaaacaaatgcaatttgaaaacttagaacagttaaaaacagaattatttgattatgtaaattggtacaacaattttagaccacattcttcattacagtatttgacgccagtggcatttaaaaatctacacatgaaaactgtctaa

SEQ ID NO: 408404 - DNA, 516 bp, Staphylococcus aureus
atggacaatagctttttagaaagcctaaaagagattttagaaccatatgatgatatagaatcaaataaagatggttttgtgtttggtggatatatagattggcctagtttcgttgattacgaagatttccaagttgaagaagtaatgagtttattagggttggacataccatttgggagttctaaaaatccgtttgaattttatgaaattttaaaggttatacaaaatattgaaaaaggattatacgaagctatttgtgatgaagcaattattataaaggaagatgaagaaattagtacagaggattttatagattcaattatggattataaggttcaaatccctacagtggataggttgaagagttcaataacagaattatttgaaaagtacgaaattcctcaaggtatacaatacgagtatgatgaaggaatgccagaatcatctaaatactggtcactagaaatggatgaagacctttattttattaaagaaataaattttaatgagtgttga

SEQ ID NO: 408405 - DNA, 213 bp, Staphylococcus aureus
atggcaaaatcatgcttgcatatacttactaataatgaatatgcgacaacgcgttgccaagatggcatagtcttattttggccaattgacggggaaatcgaactacaaaaatttcgtaaaagtaaaataattgaagatgatatatatatattattaatcatctggatgtatttagtattaagaataataaaaaaacgatcatgttgtatttga

SEQ ID NO: 408406 - DNA, 264 bp, Staphylococcus aureus
atgggtattccgattgaaaaatcttttaatttaatgagtgattttaagctaaatgacaaagaactcaccgaactaatgacattgtttagagaaaattataaagaaactgaagcaaaacatttaaaaatatatgacggaatgcaagaacagctcaaaacacttcatcaaaaccataagttattcgttgtttctagtaaaaaaacaaatgtattagaaagaaatctttctaaattaggtgttgataatctatttgttgaagtataa

SEQ ID NO: 408407 - DNA, 1374 bp, Staphylococcus aureus
ttgttgaagtataaagtaacgaattataaaccttctcctgatggaattatatatatattacaaaaatatgacttacataacaaagacactatatatgttggagatgctgtttttgatattaaaatggctaaaaatgccaatattgattcttgtgctgtaacttggggaagtcatagtattgaagtattaaacactgaaaatccaaattttataattaataatgttaaagaacttaattttattgtaactttgattggctttttcacaatgtttattgttggtgtttcagacttaattgttgtaggaatgttaaatgaaatgagtaaagaatttcatgtaagtaatgctttaataggtcagttggtaacattgtatgctgttgctttttcaattctaagccctctcttaacaaaggtaactagtcaaattaatgacaaaaaattattagtatcctgtttaatactttttattattttcagcatgcttacaactgtaatgaccaattatttctttctatgtattgttagaatctttatggcgggcatcgcttcattaatcactgtaaaattaatgtctactggagcaaatattgttccagtagaatacaaagcatcagttatcgctaacatatacgtaggctttagtgcagcaaatatacttggtatacccataggtacattaattgcttcccattacaattggaagattccgttttatatcattgcgattatcacttttttatgtctactaggtattatgttatttatcccgaataaatcacattatagtattaataatcattctaaataccaattagtaaatttcagaggcacattaatcatgttgggctttttattaatcatgatgatatctaatagcatgttatttacatatatagagcctttagtaaaaagtaaaggtcatagcatctggatagtaagtttgtgtttatttttctcaggtattgcaggtgttttaggttcaaaattaggaaataatttaactgaaaagaaaggctataggattgctggaaatatcattataattgtctatattatttctattatgagcatcttattgactggacaaaatgtcatacttttaattttatctatatttacatggaatttatttcattggggaacaaatccaacagttcaatatgctttacttaaatttttaaaaggcgatccaagtcaaatattgagctatgatatttcaatattaaatttaggaatcggattaggatcattaattggtggtatattattttctatcgataatcagttcaacttatcaattgttgttgctatgatattagcaatggtttcatctatattattaaaaacagctgttcatacagagaaaaattaa

SEQ ID NO: 408408 - DNA, 2403 bp, Staphylococcus aureus
atgagtttggtttatctattaattgctatactagtaattatggcgatgatattattaacatctaaacgtagagcaatggctaaatatgcaggatacatagcgctgactgcacctgtaatagcatctatttattttttgttacaagttccatcagtaattaaacagcattatttgtctgtttccattccgtggatgacctcattagatattaatgtagatttacgtttagatggtttgagtttaatgttttcccttattatttcccttattggaatcgctgtattcttctatgcaacacaatatttatcctctcgtaaagataatttaccaaggttttacttatacttaacgctatttatgtttagcatgctcggtattgtattagctgataatacaatattaatgtatgtgttttgggaactaactagcgtatcatcatttctattaatttcatattggtataacaacggagatagtcaatttggtgcgatgcagtcatttatgattacagtatttggtggtttggcattattagttggttttatcatgttgtatatcatgacaggaacgaataacatcacagagatattaggacaagcagatcatattaagaaccatgctttatttatccccatgattatcatgtttttattaggtgcatttacaaagtctgcacaattcccatttcatatttggttaccaagggcaatggcagcgcctacacctgtaagtgcatatttacattcagccactatggttaaagctggtatctttttattacttagatttacacctttgttaggtctaagcaatatgtatatttatatcgtaacctttgtcgggttaataactatgttatttggatcaatcacagctttaaaacaatgggatttaaaaggaatcctagcatactctacaatcagtcaacttgggatgattatggctatggtgggtataggtggcggatatgctcaacaccaacaagacgcaatagcatctatttatgtatttgtgttatttgcagcattgttccatcttatgaatcatgcaattttcaagtgtgcgcttttcatgggtgtagggattttagatcatgaagcaggttcaagggacatacgaattttaagtggcatgcgtcaattatttccaaaaatgaatcttgttatgatgattgcggcgctatctatggctggtgttccatttttaaatggatttttaagtaaagaaatgttcttagatgctttaacacaaactggacaattgtcccaatttagtttgatttcaatgattatcatcgtatgtatgggtgttattgctagtatttttacattcacatatgcactttacatggttaaagaagtattttggactaaatatgattctaaagtgtttactaaaaaaaatatccacgaaccatggttgtttagtttaccctctcttatattaatggtgctagtacctgtaatcttttttgtgccaaatatatttgggaaggggattatcgttccagcattaagaggtgtatcaggtggtaatcatcaaattgatccattggtaccacatgtttcgcaatggcatggatttaacataccgcttcttttaaccatcatcattattttattgggtagtgtactagcaatcaaagtagattggaaaaaagtgttcacaggtaaaattagacaaatttcagtttcaaaagggtacgaaatggtttaccgacaatttgaaaagtttactacgaagcgatttaaacgtgttatgcaagatcgtttaaatcaatacattattatgacactgggcatatttatggtaatcatcggatacggttatattcgtataggactaccaaaagttcatcagttacatgtttccgaatttggaccgttagaagttatattagcaattgttacagttatcattggtttgtcattaatatttatacgtcaacgactaaccatggtcattttaaatggggtcatcggttttgttgtaactttattctttatagcaatgaaagcacctgatttagcattgacacaacttgtagttgaaacgattacgacaattttatttattgttagcttttcaagattacccaacgtaccaaggtctaaagttaataaaaaacgagaaataattaaaatttcagtatctcttatgatggcgctgattgttgtgtcacttattttcatcgcgcaacaagcagatggattggcatcgatttctaatttttatcttagagcggataaattaacaggtggcaaaaacattgtgaatgcgatattaggagactttagagcattagatacattgtttgaaggtttagtattaattattactggattaggtatttacacattattaaattaccaagataggaggggacaagatgaaagagaatga

SEQ ID NO: 408409 - DNA, 849 bp, Staphylococcus aureus
atgataaacatcggattaacaggttggggtgatcactattcattatatgaagatttagaacgccaaaccgataaacttaaaacatatgctggacattttccggttgtcgaattagatgcgacatactatgcgatacaaccggaaagaaatatattgaaatggataaaagaaacgcctgatacatttgaatttgtggtcaaaattcatcaagcactcacattgcatgcagactacaaaacatttgcagatacaaggcaagaactatttgatcaatttaaaaatatgttagagcccttacatacacagaaaaaattagcaatggtattagttcaatttcctccgtggtttgactgcaatgcacaaaatatcaaatatattttgtatgtaagacagcaattacaagcatttccaatgtgtgtagaatttaggcatcaatcatggtttagtgatgcatttaaagaacaaacattggcatttttaacagaacatcagatcattcatgcagtagttgatgaaccacaagtgaaagatggcagtgtacctttagtcaatcgaatcacaaatgaaattgcgtttgtacgttatcatggacgtaatcattatggttggactaagaaagatatgtcagatcaagaatggcgagatgtacgctatttatatgattataatgagcaagaattaatagacttagcacaaaaggcacaaatattagcgcaaaaagctaagaaagtttacgtcatatttaacaataattctggtggtcatgcagcaaataatgccaaaacatatcagcgattattgaatatagaatatgaagggttagcaccacaacaattaaaattattttaa

SEQ ID NO: 408410 - DNA, 165 bp, Staphylococcus aureus
gtgaaaccaatgagtgctactaaagaccatcacaataaagccaaagcattaccagaaacaggtagtgaaaataacggctcaaataacgcaacgttatttggtggattattcgcagcattaggttcattattgttattcggtcgtcgcaaaaaacaaaacaaataa

SEQ ID NO: 408411 - DNA, 639 bp, Staphylococcus aureus
atgttgctatgtgaatctaaagttatcaacaaaaatcctaagtatagagttattaaatatggtgatgaatatttaatgattgatttagtaagtacctggttaactttatttcttcctatgattaattggttaattccaaaaaaatatgtcaaaatcagtaaaaaagaatttgacgatttaaacattgtcaaacctgttaaaaataaagctttttggccagttgcaggtagtactattttgttcggagttacgtttagaaaatatattccttcacttaatattcaattagagaaaaacatggtgattgtaatatgttgtgcaatatttctgggtgttttaatactttttttatttctgaatcgtaagctaagattggaaatttataataataactctagtaaagggaaaataattttatttccttcattaaaaaacttttgctttacaatattttattattttttatttggcggtctttcaataatggctctaagtatgttattaactttaaatcctcaaaatataataggctttattggttggttggtaatgactgcaggtttctttctgttaaacatgtcatcgattattgacaaaaaaatttatgtattatctaaaactaacacggtggaaaaatga

SEQ ID NO: 408412 - DNA, 270 bp, Staphylococcus aureus
atgtattatctaaaactaacacggtggaaaaatgatggtttagctggatttactgcgagttctgtttcgtcaatacttgtatattggaccaatcaaagaaatgaatttggaataaaaggtaaaaacgattggataggacataaactagacgatggtatcgatagtgttaaaaaatctacagaaaaagccgtagatagtgttgggaatgttgttggtgaaggttcaaaaagtatttctaatcatataagccctaagaaatggagctggtaa

SEQ ID NO: 408413 - DNA, 228 bp, Staphylococcus aureus
atgttgctatgcgaatctaaaatcatcaataaaaaccccaaatatagaattattaaatataatgatgaatacttaatggtcgatataataagcacttggattagtttattttttccatttatcaattggttcatcccaaaaagatatgtcaaaatcagtaaaaaagaatttgacgatttaaatattgttaaacctgctaaaaaatgttttttggccagttgcaggtag

SEQ ID NO: 408414 - DNA, 888 bp, Staphylococcus aureus
gtgaagaaatcgttaattgcttttattttgatttttatgcttgttctgagtggctgtggtatgaaagataatgataaacaaggtagcgacgataatggctcgtctaaatcgccgtaccatagaattgtttcgttaatgcctagtaatactgaaattttatatgaattaggattaggtaaatacatagttggtgtttcaacggttgatgattatccaaaagatgtgaaaaagggtaagaaacaatttgatgctttgaatctaaataaagaggaacttttaaaggcaaagccagatctaattcttgcgcatgagtcgcaaaaggcaactgctaataaagtattgtcatcattagagaaacaaggcatcaaagtagtgtatgttaaagatgcacaatcaattgatgaaacttacaacacatttaagcaaattgggaaattaacgcatcatgaaaagcaggctgaacaacttgttgaggaaactaaggataatatcgataaagtcatagattcaattcctgctcatcataaaaaatcaaaagtatttattgaggtttcatcaaagcctgaaatatatacagcagggaagcatacatttttcaatgatatgttagaaaaattagaagcccaaaatgtttatagtgacattaatggttggaaccctgtaacgaaggaaagtattattaaaaagaacccagatatattaatttcgacggaagctaagacaagatcagattatatggatatcatcaaaaaaagaggtggattcaataaaattaatgctgtcaagaatacacgtattgaagttgtaaatggtgatgaagtatcaagaccgggtccacgtattgatgaaggattaaaagaattaagagatgcaatttatagaaaataa

SEQ ID NO: 408415 - DNA, 717 bp, Staphylococcus aureus
atgcgtattaacgataaaattttactagaaaatatagaagattactttaatcataaaggtttatcaccgcatttgattgatgatattaaagagaaagtaattactgatataaaaaattctgaaaagaaagatcaagattatattgaatataaaagaaaatctccagcacaaatcatattaatgattcaaaggaatttgtttgctttacaaatgaatccagttattttctttattataaatttcattctcatatcctatttatatgataaacagtatgttcagtttcaagctattactggaatgagtctattttattgtttagtgatttttccaatgactattgttgtatacctaagggtgtctcaaaagaattacttgcgtagtaataaaatagaaatggttatgggtacaattatcgctatcatatccctgttattaattatattacaagcatttaatattacttggggcgttataccaattacaaattttggacatcaatttttctttttcattggtattattttagtaattgccggcatattttataagcgacttgagttttcgggaatcggcttattattttgtcaaaaaaccgtagatgcaatgattcataatccacaatcagcccagactttttcattaattatatggatattattagtagttctagttatatatttcacaattagattatcttcacgtacaagattataa

SEQ ID NO: 408416 - DNA, 489 bp, Staphylococcus aureus
atgttcataataaagtctattttgtatagactgatacaaatgatagttgttttatttgttatttctacacttgcattcattttaatgaaattatcaccaggcaatcctgttgataaaatattacatcttgatgtagcacaagtgtcgacggaacaaataaatgcaaccaaagataaattgggattaaatgattctttattggtacagtggtggcattggatgaatcatttattacattttaatttaggaaaaagttttgaatcaaaagaaccggtaacacagatattattcaactatgcacccataacactactcatatctttttcaacattagtagtgtcattatgcatatctataccgctcggcattatagcagccaaacgatttcataagttatctgacaaagtgattagagtgatctcaactctatcaattagtttacagcgttctttatcggtattattttattatttattgtcacaaatttaa

SEQ ID NO: 408417 - DNA, 570 bp, Staphylococcus aureus
atgatttcacagcaatcaatgatttctgttatcaaaccaattcatacagatacatatcatcatatcttaaaaataattcaaaagtatgagttagattatattattgatgatgattggaattatgctgcacaacttgacgctgagaacgctatttttgagcgtttagatccacataagctggccagttgtattgatgttgcaaatatcgacacaccgatcaagattattttattaaatatagaaccgacacaaattacaactatattagatgagctcaataaataccatcaagaattggaaatgattcaccattcaaatgaatataacattgatataacagcgcaaaatattaataaatatactgcattacaatatatatttgatgcagatgttaaatatatagcatttggtaatgatcacaatgatattgtcatgttacaacatgctagtaatggctatattataggaccatcagaagcatacacacacgcaatattgaaacttgataaagtcaaacacatcgataataatgcactagctatttgcaaagtcttaaaatcatataaataa

SEQ ID NO: 408418 - DNA, 1215 bp, Staphylococcus aureus
atgaataaacaaatacaaacagaagcagatgaattaggtttctttggtgaatacggagggcaatatgttccagaaacattaatgccagcaattattgagttgaaaaaagcttataaagaggcaaaagcagacccagagtttcaaagagaacttgaatactatttatcagagtatgtaggacgcgcgacgccacttacatatgctgcatcgtatactgaaagcttaggtggcgctaagatatatttaaaacgagaggatctaaatcatacaggcgcccataaaattaataatgcgttaggtcaagcgttgctcgctaaaagaatgggcaagaagaagcttgttgctgaaacaggtgcgggtcaacatggtgtagctagtgctacggttgctgcattatttgatatggaacttgttgtctttatgggaagtgaagatattaaaagacaacaacttaatgtatttagaatggaattacttggtgcaaaggttgtggcagttgaagatggtcaagggactttatcggatgcagttaataaagcattgcaatattgggtaagtcatgtagatgatacgcattatttattaggttctgcattgggtccagacccattcccaacgattgttagagattttcagagtgtgattggtaaagaaataaaatcacagatattgaagaaagaaggtcgacttccggatgcaattgtagcatgtatcggtggtggctcaaatgcaatcggtacattttatccatttattaaagatgatgttgctttatacggtgttgaagccgcaggtcaaggcgaggatactgataaacatgcacttgcaattggcaaaggatcacctggcgtattacatggtactaaaatgtatttaattcaagatgaaggtgggcaagtgcaactagcacattctatttcagcaggacttgattatcctggtattgggccagaacattcttattaccacgacattggtagagtaacttttgaaaatgcaagtgatacacaagcaatgaatgctttaatcaactttacaaaacatgaaggtattatacctgcaattgaaagtgcacatgcactgagttatgttgaaagactagcgcctacgatgtcgaaagaagatattattgtagtaagaatttctggacgtggcgataaagatatggaaacaattagacaatatatggcagagcgaggtcttgcaaatgactaa

SEQ ID NO: 408419 - DNA, 774 bp, Staphylococcus aureus
gtgtgtggtacaggtggtgacaagtctaatagcttcaatatatcaactactgtcgcttttgttgtagcaagtgctggcgtaaaagttataaaacatggaaataaaagtgtgacttcaaattcaggtagtacggatttgttaaatcaaatggacattcaaactacgtctgttgatgatacgccaaagcaattagatgaaaaaaacctcgtgtttatcggcgcaacagaatcgtatccaataatgaaatatatgcaaccagttagaaaaatgataggtaagcctacaatattaaaccttgtaggtccattaattaatccctatcacctaacgtatcaaatggtaggtatctttgaccctacaaaactaaaactagttgcaaagacaattaaagatttaggtagacgacgtgcaatcgtattacatggtgcgaatggtatggatgaagcaacgttgtctggtgataatttgatatatgaattgactgaagatggagaaatcaaaaattacacattaaatgcgactgattatggtttgaaatatgcacagaatagtgattttaaaggtggttcgcctgaagaaaacttagcaatcacacttaatatcttgaatggtaaagatcagtcaagtcgccgtgatgttgtcatacttaatgcaggtttaagtctatatgttgcagagaaagtggatagcatcgcagaaggcatagaactcgcaagcactttgatagataatggtgaagctttgaaaaaataccatcaaatgagaggtgaataa

SEQ ID NO: 408420 - DNA, 243 bp, Staphylococcus aureus
atgacattactaacaagaatccaaactgaatctatattgcttgaaagtgacattaaggagttaatcgacatacttatttccccaagtatcggaactgatataaaatatgaattactgagttcgtattcggaacgagaaattcaacaacaagaattgacatatattgtacgtagtttaattaatacaatgtacccacatcagccttgttatgagggcggtatgtgtgtgtggtacaggtggtga

SEQ ID NO: 408421 - DNA, 1407 bp, Staphylococcus aureus
atggatgtattctataaaaaaataaaagcaaatgtaacacctgaagttttagcacaacttcattccaagaagatcattttggaaagtacaaatcaacaacaaactaagggtcgctattctatagtgatatttgatatctacggtactttaactttagataacgatgtattatcagtaagcactttaaaagagtcgtatcaaatcactgaaagaccgtatcattatttaacgactaaaataaatgaagactaccataatattcaagatgagcaacttaagccaataccgtttatatctggatatgttgggacgtgtagctttgatttagtaagacatgaatttcctaaattgcaatcaatacaattagaggatcacaagcaacacgatgtacggttatatatggttgaacaagtttatgtatttgaccattacaaagatgagttatatatcatcgcgacgaatcaattttcaaattcaacgaaatcagatcttgagaatcgagttaataagtctatcgaagacttaactaaaatccaaccattcatgcctacacaagattttgattttaaaactaaagaaattcaatcaaatatttctgaagaaagatttatcgaaatgattcagtatttcaaagagaaaataacagaaggggatatgttccaagttgtgccatcaagaatttacaaatatgcgcatcatgctaatcagcatttaaatcaacttacgtttcaactgtatcaaaatttaaaacgacaaaacccaagtccatatatgtattatcttaatatcgatcaaccctacattgtcggtagttctcccgaaagtttcgtaagtgtcaaagatcaaattgtaacaactaatcctattgcaggtacgattcaacgtggtgagacgacacaaatagataatgagaatatgaaacaactacttaatgatcctaaagaatgcagtgaacatcgtatgcttgttgatttagggcgtaatgatattcatagagtaagtaaaataggtacctcaaaaattactaaattaatggttattgaaaaatatgaacatgttatgcatatcgtaagtgaagtcacaggtgaaataaatcaaaatttatcgccaatgacagttattgcgaatttattaccaacaggtaccgtttcaggtgcaccaaaattacgtgcaatcgaaagaatttacgaacaatatccacataaacgtggcgtttatagtggtggtgttggatacataaattgtaatcataacttagattttgcattagcaattcgaacgatgatgatagatgagcagtatatcaacgtagaagctggttgtggggttgtatatgattctattcctgaaaaagaactaaatgaaacgaaattgaaagccaaaagtttattggaggtaagcccatga

SEQ ID NO: 408422 - DNA, 1092 bp, Staphylococcus aureus
atgacaacagttttatttgttgggcttggattaattggtggaagtcttgctagcaatataaaataccataaccctaatactaatattattgcatacgatgcagatacttctcagttagataaagctaaatcaatcggtattattaatgaaaaatgtttaaattatagtgaagctattaaaaaagtcgatgtaattatttatgcaacacctgttgctatcacaaataaatatcttagcgagcttatacatatgccaactaaacctggtgttattgtttctgatactggtagtactaaagcaatgatacagcaacacgaatgcagtttattaaagcataatattcatttagtcagtggtcatccaatggctggtagtcataaatccggtgtactaaatgctaaaaagcacttatttgaaaacgcttattatattttagtctacaatgagccaagaaatgagcaagcagcaaacacgttaaaagaactgttatcacctactcttgctaaatttattgtaactactgctgaagaacacgactacgtaacaagcgtcgtaagtcatttacctcatatcgttgcatctagtttagttcatgttagtcaaaagaacagtcaagaacatcatttagtcaataaacttgcagctggtggttttcgtgatatcactcgtatagctagtagtaatgcacaaatgtggaaagatatcaccttgagtaataaaacgtatattttagaaatgattcgacagctaaaaagtcagtttcaagatttagaaagactaattgaaagcaatgattctgaaaaattgttatcattttttgccgaagctaaatcgtatcgtgacgcactgcccgctaaacaactaggtggactaaatactgcgtatgatctatatgtagatattccggatgaatcaggtatgataagcaaagtgacttatatcctaagtttacataatatatctataagcaacttaagaatcttagaagtacgcgaagatatatacggtgctttaaaaattagtttcaaaaatcctaccgatcgagaacgcggtatgcaagcattgagtgattttgattgttatatccaataa

SEQ ID NO: 408423 - DNA, 1263 bp, Staphylococcus aureus
gtgtataattatcatttattagaagatagggatgttctatgtattgatcaaaaaagtttttttgcgagtgtttcttgtattgaaaaggggctagatccattagaaacaaagttagctgttgttgcagatactaagcgtcagggttctgtagtattggctgcgacacctaaattaaaagaattaggcatcaagacaggatcgcgattgtttgaaataccacatagaaatgatatttacattatcaatccaagtatgcgtaaatatcttaatgtttcagttgctatttctaagattgcattgcgttatattccacctgaagatttacaccaatatagtattgacgaattttttatggatgttactgatagctatcatagatttagttctacagtacatgcattttgcgaaagacttaaacgtgaaatttatgaagaaacaggcatttattgtactgtgggcattggttctaatatgttattaagtaaaattgctatggatgttgaagctaagcataatcaaaatggtatagctgaatggcgatatcaagatgtaccaacaaaattatggccaattcagcccttgagagatttttggggtattaatcgtcgaacagaagccaaattgaataaaagagggatttttactataggagatttagcaaaatatccatataaatttttaaaaaaagagttcggtattttaggtgttgatatgcatctacatgcgaatgggatagatcagagtaaagtacgtgaaaagcataagattagcaatccatcgatatgcaaaagtcaaatattaatgagagattatcattttgacgaagcaaaagtagtaatgcaagagttaattgaagatgttgctagcagagttcgagcaagaaaaaaagtggcaagaacgatacattttgcctttggctatagtgatgaaggtggtgtacataagcaatatactttgaaagatccaacaaacctagaaaaagatatttataaagtagtaatgcatttcgcagataaattatgtaataaacaagcactatatcgtacgctaagtatatctttgagtcaatttattaatgaggatgagcgacagttaagtctgtttgaagatgaataccaacgcaaacgtgacgaatgtctagctaaaacgatagaccaattacatttgaaatacagcaaaggtattgtgtccaaagcagtatcgtttacagaagcaggtacaaaacatggtagattaggtttaatggctggacataagatgtaa

SEQ ID NO: 408424 - DNA, 1554 bp, Staphylococcus aureus
atgtcagaagtaaaaaaggtagttaaacatgaacaacaaaagaaagaaaagacaaaaaagcaatacaagccattttggattgttatgagttttataatacttatagttgtactattactcccggcaccttcaagtctgccaataatggctaaggcagtactagctattttagcttttgcagttattatgtgggtaacggaagctgtatcatatccggtgtcagcaactttaattattggtttaatgatattacttttaggatttagtccagttcaaaatttaggggagaagctaggtaatccgaaaagtggcagtgctgttttagctggaagtgatcttctaggaacaaatcatgcattatcattagcatttagtggatttgcaacatcagctgtagctctcgttgcagccgcattatttttggctgctgctatgcaagaaacgaatttgcataaaagactagctcttttagtgctatcaattgttggtaataaaactagaaatatagttattggagcaattattgtttcaattgtacttgcatttttcgttccttctgcaacagctagagcaggggcagttgtaccaatcttgctgggtatgattgcagcatttaaagtttctaaagatagcaagttagcgtctttattaataattacttcagtacaagctgtgtcaatttggaatattggtatcaaaacggcggcagcacaaaatatcgtagcgattaattttataaaccatcaattaggatttgatgtttcatggggcgagtggttcttatatgcagcgccttggtccatagttatgtctatagctttatatttcatcatgattaaagtgatgcctccagaaattaatacaatagaaggtggcaaagatttaataaaagaagaattgcataaacttggccccgttagcgcacgtgaatggcgtttaattgttatatcgatgttattattactgttttggtcaactgaaaaagtattacatccgattgactctgcatccattactattattgctttaggtgttatgttaatgccgaaaattggtgtcatgacatggaaacatgttgaaaataaaataccatggggaacaattatcgtgtttggtgtaggtatttcactaggtaacgttcttttgaaaacaggagcagctcaatggttaagtgatcaaacttttggtgttttaggtttaaaacatttacctattatcgcgacaattgcacttatcacgctttttaatatattgattcatttgggctttgcgagtgcaacaagtttatcatcagcgttaatacctgtttttatttcgctaacctctacgttacacttaggagaccagtctataggatttgttttaattcaacaatttgttattagttttggtttcttattacctgttagtgcacctcaaaatatgttggcttatggcactggtacttttactgtgaaagatttcttgaagacaggtataccattgacaattgtagggtatattctagtgatagtttttagtatgacttattggaaatggttaggtttgctttaa

SEQ ID NO: 408425 - DNA, 1374 bp, Staphylococcus aureus
atggcaatagctgtgttattaaatcgaatgtttcgaatggaacacaatccattatttgaatatatttatcaacaaaaagaagacattgatgcatgttattttatcattccggaagaggacatgtcttcagcttctgatttgaaagcacagttttatcgcggtactttgcagcgcttttaccaatcgttgcacgcagaaaagctcacaccttatgtcatgtcttatgacgatatcatttcattttgtaaagaaaacaatatctctgaagtagtgattgcaggtgatattatgagttatcaccttgaagaatatgatattttacatcaacgctctttattcaatgaagcacgcattgccgttactttgatacgtgggaatcattactttaaagcgagtaaaacaatgaatcaacaaggggagccatacaaagtttttactagtttctctaaaaaatggcgaccttacttgaggcatagagacgtatatcactatgatttaaaatcattcgaagacttcgtcattgcatcacctgatgatttagtgtttgatgacatagcatttggatcctcacaaataattgaacagaataaatggcaacattttttagatcaagatatacagaattacgaaagcggaagagactatttacctgaagtgttaacaagtcagctaagtgttgctttagcatatggattattagatattattgaaatttttaatgatttattggcgcgttatgatgaggatgaggcaaactatgaagcatttatacgtgaactcatttttagagaattttattatgtgttaatgacacagtatccagaaacctcataccaagctttcaaatctaaatatcgacagataaaatggtcgcaaaatgaagcggattttaatgcatggtgcgaagggcaaacaggatttccaatcattgatgcagcaataatggaattgacacaaactggttttatgcacaatcgaatgagaatggttgtgtcgcaatttttaaccaaagatttatttatagattggacatggggagaaaaattctttagaaagcaccttattgactatgatgcagcatcaaatattcatggatggcaatggtctgcttctacaggtacggatgcagtgccgtattttagaatgtttaatccaataagacagagtgaacgctttgatcctaaagctttgtatatcaaaacatatcttccgatttttaatcaaattgatgctaaatatttgcatgatacacaacgcaatgagtccaacctttttgaactggggattgaattaggtcgtcattatccaagacaaatggtagatcatcaagaaaaacgtacacaagttttagctgcatttaaagcgctagactaa

SEQ ID NO: 408426 - DNA, 978 bp, Staphylococcus aureus
gtgattaagtttaaaaatgtaactaagcgttatgacaaacatgttgctgtcgataacattagtttcgatattaatgagggtgaattctttgtactaattggaccttcaggttgtggaaaaactacgacattaaaaatgattaatcgactcattcacttaagtgaaggttatatttattttaaagataaaccaataagtgattatccagtatacgaaatgcgttgggatattggatacgtattgcagcagattgcattattcccacatatgacaatcaaagaaaatattgcacaagtgccacaaatgaaaaagtggaaagaaaaagatatagataaaagagtagatgaattacttgaaatggttggattagaacctgaaaaatataaaaacagaaaacctgatgaattgtcagggggacaacgacaacgtgtaggagttatacgtgcgttagcagctgatccaccagttattttaatggatgaaccgtttagtgcattagacccaatcagccgagaaaaacttcaagatgatttaattgaattacaaactaaaattaagaagacaatcatatttgttacacatgatattcaagaggcgatgaaacttggtgataagatttgtcttttgaatgaaggtcatattgaacaaattgacacaccagaaggatttaaaaataatcctcaaagtgaatttgttaaacaatttatgggtagtcatttagaagatgatgcgccatgtgttgaagagaatgcgattatccgtgacttggatattatgaaaccaatcgatgaggttacatctatgagcgcttatccaattgtttatgacaatcaacaaattgaagtattgtatcaacatttatcagagagcgagcgtgtcattgtcatgcaagaagatggcgtaggtcaatatgttattgataggaaagatatcttcaaatatttgtcccagaaaaaggaggtagctcaacatgactaa

SEQ ID NO: 408427 - DNA, 1059 bp, Staphylococcus aureus
atgaaagaacaacttaatcaactatcagcatatcagcctggtttatcaccaagggcattgaaagaaaagtatggcattgaaggagatttatataaacttgcatcaaatgaaaatttgtatggaccatcgcctaaagttaaagaagcgatatcagcacacttagatgagttatattattatcctgaaacaggatcaccgacattaaaagcggcgattagtaaacatttaaatgtagatcaatcacgcattttatttggtgcgggattagatgaagttatattaatgatttctagagcagtattaacgccaggggacactattgttacaagtgaagcgacattcggtcaatattatcacaatgcgattgttgaatcagctaatgtgatacaggtacctttaaaagatggtggcttcgacttagatggcattttaaaagaagttaatgatgacacgtcattggtatggttatgtaatccaaataatcctacaggtacgtattttaatcatgagagcttagattcgtttttatctcaagtaccatcacatgttccggtactcatagatgaagcttattttgaatttgtgacagcagaggactacccggatacacttgctttgcaacaaaaatatgacaatgcattcttattacgtacattttcaaaggcgtatggattagcgggtttacgtgtaggatatgtggtagcaagcgaacatgcgattgaaaaatggaacatcattagaccaccatttaatgtgacacgtatatctgaatacgcagcagttgcagcacttgaagatcaacaatatttaaaagaggtaacacataaaaatagtgttgaacgtgaaagattttatcaattacctcaaagtgagcatttcttaccaagtcaaacgaattttatatttgtaaaaacaaagcgggtaaatgaactttatgaagcacttttaaatgtagggtgtattacgcgaccatttccaactggtgttagaattacaattggttttaaagaacaaaatggtaaaatgttagaagttttatcaaactttaaatacgaatag

SEQ ID NO: 408428 - DNA, 135 bp, Staphylococcus aureus
atgtcactcgaagcctttcatgtagcaaataaaatgcatatactggggccccaacaaagagaatttcgaaaagaaattctacaaacaatgcaagttggggcggggccccaacataaagaaatactttttctttag

SEQ ID NO: 408429 - DNA, 1176 bp, Staphylococcus aureus
gtgttagattggtttcaactagcaaataataaagaaaataaaacaattcaactcagacgttatttacaccaatatcctgagttatcttttgaagaatttcaaacacatgattatattgttaaccaattaagccagttatcttgtgatattgaaactcctatcggccgcaatggtatcaaagccacatttaaaggtttgggcacaggacctaccattgcattaagagctgactttgatgcgttacctgtcgaggaattaaacgatgtgccttataagtctaaaaatccaggatgtatgcatgcgtgtgggcatgatggtcatacagcaattttacttaccgtagcagaaattttagatgaacataaacatttattagaaggtaatgttgtattaatattccagtacggtgaagaaatcatgccaggtggttctcaagaaatgattgatgctggatgtctggaaaatgtagatagaatttacggtacacatttatggagtggttatcctactggaactattcattcgcgtgcgggggcaatcatggcctctccagatgaatttagtgtcacaattaaaggtcgtggcggtcatggtgccaaacctcatgaaaccattgacccaatagtaatcatggcagagttcattttaagtgcacaaaaaataatttcacgtacgattgatccagttaaacaagctgtactttcatttggaatgattcaagcaggcaccacagatagcgttattcctgatcaagcattttgtaaaggtacagttcgtacatttgactcgaaaatacaagaacatgtcatgcataaaatggataagctactacaaggtttggcaattgcaaatgacattgaatatgacttgaattatattaaaggatacttgcctgtccataacaacgagaaagcatatcaagttattaaagaagcaacaaatgacttacatgtacgctttaatgaatcagatttaatgatgattggagaagatttttcacattatttgaaagtacgaccaggtgcattctttctgactggttgcggtaatgaaagtaaaggtattacagcgccacaccataatcccaaatttgatattgatgaaaaatcattaaaatacgctgtagctgtatttttgaaaatcattgaattagagcaagtatttaaaacaaattaa

SEQ ID NO: 408430 - DNA, 804 bp, Staphylococcus aureus
gtggaagcattaaatgattataattacgttttatttgtaattgttcaagtttcattaatgttctttatatctgcatttattagtggaatacgatacaaaaaatcagattatatatacattattggaatagtgttatcttcagtatatttctttgacaaaatcagaagtatttcactagttgttataacgatttttataataatttttctctattttaaaattagactatattctgtatttttagtaatggttactcaaatcattttatattgtgcaaatttcgtttatatcattattttttcatacattataacaatttcacacagcgtgtttatagttctaccaatctttttggtagtgtatgtatcaatttcttatgcacttgcctacattttaaatagaatattaaaaaggataaatggtacatacctttctcttaataaaaaattccttactgttataactattgttatagtaataacattctctttgttatttgcatattcgcaaattgatgcgagtgatgcatcaacaatcaaacagtattcgcttttattcttgggaattattatattactgagtatcttaatttttatttattctcaatttactcttaaagaaatgaaatataaacgtaatcaagaagaaattgaaacctattatgaatacacattaaagattgaagcaattaataatgaaatgcgcaagttccgtcatgattatgtcaatatcttaacgactctttcagaatacattcgtgaagatgacatgaccggtctttcaataaaaatattgtacctatga

SEQ ID NO: 408431 - DNA, 141 bp, Staphylococcus aureus
atgaaaaaattactcaacaaagttattgagcttttagttgactttttcaacagcatcggttacagagcagcctatataaattgtgattttttattggatgaagctgaagtaccaaaagaattaactcaattacacgaataa

SEQ ID NO: 408432 - DNA, 618 bp, Staphylococcus aureus
atgataaaagattgtactaaatcgtataataacagtgaggagagtggtgtaaaattgaattattttgataacaaaattgaccagtttgccacgtatcttcaaaagagaaataacttagatcatattcaatttttgcaagtacgattagggatgcaggtcttagctaaaaatataggaaaactgattgttatgtatactcttgcctatattttaaacatttttatcttcactttaattactaatatatcgttttatctaattagaaggtatgcacatggtgcacatgcaccttcatctttttggtgttatatagaaagcattacactttttattgttctacctctattagtactacattttcatattaatgaaacactaatgatgtttttagcattattaagtgttggcgtagtgattaaatatgcacctgcagctactaagaagaagcctatcccggcaaggcttgtaaagcaaaaaagatatttttcaattataattagtacaattcttttcattatcacactttttgtaaaggaaccatatacccaatttattcaactgggtattattatacaagctattacattactaccaatatactattcaaaggaggactaa

SEQ ID NO: 408433 - DNA, 786 bp, Staphylococcus aureus
atgaaagtccaaatttatcaattaccgattatttttggagatagttctaaaaatgaaactcaaataacgcaatggttcgaaaaaaatatgaatgctgaagtagatgtagtcgttttacctgaaatgtggaataatggctatgatttagagcatttaaatgaaaaagcagataataatctaggacaaagtttttcatttattaaacatttagctgaaaaatataaagtcgatatcgtagctgggtcagtttctaacattagaaacaatcaaatatttaatacagcttttagtgtgaataaaagtggcaaactgattaatgaatacgacaaagttcatttagttcctatgttaagagagcatgaatttttaaccgctggcgaaaacgtagctgaaccctttcaattgtctgacggtacttatgtgacccaacttatctgttatgatttacgttttccagaattattaagatatcctgctcgtagtggtgctaaaattgcattttatgtggcacaatggcctatgtcacgtcttcaacattggcattctttactaaaggcacgtgcaattgaaaataatatgtttgtcattggaactaatagcactggattcgatggtaacacagaatatgctggtcattcgatagttataaatccaaacggagatttagttggagaattaaatgaatccgcagatattttgactgtagattttaacttaaatgaagtagaacagcaacgcgaaaatatacctgtatttaaaagtattaaattagatttgtataaataa

SEQ ID NO: 408434 - DNA, 627 bp, Staphylococcus aureus
atgggtttatttaaaaaagataaaaaagcaatgacttttgacaacgcaatggaagaaagacgttcaatatataatttgaaagattcaatatcaattagcgatgacgaattagaatcaatgattgcacatgcagttaaacatgttccttcatcatttaattctcaatcaactagaattgttctcttattaaatgacaacaataataaattttgggataacacaaaagcaattttaaaagaagtcatgggagagaatcgtgatttcgagccaactgaacaaaaaattgataacttcaaacattcatacggtacaattttgttttatgaaaatcaagatgttgtaagtggtttacaagaacaaatgccaaactactatgataattttgcaatatggtcaactcaaacaaatgccatgcatcaatttgcaatttggactgcattagctactaaaggcataggtgcttcattacaacactataatccacttgttgatgagatgacttcaaatgaatttaatattcctaaaagttggaaacttattgctcaaatgccatttggtgatattcgtgaagctgctggcgaaaaaacatttaatccagtggaagatcgtttcgtaataaaaaaataa

SEQ ID NO: 408435 - DNA, 1215 bp, Staphylococcus aureus
atgtcatatcattggtttaagaaaatgttactttcaacaagtatgttaattttaagtagtagcagtagtttagggcttgcaacgcacacagttgaagcaaaggataacttaaatggagaaaagccaacgactaatttgaatcataatgtaacttcaccatcagtaaatagtgaaatgaataataatgagactgggacacctcacgaatcaaatcaagctggtaatgaaggaactggttcgaatagtcgtgatgctaatcctgattcgaataatgtgaagccagactcaaacaaccaaaacccaagtccagattcaaaacctgacccaaataacccaaacccaggtccgaatccgaagccagacccagataagccgaaaccaaatccggaaccaaagccagacccagataagccgaaaccaaatccggatccaaaaccagatccagacaaaccgaagccaaatccggatccaaaaccagatccaaatccgaatccgaatccaaaaccagaccctaataagccaaatccaaatccgtctccaaatcccaatcaacctggggattccaatcaatctggtggctcgaaaaatggggggacatggaacccaaatgcttcagatggatctaatcaaggtcaatggcaaccaaatggaaatcaaggaaactcacaaaatcctactggtaatgattttgtatcccaacgatttttagccttggcgaatggggcttacaagtataatccgtatattttaaatcaaattaatcaattggggaaagaatatggtgaggtaactgatgaagatatctacaatatcatccgtaaacaaaacttcagcggaaatgcatatttaaatggattacaacagcaatcgaattactttagattccaatatttcaatccattgaaatcagaaaggtactatcgtaatttagatgaacaagtactcgcattaattactggcgaaattggatcaatgccagatttgaaaaagcccgaagataagccggattcaaaacaacgttcatttgagcctcatgaaaaagatgattttacagttgtaaaaaaacaagaagataataagaaaagtgcgtcaactgcatatagtaaaagttggctagcaattgtatgttctatgatggtggtattttcaatcatgctattcttatttgtaaagcgaaataaaaagaaaaataaaaacgaatcacagcgacgataa

SEQ ID NO: 408436 - DNA, 1173 bp, Staphylococcus aureus
atggcaagttatgaaaaacgcggaaatacatggcgctatcgtatatcactaggaaaagacgcagaaacgggcaaatataaatatatttcaaactcaggttttaaacgcaaatcagacgctaaacatcacgctgaaatggttgagcgtcagttaagaaatggcgattatatcgcaccgtccacatctacatttaaacaggttgctgacgattggatatcacaatatgctaacgaagtaaaagtaagtagtgtcagagcacgcgagaaagccataaaccacgccatagaacgctttaacaataaaccaatacaaactatcaataaacatgaatatcaacgttttgtaaacgatataagcgcacagtatagcaagaattatgttgatagcattatagcctctacaaatatgatatttaagtacgcatacgatatgaaattaataagaataatgcctagcgagggtattaaacgacctaaaaagaaaattagtgtggaagaattagaagatactgagatacataaaaagtttcttgaaaaagatgaattatttcaattcctggaggttgctaaaaatcaccattcaccccaaaacagctttgaggtgttttgtacattagcatatacaggcatgcgtgcaggtgaattattggcattgaaatggtctgatatagactttgagaataacacaatcaatattacaaagacttattacaatccgaataacaataaaaagcaatttcaaatacttacaccaaaaactgaaagctcaatcggaaaaatttcagtggatcctcatgtgattaaattacttaaaaattataaaaccgacgtgcaggacacatggaaaaacgaattgtatgtagataataatttcgtttttactgatgttaacggctaccctcttgtaattaaaaaactacaattatggataaaagctatacttaaaaagactgacataactaataaacaaataagcactcattcatttcgtcatactcattgtgcgttacttatagaggctggtgtgcatattaaggaaatacaagaacgcttgcgccataaagatataaataccactatgaacatctacgctaagattacgaactcatacaaaaaagacgcttctcaaaagtttagtaaactcatggaaaacgtctcaaaagatttattttaa

SEQ ID NO: 408437 - DNA, 675 bp, Staphylococcus aureus
atgattagaaatagattgtctgaactactgtcagaaagaggactaaaaatatctcgtgttgcaaaagatgtaaaaatagcaagaagttcacttacttcaatggcacaaaatgattctgaaatgataagatatgatgctatagataaattatgtagttatctgcacatatctccttcagaattttttgaacataatccgatcaattttgactttacttttgatgaagaaccgaattataaaattaatgatgttttcgagggatttgaagtaactgcaaacattactcacgctttttcgattgaaaattttgactttgaaattttagtagacgtcgaattagataataggcaaaaattaaattttgacttagacgtctcatataaagaaactgaaaagataactaattcacaacatagatttattttcacgattaaaaatgaagatgaaaatatcggattaaaaaaatacgttgatagtttatctgcaggccttaaaaacttgttatttaaaaaaattaaccaaaagttaagtgggtatgtttctgaaataatagtaaaaaatatagacgatattgaagagctttttccaaataaaggcgaaaaaagtacgactctacataaagaaattttacaaactgatagccgtttatctagtgatatttttaaagaatattaa

SEQ ID NO: 408438 - DNA, 219 bp, Staphylococcus aureus
atgactattttagcgaatactagaaagtttaaagaagccatgttcttaaaaggctttaatttatctgatttatcacgtgaaacaggtgttggaatttcttatttaagccaaattattaatggtaaaaagattccaagccctaaattagctaagaaaatggcagaagttttacaagttgaggtaaatgaattatttgaatttgaagtaaaggaggcataa

SEQ ID NO: 408439 - DNA, 318 bp, Staphylococcus aureus
atgttcaacattaatattgatgaagatgaagcacgtgagttacttgagcaggctatcaatgcacgtgtggacgaattagcgaaagagaaatattttatgacttacaaagagttgtctaactatctgaatttaagtaagcctactattgaagaattacttattaataatggcatgaaatattatatggtcggatctacgtacagattcaaaaagtctgatgaagatgaattcatggaacagcttactgctcatatgaatatccagaataacgactttaaacaagtcaatatcaaaaagttattggaggcaaggcaatga

SEQ ID NO: 408440 - DNA, 156 bp, Staphylococcus aureus
atgaaaatctacttaacttatatctgcttagtttcattgttaacaatattattactagcaatatctaacatgtatgttgcttttagcgtttatgcttggctaataactttaggatgtaatttaacaggagagattacaacgtgcgaaaacaagtga

SEQ ID NO: 408441 - DNA, 558 bp, Staphylococcus aureus
atgaaaaggaaagtactagtattaacaatgggcgtactttgtgcgacacaattatggcaaacgaataatgcaaaagctttagtgacagagagtggcgttaatgatactaagcaatttactgaagtaacatcggaagaaaaagttataaaagatgctatttcgaaagtcaatgaaagctttatttactatccccaaaatgatttgaagggattaggtggagaacacaacgattacgaaaaaattacatatagcacttcttctaataatgttttagaattatcaatgagttcaaaatacgtaggcggtaaatcaggagctatggttggttatagtgaaatttactcatcacatttcacagaccgcgacaaacgtgctatcagacgtgatcatgttaaagaagcacaaaacttgattaatgattataaatatacgcaaatatatgaagactttgctaaagctactgcaaaggtaagtacacttagtcagtctcaccaaaattatttaaataaacaaattgataaagtgaataataagatagagaaaactgaaaaacgctaa

SEQ ID NO: 408442 - DNA, 1026 bp, Staphylococcus aureus
atgaaaaagaaattattagttttaactatgagcacgctatttgctacacaatttatgaattcaaatcacgctaatgcatcaacagaaagtgttgataaaaactttgtagttccagaatcgggtattaataaaattattccaacttacgatgaatttaaaaaagcaccaaaagtaaatgttagtaatttagctgacaacaaaaactttgtagcttctgaagataaattgaataagattgcagatccatcggcagctagtaaaattgtagataaaaactttgccgtaccagaatcaaaattaggaatcattgtaccagagtataaagaaatcaataatcgagtgaatgtaacaacaaacaatccagcttcaaaacaagttgacaagcaaattgttgctaaagacccagaggtgaatagatttattacgcaaaataaagtaaaccatcgtttcattactacgcaaacccactataagaaagttattacttcatacaaatcaacacatgtacataaacatgtaaaccatgcaacatcttctatccatcatcactttactattaaaccatcagaagcacctagatatacacacccatctcaatctcaatcgttaattataaatcatcattttgcagttcctggataccatggtcataaagttgtaacaccaggacaagctagtattagaattcatcacttttgtgctgtacctcaaataaatagttttaaggtcattccatcatatggtcacaattcacatcgtatgcatgtaccaagtttccaaaataacacaacagcaacacatcaaaatgcaaaagtaaataaaacttataactataaatatttttatacttataaagtagtcaaaggtgtaaaaaaacatttctcattttcaaaatcacatggttgtaaaattgttaaaccagcattaaacatcaaaaatgtaaattatcaatatgctgttccaagtaatagccctacacacgttgttcctgagtttcagggtatcttaccagcaccacgagtataa

SEQ ID NO: 408443 - DNA, 321 bp, Staphylococcus aureus
ttgaaaaataaattgctagttttatcattgggagcattatgtgtatcacaaatttgggaaagcaatcgtgcgagtgcagtggtttctggggaggagaatccatataaatctgagtcattgaaattaaatgggaaaagaagtactacaataactagtgataaatatgaagaaaatttagatatgttaatatcgtcattatcatttgcagattatgaaaaatatgaggaaccagaatacaaagaagcagttaaaaagtatcaacaaaaatttatggctgaagatgatgcattaaaaaattttttagtgaagagaaaaaaataa

SEQ ID NO: 408444 - DNA, 2892 bp, Staphylococcus aureus
atgaatatgaagaaacaagaaaaacacgcaattcgtaaaaaatcgattggcgtggcttcagtgcttgtaggtacgttaatcggttttggactactcagcagtaaagaagcagatgcaagtgaaaatagtatgacacaaacggaaaatacgagtaatgagagcaaaagtaatgatccaagtagcgttaatgctgcacctaaaacagacaacacaaacgtgagtgattctaatacaacgacaaacactaatagtgacgaaacgaatgtagcgcaaaatccagcacaacaggaaacgacacaatcagcatcaacaaatgcaactacagaagaaacaccggtaactggtgaagttactactacggcaacgaatcaagctaatacaccggcaacaactcaatcaagcaatacaaatgcggaagaatcagtgaatcaaacaagtaatgaaacgacttctaatgatactaatacagtatcatctgtaaattcacctcaaaattctacaaatgcggaaaatgtttcaacaacgcaagacatttcaactgaagcaacaccttcaaacaatgaatcagctccacagagtacagatgcaagtaataaagatgtagttaatcaagcggttaatacaagtgcgcctagaatgagagcatttagtttagcggctgtagctgcagatgcaccggctgctggcaaagatattacgaatcagttgacgaatgtgacagttggtattgactctggagatacagtttatccgcaccaagcaggctatgtcaaactgaattatgggttctcagtaccaaatgaggctgttcaaggtgacacattcaaaataactgtgcccaaagaattaaacttaaatggtgtaacttcaactgctaaagtgccaccaattatggccggagatcaagtattggcaaatggtgtaatcgatagtgatggtaatgttatttatacatttacagactatgtaaatactaaagatgatgttaaagcaactttgaccatgcccgcttatattgaccctgaaaatgttacaaagacaggtaatgtgacattggctactggcataggtagtacaacagcaaacaaaacagtattagtagattatgaaaaatatggtaagttttataacttatctattaaaggtacaattgaccaaatcgataaaacaaataatacgtatcgtcagacaatttatgtcaatccaagtggagataacgttattgcgccggttttaacaggtaatttaaaaccaaatacggatagtaatgcattaatagatgcacaaaatactagtattaaagtatataaagttgataatgcatcagacttgtctgaaagttattatgtgaatccagataactttgaagatgtcactgatagtgtgaatattacattcccaaatccaaatcaatataaagtagagttcaatacgcctgatgatcaaataacaacaccatatattgtagttgttaatgggcatattgatcctaatagtaaaggtgatttagctttacgttcaactttatatggatataattcgaatataatttggcgatcaatgtcatgggataatgaagtagcatttaataacggatcaggttctggtgacggtatcgataaacctgttgttcctgaacaacctgatgagccgggtgaaattgaaccaattccagaggattcagattctgacccaggttcagatagtggttcagattcagcgagcgattcagattcagcaagtgattcagattcagcgagtgattcagattcagcaagtgattcagattcagcgagtgattcagattcaacgagtgattcagattcaacgagtgattccgattcagcaagcgattcagattcagatagtgactcagactcagacagcgattcagattcagatagtgactcagactcagatagcgattcagattccgacagtgactcggattcagatagcgattccgactcagacagtgactcagattcagatagcgactcagactcagaaagcgactcagattcagacagcgattccgactcagatagtgattcagattcagacagcgactcagacagtgtttcagattcagacagtgactcagactcggatagtgaatcagactcagacagcgactcagattcagacagcgactcagactcggatagtgaatcagactcagacagtgactcagactcagacagcgactcagactcagatagcgactcagattcagatagcgattcagactcagacagcgactcagactcagatagcgattccgactcggatagcgactcagactcagatagcgattccgactcggatagcgattcagaatcagatagtgactcagattcagatagcgattccgactcagacagtgactcggattccgacagcgattcagattcagacagtgatttagactcagacagtgactcggattcagatagcgattccgactcagatagtgcctcagattcagatagcgactcagactcagacagcgattcagaatcagatagtgactcagattcagatagcgattccgactcagacagtgcctcagattcagatagtgactcggattcagcgagtgattccgattcagattcaacgagtgacacaggatcagataacgactcagactcagaaagtgattcgaatagcgattccgattcaggttctaacaataatgtagtgccgcctaattcacctaaaagtggtactaatgcttcaaataaaaatgaggctaaagaaagtaaagaaccattaccagatacaggttctgaagatgaagctaatacgtcactaatttggggattattagcatcattaggttcattactacttttcagaagaaaaaaagaaaataaagataagaaataa

SEQ ID NO: 408445 - DNA, 729 bp, Staphylococcus aureus
atgaaaaaagtaatggggatattattagcaagtacacttatcttaggtgcttgtggacatcatcaagatagtgcaaaaaaagagagcactagtcacaaaaagaaagaaaatgacaatgaagaattaaatgaagaacttaaagaatttaaaagcaaaaaaaatatggatataaaaattaaaggcgatactattgttagtgacaaatttgaagctaaaataaaagaaccgtttatcatcaatgaaaaagatgagaaaaagaaatatatcgcttttaaaatggaaattactgctaaaaaagacgataaagatttaaatccatcttctatttctcatgactatattaatatcactcaagatgataaaaatacagtaaataaattaagagatggttatcttttaagtgataaaaattataaagattggacagaacataaccaagatcaaattaaaaaaggcaaaactgcacaagccatgtttatctatgagttaagaggtgatggaaacattaatttaaatgtccataaatactcagaagataaaacagttgattctaaatcattcaaatttagtaaacttaaaaccgaagatttttctcatagagcggaaacaagggaagaagtagaaaagaaagaaaaagaatttgaagaagagtacaaaaaagaacaagaacgagagaaagaaaaagaaaagcaaaaagatgacgaccacagtggtttagatgaagtataa

SEQ ID NO: 408446 - DNA, 465 bp, Staphylococcus aureus
atggctaagaagaaatcaccaggtacattagcggaaaatcgtaaagctagacatgattataatattgaagacacgattgaagcgggaattgtattgcaaggcacagaaataaaatcaattcgccgaggtagtgctaaccttaaagatagttatgcgcaagttaaaaacggtgaaatgtatttgaataatatgcatatagcaccatacgaagaagggaatcgttttaatcacgatcctcttcgttctcgaaaattattattgcataagcgtgaaatcattaaattgggtgatcaaacacgtgagattggttattcgattgtgccgttaaagctttatttgaagcatggacattgtaaagtattacttggtgttgcacgaggtaagaaaaaatatgataaacgtcaagctttgaaagaaaaagcagtcaaacgagatgttgcgcgcgatatgaaagcccgttattaa

SEQ ID NO: 408447 - DNA, 2373 bp, Staphylococcus aureus
atgaatttaaagcaatcaatagaagagattattaatcaacctgaatatgaacctatgtcagtttcagattttcaagatgcattaggtttaagcagtgccgactcgtttagagatttaattaaggtgcttgtggagttagaacaatcaggattaatcgaacgttcgaaaacagatagataccaaaaaaagcatagttccaaaggtcaatcgaaattgataaaaggaacgttaagtcaaaacaagaaaggttttgctttcctaagacctaaagatgaggatatggaagatatatttattcccccaacaaaaattaatcgtgccttagacggagatactgtaattgtagaaatacatcaatctaaaggtgaacataaaggtaaaattgaaggggaagttaagtcgattgagaagcattctgtaactcaagttgttggtacgtatagtgaagctagacatttcggctttgttattccagatgataaacgtattatgcaagatattttcattcctaaaggtcaaagtttaggtgcagtagatgggcataaggtactagttcaaattactaagtatgctgatggttcagataatcctgaagggcatatttcagcaatattaggacataaaaatgatccaggtgtagatattttatctattatttatcaacatggtattgaaattgagtttcctgatgaagtattagaagaagctgaagcagtacctgatcatattgaaaatactgaaattaaaggccgtcatgatttacgtgatgaattgacaatcacaattgatggtgcggatgctaaagacttagatgacgcaatcagtgttaaaaagttagcgaacggtcatacgcaattaactgtaagtattgctgatgtcagttattatgtaacggaagattcagctttagataaagaagcttatgatagagcgacaagtgtatatcttgttgaccgtgtgattccgatgattccacatcgattaagcaatggtatttgttcattaaatcctcacgttgatcgtttaacgttaagctgtcgcatggaaattgatgcaagtggtcgtgttgttaaacatgaaatttttgatagtgttatacattctgattatcgaatgacgtatgatgcagttaaccagattattactgaaaaggatcctaacattcgcgagcaatataaagaaattacgcctatgttagatttagcacaagatttatctaatcgtttgattcaaatgagaaaacgtcgtggtgaaattgattttgatattagcgaagcgaaagtactagttaacgaagatggtatacctacagatgttcaattgagacaacgtggtgaaggcgaacgtcttattgagtcatttatgttaattgcaaatgaaacagttgctgaacattttagtaagttagatgtaccatttatttaccgagtgcatgagcaacctaaatcagatcgcttaagacaattctttgattttattactaactttggcattatgattaaaggaacaggcgaagatattcatccaacaacacttcaaaaggtccaagaagaagtagaaggtcgacctgaacaaatggtcatttcaacaatgatgttacgttcaatgcaacaagcgcattatgatgatgtgaacttgggacattttggcttatcagctgaatattatacgcattttacatcaccaataagacgttatcctgatttaacagttcatcgtttaatccgtaagtatttaattgagaaatcaatggataacaaagaagtgaagcgttgggaagacaaattgcctgagttagctgaacatacttctaaacgtgaacgtcgtgctattgagtcagaacgtgatactgatgaattgaaaaaagcagaatatatgattcaacatattggtgatgaatttgaaggtattgtcagctcagtagctaacttcggtatgttcattgaattgccaaatacgatagaaggtatggttcatattgcgaatatgactgatgattattaccgttttgaagagcgtcaaatggcattaattggtgagcgtcaagctaaagtatttagaattggtgacacagttaaggttaaagtgacgcatgttgatgtagatgaacgattaattgattttcaaattgtaggtatgcctttaccgaaaaatgatcgatcacagcgcccagcacgaggtaagacaattcaagctaaaacgcgtggtaaatcattagataaatcgaaatctgatgataaaggtcataagaaaaaaggtaagcaacgtaaaggtaaaaaccaacgtaaaaatgacaaatcaggaaacagtaaacataagccattttataaagataaaagtgtgaaaaagaaagcacgtcgtaagaaaaaataa

SEQ ID NO: 408448 - DNA, 741 bp, Staphylococcus aureus
atgcaaataaagttaccaaagcctttcttttttgaggaaggtaaacgtgccgtgttattactacatggttttacaggcaattcgtctgatgttcgtcaattaggtcgatttttacaaaagaaaggttatacatcgtatgcaccacaatatgaaggtcatgcagcaccaccagaagagatacttcaatcaagtccttttgtttggtttaaagatgccttagatggctatgactaccttgttgaacaaggttatgatgaaatcgttgttgctggcttgtcattaggtggcgattttgcattaaaattaagcttaaatcgagatgtaaagggtattgtaacgatgtgtgctcctatgggtggcaaaactgaaggtgccatttatgaaggctttttagaatatgcacgcaattttaaaaagtatgagggtaaagatcaagaaacgattgacaaagaaatgcatcatttcaaaccaactgaaactttaaaagaattaagtgaagcattagatacgattaaagatcaagttgatgaggtgcttgacccaattttagtgattcaagcagaaaacgacaatatgattgatccacaatccgcaaattatatatatgaacatgtagactctgacgaaaaagatatcaaatggtatagtcagtcaggacatgttattacaattgataaagaaaaagaacaagttttcgatgatatttatcaatttttagagtcattagactggtcagaataa

SEQ ID NO: 408449 - DNA, 456 bp, Staphylococcus aureus; identical to SEQ ID NO: 406355

SEQ ID NO: 408450 - DNA, 948 bp, Staphylococcus aureus
atgagacttcaaaaagcacctctagtaacgtcaggactagtcttaggattattaggcctgggtaatctattaaaagacttatctcttactttaaacgctatttgcggaatctttgctttcttgatttggattcaccttttatgtactatgctcaaatattttaataatgtgaaagaacaattaaacagccctctagtttcatctgtgttcacaacatttttcatgtctggctttttaggtactacttatttaaatacattttttagtaatataacatttatcaataatttaataacgcctatttggattttatgccttgtgggaattatgatgcatatgattattttttcaattaaatatttaaaagatttttcacttgagaatgtttatccttcatggactgtactttttattggtattgctatcgcaggattgacggcacccgtcagcggatattttttcataggtcaattaacagtaatatatggctttgtagctacttgtattgtcttacctatagttttcaagcgattaaaagcatttccattgcagacgtcaatcaaaccgaacacatcgacaatttgtgcaccattttctttagtcgctgcagcatatgttatagcctttcctaaagcgaatgcttttatcgtaattatacttttactattagctcaaatattttatttttacatcattatacaattgcctaaattactaaaagaacctttttcgccagtattttcagctttcacattccctttagtaatctctgcaactgctttaaagaacagtttgcctgtgcttatgtttccagtcatttggaagggccttttgtttatcgaagtgttattagccactgtaatagtacttagagtctttataggatatcttcacttctttttaaaaaaggaaaaccaagataaatttcttcgtaatgcgtctcagtaa

SEQ ID NO: 408451 - DNA, 1557 bp, Staphylococcus aureus
gtggaaaatacaattaatgaaagtgaaaagaaaaaacgatttaaattaaaaatgccaggtgcatttatgattttattcattttaacggttgttgcagttatagcaacatgggttattcctgctggtgcatattctaaactttcttacgaaccttcatcccaagaactaaagatagttaaccctcataaccaagtgaaaaaggttccaggtacgcaacaggaactagacaaaatgggggttaaaattaagattgaacaatttaaatcaggtgcaattaataagccggtatcaattccgaatacttatgaaagattaaagcaacatccagctggaccagaacaaataacaagtagcatggttgaaggtacgatagaagcggttgatatcatggtattcattcttgtattagggggacttattggcgtagttcaagccagtggttcttttgaatcgggattgctagctttaacaaagaaaactaaagggcatgaatttatgctaattgtgtttgtatcaatactaatgattatcggcgggacgttatgtggtattgaagaagaagctgtcgcattctatccgattttagtccctatatttatagcgttaggatacgattctatcgtttctgttggtgccatattccttgccagctctgtcggtagtaccttttcaactattaacccgttctcggttgtaattgcctctaatgcagctggtacaactttcacggatggtttgtattggagaataggtgcttgtattgtcggtgcgatttttgttattagttatttatattggtactgtaaaaaaattaaaaaagatcctaaagcgtcatattcttatgaagacaaagatgcttttgaacagcaatggtctgtgttaaaagatgacgatagtgcccattttactttgcgtaagaagataatccttacattatttgtactaccatttccaattatggtatggggagttatgacgcaaggttggtggttcccagttatggcttcagcatttttaatatttacaattataataatgtttattgctggtacaggtaaatctggattgggagaaaaagggactgtagatgcatttgtcaatggtgcatcaagtttagtaggtgtatctttaattattggattagctcgaggtattaatttagtgttgaatgaaggtatgatttcagatacaatcttacacttttcatcatctttagttcaacatatgagtggaccattatttatcatcgtattactatttattttcttctgtttaggttttatcgtgccatcatcttctggattagcggtattatcaatgcctatctttgcaccactagctgatacagtaggtataccaaggttcgtcatcgttacgacatatcaatttggtcaatatgctatgttattcttagcgccgactggacttgttatggccacactacaaatgttaaacatgcgatattcacattggttccgatttgtatggccggtagttgcttttgtattgattttcggtggcggagtactaattacgcaagtactaatttattcataa

SEQ ID NO: 408452 - DNA, 1437 bp, Staphylococcus aureus
atgactagtagtaagtatattgaatatttgcaaactgaggttgaaggacagcttctagatcgaaagagggcatctataaatcctaaagatgttgctcaacacattagtgcgtttgcaaatgctgaaggtggcaaactggtaattggtattgaagataatggagaaatttcgggatttaatcattcaaaagcaaaaaagaaagaggtttatattgaagcacctttcgaacatttatatagaatacctaaatatacatatgaaataatagaagtgaagaaacgcgatggaactatggatgaaattcttattttcgacattgaacccagttatgatgccataatcaccttaaaagatgattcagtatatttaaggattaacgataaaagtagaaaactgacacacaatcaaattacaaatctagaatacgaccgtggttcacgaagattcgaagaagaattagtagagtattctagtattgaagatgtgaatgaagaactagttgatgaatttaagcaattacttaatacaaacgtagataatgaaaaattattaaaagctagaggatttatgcgtgaaggtaaattgacagttgcaggtttgttattgtttagtaatcacatcaatgtttatttaccaggcgctagaattcgatttatgaggtatgaaggaacaaaagaagaatctgggacaagacttaacattgtaaaagatattacttttgataaagctttgccagtagcaataagagaagcgagagcctttatcaatacacaattacgtgaatatacttttttaggtaaagagggaagatttgtaactttgccagaatatccagaatttgcttggtttgaggggatgataaattctattgtacatcgcagatatgataatcaaggcgatcatataagaataaaaatgtttgacgacagattagaaattagtagcccgggtgcactgcctgcttctgttacgttagagaatattaaagaagaaagatattcaaggaatccaaaattagctgcagcattaactcaatataaatgggtgagagaatcaaatgagggcgtgggacgtatatttgacgaaatgaagcaatattttttagatgatcctgtatactcagagcctaataatagttcagtacaactagctttgaagaataacataatagcaaggaaaaaaagagaaacagggagagtgagtaatataataacacctgaattatttgaaagtttaaatgagcaacaagaattaattgtgagacatttatataatcaaggcgaactaacagcatctaaaattgctaatattattcaaaggtctgttcctactgctagaaaaagattgaaagaattagaggaaatgaatattatatcgacacatggatcaagtaagaatgatccaaagagaacatattatttactcggattcgagtaa

SEQ ID NO: 408453 - DNA, 1203 bp, Staphylococcus aureus
atgaattattcatctcgtcaacagccggataagcattggcttcgcaaagtagactgggtattagtagccactatagctgttttagcaattttcagtgttctgcttattaactcggcaatgggcggtggtcaatacagtgctaatttcggtatcagacaaattttttattacattttaggtgcaatttttgcaggtatcatcatgtttatttcacctaaaaagattaaacattatacatatttattgtatttcttaatctgtctattattaataggattgctcgttattcctgagtcacctattacacctattatcaatggtgccaaaagttggtacacgtttggccctatcagtattcagccatctgaattcatgaaaattattttaattttagcattagcgcgtgtcgtttctagacataatcaattcacatttaataaatcattccaaagtgatttgttattatttttcaaaattattggtgtctcgttagtaccaagtattttaatattactgcaaaatgacctaggaactacattagtattagcagcaattattgcaggtgtgatgttagtaagtggtataacatggcgtatcttagcacctatctttattacaggtattgttggtgcaatgacagtcattttaggtattctatatgcacccgcattaattgaaaatttattaggtgtccaactgtatcaaatgggacgaatcaattcatggcttgacccctatacatatagtagtggtgatggctatcatttaactgaatcacttaaagctatcggttcaggacagttactaggtaaaggatacaatcacggtgaggtttatatacctgaaaatcatactgactttatcttttcagtgattggagaggaacttggttttatcggttctgtcatattgatcttaatatttttatttttaatcttccatctaataagattagctgcgaaaattgaagatcaatttaacaaaatctttatcgttggtttcgtcactttacttgtgttccatattttacaaaatattggtatgacaattcagttgttaccaatcactggtattccattaccatttattagttatggtggtagtgcgctatggagtatgatgactggaataggtatagtcttatcaatttattatcatgaaccaaaacgatatgtagatttataccatccaaaaagtaattaa

SEQ ID NO: 408454 - DNA, 870 bp, Staphylococcus aureus
gtgaagaaaatttttgtaattagtacgacattgttagcggtcgctattattataggcactattattacggttgtgtttagtcaacgacaggcacaaacatttaaaatacaacaacagcaatttgttaaaaagccaattccgacattgtttttacatggatttggtggtagtgccaactctgaaaaatttatggtgaagcaagcagaaaaaagaggggtaactaaagatatcatcactgcttacgtttcaaaggatggtgcagtgacatttaaagggaaactaagtaaagatgcagtgaatcctattgtgaaaattgaacttgaaaataacagacaaggctatttggataagaatgctgcgtggtttaaaaatgtactgactaagttacaatctgaatacaatttcgataaattcaactttgtcggtcactcaatggggaacttaacatttgcacaatatatgatgacatatggtaacgacaagtcactgccacagttaaacaaacaagtgaatattgctgggacatttaatggcgttttaaatatgaatgaagatgtcaatgaaattacagttgataaagatggtaaaccaagtcgaatgaatcaaccttatcagcaattacgcgtgctaaaagatatttataaaggtaaaggtatcgaagtgctaaatatttatggagatttgaaagatggtacacattcagacggcagagtgtctaatagttcttcgaaatcattaaaatatttactgggaaatagtccgaaaagttatcgagaatctaaatatgaaggtgagtctgcacagcatagtcagcttcatgagaatgaaaatgttgctaatgagttgatcgacttcttatggaaaaaataa

SEQ ID NO: 408455 - DNA, 1089 bp, Staphylococcus aureus
atgcctttaatgcaattcacattgtttacgttattcagtaaagaacatagaggatttgcaatgggattagctggtttagttattcaatttgcaccagcaatcgggcctactgttactggattaatcattgatcaagcgagttggcgagtaccatttattataattgtaggaattgctttagtcgcattcatcttcggtttaatttcaatttcaagctataatgaagtgaaatatactaagctagataagcgctctgtaatgtattcaacgattggatttggattaatgttatatgcattcagtagtgcaggcgacctaggatttactagcccggtagtcattggtgcaatgataattagttctattatcatctacttatttattcgtagacaattcaatataagcaatgcacttttaaatttaagtgtttttaagaatagaacatttgcattatgtacgattagttcaatgattataatgatgtcaatggttggtccagcgttattaataccgctctatgttcaaaatagcttagctctatctgcattattgtttggacttgttatcatgccaggtgcaatcataaatggtattatgtcggtttttacaggtaaattttatgataagtatggtcctagaccactgatttatactggttttacgattttaacaattactactattatgttgtgtttcttgcatacagacacatcttatacgtatttaatagtcgtatatgcaattagaatgttttcagtttctttactcatgatgccgataaatactacaggaattaattctttgaaaaatgaagaaatctcacatggcacggctattatgaactttggtcgtgtaatggctggctcattaggaacagcattaatggttactttgatgagttttggcgcaaaaatattctcatctacatcgccatcgcatttaactgcaactgaaattaaacagcaatcaattgctataggggtggatatctcatttgcttttgtagctgtgcttgttatggcagcttatgtgatagcgctttttataagagaacctaaagaaatagaaagtaatagaaggaaattttaa

SEQ ID NO: 408456 - DNA, 513 bp, Staphylococcus aureus
atgaaacagcaaatgttatcaaaagtattattaagtacagtcgtagttatgggatcaatagcaggatcttctcttgtaatggatgacaacgctcatgctgaacaaaaaagtgataatatcgggaaactgaatcaaaaaaatgaaagtaccttgcatctttcatttgaaaagggtattaaagggactgttgacaaaaatggtaagttaacattatctgatggaaaaacgtcaaaagtgatgccaactaatgctaaagataaaaaaggtaacgatgttgttttggtttataaaaaggttaaagatggatttgatgttcaagtaattaaatctagtcaagagagaaaaactaactgggttaaatgtggtctaggaacagttggaggcgctggcactggtgggctaggcggtgctagtgcagcttcagttataccaggtttaggaactgttgcaggtgctattattggtggggtttctggtggtgccacaggtgccgcagcgtcatgtttcggttga

SEQ ID NO: 408457 - DNA, 402 bp, Staphylococcus aureus
ttgaagcatgtgaaagaaaatgacttagcgcacggagagtttggtaagtggcttgaaaaagttgggttagataagtaccaagctagcaggtttatcaaagttgcaaatgaacaatcaaaattgcactcgagcgcaaatttaggacttaaagcgctttatcagatagcaactattccagtagagcatcgagaagaaaaacaacaaacgtcttcaggagagatgaaaacaccatacgaaatgaccaataaagaacgtgaagaatttaagcgccaactcaaacaacgcgatgaagaaaacgcacaacttcaatcacaaatggaacaagcacaacgttcggaggagatagcgagaaagcaatataaatatggattaaataattatatttttactataaaattttag

SEQ ID NO: 408458 - DNA, 858 bp, Staphylococcus aureus
atggataacgtaaaagcaatatttttggacatggatggtacaattttacatgaaaataatcaagcatcaacgtatacgaaagatgtcattaatcgattgagagagaaaggatataaagtatttttagcgactggacgttcgcattctgaaatacatcaacttgtacctgaagattttgcggtaaatggcatcattagttcaaatggaaccattggagaagtagatggagaaattatcttcaaacatggtttatcattggctcaagtgcaacaaattattaatttagctaagcgccaacaaatttattatgaggtatttccttttgaaggtaatagagtttctttaaaagaagatgaaacatggatgcgagatatgattcgtagtcaagatcctattaatggcgtaagtcatagtgaatggtcttcaagacaagatgcgcttgctggtaagatagattgggtaactaagtttcctgaaggtgaatattcaaaaatttatctgttcagttctaatttagaaaaaataacagcatttagagatgaattaaagcaaaatcatgtgcaactacagattagtgtttcaaattcatcaagatttaatgcggaaacaatggcttatcaaactgataaaggtacaggcattaaagaaatgattgaacattttggcatcaatcaaaaagaaacgttagttattggagatagcgacaatgatagagcaatgtttgaatttggccattacacagtcgctatgaaaaatgcacgtcctgaaatccaagcattaacttcagatgtaacggcttatacgaatgaagaggatggcgcagcaaaatatttagcaaagcattttttagctgattaa

SEQ ID NO: 408459 - DNA, 783 bp, Staphylococcus aureus
atgttaattcaattagatcaagttgggcgaatgaagcaaggaaaaacaattttaaaaaatatttcttggcaaattaatgaaggtgataaatggattctatatggtttaaatggtgctggcaagacaacacttctaaatattttaaatgcgtatgagcctgcgacaactggctatgttaatctatttggtaaaatgcccggcaaggtagggtattctacagaaactgtacgacaacatataggttttgtatctcatagtttactggaaaagtttcaagagggtgaaagagtaatcgatgtagtgataagcggtgcttttaaatcaattggtgtttatcaagatattgatgatgaggtacgtaatgaagcacatcaattacttaaattagttggaatgtctgctaaagcacaacaatatattggttatttatctaccggtgaaaaacaacgagtgatgattgcgcgagctttaatggggcaaccccaggttttaattttagatgagccagcagctggtttagactttattgcacgagaatcgttgttaagtatacttgactcattgtcagattcatatccaacgcttgcgatgatttatgtgacgcactttattgaagaaattactggtaactttactaaaattttgctattaaaagatggggaaagtgtacaacaagggttaatagatgatattttgacatctgaaaacatgtcacgatttttccagaaaaatgtagcagttcaaagatggaataatcgattttctatggcgatgttagagtaa

SEQ ID NO: 408460 - DNA, 3507 bp, Staphylococcus aureus
atgacaatattgacaacgcttataaaagaagataatcattttcaagaccttaatcaggtatttggacaagcaaacacactagtaactggtctttccccgtcagctaaagtgacgatgattgctgaaaaatatgcacaaagtaatcaacagttattattaattaccaataatttataccaagcagataaattagaaacagatttacttcaatttgtagatgctgaagaattgtataagtatcctgtgcaagatattatgaccgaagagttttcaacacaaagccctcaactgatgagtgaacgtattagaactttaactgcgttagctcaaggtaagaaagggttatttatcgttcctttaaatggtttgaaaaagtggttaactcctgttgaaatgtggcaaaatcaccaaatgacattgcgtgttggtgaggatatcgatgtggaccaatttcttaacaaattagttaatatggggtacaagcgggaatctgtggtatcgcatattggtgaattctcattgcgaggaggtattatcgatatctttccgctaattggggaaccaatcagaattgagctatttgataccgaaattgattctattcgggattttgatgttgaaacgcagcgttccaaagataatattgaagaagtcgatatcacaactgcaagtgattatatcattactgaagaagtaatcagccatcttaaagaagagttaaaaactgcatatgaaaatacaagacccaaaatagataaatcagtgcgcaatgatctgaaagaaacgtatgaaagctttaaattattcgaaagtacatactttgatcatcaaatactacgtcgtttagtagcgtttatgtatgaaacaccttcgacaattattgattatttccaaaaagatgcaatcattgcggttgatgaatttaatcgtattaaagaaactgaagaaagtttaacagtagagtctgattcgtttattagcaacgttattgaaagtggtaatggatttataggacaaagttttataaaatatgatgattttgaaacattgattgaaggctatcctgtcacttatttttcattattcgctacaacaatgccgataaaactaaatcatattattaaattttcatgtaaacctgtccaacaattttatgggcaatatgacattatgcgttctgaatttcaacgatatgttaatcaaaattatcatatcgtggttttggtcgaaaccgaaactaaagttgaacgtatgcaagcgatgttaagtgaaatgcatattccatcaataacaaaattgcatcgctcaatgtcatcggggcaagcagtgattattgaaggcagtttatctgaaggatttgaactacctgatatgggattagttgtcattactgaacgtgagctttttaaatcaaaacagaaaaagcaacgaaaacgtacgaaagctatctcaaatgctgaaaaaattaagtcttaccaagatttaaatgtgggagattatattgttcatgtgcatcatggtgttggtagatatttaggtgttgagacgctcgaagtagggcaaatacatcgtgattatattaaattgcaatataaaggtacggatcaactatttgttccagtagatcaaatggatcaagttcaaaaatatgtagcttcggaagataagacgccaaaattaaataaactcggtggcagtgaatggaaaaaaacaaaagctaaagttcaacaaagtgttgaagatattgctgaagagttgattgatttatataaagaaagagaaatggcagaaggttatcaatatggggaagacacagctgagcaaacaacatttgaattagattttccatatgaacttacgcctgaccaagcgaaatctatcgatgaaattaaagatgacatgcaaaaatcgcgtccaatggatcgcttgctatgtggtgatgttggttatggtaaaactgaagttgcagtgagagcagcattcaaagctgtaatggaaggaaagcaggttgcatttttagttcctacaactattttagctcagcaacattatgagacgttaattgagcgtatgcaagattttcctgttgaaattcaattaatgagtcgttttagaacgccaaaagagataaaacaaactaaggaaggacttaaaactgggtttgttgacatagttgttggtacacacaaattacttagtaaagatatacagtataaagatttagggctgttgattgtagatgaagaacaacgatttggtgtacgccataaagagcgtattaaaacattaaaacataatgtagatgtactaacattgactgcaaccccaatacctagaacattgcatatgagtatgctaggtgtgcgcgatttgtcagtgattgaaacgccgccagaaaatcgtttcccagttcaaacatatgtattagaacagaacatgagttttatcaaagaagctttagaaagagaactatcccgtgatggccaagtattttatctttataataaagtgcaatccatttatgaaaaacgagaacaactccagatgttaatgccagatgctaacattgcagttgctcatggacaaatgacagagcgcgatttagaagaaacgatgttaagttttatcaataatgaatatgatattttagtaacgacgacgattattgaaacaggtgtcgatgtcccaaatgcaaatactttgatcattgaagatgcagatcgctttggattgagtcagttgtatcaattaagaggtcgtgttggtcgttcaagtcgtattggttatgcatacttcttacatccagcaaataaggtactaactgagactgcagaagatcgattacaagcgattaaagaatttacggagttaggctcaggatttaagattgcgatgcgtgatttgaacattcgtggtgctggtaatttgttaggtaaacaacagcacggctttattgatacagttggatttgatttgtacagtcaaatgttagaagaagctgtaaatgaaaaacgtggtattaaggaaccagaatctgaggtgccagaagtcgaagttgatttaaacttggatgcatatttgccaacagaatatattgcaaatgaacaagctaaaattgaaatttataaaaagctaagaaaaactgaaacatttgatcaaattatcgacataaaagatgaattaattgatcgtttcaatgattatcctgttgaagtagcacgtttgcttgatatagtggaaataaaagtacacgcattacattcaggtatcacgttgattaaagataaagggaaaataattgatattcatttatctgtaaaagccactgaaaatattgatggcgaagtgctgttcaaagcaacacaacctttaggtagaacaatgaaggttggtgttcaaaataatgcaatgacaattactttaacgaaacaaaatcaatggcttgatagtttgaagtttttagttaagtgcattgaagaaagtatgagaatcagtgatgaagcataa

SEQ ID NO: 408461 - DNA, 1815 bp, Staphylococcus aureus
atgaacaaaacaaagggttttacaaaatataagaaaatgagatatatgccagggctcgatggtttgagggcaatcgctgttctaggaattattatttaccacttaaataagcaatggttgacaggtggctttttaggtgtggatacattttttgtgatctctggttatttaattacaagcttattactcaaagagtatgatgacacaggtatcattaaattgaaaagcttttggatacgtcgtttaaaacgtttattaccagcagtcatagttttattaatggttgtagggacagcaaccttattattaaaatcagataatatcattagggttaaacatgatattattgctgcgatattttatgtatcaaactggtggtatatagcaaaagatgttaattattttgagcaattttcatttatgccattaaagcatttatggtctttagcaattgaagaacagttttacatatttttcccagttattttggttacattattgttaacaattaaaaagcgatacaaaataggatttattttttggggagtatctataatttctttagggttaatgatgtttatctacagtattaatggggatcattcacgagtgtattttggtacagatactagattacagacattgttactgggtgttattttagcttttttatggccgccgtttaaattgaaaaatgatccacctaaagttgtaaaatatgttattgatagcataggtagtttatcatttatagtacttatattattatttttcattattaatgatgagacgaattggatatatgatggtggtttctatttaatatccatattaacgttatttattattgccagtgtcgttcatccatctacatggatagcgaagatattttcaaatccagtgttagtatttatcgggaaaaggtcttatagtctatatttatggcattttgcagtaattagtttcgtacatagttactatgtagacggacagatacctgtatatgtgtactttatagatataagtttaacaattatatttgcagagctatcatatcgctttatagaaactccatttagaaaagaaggtattaaagctttaaattggcgatcttcttatataccacaatttataagaatggtaattgtagtaaccttgttaattccatttatgttgattttagtaggtgcattcaataaatatggtaaagacattataggagaaaaagcgaatagctttgataccactattgaagataattattcaatgcggatagcaccaattgataacattcacattgatggcttagtaagtgagaagaaaaaggaatcttccgatgtatataataatattaaacctcttttaatcggtgattcagtaatggttgatatcggtgagtcatttaagtcatcagttcctaagtctagaattgatggaaaagtagggcgtcaattgtatcaaaccttacctttagttaaagcgaattattcacaatataaaaaatcatctgatcaagtcgtattagaattaggtacaaatggcgactttactgtcaaacagctcgacgatttacttaatcaatttggaaaagccaagatttatttagttaatacacgtgttccaagaatttatgaggcaaatgtaaatcgattattagctgacgcggcgaaacgaaagtccaatgtcacattaattgattggtataagcgatcacaaggacatagtgaatattttgcaccagacggtgtacatttagagtacaaaggagtcctagctttaaaagatgaaatattaaaagcacttaaaaagaaataa

SEQ ID NO: 408462 - DNA, 1083 bp, Staphylococcus aureus
atgactgaaagaatattagaactaaatgatttgcatgtttcctttgatattacagcaggggaagtgcaggcagtgagaggtgtagatttttatttaaacaaaggggaaacattggcaattgttggtgaatcaggttcaggtaaatctgtgacaacaaaagcaattacaaaattattccaaggggacacaggaagaattaaaaagggagaaattttatttttaggggaagatttagcaaaaaaacctgaaaatgagttaattaaattacgtggaaaagatatttcaatgatctttcaagatccaatgacatctttaaacccaacgatgcaaattggtaaacaagtcatggaaccattaattaagcacaaaaattatagtaaagcacaagctaaaaagctcgcattggaaatactaaatcttgtaggattaccaaatgcagaaaaaagatttaaagcatatccacatcaattttcaggtggacaaaggcaaagaattgttattgcaaccgcattagcttgtgaacctaaagtgctgattgctgatgaaccaacgactgcattagacgtaacgatgcaggcacaaattttagatttaatgaaagaactacaacaaaaaatcgatacagcaattatttttataacgcatgatttaggggttgttgcgaatattgctgatagagtggcagttatgtatggtggtcaaatggttgaaacaggagatgttaacgaaatattttatgatccaaagcatccatatacatggggattattatcgtcaatgcctgatctatcaacaacaaatgacacaccattactagcgattcctggagcgccacctgatttattacacccacctaaaggtgatgcatttgcgagacgtagtcaatatgcattagatattgattttaaagtagaaccgccgtggtttaaagtttcaccgacacattttgtgaaatcttggttattagacgcacgtgcaccaaaagttgaactacccgagctggtaaaacaacgtatgaaaccgatgcctaataattatgaaaaaccactcaaggtagaaagggtgtcgttcaatgaaaaatga

SEQ ID NO: 408463 - DNA, 942 bp, Staphylococcus aureus
atgaaaaatgatgaagtgctattatctattaaaaatttaaagcaatattttaacgcaggaaagaaaaacgaagtgagagcgattgaaaatatttcgtttgaaatatacaaaggagaaacattaggtttagtaggagaatcggggtgtggtaaatctacaactggtaaatcaattatcaaacttaatgatattacaagtggagaaattttgtatgagggtattgatatacaaaagattcgtaaacgtaaagatttgcttaaatttaataaaaagatacagatgatttttcaagacccatatgcgtctttaaatcctaggttaaaagtaatggatatagtagctgaaggtattgatatccatcatttagcaactgataagcgtgaccgtaaaaaacgtgtctatgatttacttgaaactgttggattaagtaaagaacatgccaatcgttatcctcatgaattttcaggtggacaacgccaacgtattggaattgcccgtgcattagccgttgaaccagaatttattatagcagatgaacctatttcagcattggatgtttcaattcaagctcaagtagtcaatttgttattaaaattacagcgtgaaaaaggtattacattcctatttattgcacatgatttatcgatggtgaagtatatctctgatcgaattgcagtcatgcattttgggaaaattgtagaaatcggaccagcagacgatatttatcaatatccattacatgattatactaagtctttattgtcggcaattcctcaaccggatcctaaatcggaacgtagtcgtaaacgatttagttatattgatgatgaagcaaataatcatttaagacaattacatgaaataagaccacagcattttgtctttagtactgaagaagaagcggcacgactacgaaaaaatttgttggtaacacaagattaa

SEQ ID NO: 408464 - DNA, 618 bp, Staphylococcus aureus
atgaacaaaccttttatagcaattgaaggtcctattggcgtaggtaaatcttcacttgcacacaaattaagtcaaactttagatttttatgaagaaaaagaaatcatcacagaaaatccatttttatcagacttttatgaagatatctctaaatggagttttcaaactgaaatgttctttttatgcaatagatataagcaatttcaagatgtaacacaactaaatcaaggtgtagttagtgattatcatatacataaaaataagatatttgctaaaaatactttgagttctgttgaatttcagaaattcagtaaaatttatgatattttaactgaagatatgattatgccgaatatgattatctttttagatgcagaccttgatgtgttaaaatctagaattgctaaacgtaaccgtagttttgagcatcaaatagaagatgaatatctgttaaagttaaaaaaagattatcgtgagtattatgagtccttacaaagtaatggttcaaatgtagttttaatcgatacaacttctattgattttctaaaaaatgaacaagattacgaagatatattacatattatattacctatgataggagatattaccaatgaataa

SEQ ID NO: 408465 - DNA, 1434 bp, Staphylococcus aureus
atgtataaaaaaatgttcacaattttaattacgttattttctataatgtttatggttcctaatgatacttttgcagaaggtaagcacaacatgatggacatgaaagaaaatgatcaaaagcgaaatgatatgatggatatgaaaagtcatgacgaaagaaaaaatttgaattcttcacaaggaaaaaatgaaataacatttcccaaagttttagatcctaaaaaagataacaatggttataaaagttatacattaaaagcgcagaaaggaaagacagaattttacaaaggtaatttctctaacactttaggatacaatggaaatttacttgggccaactttaaaattaaaaaaaggagataaggttaaaattaagttagtcaacaacttagatgaaaatacaacatttcattggcatgggttagaaatagatggaaaagtggatggaggcccttctcaagttataaaaccaggaaaagaaaaaacaataaaatttgaggttaaacaagaggctgctacattatggtatcatccccacccctccccaaatacagctaaacaagtttataatggtttatcagggttattatatatagaggatgacaaaaagaataattatcctagcaattatgggaaaaatgatttgcctataataatccaagataaaacatttgtatctaaaaagttaaattatacaaaaacgaaagatgaagatggtactcaaggtgatacagtccttgtgaatgggaaagtagatcctaaattaacaacaaaagaaggaaaaatacgtttgagacttttaaatggctccaatgctcgggatttaaatcttaagctaagtaataatcaaagttttgaatatattgcttcagaaggcggccatttagaaaagactaaaaagttaaaagaaattaatttagctccttcagcaagaaaagaaatagtaatagatttatctaaaatgaaagaagaaaaagtcaatcttgttgataatgatgaaacagtaattttaccaattattaacaaagaaaaaagtactaacaaagacactactccaaaagtagataaaaaaatcaaattagaaggtatggacgataatgttactattaatggcaaaaaattcgatcctaacagaatagatttcacacaaaaggtaaaccgtaaagaaacttgggaaattgaaaacgtcaaagataaaatgagtggtatgaagcacccgttccatatccacggaacgcaatttaaagttttatcagtggatgggaagaaaccttcagaagatatgagaggcaaaaaagacgttatatctctggaacctggacaaaaagccaaaatagaagtggtttttaaaaatactgggacatacatgttccattgtcacatacttgagcatgaagataatggaatgatgggacaaataaaagtaacaaaataa

SEQ ID NO: 408466 - DNA, 2046 bp, Staphylococcus aureus
ttgtcgaataacaaaaaacaccaaaatcatgagcatcatagtcatcaagaacatgaaaatcacactagtcatggtaatcatgaacatcaccatcatggaaattttaaaagtaaattctttatttctttgatttttgcgataccgattattattttatcgcccatgatgggagttaaattaccgtttcaaatttcatttacagggtcagattggattgtattaattcttgctacaattttattcttttacggaggaaagccatttttatcaggggctaaagatgaaatttcaactaaaaaacctggaatgatgacgcttgttgctctaggtatttcagtagcttatatttatagtttatacgccttttatatgaataacttcagtggttcatccacacatacaatggactttttctgggaattagcgactttaattttaatcatgttattaggtcattggattgaaatgaacgcagtaggtaatgcaggcaatgcactgaagaaaatggcagaacttttacctaatactgcagtgaagctgattgataacaatcaacgagaagaagttaaaatatcagatattcatattgacgatattgtggaagtcagagcaggcgaaagtatacccacagacggaatcattgttcgaggagaaacatcaattgacgaatcattagttactggcgaatcaaaaaaagttcataaaactcataatgatgatgttattggaggttcaattaatggttcaggtacagtacaagttaaagtgactgctacgggtgaaaatggctacctatctcaagttatgggtcttgttaaccaagctcaaaacgataagtcaaaagctgaactcctctctgataaagtcgcaggttatttgttttactttgcagtaagtattggcctgatttcatttatcgtatggatgcttattcaaaacaacgtcgatttcgcacttgaacggctagtaaccgtattagtcattgcttgtccacatgcattaggcttggcaatacctttagttacagcacgttctacctctataggcgcacataatggtttaatcattaaaaacagagaatctgtagaaatcgcacaacacattgattacatcatgatggataaaactgggacactaactgaaggtaacttttcagtgaatcactatgaaagttttacagacgagttaaataatgaagaaatattgagtctatttgcttcattagaaagtaattctaatcatccacttgccactggtattgttgattttgctaaaggcaaaaatatttcatatgctactcctcaagaagttaataatattccaggtgtaggcttagaaggcacagttgataataaaaaactcaaaatagtgaatgtttcttatctcgataaaagcaattttgattataataaagaacaatttacgaatctcgctcaacaagggaattctattagttatctaattcatgaccgacaagttattggtattatcgcacaaggcgataaaattaaagaaagttcaaaacaaatggtttcggatttattatcgagaaacattacgccagtcatgcttacaggcgataataaagaagtggcacaaacagtggctgaagaattaggtattagtgatgtccacgcgcaattgatgcccgaagataaagaaagtattatccaagattatcaaagcaatggtagcaaaatcatgatggttggtgatggtatcaatgatgcgccaagccttattagagcagatattggtatggcaattggcgcagggacagatgtagctattgaatcgggggatgtcatactcgttaaaagtaatccttctgatattatcaattttttgtccctttcaaaaaatacgatgaaaaaaatggttcaaaatttatggtggggcgcaggatataacgtgattgcagttcctcttgcagctggtatattagcttctattggtttaatattatcacctgctgtgggtgcaatacttatgtctttaagtacgatcatcgtagcaattaatgcatttacattaaaattaaaataa

SEQ ID NO: 408467 - DNA, 576 bp, Staphylococcus aureus
ttgaaaataggttatgcaagagtttcaacaggattacaaaatttaaatttacaagaagatcgattaaatgcatatggttgtgaaaagatatttaacgatcatatgagtggttcaaaaagtaaaagacctggtttagataaagcaattgaatttgcaaggtctggagatactattgttgtttggagattagatagactaggacgtaatatggaggatttaattacattagttaatgagcttaatgaacgaggtgtaagtttccatagtttagaagaaaatataacgatggataaatcaagttctaccggacaattattatttcatttattcgcagcatttgcagaatttgaacgtaatttaattttagaacgttcttcagctggtagaattgcagcacgtgctagaggacggtatggtggaagacccgaaaaattaaacaaacaagatttaaaattgctcaaaacactttatgataatggtacgccaattaagacaattgctgaacaatggcaagtttcacgtacaacaatttatcgttatctcaataaattagaagatgaaaagagtgataagtaa

SEQ ID NO: 408468 - DNA, 996 bp, Staphylococcus aureus
gtgaagtccttaaaaagcaaagcctttatttatggtttattattcacatttatcatcgcagttataagtttattaggctcaaagttaccatttttagataagataggtgctttaacaattgctatactgattgcgattctatatagacattttaagggttaccctgaagcatatcgttcaggaatcgcattttcgtctaaacggttactgaaattagctattatattatatggattaaagttaaatatttatgatgtaattggaaaaggtagcgatttggtattaatcgatattggagtcatcctttttagtatcggattaatgttgttactaaataaatatattaaaggagataaaaacctcatcctattattaggtattggcactggggtgtgtggcgcggcagctattgcagcagtatctccaatattaaaatctagagaaaaagattctgcgattagtattggtattgtcgcacttattggcactatattttcgcttgcatatactgtaatatattctatttttacaatatctcctgaagtatttggggtctggtcaggtacaagtttacatgaaattgcacatgtaattcttgcttcagacttctcaggccaagaggctttgagtatgggactgttaggaaaactgggacgtgtgtttttattaatacctctgagtattattttaattttaattatgagaaaaaaatcgcatagtgagaatgaaaaaaagcgtattgatgtaccttactttttacttggttttgtcatgatggcattattccatacttatgtatccttgccacacatggttatgcaaattatagataatatcactactatatgcttattgatggcaatggttgcattagggttaaatgtttcatttaaagacttaaaagatcgtgctttcaaaccattaatagctgtcattattgtatctatttgtttatcaactgtgacatttattgttgctaagtacttttatagttag

SEQ ID NO: 408469 - DNA, 822 bp, Staphylococcus aureus
atggattcattaaaagttctaactgaagtagttaaaacgcaaagttttactaaagctgcagaaaatttatatacttcacagccatcaataagtcgcgatattaaacgattagaactggaatacgatgtaaaaattttcgaatttagacattctaaaatgtctttaacaagtgatggggagaaactatttcaatatgctttacaacgtgagcgattagaacaaaacttaagacacgatttgaaaatgcaacctgatataatttcaggagatttaacgatagggagtagttacacttatggcgaatatcgattgtcacaacatcttgctgatttagccaaaaattatcctgaattatacattcatgtgtatttaaataattctgatacagtattacaacatattaagaataacactatcgatttaggtataatcgaaaaagaggttcaaagtaatattatacacagtagacgtattgctcaagatgaaatagtattaattcgcaaaaaatcatcatcttcaaataagtcaatatgttttatcagagaacgtggatcagggacaagagtctatcaggaaaatgcgttatcacaaatgacttcatcctcttatttagtagaaattaacaacacaaatctaattaaaaatatggtccacgctgataaaggcttttctattgtttctaaatcaacattaacaccttatgatttagaaaagctagaagtaacaaacttagacatcaaacgttatttctatttagtcatacataaggataagtatattgatacgaagcttaatgaagttattaaaaatttgatttcatga

SEQ ID NO: 408470 - DNA, 324 bp, Staphylococcus aureus
atggaattttatcaaatgccaatgtttaataaagtgctaatgaatcatttgagactagagaaatatcaagacttaatgctaatttctcaaaaagattttgaagttggaaactcaatatacttaaatatcttagtaaaagatatcgaagaaaaatcacaaaacatttcacaaaaatttatagtaagccaattagaagaacaaccatggaacgctaaagaaatgacaataaaagatccagatggaaacttaatcacacttactcaatcaaatattagcgatactgattttgaaaaattaatgaaaaaaacttctaaagattattag

SEQ ID NO: 408471 - DNA, 174 bp, Staphylococcus aureus
atgaaaaagttttttatgttttttgtttgtttattaactgtgtttttaagttttaattttgttaattcgattttatttgacggttcttttgtctttttagaaagttttatttattcattggtttttacactcgtttttttaggattagagggggataaggagaaaaagaagtag

SEQ ID NO: 408472 - DNA, 171 bp, Staphylococcus aureus
atgttaagttatggtggattgcttaaacaaaagcataaaattttaaacttagacgatgccgaagatggtaatttgattaatacaagtgatgaagataaaacgacagacgaagaaaaaaagcacattcaattaccgcaatttggaatttcgaaaagcaaaattattatttaa

SEQ ID NO: 408473 - DNA, 426 bp, Staphylococcus aureus
atgaatgacttgaatgatataaagtacaaaaatgaaattagtaatcattcaaatcaatttacacataattttgatgataaagaaatgctattgcaagaattcccagaacaactaactaattatttattaaaatatgattatagagatttagaaatcataaaggctgttattcttaaagcaaaaaaatcatttaattcaaggcatgaagatatgcattacatgttagaggacattgaggatgaaatattaacttctttaaaaagacttaaaaaagctatacatgataggggagttaaaggccaaaaggaaacaataaagtcaatgcaagcttatttaatgcaaacaattctaactgaacttgaagaaacacatgccctttatatgcgccgtaaaaacatgaaacaatataatatctttaatcaataa

SEQ ID NO: 408474 - DNA, 486 bp, Staphylococcus aureus
gtgcaagaaaattacaaagaaagattttatcaaatccctaaagtattctttaccagtgaaaattataaaaatctaactaatgatatgaaaatagcctatgctatcttacgtgatcgcttaaatttatctattaaaaataactgggttgatgaagatggtaacatttactttgtttattcaaatgaaaagctaatggaaatcttaaattgtaaaaaagaaaagttaacaaaaataaaaaaagggttagaaaacgatggtctactcattcaaaaacgacgtggtttaaataaaccaaatattctatatttaatgaaacctattgtcacagaacgtgatatttacaaaatagaaaaagaagaaaacgatgttgaactttacggcgagaaggaagttcgaaaatcgaacgtccagaagttcgaaaatcgaacactaatgatactgactttaatgacattgactttaatgatactgagaataatgatatga

SEQ ID NO: 408475 - DNA, 744 bp, Staphylococcus aureus
atgaaaagtgtgaaaaagttgagtgaagaattaggggttagtaagcaaacgatttttaataatattaagcgattgaatatagagacaataaaacaggaaaacacttcgtttattaaagaagataccgatatagaaaaaatcattcaaagagtaaatgaaaataaaaagaaatatggttttgaaagtactactgaagacaaacaaaaaaaagggtcggataatattaattttgaatcgaaaagcgatgctcaaatagtagaaatccttaaaaatcagattgatactttaaataatcaaattgaaaaacaagaaagtcgtcatgaaacaacaattgaattttacagaaaagagttgcaagaaagatcaaaattgcttgaaaatcagcaagttctggcattagagagtaataaaaagattcaaaaattagaaaatcaattagaaaaagaaaaacaccttaattatccctttgatacatctactaacactagacaaaacgttgatgcacaagaaaaaacatatactactaatcctgtaaatattaacagagatcaggaagaaaccaaagaaacagagattcaatataaggatatatctggaagtcaaagcgacgaaagtacacaaggtgaagaagcaaaaagagaagacgttccagctaatctaaatgacaatgatagtgatatagaagaaaagagtgaagaaacggaacctaaaaaggggttttggagtcgtttgtttggtagctaa

SEQ ID NO: 408476 - DNA, 342 bp, Staphylococcus aureus
atgaaattagctgaagctataaaagaacagagagaattaaaaagatggtctcaagaggaattagccaatatattaaaggtttccagacaaagtgtttctaaatgggaaagtgccaaaaactatccttccttagatattttgattgctatgagcgatttatttggaatctctttagagcatttaattaaaggagatgcacgttttaaaaaagttattttagagggaaattatagagagagtaacagggcaccttccatagttgattttctttatgatttttggtggcttttctttcctgttgccggatttttagtttgggccattcattcgttcatgggttga

SEQ ID NO: 408477 - DNA, 861 bp, Staphylococcus aureus
atgacaggagagacagttgtatataaaaatgaaatgaatttagttccattaaggcgatttacagctactgaaattaatttattttttgcgatgtgtaataaattaaaagagcaagatactaatacattacgtttgtcttttgatgaattaaaaaaattaagtaattatagtccagaaacacgtaatattaatagatttgctaatgatttagataatgtgtataaaaagatgttgaatttaaccattagatatgaagatgatgatgtaatagaaagattcgttttattcaatcattatagaatccataagcgagaacaatatctagaaatatcaacttcttcaaatttaaaacacatattgaattcaattactaataattttacaaaatttgaattaaaagaaatgactaggcttaaatctacatattctaaaaatatgtttagattacttaaacaatacaaacatacaggctatttaaaaattcacatcgatgattttaaaaatcgtttagatatacctaaatcttatcgtatgactgatattaacaaaaatgtttttaaacctattattattgaattaggttctatatttaataatcttactatcaataaaatcaaagcgaaaaaagggcgtaaaattgaatggatagagttcacatttgacgctgagaaacgcattcataacaaacgacaacctcaaatgtccaagatagataaatcaagacaatatgtgaggcgtgaaaagacgcctaaatggttagaagaacggtcatatgaaaagcaacctcaaaaagattacgacccacaattagagaaagaacgagaggattttttaaaacaacttgaactgaattgggaataa

SEQ ID NO: 408478 - DNA, 501 bp, Staphylococcus aureus
atgtatgaaattaaaactaaaaatgtaggtggatggtttcataaagagaagcaagaaacaggcaatattgtaattactaaaacttattttgaaaaatacactaaacaaattaaagcagcacagatgatattagatgattatgaatggattaaaagtgggaagtcattaaaaaaatcagagaaacaaaatgaaagtttagttaatgaattgactagtgtccatatggaaaatgaaaagctggttgaagaatttaatgatttagcacaacgttataattatttgttgtcagagaatgaaaagaaagataaagaactaaattatacgcttaagttattcaatcaagtttttaaaatcattaaaagtatgatgaaagaagagcgttatcatacgctaataaatcatattgataatcatttagacaattctaaaatacgtgaagtaatgacgatagataacaatgatgaacagttctttaagaagaaatatcaagcacaagaatga

SEQ ID NO: 408479 - DNA, 327 bp, Staphylococcus aureus
ttggaagaagaatacggtaaagaaaatcttttatatgcgacagtacatatggatgagataacaccacatatgcattatggcgtaattcctattactaaagatggacgtttaagtgcgaaagaagttgtaggtaataaaaaagcattaaccgaattccaagatagattcaatacgtatattaataagcaaggctatgatttaaaacgaggaatttctagacaacttacaaaagaaaaacatgatcaagttagcggctataaacaaaaaacagaatatcataaacaaatgtatatgcgcgagaagcaaatagaggatcatttaaagtga

SEQ ID NO: 408480 - DNA, 378 bp, Staphylococcus aureus
atgtcttattcaattattcgagttgttaaagtgaaatcaaaaacaaatacaagaggtattcaaagagaaaataaaaattatgaaaatatagatattgatttaagtaagtcatatttaaactatgatttagtcaatgatactaagtttgattttaataaaaaaattgatgagaaaatcgaaaaaaattataaagggaaacgcaaaattagaacagatgccattaaacatattgatggattaattacatcagataatgtgtttttaatcaattatctgaagaagagacaaaatagttttttaagcatgctaaagcgttcttggaagaagaatacggtaaagaaaatcttttatatgcgacagtacatatggatgagataa

SEQ ID NO: 408481 - DNA, 273 bp, Staphylococcus aureus
atgattttttcgcaaaatttatttcgtcgtcccaccccggcaaggttgactagaattgaaaaaagcttgttacaagcgcattttcgttcagtcaactactgccaatataacttcgtagagcatagaacattgatttatgtcccagcctgtacaattatatatatttgcgaaataaaaaagaccggaacatatcgagaattccccgatatattccaatctaaaagttacttatataactattggttagctatgcataaatggcttatgcagtaa

SEQ ID NO: 408482 - DNA, 696 bp, Staphylococcus aureus
atgaagaaaacattactcgcatcatcattagcagtaggtttaggaatcgtagcaggaaatgcaggtcacgaagcccaagcaagtgaagcggacttaaataaagcatctttagcgcaaatggcgcaatcaaatgatcaaacattaaatcaaaaaccaattgaagctggcgcttataattatacatttgactatgaagggtttacttatcactttgaatcagatggtacacactttgcttggaattaccatgcaacaggtgctaatggagcagacatgagtgcacaagcacctgcaactaataatgttgcaccatcagctgatcaatctaatcaagtacaatcacaagaagttgaagcaccacaaaatgctcaaactcaacaaccacaagcatcaacatcaaacaattcacaagttactgcaacaccaactgaatcaaaagcatcagaaggttcatcagtaaatgtgaatgatcatctaaaacaaattgctcaacgtgaatcaggtggcaatattcatgctgtaaatccaacatcaggtgcagctggtaagtatcaattcttacaatcaacttgggattcagtagcacctgctaaatataaaggtgtatcaccagcaaatgctcctgaaagtgttcaagatgccgcagcagtaaaactatataacactggtggcgctggacattgggttactgcataa

SEQ ID NO: 408483 - DNA, 927 bp, Staphylococcus aureus
atgaaaaataataaagatgaaaaaataagaatatccataattaacggatttttgggtagtggtaaaaccacgttactgacacattatattagtgaattattaaaaaatgatgagaaaattaaaatcatcatgaatgaattcggtactgttgatatcgatagcaatagtatttcaaatgaaattgaagtccattcattgattaatggttgtgtttgttgcgatcttaaacaagaacttgtctatgaactaaaagccattgctttaaaaggggacgttaatcatgtcatcatagaagcgacaggcattgcgcatcctttagaattactagttgcatgtcaagatccgcaaatcgttaatttctttgaaaagccaattatttatggtgtattagatgcgactcgatttttggaacgtcatcaatataccgaaaatacagtttcgctgatggaagatcagttgaaactaagtgacatgattattattaataaaattgatcttgtaactgatgacagtattgagaaaattgataagcaattaagtttgatttgtgcaagtattccaacttataaaacaacctatggacaagtttcgttggaagaattggacttacctggtaaagacagagagatatcgtcgcatcatcaccatcatcatgggattaaaagtatgacttacacatttacaggtccgattgatcgtcaattgttttatcaatttataatgaaattatcggaatctgttctacgtttgaaaggttatgtatcatttagagatcaaccaaatgcaatttatgaatttcaatatgcttatggtttaccagattatggaataattggcatgcaattaccattaacgattgttattattggtgaaactttagatacaaatcacatacgtaatcaattggatatgctacaatttacgtaa

SEQ ID NO: 408484 - DNA, 1674 bp, Staphylococcus aureus
atgaaaacacgactaaaatttcaagtagataaggatttattgttagctatagttgttggtgtttgtggaagtttagttgcgctcgccatgtttttcttaagtggttatatggtgacacaaagtgcacttggtgcgccactatacgctctgatgattttagtcgttacagtaaaattgtttgggtttttaagagctattactcgatacgtagagcgccttatttctcataaagctacatttacaatgctacgtgatattcgggtacagtttttcggtaaattagtaaatgtcattcctaatgtttaccgtaaactgagttctagtgatttaatttcacgtatgattagtcgtgttgaggcgttacaaaatatttatttacgtgtttattatccaccagtcgtcatcggtttgacagcgctagttacagtaatagtattggcgttcatttcaatcggccatgcgctattgattatggttagcatgttgtttactttactcattgttccttggttaagctcaaaaaaagcacgtactttaaagaaacatgcagctaatgaacaggctcgatttttaaatcatttttatgattataaagctggtatggatgaactacgtcgatttaatcaaattaatcattatcgaaataatttgatggctaaattaaatcattttgataaattacaacttaaagagcaacgctttttaacgatttatgattttatattaaatattattgctatgctttcgatttttggtagtttagttctaggattaattcaaattaatgcaggccaactaaatattatttatatgacgagtatagttttaatggtcttaactttatttgaacaagctgtaccaatgacaaatgtcgcgtattataaagccgatactgaccaagcattgcacgatattaatgaagtgatatctgtaccttctaccaatggaaataaacgccttaatgataagtatgatgcaacgaacatttatgaagttaaggacgctagttttaagtattggaaccagcaaacgtatgtgttgtcggatattaattttaatgttaatagaggcgaaaagattgcgattgtgggtccttctggttcaggaaaaagtacattactacaaattatggcagggttatatcaattagatagtggctctattcgtttcgaaaatatggatatgtttgaaatagatgacaaagataagtttgaagcgttaaatgtcttgctacaatctcaacaattatttgatggtacaatacgtcaaaatttatttaccgatgaaaaagatgaagcggtgcaagcaatatttaagcaattagatttagaacatttggcactagaacgtcaaattgacttagatggtcatacattatctggcggagaaattcagcgtttagcgattgcgaggatgttattaaaagatactgcatcaacgtggattttagatgaaccaacaacggcattagataaacaaaatagtttgaaagttatggatttaattgaagcacatgcagaaacattaattgttgctacacacgatttaactttattgtcacgttttgagaccatcattgtgatgataaatggtaaaatagttgaaaagggaaactatcaacaattactcgctaatcaaggtgctttatggaatatgattcaatataatgcataa

SEQ ID NO: 408485 - DNA, 444 bp, Staphylococcus aureus
atgaggacacttaataaagatgaacataattatatcaagcaaatagctaatatacatgagacattattgtcgcaagcagaatccaactataaatgtactaaactgagtattgctcttaggtacgagatgatatgttcaagattagaacatacaaatgataaaatttatatatatgaaaatgaaggtcaattaatagcgtttatttggggacattttagtaatgaaaaaagtatggttaacattgaactgctatatgttgaaccacaatttcgcaaactgggaatagctacgcaactgaagattgcgcttgaaaaatgggcaaaaactatgaatgcaaagcgaataagcagtacaattcataaaagtaatttaccaatgatatctttgaataaagatttaggttatcaagtgagtcatgtaaaaatgtataaagatattgattag

SEQ ID NO: 408486 - DNA, 822 bp, Staphylococcus aureus
atgaaatttaaaataccagaaaactttaatgacttaagtttacgagatattttccaacaacttaaggtacctaaaaaagatttacatcatttaaatatgtctaaagatattactattaatgataaacctgcgcgattaatggataaagtgcatactggcgacgatgtatttgttccaaccatcgatgaaaaaagtaattatgttccaagttatcgttatgcacaaattaaatacgaagatgatgatatggcaatcgtaatgaaacctaaaggtgttaagacccaccctaatgatttaaaagaaagcaatactttaatgaatcatgtgatttacacggttgatagcgattatgtcgaaccaattcatcgactggaccaggaaacagtaggattattaattgttgctaaaaatcctttaatgaaaaaaattcttgatcgcatgttagaagacaatgatattacgcggatatacaaagcaaatgttaaggcacttttacctttaaaaccacaaacgattgatatgccaattggtaaagataaattccattcgaataaacgacgtgtgtctcctactggacagcgtgcaattacacacattttaacttcaaaaatgataaaagaaactgtgtgccaacttgaaatcaagttggatactggacgtactcatcaaattcgtgtgcatttagctgaaattggtcacccagttattggtgatcctttatacggtgattcaacgttaagacaattagaacttgaaagttacaaaatagagtttgtgcatcccttgactaaggaagtcatttccgtttctttggatgactaa

SEQ ID NO: 408487 - DNA, 396 bp, Staphylococcus aureus
atgttaggaaaatactggattcaattattgatagcaacagttattataagtttaatatcaattaaagcatttccattggcaattggggcattatatttacctattattttcaaagtaataaaattacaactcaatttatcaaaaggattaatcgatgatgttaatgcgcaaacattcattaaaagtaatcaatcaggtattgtaataagtgtaatttgttgtttattaataacaggaatattgtattatacacttgatgggttttatgcgagtttaacaggagtattaggtacgcttgttgctctaaatccatatacgacaattgttagtgctgtattatatatacttacagctattgctacggttgaagctactaaaacaaagtatcgtaattaa

SEQ ID NO: 408488 - DNA, 642 bp, Staphylococcus aureus
atgacacaaaatatcattactgttaaaaaagaacacattattgaaaatgtgattagtaaatcaagattcattgctcatatcaaacctgttcaaaatgaagatgaagctaaagcatttattgctgcaataaaaaaagaacataaagatgccactcataattgttctgcatatactattggacctgaaatgaatattcaaaaagcgaatgatgatggtgaaccgacaggaactgccggtgtcccaatgttagacatattaaaaaagctcgatgttcataatgcgtgtgtcgtagtaacaagatattttggtggtattaaattaggtggtggcggtttaattcgcgcctatagcggtgctgtcagagacgtcatttatgatatcggacgtgtcgaactacgagaagcagtaccatgtatagtaacactgaattatgatcaaactggtaaatttgaatatgaattagcctcaactcattttatgttaagaaaccaaacttacactgataaggtaagctactatatcgatgtcgttaaaagtgactatgaagcgtttattaattttttaaatcaaatgactgctggaaatttcgatttgactgaagaaactccaaagcagttacctttcgatataccaactgaataa

SEQ ID NO: 408489 - DNA, 528 bp, Staphylococcus aureus
atgttcaaatcattgataggaaaagatatttctgaagaggatgcaaattatgcatctggtcttacagctgtatgttcgattataaatggcggtaaacaatttaactctgtaccagatgaagcttcacttgaatttaacgtaagaccagttcctgagtatgataacgactttatagaatcgtttttccaaaatatcattaataatgtggatagcaataagctttcactcgatattccaagcaaccatcgacctgtaacaagcgataaaaatagcaaattaattactacgattaaagatgtagcttctagttatgtagacaaagacgatatatttgtttcggcgcttgtaggtgcaacggatgcttccagcttcttaggagataataaggacaatgttgatttagccatttttggaccaggtaatccattaatggcacatcaaatcgatgaatatattgaaaaagatatgtatctgaaatatattgatattttcaaagaggcttccattcaatatttaaaggagaaataa

SEQ ID NO: 408490 - DNA, 2070 bp, Staphylococcus aureus
atgaaatttaagtcattgattacaacaacattagcattaggtgttttagcatcaacaggagcaaactttaatactaacgaagcatctgccgcagctaagcaaatagataaatcatcaagttcattacatcatggatattctaaaatacagattccatatacaatcactgtgaatggtacaagccaaaacattttatcaagcttaacatttaataagaatcaacaaattagttataaagatatagagaataaagttaaatcagttttgtactttaatagaggtattagtgatatcgatttaagactttctaagcaagcaaaatacacggttcattttaagaatggcacaaaaagagttgtcgatttgaaagcaggcattcacacagctgacttaattaatacaagtgacattaaagcaattagtgttaacgtagatactaaaaagcaagtgaaagataaagaggcaaaagcaaatgttcaagtgccgtatacaatcactgtgaatggtacaagccaaaacattttatcaaacttaacatttaaaaagaatcaacaaattagttataaagatttagagaataatgtaaaatcagttttaaaatcaaacagaggtataactgatgtagatttaagactttcaaaacaagcgaaatttacagttaattttaaaaatggcacgaaaaaagttatcgatttgaaagcaggcatttatacagcgaacttaatcaatacaggcgatattaaaaatatcaatataaatgtagaaactaaaaagcaagcgaaagataaagaagcaaaagcaaataatcaagtgccatattcaattaatttaaatggtacaacaactaatattcaatctaatttagcattttcaaataaaccttggacaaattacaaaaatttaacagcaaaggttaaatcagtattgaaatctgacagaggcgttagtgaacgtgatttgaaacacgcaaagaaagcgtattacactgtttactttaaaaatggtggtaaaagagtgatacatttaaactcgaatatttatacagctaatttagttcatgcgaaagatattaagaaaattgaagttacagttaaaactggatcaaaagcgaatgcagagcgttatgtaccatacacaattgcagtaaatgggacatcaacaccaaatttatctgatttaaaatttaaaggtgactcacgtgtaagttacagtgatatcactaaaaaagttaaatcagtattgaagtatgatagaggtatcggtgaacgtgaattaaaatatgctaaaaaagcaacttatacagtacattttaaaaatggaacaaaaaaagtgattaatttaaactcaaaaattagccaactgaatttgctttttgtcaaagatattaaaaagatagatgtcgatgttaaaacagggtcaaaagcgaaagcggatagctatgtaccatacacaatcgcagtaaatgggacatcaacacctattgcatcaaaactaaaactttcgaataaacaattaattggttatcaagatttaaataaaaaagttaaatcagttttaaaacatgatagaggtatcaatgatattgaattgaaatttgcgaaacaagcaaagtatactgtacactttaaaaatggaaagacacaagtagttgaccttaaatcagatatctttacaagaaacttattcagtgtcaaagatattaaaaagatagatattgatgtaaaacaacacactaaatctaataaagcgcttaataaagtggctaacatagcgactaaagtgaagtttccagtaacgataaatggattttcaaatgtagtttcaaatgaatttgcgtttttacatccacataaaataacaacaaacgacttgaatgctaaacttagactagcgttagcaagcgatcaaggtattactaaacatgatattggactttctgaacgcactgtgtataaagtgtattttaaagacggatcatcaaaatttgttgacttaaaagctgcgaaacaagattcaaaagtatttaaagcaactgacattaaaaaagtagacattgaaattaaattttaa

SEQ ID NO: 408491 - DNA, 1236 bp, Staphylococcus aureus
gtgtttgcgaacaatattgcacatatgatgggtgatagccatttaacacctatgattcaagctgcaagtttaagctttatatttataggtatgcttggcgtgttaagaggttattatcaatctgcaaataatatgacagttccggctatttcccaggttatagaacaagttatacgagtaggtattatcattgttactattgttatttttgtagatagaggttggacgatatatgaagcgggtacaattgctattttagcatcaacgataggttttttaggttcttcaatttatttagtagcgcaccgaccttttaagtttaaaatggtaaataacactgcaaagattgtttggaaacagttcgcactttcggttttgattttcgctatcagtcaattaatcgtaattttatggcaagtgattgatagtgttactattattaagtcacttcaagcgatacgcgtgccattcgatgttgctataactgaaaaaggagtctatgaccgtggtgcatcatttattcagatgggattgattgtaactacaacatttagttttgcgctcattcctctgttaagtgacgcaatcaaaatgaataatcaggtacttatgaatcgttatgcaaatgcgtcattaaagattacgattttaataagtacagcagcgggaataggattaattaatttattgcctttaatgaacggtgtattttttaagacgaatgatttaaccttaacgttaagcgtttatatgattacggttatttgtgtatcgttaattatgatggatatggcattattacaagctcaacatgctgtgagaccaatttttgtcggtatgacggcaggattggttattaaatttatacttaatatcattttgattcgtttaagtggcattattggtgcgagcattagtactgttgtatcattaattatattcggtacgattatccatattgctgtcacgagaaaataccatttacatgcgatgagacgattttttatcaatgttgttttaggtatggtatttatgtcgattgttgttcaatgcgtgttaaacatagtgacaacacacggtagaatcactggactcgttgaattattatgtgcagcagtattaggtatcattgcattgtttttctatatttttagatttaatgttttgacatataaagagttaacttatttaccatttggttcaaagttgtatcaaattaagaaaggaagacgttga

SEQ ID NO: 408492 - DNA, 1296 bp, Staphylococcus aureus
atgcagttaaatagtaatggttggcatgttgatgaccatattgttgtcgctgtttctacaggtattgatagtatgtgtttattgtatcaactactaaatgattataaagatagttatagaaaactaacatgtttacatgtcaatcatggcgttaggtcagcttcaatcgaggaagccagatttttagaagcatactgcgaacgtcatcacatcgatttacatatcaaaaagttggatttgtcgcatagtctcaatcgaaataacagcattcagaatgaagctcgaattaaacgttacgaatggtttgatgaaatgatgaatgtattagaagcggatgtattgctaacggcgcatcatttggacgatcaattagaaactattatgtatcgcatttttaatgggaaatcaacgcgtaataaactaggatttgatgagttgtcgaagcgaaatggttatcagatttatcgaccacttttagctgtctctaaaaaagaaataaaacaattccaagagagatatcatataccatattttgaagatgaatctaataaagataacaaatatgttagaaatgatattcgtaatagaattattccagctattgatgaaaataatcaacttaaagtatcgcatttattaaaattaaaacaatggcatgatgaacaatatgatattttgcaatattcagctaaacaatttattcaagaatttgtgaagtttgatgaacagtcaaaatatttagaggtttctaggcaagcttttaataacttgccaaactcattaaagatggttgtgttggattgcctattatcaaagtattatgagttgtttaatattagtgctaaaacatacgaagagtggtttaaacaatttagtagtaagaaagcacaattcagtattaatctcacggataaatggataattcaaatcgcatatggtaaattaataataatggctaaaaataatggcgatacatattttagagttcaaactattgaaaagccaggtaattatatttttaacaaatatcgattagagatacattctaatttaccaaaatgtttatttccacttacagtgagaacacgacaaagtggcgatacatttaaactgaatgggcgcgatggttataagaaagtaaatcgcctgtttatagattgtaaagtgcaacagtgggttcgggatcaaatgccaatcgtattggataaacaacagcgcattattgcggtaggagatttatatcaacaacaaacaataaaacaatggattataattagtaaaaatggagatgaatag

SEQ ID NO: 408493 - DNA, 366 bp, Staphylococcus aureus
atgacaacaacaccatatgacatcattggtaaagaagcgttatacgatatgattgattatttttacacccttgtagaaaaggatgaacgacttaatcacctgtttccaggagattttgcagaaacaagtcgtaaacaaaaacaatttttaacacagtttttgggcggtccaaacatttataccgaagaacacggacatcctatgctaagaaaaagacatatggcgtttacaatcactgaatttgaaagagatgcatggttagaaaatatgcagacagcaattaatcgcgctgcgtttccacaaggtgttggagattatttatttgagcgcttaagattaactgctaatcatatggtgaattcctaa

SEQ ID NO: 408494 - DNA, 870 bp, Staphylococcus aureus
gtgaaagcatttaatcaacgtaggctaatgaaagcgtcgaatatcgtcaattgttctcgtattaacttagcctctaaagcatttcctagccaaaatgacaatattacacatcatgcaacggtaccacttaaatcgggtcaagaacaattcggcattttaaatgtagcgtcaccaaatactgaaatttatagtgatgaagatttagagttgctagagtctgtcgcatttcaattagggtcagccatcaaacgtatttatttaacagaccgtgaaaaagaagcagcaaaaattaatgaacgtaatcgtttagctagagatttacatgattcagtaaatcaaatgttattttctgtaaaactaacagcacatgctgcgtatggcatgtcaaacgaatccattgctaaacaagctttcaagacgattgaggaaacgagtcaaaatgccgttaatgaaatgcgtgcattgatttggcaacttaagccagttggacttgagcaaggcttaattcatgctttgacagcatatagtaaattaatgcatatacaattaaatgtaaatgtagaaggtttaatcgatttatctaatgaaatcgaagaaaacatatacagagcattacaagagtgtattaataatgttaagaaacatgctgatacgaataaaatggatcttacattaaaacaaatgaacgatatactatatattgacgtgattgattatggtcaaggatttgagatcgataatgttcagatagcttcatcacacggtataaataacataaaacaaagagttaaattattaagaggtaaagtgacctttcattctcagccaacaaagggtacacaaatacaatttacaattcctataaaatag

SEQ ID NO: 408495 - DNA, 627 bp, Staphylococcus aureus
gtgataaaacttgaaaatgtttttgtaaaaaaaggtaataaaaacattttagacggatgtaactttaattttgaaaaaggaaaatcatatgctttagttggagaaagtggcgctggaaaatctactttacttaacataatcgccgggttcgaagatgtatcacaaggaagcatatatattgaagataagttactaaaaaagaaagtcgatttttatagatatacgttagggtatttgtttcaaaattttgctttacttgaaaatcaaacaatcagtcaaaatttaggtttagccctaaagttcaaaaagaataaaaaagataatatgaacttaaagaaagaagtattaaaaaaggtcggcctagatttagatatcaagagaattgttagttctctaagcggtggtgaacaacaaagagtagcattggcaagattaatattaaaagatccgaaaatcattttagctgatgaacctactggatcactagatacgaaaaatggaaaaatagttattgatttattattgaagctacttgatgaaaataaaactatgattgtcgtaacgcatgatttagagcttgcgaaacgatttgatgtcatagtcaatatttctgagcttagaagttaa

SEQ ID NO: 408496 - DNA, 312 bp, Staphylococcus aureus
atgaaaagaactttaattattgtaacaattgtactattaatcatcatacttagtctgttattggttagaaatgagcatttagatcgttttaacccactgttaaaagaaaaagtatcttatgccaaagttccaaaagatacccaggactatagaaatataactgtatactctaaaaatggagaaaaaaagagttataaattggattttttaggttatgatcctacaaaagaatatgtgaaagtaaatcataaagggaaatatgtgcgttcgatagaatacattacaaaagatattcctagctttttaaaatga

SEQ ID NO: 408497 - DNA, 1935 bp, Staphylococcus aureus
atgaaaaaattcaaattatttttagattttagtactttattattaatttcagggctattatttttatttttcttcaaagaaaatgaagaaattatacctgaaagttccaatattttaacaatctctaattgggataaatctaacagtaaatcaaaagtgttagatgtcattgaatcaggcgccaaaaatcaaaatatacaaataattaaatccgttaaagattttgataataaaaaagaattttttgttttcaactcaaaacgaaataattctgactttatacgtaataaaacatcacttttaactccatcagatttattaaacagagagataaaaggaaagtattatattattggtgaacatttcaatgtagaagagcttacgagtgaattaaaaaaagctggtttaacatctgaagttgaatacataaatagaaacatattattttttgaattagtcatagataatgatttattagtgcctttcatattcttaggcgtattatatcttttgtacttcttatatgacagaggatataatttgaaattttatgctattcaaaagctacatggcttttcaactacacgcattatttttcataatattcatataaaaatcatttattggctagtacttaccactattttctttattgctaatatattaatcattcatatagccaatttagaattggatttcttaatgtttattcgtagatttatcgtgttgctttttgtttttgcttgtattactacattgttgtggctgatttcgtatagtcttcttttgaagttaagtattccattaaccttaaaagggaaaaaaggatataagttttcaatatttatgggtaccttcaccaaatgtatcatggtgctaatactatcttttttactggcacaaaatttaaatgcttatacgaagttaaagaatatatatgactctgaaaaaatctggcaaaagttagataattactatacattagagatttctcctaatattagaaattcagaagaaaaacaaattttagaaactaatatatacaatttaattaagaaaagcgaacaacttggtggattgcttttaaagaataataatatagccaatcccgataaaaacaattacattcctgaaaatggcaatgtcttttttatcaataacaattttctgaatttctataaaaatataaatcatgattttaaaatgattgtcaatcattcggataaaataaacgtgtttattcctccaaggttacaatatcaaaaatctgaaattcaaaaaaatcaccaaggatggattgactttcaaaagcaacaaaacaaaaaagtagatgtgcaagtactgtcaaaaaacgtatctgttttttcttttgatcgcacaactaatttgaaatttggatatctagattctccaatagtaatgttgttgacacctgacgatttaacaggagatttttatttagctgctgtttctcaaggtggatatctatttaaagatttagatacacttaaacagttgcttaaagataatcacctagaagaagaaattagcggtataactaattacaaggattctgtgttaaatgaattaaatgaaacgaaaacaaaaatgataataacaatagttactattattattaacgttttcattcttttgatagctactgtatttgaaacaattcaatattttagctggaataaaaagcaactattattaagaaaaattcatggttattcattattcagcagtaatgtacgttatttaacaatttctattttactttctattatgttagcttacactacgcatattttatttggttcaaagatattactattcataataatgtctattgctattattcaacatttacttcaaattgcttatattaaatatcttgaaaaatactttaaagatttaatgagggagatttaa

SEQ ID NO: 408498 - DNA, 294 bp, Staphylococcus aureus
atgaaaaagaaatttgtttctagttgtattgctagtacaatcttattcggcactttattaggtgtaacttataaagctgaagctgcaacagtacatgtagctggtggtgtttggagccatggtattggaaaacattacgtatggtcttattatagtcacaataaaagaaatcatggttcaacagcagtagggaaatattcatcttttagtggtgttgctcgacctggtgttcaatctaaggcatctgctccaaaggcttggggtggaaacaaaacattttatagtcttcactaa

SEQ ID NO: 408499 - DNA, 396 bp, Staphylococcus aureus
atggataagaaaacaatttattttatatgtacaggaaactcttgtcgtagccaaatggctgaaggttggggaaaggaaatattgggtgaaggttggaatgtctattctgctggtattgaaacacatggtgttaatcctaaagcaatagaagctatgaaagaagtagatattgatatatcaaaccatacgtcagacttgattgataatgatattttaaaacaatcagatttggtcgtaacgttatgtagtgatgcagacaataattgtcctattttaccaccaaacgttaaaaaagagcattggggttttgatgatccagcaggtaaagaatggtcagaattccaacgtgttagagacgagattaaattagctatagaaaagtttaaattgagataa

SEQ ID NO: 408500 - DNA, 1290 bp, Staphylococcus aureus
atgactattttagcaattgtaatttttcttttaactttaacctttgtgatttggcaaccaaaaggtttagatattggtattacagctttaattggagctgttgttgctatcattacaggagtcgtaagtctttctgatgtattagaagtaacaggtattgtttggaatgcaactttaacttttgtggctgttattcttatttcattaatattagatgaaattggtttttttgaatggtctgcgatacatatggtcaaggcttcaaacggtaatggcttaaaaatgtttgtttttattatgttacttggagcaattgtagcagcatttttcgcaaatgatggtgcagctttaatcttaacgcctattgtattagcgatggtaaggaatctaggatttaatcaaaaagtgatttccccctttattattgccagtggttttattgctgatactacatcacttcccttaattgtaagtaacttagttaatatcgtttctgcagattacttcgatattggatttattgaatattttagccgaatgatcattcctaatatattctctctgattgctagtattctcgttttatggttatatttcagaaaatccatacctaaaacgttcgatacagaaaatctatcagatcctaaaagtgcaattaaagattctaagttatttaagctttcatggatagtattagcagtactactcgttggatatcttgttagcgagtttatccaaattcctgtatcaattattgctggtattattgcttttatctttgtaatattagctcgtaaatctaaagcagttcatacaaaacaagtgattaaaggtgcaccatggaatatcgttgtattctctattggtatgtatcttgttgtgtttggactaaaaaatgtaggtattacaacggtccttggggatgttttaacaaacatttcaaattatgggttatttagcagcatcatgggtatcggctttatagctgctttcttatcttcgattatgaacaacatgccaactgttttaatagatgcaatagcgattggccaatccagtgctacaggaatattaaaagaaggcatggtttatgcgaatgtcataggttctgatttaggacctaaaattacgccaattggttctttagcaacattattgtggctacatgtcttaacacaaaaaggtgtgaagatttcgtggggaacatactttaaaactggaattatcatcactattccagtcctatttgtaacactcttaggtttataccttacactaatcatattttaa

SEQ ID NO: 408501 - DNA, 315 bp, Staphylococcus aureus
atgtcttataaagaactatcaacaatattaaaaattttatcagattcaagtaggttagaaatattagatttactttcttgtggtgagctatgcgcttgtgacttattagaacactttcaattctcacaacctacactaagtcatcatatgaagtcattagtagataatgaattagttacaacacgaaaagacggcaataaacattggtatcaacttaatcatgctattttagatgatattatccaaaacttgaacatcattaatacatctaatcaaagatgtgtatgtaaaaatgtggaatcaggtgactgttga

SEQ ID NO: 408502 - DNA, 318 bp, Staphylococcus aureus
atgatgaatgaagtcattggaaatccactactagataaatttatgaaagatttaattattcaaattttagcaatgatttcagaacaagaaagaaatgaaagtaaacgtcgacaagctcaagggattcaagtcgccaaagaaaaaggtatatataaagggagacctattctgtattctcccaatgctaaagacccacaaaagcgtttagtttattaccgagttgttgaattacttgaacagggtaaatctataagtactatagctaaagaagttggtattacacgtcaaactatatatagaataaaaaatagtaaataa

SEQ ID NO: 408503 - DNA, 213 bp, Staphylococcus aureus
ttgaataaaaaaaatgagttagatatagcttttattatgtctaccgttttgaatgttttatttttagttgggttaactttcttagttcaattagaaaatttatatattttaattccatatactattttgggttttataaatgcagtttatctaactgttagggctataaatattactaaaaataggaggttctgttgcaaagttaaaaaataa

SEQ ID NO: 408504 - DNA, 354 bp, Staphylococcus aureus
gtgcttacgaatgcggcagtcggtgatgagacagaaacgaaagaagttgtagtcaagcgaggggaatataaagagaatccacaaagtggcaaagtacagctagtctataacgaacatgttgaactgatagaggtaccaataaaacctagtgatcgtttaaaagctcgtgatatgttgggtaaataccataagttatttacagataagcatgatattaacgggaatgtgcctatattcattaatattggtgaatgggatggcgatgatgaagatttagataagacggtacaagaggtatctaacgctaatcctaatcatactgtgattgtggatgatataccgttagaggattga

SEQ ID NO: 408505 - DNA, 705 bp, Staphylococcus aureus
atgaataaaaaattactaatgaatttttttatcgtaagccctttgttgcttgcgacaatcgctacagattttacccctgttcccttattatctaatcaaataatcaaaactgcaaaagcatctacaaacgataatataaaggatttgctagactggtatagtagtgggtctgacacttttacaaatagtgaagttttagataattccttaggatctatgcgtataaaaaacacagatggcagcatcagccttataatttttccgagtccttattatagccctgcttttacaaaaggggaaaaagttgacttaaacacaaaaagaactaaaaaaagccaacatactagcgaaggaacttatatccatttccaaataagtggcgttacaaatactgaaaaattacctactccaatagaactacctttaaaagttaaggttcatggtaaagatagccccttaaagtattggccaaagttcgataaaaaacaattagctatatcaactttagactttgaaattcgtcatcagctaactcaaatacatggattatatcgttcaagcgataaaacgggtggttattggaaaataacaatgaatgacggatccacatatcaaagtgatttatctaaaaagtttgaatacaatactgaaaaaccacctataaatattgatgaaataaaaactatagaagcagaaattaattaa

SEQ ID NO: 408506 - DNA, 228 bp, Staphylococcus aureus
atgaaacaaaatgacctagcacatggagaatttggtaattggttgaaaaatatcaacttagatagaacacaagctcatcgtttcattaaagtttctgaagaaattaaagatgttggtacataccaacatttaggtctgagagctttatcggaaatagctagcttacctgtaccagtacgcatcaaagtacacataacatcaaacggcaaaactaaaattccatactaa

SEQ ID NO: 408507 - DNA, 936 bp, Staphylococcus aureus
atgagacttcaaaaagcacctttagtaacatcgggattgatcttaggtttgttggggttgggcaatctcttgaaagacatatcacttgttttaaatgctatttgtggtatctttgccctctttatttgggttcaccttttatgtactattctcaataattttaaaaatgttaaagaacaattgaatacccctctagtttcatctgtgttcacaacatttttcatgtctggatttttgggaaccacttatttaaatacgtattttagtgatgtaaccattatcactagcttaataacacccttatggctcttatgtcttatggggattatgatacatatgattattttttcaattaaatatttaaaagggttctcgctcgaaaatgtttatccatcatggacagtgctttatattggtattgctattgctggattaacagcaccaatcagcggattttatttaattggaaaattatcagttatatatggttttttagcaacatgtattgtcttaccaatagtattcaaacgattaaaaacgtatccattgcaaacgtctattaaaccgaacacttccacaatttgtgcaccattttctttagttgctgcggcatatgttataacttttcctaaggcaaatgatctaatcgttattattcttttggtattggctcagtttttttatttttatattatatttaaacttccaaagttgctaaaagagccgttttcaccagtattttcagctttcacttttcctttagtaatttcagcaactgccttaaaaaatagtttacctgtactaacgtacccagaaatttgggaatggctcttattttttgaaattacattagcaactttaatagtattaagagtctttttaggctatgttcatttcttttttaaaactagcccgaaggctagctataactcttaa

SEQ ID NO: 408508 - DNA, 180 bp, Staphylococcus aureus
atggctacaataagtattactactgattataaattcacaaaaaaatcagcgcaaaaactaatagatgcaatggagattaacgaaaataatagtaatgtgaacaaaacaaacataaaagcgactaaaataaaatcaacttgtgagattgaaaatctattgaaggattatcgaagtaattga

SEQ ID NO: 408509 - DNA, 297 bp, Staphylococcus aureus
ttgactgtaaaagtaatatcactttcagaattgttaacaggtgataagcaagaggttaagcgaaagataccttcagttttaaatatactaaattcatttgagacaatatcaatttcaggaagtgaatcagcacacgatgttgatttatttttgaaaaataagtctatagcatttgatagacaaaacctgtctagaactcatttagttttttcacaattcaaaaacaaacaaatactagttggctattttacaattagcaataaacccttagttttttacaaaacgtatgttagataa

SEQ ID NO: 408510 - DNA, 342 bp, Staphylococcus aureus
atgttagataaaatatcaaacacgttaaagaagaagttatatcaaaagggtgaaactcacagtggaaatgacaatttaatcatacaaggatacttaattgctcaaatagaaaaaaattattctgaagaagcattggctacaaaatccataaatgcaaacgatttattaactttagcatatgtgaaagttttagaaggtgcgaacatatttggcggttcatatatttggatagagtatgaggatgtagatagattaagagaattttatagaaaatttggatttacagaaatcaaagatcatacaagtgaaaataatttgaagatggctattcttaaaatataa

SEQ ID NO: 408511 - DNA, 378 bp, Staphylococcus aureus
ttgacacactgcctattaaattatatacgtaaagaaaataatgtttcagtattcaataaagaaatatctgacaaatatataaaactatctattgttaccattaatatctcatttctatttatcagtatcattacttttatattatcgataattaatccgaacatatcattaatcaagttattattcgaagtggtttctgcatttggaacagtcgggttaagtatgaaccttaccacagaatatcatggtattactaaaataattattatattcgttatgctttgcggtaaagtaggactattaactttattaagaacatttataccaccaaaaagtccaaaaaattaccgctacactaaaggacaaatttatctataa

SEQ ID NO: 408512 - DNA, 882 bp, Staphylococcus aureus
atgcaaaataagtcaaaatcgccttttaaaattgcattgtctaaatttattcataataaaattgcaatgttatcggttatttttttattaatcataactattgtatcaattatagcgccattaatagctccttttccagtgaaccaacaagatttattaaatataaaaggtgaaatgacagcacaaaacattcttggtacagactctggtggtagggataactttagtcgtttgttatatgcaggtcgtatttcattatccattggaattacatctacaataggaatgcttttgattggaattacagttggagtgatttctggttattttggaggtattgttgatacattattaatgagaataaccgaatttgttatgttatttccatttttaatatttgcaattgtattaaatgctgcacttggagataaaattaaaaatccttatggatctgccataattcttgttctagttattatcgtattaagttggggaggtattgcaagacttgttcgtggtaaagtacttcaagaaaaagaaaatgaatactttttggcagcaaaatcaattggtacacccacatataaaattattttgaaacatcttttgccgaatatattaagtgtagttatcgtacaagcaacattgttatttgccggtatgattgtagtggaatcaggattgagctttttaggattcggaattagtaaagcaattccatcttggggtaatatgttgagtgatgctcaagaaggggatgttataagtggtaaaccgtggatatggatgccacctgctataatgattacattaactatattaagtataaactttgtaggggaagggcttaaagatgcttttaatcctagaggtagacgttaa

SEQ ID NO: 408513 - DNA, 981 bp, Staphylococcus aureus
atggaaaatattttagaagtaaatcaagtaaaaaaatactacaaaattaaaactggattattacaaaaaactcagtacgttaaagctgttgatgacgtatcgttttcaataaaaaaaggacaaacttttggattggtaggcgaatcaggttgtggtaagtcaacgttaggtaaagtgattatcagacttgaagatgcaacttcaggctcaataattgttaatggtgaagatataacaagattacaaggtaaaaaactgagaaaatcacgacaacaatatcagatgatatttcaagatccgtatgcatcattgaatccgatgcaaatggttggagatatcatttcagaacctattttaaattataaaaaattgccaaaagaagaaataaaaaaagaagttctatatttattaaaatgtgttggtctaagtgaagatgcatattataaatatgcacatgaattttcaggtggacagagacaaagagtgggaattgcaagagcattggctttgcgtccgagtttaattgttgctgatgagcctgtaagtgcattagatgtatctgttcaatctcaagtactgaatttattaaaagatttacaagaacaatttaacttaagctatttatttatcgcacatgatttaagtgtagtaaaacatataagtgatgtcattggagttatgtatttaggtcatatagttgaaatcgcatctgataaagaaatttatgaaaatcccaaacatccttatacaaaagcgttgatttcatcaataccacaaattgataagctaaataaaaatagaattatattaaagggagaattaccttcgccaagtaatccgccacaaggttgtcctttccatactagatgtccaattgctcaagatatgtgcaaaaaaagtatgccagaattaaaggacattggtaacgaacatcaagtcgcttgtttctacgtagataaagtaggtgatttaaatgattaa

SEQ ID NO: 408514 - DNA, 987 bp, Staphylococcus aureus
atgaataatgtattgttagaggttaaagatttagaaacatcattaaaaataaataatgaatggttagcaactgttgaaaatatttcttttgaattatctaaaggagaagttttgggtatagtaggggaatctggttgcggtaagtccatattaagtaagtcaattattaaattattaccagaaaagatatctaaactaagtaatggagaagttatatttgatggtaaacgaatcgatacgctcaatgagaagcaattgctagatattcgaggaaatgatattgctatgatttttcaagaacctatgactgctttaaatccggtatttactataaaaaatcaacttgtggaatctataaaatcacataaaaaaatttctaaaaaagaagcaaataacttagcaaaagatttactaaaaaaagttggaattgcaagacaagatgaaatattaaatagctatccccatcaattatctggtggtatgaggcaaagagtaatgattgcaatggccatttcatgttctcccaaattattaattgctgatgaacctacaactgctttggatgtcacgattcaagcgcaaatattagacttattaaaagaattgcaaaaggaaacgcaaatggcaattatgatgattacacatgatttgagtgtggttgctgaattttgcgataaagttttggttatgtatgcaggtcaaattgtagaatttggaggcataaaagaaatactacacaatccgaaacatccttatacccaaaaattattatctacaattccaaaacttaaagaagagcagaaacgacttgaaacaatagaaggaattgtgccatcaatccaagcatttcacgttaataagtgcagatttgcaaatagatgtaacaaaaaactggatatttgtaataatcaatctcctaaaatgcatgtttgtgaagacgtcattgtacggtgtcatttataccaaaatgaatataaggagatataa

SEQ ID NO: 408515 - DNA, 1356 bp, Staphylococcus aureus
ttgaaaattgatgattggatttattcaattgaagtcttagctaacaaggattacgaaggtgcttattatccaagtgtagaaaatatccaaggtgcaaaagattatcatgaaggaaaagctgatcatattaacggattgaagaaaatagatgactacacaatgcaggttacatttgataaaaagcaagaaaattacttaacaggatttattactggacctttattaagtaaaaaatatttatcagatgtaccaattaaagatttagcgaaatcagataaaatccgaaaatatcctattggtattggaccatataaagttaagaaaatcgtcccaggtgaggctgttcaacttgttaaatttgatgattattggcaaggtaagcctgcattagataaaatcaatttaaaagttattgatcaagctcaaattattaaggcaatggaaaaaggcgatattgatgttacgaatgatgctaccggtgcaatggcaaaagatgctaagtcatctaatgctggtctcaaggtattatctgcgccaagcttagactacggtttaataggattcgtatctcatgattacgataaaaaagctaataaaactggtaaagtgagaccaaaatatgaagacaaagaattacgtaaagcaatgctttatgcaattgatagagaaaaatggatcaaagcatttttcaatggttacgctagtgaaataaatagttttgtaccatcaatgcattggatagcagctgatcctaaggaactaaacgattataaatatgatcctgaaaaagctaaaaaaatcttagataagttaggttataaagatcgagatggtgacggatttagagaagatcctaaaggtaataaatttgagattaactttaaacattattcaggttcaaatcctacttttgaaccaagaactgctgcgataaaagatttctgggaaaaagttggcttgaaaacaaatgtgaagttagtagaattcggtaaatataatgaagacttagcaaatgcatcaaaagatatggaagtgtacttcagatcatgggcaggtggtacagatccagacccatcagatttataccacactgatagacctcaaaatgaaatgagaacagttttaccaaaatcagatcaatatttagatgatgcattagacttcgataaagtaggcattgatgaaaagaaacgtaaagatatttatgttaaatggcaaaaatatatgaatgatgagttacctggattaccaatgttccaaggtaaatcgataactatagttaatgataaagtacgaaacttagacattgaaattggaactgatcaaagtttatataatttaactaaagaagcttag

SEQ ID NO: 408516 - DNA, 528 bp, Staphylococcus aureus
atgaaactgcttaaaacgaagaattgtttatattatcgtaatggcgacaataaattatctgagtatcaactattaacgcaatttaacccagcatttattaataaaaaaattaagatgtgtgaattccaaattgaaagtatgtaccatctgagtgcgtcgaccacaacatgtgatgaaataatggggatcgtgtctgtctcatatccaattgaaaaactagttatcaaaattattgaaacaaaggcaagattacaaaactataaaaatcgatctataagtaatatggtgttgttgaaaacagtactaaatcattatacagaaaaagagcagaagcaagttgtaaaatatatgcgttcaaatggacgatataagccctacaatgtcattgaacgcttacaggttgatttgtatcaagcaagtattaaacaacgttcagaacgtcaaaaacaaagaaatatagcaattgaaaatagcaagattgcacgagtaaatgcttatcaccaatcttcacatgtaaaagtggtgtaa

SEQ ID NO: 408517 - DNA, 654 bp, Staphylococcus aureus
atgacaactacaacaatcacgggtgatacgtgggatgtatattttaatgatagacgttatagaaatttgttaggagattttgaagatctaataacagaaacgaaatcattaattagacaaggctataaaacggatgttattaaaaataaaatggataataaggctttgagcctacaatctaaattcaaagaattaggacaaatattattagatgaacatgaagaaaaaatagtagaaatccaacaaaaagagaaagaatcttcatatgagaatccacaagttgaaatgttgaaacgtcaagacatagaggcgaaagtaaatttaattgatgcagaagaactatttaatcttgtttataatgccaatcctaaaaccactaatgtatatgaacttaatatctataaaaaagcgatagaaagtcgtcttactgaagatgaaaatgtaaggttaaaaccttactttgatgtattggtagaaaaggtaatttatccatatcgaaataatgaagaatatcaaaaattagagtataactataatgttttaagacagtttgggttacaaaataacgggcaaccagtcatcaaacatagtgatggcgatatagaaattattaacattcaaagtaagtataacgaagtgttccgtaacgcttaa

SEQ ID NO: 408518 - DNA, 345 bp, Staphylococcus aureus
atgagtgaatttgaagtaaaagaaaagacgtacaacttaccgaatgaacaccgccaagtactcaatgtgataagaaatacgtctaataaatatattactaaaacaaagctgcttaatcaattgggatatgaatataattcaagcaatgaacgatggttacgaagagtaatcaattcattagtatatgattatggttatcctatcggatgcagttataaacctagtgaacgtggttattacatcattacgacagaacaagaaaagcaacaagcgatgagaagtattaagaaattagctgatggcagtatgaaacgctatgaagctttgaaacgaattgaagtgtaa

SEQ ID NO: 408519 - DNA, 642 bp, Staphylococcus aureus
atgaacatagaaactatcgtaaatgaatttgagacgcgagcaggcacgctattaaggtactacacgggattattagaacatagtaaagtacaaccatgttgctttaagttatataatgatccatttgatatggtttatgtggtgatgaacaacaagttattcggtcatgtatatattaaagattgtaaggtgaggaagtcatttgaattagcgtcacctaagcacactgaggggcttataagaagcatagaggggcattatgtaggttatgaattacatgatggtaaacagctttctattagtgatatgatggccagtcaattatttgaagatgagtattttatgtatgggctacaaacatatgtagaatcaaataatagtgatgtgtttgagtacctagaaaatggatttgatacagatacacttgagggcattcaatcaagtaatactgatgtgatagcgaatattgaaatgttgtatcagttagctacgggaatcaatgaaccagcacgagagttagttgagggattaaaattagtaactgagtttgtacaagatgagaatgcgacacaagaggattacaaggcgttagaacgtaaattgaatgatctaaaagcgtcttactatagcttgagtaaataa

SEQ ID NO: 408520 - DNA, 381 bp, Staphylococcus aureus
atggataaagaacaacttaaaaagtatatatacgaatatgtgaaagaatataaggagataccgatatatcagttagaagatttgtttaaagaaataaatcacgactatatagggagaactagtatcacacacgataaggatgagaatattgtgttttggagtgggtggaacaaaattacaatgtttgcgttgattgaattagttaaaagtgaacaacttgatttagtgtatagaggtagttttataatgcgttatttgttggatggtagagttcctaatttaccattagctatttgttatccagaagatggacaacaaactgacgtgccctcatgggtgcctatggtattaagaataaataaagaggagaaaatcaaatga

SEQ ID NO: 408521 - DNA, 183 bp, Staphylococcus aureus
atgcagacgattacagggcaatgggacaaaaaaggttatttaataaaagataaaaaaagaattcaaaaacaagtaaaacataaatctcaaaggcatctgggttatgcgattaaaaaagaaataattgaagaactaggatttgatttctcgatttcgcataatccatatacagaaagttattag

SEQ ID NO: 408522 - DNA, 642 bp, Staphylococcus aureus
atgaacatagaaactatcgtaaaccaatttgaaacacgagcaggcacgttactaaggtactacacaggattattagaacatagtaaagtgcaaccatgttgctttaagttatacaatgatccatttgatatggcatacgtgatgatgaatgggaagttattcggtcatgtatatattaaagattgtaaagtaaggcaatcatttgaattagcgtcacctaagcacactgaggggcttataagaagtatagaaggtcattatgtaggttatgaattacatgacggtaaacagctttctattagtgatatgatggccagtcaattatttgaagatgagtattttatgtatggattacaaacatatgcagaatcaaataatagtgatgtgtttgagtacctagaaaatggatttgataccgatacacttgagggcattcaatcgagtaatactgatgtgatagcgaatattgaaatgttgtatcagttagctacaggaatcaatgaaccagcaccagagttagttgaggggttgagattagtaactgagtttgtacaagatgagaatgcgacacaagaggattacaaggctttagagcataagttaactgagttgaagtcatcttattacagtttgaataagtaa

SEQ ID NO: 408523 - DNA, 381 bp, Staphylococcus aureus
atggataaagagcaacttaaaaagtatatatacgattatgtaaaagaatataaggagataccgatatatcagttagaagatttgtttaaagaaatgaatcacgactatatagggagaaccagtgtcacacacgataaggatgagaatattgtgttttggagtggatggaacaaaattacaatgtttgcgctgattgaattagttaaaagtgaacaacttgatttagtgtatagaggtagttttgtaatgcgttatttgttggatggtagagttcctaacttaccattagcaatttgttatccagaagatggacaacaaacggacgtgccctcatgggtgcctatggtattaagaataaataaagaggagaaaatcaaatga

SEQ ID NO: 408524 - DNA, 183 bp, Staphylococcus aureus
atgcagactataacaggtcaatggggcaaaaaaggatatttaattaaaggtgaaaaagatcgcttgcaaaaaaaggtgagtcacaaaaacattaagtatagaggatttgctataaacaaagaaatgcttgaagaattaggatttgatttctcgaattctcataatccttattcagattattaa

SEQ ID NO: 408525 - DNA, 378 bp, Staphylococcus aureus
atggataaacaagttagaaatacaacagaaattgtacgtttggcgaagcagaaatcacaaaagacaagggaaaaagtagacaaagcgatttctaaattttcgattgaaggtaaagctattaattttaattcaatagcaaaggaagctaatgtttctaaatcatggctttataaggaacacgatattaggcaaagaatcgaatcccttcgtgagcgtcaaataacatcaaatgtagtctcaaaacccaagaaaagttctcgttcggaggaaatccttataaaaaccttaaaaagaagggttatggaattaaaaaaagaaaataaaaaattacagaaccaaattcaaaaattatatggagatctgtataataaagagtag

SEQ ID NO: 408526 - DNA, 366 bp, Staphylococcus aureus
atgacaaaagatatgtgtgaagttacctatattcatgaagataaggtaaacagggctaaaaaagaccttgctaaacagaatcctatggatgtagcgaaagtttttaaggctctatcagatgatataagagttaaaattgcttatgttttgtctttagagggagagttatgtgtttgtgatgtagctaatatcattgaatcttcaacggctacggcatcccatcatttaagattattgaaaaatttaggtatagcaaaataccgtaaagaaggaaaagtagtctattattcactagatgatgagcatgttaaacagcttgtagaaaaagctttcttgtatcaaagggaggttgctagtattggatag

SEQ ID NO: 408527 - DNA, 2181 bp, Staphylococcus aureus
ttggatagttcagcaaaaacattaacagaagataaacaggtttaccgtgtggagggtttctcgtgtgcgaattgtgctgggaagtttgaaaaaaatgtaaaacaactagctggagttcaggatgcaaaagtgaactttggcgcttccaaaattgatgtatatggaaatgcatcggttcaagagcttgaaaaagcaggtgctttcgagaatcttaaggtatttcccgaaaaactagcgaattcatcgatgcaagcggtcaaagaagacactaaggctcctaaagaagagaaaataccgttttataaaaaacacagcacattgctgtttgccacattactgattgcttttggttacctttctcactttgtaaatggagaagataaccttgtaacttccatgttatttgtaggttcgattgtaattggcggatattcactatttaaagttggttttcaaaatttgatacgctttgatttcgacatgaaaaccctgatgaccgtagcagttattggagctgccatcattggtgaatgggcagaggcatccattgttgtcgttctctttgcaatcagtgaagcacttgaacgtttttctatggatagagcaagacagtccattcgttcattgatggatattgccccaaaagaagcacttgttatgcggaatggtcaggaaataatgatccatgtggacgatattgccgtgggtgatattatgatcgtcaaaccaggggagaaaattgccatggatgggatcattataaatggtgtgtcggctgtcaaccaggctgctataacaggagaatctgtccctgttgccaaaacggtagatgatgaagtatttgcaggtacgcttaacgaagagggactacttgaagtaaaaatcaccaaatacgtagaggatacaactatctccaagattattcatctggttgaggaagcacaaggggagcgcgctccagcgcaagcattcgtagataaatttgcgaaatattatacgccgatcattatggttattgcggcgctcgttgcagtcgttccacctttattctttggtggaagttgggatacttgggtttatcaaggattagcggtacttgtagttggatgtccgtgtgcattagttatttctactccaatctcgattgtctcggcaattggaaatgcagctaaaaaaggtgtgttgattaaaggcggtgtctatctagaggaattaggagccattaaggcaatcgcatttgataaaacaggaacactgacaaaaggtgtaccagtggtaacagattttaaagtgttaaatgatcaagtggaagaaaaagagctgttttccattattacagctttagaatatcgatcacaacatccacttgcttcagcaataatgaagaaagcagagcaagataatattacttattccgatgttagagtggaggacttcacttctattacaggtcggggcattcaagggaatatagatggaacaacctattacattggcagtccaaggctttttaaagaattaaatgtttccgattttagccttgagtttgaaaataaagtgaaagttttacaaaaccaagggaaaacggccatgattattggaacggaccaaacaatcctcggcgtgattgctgtagcagatgaggtccgcgaaacaagtaaaaatgtgattcaaaaacttcatcagttaggaatcaagcaaacaattatgctgacaggtgataatcaaggtaccgcagaagcaatcggtgctcatgtaggcgtttctgatattcagtccgaattgatgccacaggataagttggactatattaaaaaaatgaaagccgagcatggtaatgtagctatgattggcgatggcgtcaatgatgctcctgcacttgctgcatccactgttggcattgcaatgggcggtgctggaacagatactgccatcgagacagctgatattgcattaatgggagatgatttaagtaagcttccatttgcagtaagacttagcaggaaaacgctaaatatcatcaaagcgaacatcacgtttgccatcggaattaagataattgccttactattggttattccaggctggctaaccctttggattgcgattctttccgatatgggagccactattttggtagcattaaatagtttgcgactgatgagagtgaaggataaatag

SEQ ID NO: 408528 - DNA, 213 bp, Staphylococcus aureus
atgaaccagtttaaagaaatttataatacaatagaaaaattactaaatgataaatcaatatctaattatagaattaatcaagacactggtgtttcttatggtggtataagtgaattaagaagcgggaaaagaaaagtgaataatttaactttagaaacagcggaaaaactctataattaccaaaaacaattagaaataatgattgaagattaa

SEQ ID NO: 408529 - DNA, 729 bp, Staphylococcus aureus
atgtcaataaaacctaaagtagacatagatgtactgctatatatgtttcaagaatatgaaaaaggcgtgtcgtttcaatacttaatcgatacattacaattagatattaatgtcaatactttgtatcctaagtataaatattataaaacccatggtattgaaacactacttacacaaaaacaatacaatcactattcaaaggaactaaaattaaaagttgtaaatgaatatttgaattcaaatcaatcaacccaagacatcgcaatcaaatacaatattcgtagttcgacacaagtcaaaaattggataaaaatgtatactgtaggaaaagagattaagaatcaatctcctaaaactggggtgtatatcatgaaagcaagaaaaaccacatttgaagaacgtgtaacaattgttgaatattacttgaatcataaacaatcttatagagaagttgcagaacactttaatatctcatacggtcaaatttaccagtgggttcataagtatcaagcacatggtaaaaatggattagtagatggcagaggcaaaggaaaacccaaatctatgatgacgccagaagaacaaaaagaagctgaaattcaagcattaaaagcacaaaatcgattattagagatggaaaatgacgttttaaaaaagtttcaagcattggaaagagagatgattcaaagagaaaacaaatcacggcatacaaaacgatcgaagcgttaa

SEQ ID NO: 408530 - DNA, 789 bp, Staphylococcus aureus
ttgtgtcgtattttaggcatttctagagcgagttattataagtgggtacattatcaatcgagtgaacttgaattagagaatgaacagcttaagcgagaaatagaatcaatctatcataagtataatggtatttatggctatcgtcgcatttatatctatattcgcttaaaactaggtaaacaagtaaaccgaaagcgaatttatcgtttgatgaaagaacttaatttaaaagcagtaatacgtcaaaagcgaaaaccttatcgacgttcaacgccacaaatcacatcagaaaataagcttaatcgacaatttgacattgatacgccaaataaagtttggttaacagatgtaacagaatttaaaatcaaagaaggtagtaagatatatttgagtgccatttatgacttaggtgctaaacgtattgttagttatgagctaggcccttctaacaataatcaattagtatttaaaacattcaatcaagcgatagaaaaagtagaaaatacaaaaggtattttatttcatagtgaccgaggttttcaatatacatcgaaaacatttaaacatatgttggatgaatgtggcatgattcaaagtatgtcacgtgttagcaaatgtatcgataacggtccaatggaaggtgtatggggtacaataaaaagtgaaatttttagaggaaataagcactttaaatttaatagtgtagaagaagctacaaaaacaattcatgattttattcttttctttaatcatgaaagaattacattaaaaatggctgattctgtataa

SEQ ID NO: 408531 - DNA, 402 bp, Staphylococcus aureus
gtggatgaaggttcatatcagccaagtagatgttttgcactaccagttattcaaaaaggacacatatttattaaacgagtgaatgactgtccaattatggatgttgatatgcttgaacagtggttaaaggagtatgaacaatcaaatgttagtccgagtgtcataggatacacgcgacgagatagtaagtattggcgagagttatgctttggaacaaccgaaggcaatcgtaacaatgcactagctagcttagttgggcatttattaagatgtcacgttaatgattatattgtttattcatttgctttattatgggggcaattcgcatgtaaaccacctatgaaagaacaagaaatcaacgccacttttcaatcgatattaaataaacactataacaattag

SEQ ID NO: 408532 - DNA, 402 bp, Staphylococcus aureus
gtggatgaaggttcatatcagccaagtagatgttttgcgttaccagttattcaaaaaggacacatatttattaagcgagtgaatgactgtccaattatgaatgttgatatgctcgaacagtggtcgaaggagtttgaacaatcaaatgctagtcctaatgtcataggatacactcgacgcgatagtgagtactggcgcgagctatgctttggaacaaccgaaggcaatcgtaacaatgcactagctagcttaattgggcatttattaagatgtcacgttaatgattatattgtttattcatttgctttactatgggggcaattcgcatgtaaaccacctatgaaagaacaagaaatcaacgccacttttcaatcgatattaaataaacactataacaattag

SEQ ID NO: 408533 - DNA, 948 bp, Staphylococcus aureus
atgagctataaccatcttacactaactgaacgcgcacgtatagaggttttacgtcaagaaaattattctttaagatctattgcacgtaaattaaaacgatctgtatctactatctcacgtgaaattagtaggaataatttaaatcagtcatatcaagctgaaacagctcaaaaaaattatgaaaccaaaagaaaactttgtggtcgtcctactcgatttactccagaacttggtaatatcattaaatattatttaaaatgccactggtctcctgaacaaatcgtaggtcgtctattacaaaaccaaatctgttttaaaaccatctatcgatggattaactctaatatgattaatttcgaacttatttcatgccttcgtcaaaaaggaaaaagacagaaacctaaagaaactagaggtaagtttaatattggccgtcctatttcacaacgtcctaaggaaataaagaaacgtaatacattcggtcattgggaagctgacacaattgtatccagcagaggcaaaagtaaagggtgcattgctactttcgcagaaagaaaatcacgttattattattgtgtacttatgcctgatcgttcctctaattctatggagacggcaattaataaccttatcaaacatctacctaaaggtgccgttaaaactattactgtcgatagagggaaagagttctcttgttatcaaaatattgaaaaccaatttaatattaatgtctacttcgctgatccatattccgcatggcaaagaggtacaaatgaaaataccaatggtttactaagagaatttttccctaagaaaacagacttagctaaagtaaatcaagagcaacttaactatgcattagactcaattaattatcgaccaagaaagtgtttaaattggaagtttccttatgaagttttatgtgatgaactgttgcacttaaattga

SEQ ID NO: 408534 - DNA, 675 bp, Staphylococcus aureus
atgaattatttcagatataagcaatttgacaaagatgtcattactgtagccgttggctactatctaagatatgcattaagttatcgtgatatatctgaaatattgagagaacgaggcatctatgttcatcattcaacaatttatcgatgggtacaggaatatgctcctattttgtatcaaatttggaagaaaaagaataagcaagcttattataaatggcatatagatgagacgtatatcaaaattaaagggcaatggaattatttatatcgcgctattgatgcagatggccatacactagatatttcgttacgtaagaaacgagataatcactcagcatatacgtttattaaacgtcttattaaacaatttggcaaacctcaaatgataattacagaccaagccccttcaacgaaggtggcaatgtccaaagtgattaaagattttaaacttacccccaactgtcattgtacctctaaatatttaaataatctcattgaacaagatcatcgtcatatcaaagtaaggaaaataagttatcaaagtatcaatacggcaaagaatacgatcaaaggcattgaatgtatttatggactatataaaaagaaccgcagatctcttcagatctacgggttttcgccatgccgtgtaattagcatcatgctagctagttaa

SEQ ID NO: 408535 - DNA, 327 bp, Staphylococcus aureus
atgaattgggaaattaatgatttgtttagcgatttgaaattgttgaaagatagattcgaagatttaaaggataatcatggttggcattttgaggagttatatccacatgaaccaaatcataacttaaataaagatgaattaattagagagggtgcttcttatcatgagagacgtattcacaataatcaaatgtttgatttattccatctctatatagagcagttcgataatattatcgaaaagttttatgaaatagaaaaagcatcatctgagaactttggcgaggaatcagatgacgcaaagaattcaataaaagtagcagagtaa

SEQ ID NO: 408536 - DNA, 318 bp, Staphylococcus aureus
atgaattgggaaattaaagatttaatgtgtgatattgaagcggtaaaagaaaaaatcaatgatgtagctatcaaacatgcttggtttgttgaagatagatttgtaaaaaatgaattagaaacaaaacgggaacatattaatttttctgctagctatttagaacatcgtatacaaaatgaacatacagttgagttattacatgtgtacttaaaagaattcggtgaacttatacaaaaatttcatgaaatagaaaaagcatcatctgagaactttggcgaggtatcagatgacgcacaaaaattaaaaatcacagagtaa

SEQ ID NO: 408537 - DNA, 213 bp, Staphylococcus aureus
atggcagacgataacattgatgatcatattgtaaagaatcacttagaaatgattgttgaccaagtagctaatgataaagagttttatattttcgattctttaatacaaggacgtagttataaagatattagtagtgtcttagagtgttcagaacaatctgtaagattatggtatgaaaccttattagataaaattgtggaggtgatagaatga

SEQ ID NO: 408538 - DNA, 1557 bp, Staphylococcus aureus
atgtctattactgaaaaacaacgtcagcaacaagctgaattacataaaaaattatggtcgattgcgaatgatttaagagggaacatggatgcgagtgaattccgtaattacattttaggcttgattttctatcgcttcttatctgaaaaagccgaacaagaatatgcagatgccttgtcaggtgaagacatcacgtatcaagaagcatgggcagatgaagaatatcgtgaagacttaaaagcagaattaattgatcaagtcggttacttcattgagccacaagatttattcagtgcgatgattcgtgaaattgaaacgcaagatttcgatatagaacatctagcgacggcgattcgcaaagttgaaacatctacattaggtgaagaaagtgaaaatgactttatcgggctgttcagcgatatggatttgagttcaacgcgactaggtaacaatgtcaaagaacgtactgctttaatctctaaagtcatggttaatcttgacgacttaccattcgttcacagtgacatggaaattgatatgttaggtgatgcatatgaattcctaatcgggcgctttgcggcgacagcgggtaaaaaagcaggcgagttctatacaccacaacaagtatctaagatactggcgaagattgtcacagacggtaaagataaattacgtcacgtgtacgacccaacatgtggttccggttcattgttgttacgtgttggtaaagaaacgcaagtgtatcgttatttcggacaagaacgtaacaatactacatacaacttagcacgcatgaatatgttattacatgatgtgcgttatgagaacttcgagatccgtaatgatgacacattggaaaatccagcctttttaggcaatacatttgatgcggttattgcgaacccaccatacagtgcgaaatggacagcagattcaaaatttgaaaatgatgaacgattcagtggttacggcaagcttgcgccaaaatccaaagcagactttgcctttattcaacacatggtacattacctagacgatgaaggtaccatggcagtcgtactcccacatggtgtattattccgtggtgccgcagaaggtgtgattcgtcgctatttaatagaagaaaagaactacttagaagccgtgattgggttaccagccaatattttctatgggacaagtattccaacatgtattttagtatttaaaaaatgtcgccaacaagacgacaacgtactatttatcgatgcatccaatgattttgaaaaaggaaaaaatcaaaaccatttaagcgatgcccaagtcgaacgtattatagacacatataagcgtaaagcaacgattgataaatatagctacagcgcgacattacaagagatcgccgataacgattacaacttaaacataccgcgatatgttgatacattcgaagaagaagcaccaattgatttagatcaagtccaacaagatttgaaaaatatcgacaaagaaatcgcagaaattgaacaagaaatcaatgcatacctgaaagaacttggggtgttgaaagatgagtaa

SEQ ID NO: 408539 - DNA, 906 bp, Staphylococcus aureus; identical to SEQ ID NO: 407985

SEQ ID NO: 408540 - DNA, 960 bp, Staphylococcus aureus
gtggagaacccatttttacaaggcaatcaagactataagacaagcaagaaattagttaaatttatgctcgtattttgctctaattctatgacagcagaagaaattcatttatgtcatcttaaaattaaaaacaaaaataaagaaattaaatatagtgtgacagtcgatggctttttagaaacttattcaaccgtggaacaagtttatgatgtcatgcagcgtcttaaattccattattactttattgatattgaaaattcaaaaactgcaacacatcttatcactaaaaaccaacactatcatcaaactgacactcattttgaacagtataagaaatttattttagattcaggtatatcatcaacacaatttgtatataataacctgtctgtaagcggatttaaatatactaatgatggtaagaatccaattcaattatctgacatagtgtatcacttaatcgcattattacgatatggcggtggcattagctatcaattattagatgaccattcaaattatatttccttgtacaacaaatatggtagccccctaccattaatgcatttatataaaatgtttagaccttttgttaatgaagatattgaaattacaaataattatgtattgagtcgtaaagataataactaccatttcttattattcaataaaattaatgatcgatatatgtcagacgtaaaacaagatttcattttccataatgaattacctcaagactctttgatgattattaaaacattgaatcatgaacatggttcaattcaacatttgcttccaataagcgatcaacttgtttatatagaaaaagaaattttagatgaattagacaaaacgaattaccctaaaacggagcttgcagttcaagaagaaactggtcgtacatttgaactcaagttaaatcacgacgaggttaaatatatttgctttaaaccaagctaa

SEQ ID NO: 408541 - DNA, 750 bp, Staphylococcus aureus
atgattaaagttacagatgttgaaaaatcatatcaaagcgcacatgtttttaagcgtcgtcgaacacctatcgtgaaaggtgtgtcatttgagtgtccaatcggtgcgacgattgcgattatcggagaaagtggtagcggtaaatcgacgttgagtcgtatgatattaggtattgagaaaccggataaaggctgtgtaaccttaaatgatctaccgatgcataagaagaaagtcagacgtcatcaaattggtgctgtatttcaagattatacgtcatcattacacccatttcagactgttagagaaatcttatttgaagtgatgtgtcaatgtgatggacaacctaaagaagttatggaagtccaagcaattacattgttggaagaagtcggtctatctaaggcatacatggataaatatcctaatatgttatcaggtggagaagcgcagcgtgttgcgattgcgcgtgcaatatgtattaaccctaaatatattttgtttgatgaagccattagttcactcgacatgtcaattcaaacacaaatattagatttattgattcatttacgtgaaacgcgtcagttgagttatatttttatcacacatgatattcaagctgccacgtatttatgtgatcaattaattatttttaaaaacggaaaaatagaagaacaaattccgacaagcgcattgcataaaagtgacaatgcttatacaagagaattaatagaaaaacaactatcattctaa

SEQ ID NO: 408542 - DNA, 870 bp, Staphylococcus aureus
atgataattttaaaacgattattacaagataaaggtgcagtaattgctttaggcattattgtattatatgtctttttaggattagcagcaccacttgtgacattttatgatcctaaccatatcgatacagcaaacaaatttgctggcatcagttttcaacatctactaggtactgaccatttaggtagagatattttaactaggttaatttatgcgattagaccaagtttgttatatgtctttgttgcgctatttgtttctgtacttattggatctattttaggattcttatcaggatatttccaagggtttgttgacgccttaatcatgcgtgcgtgtgatgttatgttggcattcccaagttatgttgtaacgttagcattaattgcattgtttggaatgggtgccgaaaatattatcatggcatttattttgacgcgttgggcatggttctgtcgtgttatacgtacaagtgttatgcagtacactgcttctgaccatgtcagatttgctaaaacaatcggtatgaatgatatgaaaattattcacaaacatattatgccgttaacattagcagatattgctatcatctctagtagttcgatgtgttcaatgatcttgcaaatatctggcttttcatttttaggattaggtgtcaaagcgcctactgcagagtggggcatgatgcttaacgaagctagaaaagtgatgtttacacatcctgaaatgatgtttgcgccaggtattgccatagtgattatagtgatggcatttaacttcttatccgatgctttacaaattgctattgatccccgcatctcttctaaagataaacttcgttctgtgaaaaaaggagtggtgcaatcatga

SEQ ID NO: 408543 - DNA, 936 bp, Staphylococcus aureus
atgttcaaatttatcttaaaacgtattgcgctcatgtttccattagtgattgtagtaagttttatgacatttctattgacgtatattacaaatgaaaatccagctgtgacaattttacatgcacaaggaacgccaaatgtaacaccagagttgattgcagaaacgaatgaaaagtacggtttcaatgatccattattaattcaatataaaaactggttacttgaagcgatgcaatttaattttggtacaagttacattacaggggatcctgttgctgaacgcattggcccagcatttatgaacacattgaaattaacaataatttcaagtgttatggtgatgattacatcaattattttaggtgtagttagtgcattaaaaagaggaaagttcactgatcgtgcgatacgttcagtggctttctttctaactgcattaccatcatattggatagcttcaatacttattatttacgtttcagtgaagttaaacatattgccgacttctggattaacaggcccagaaagttacatattgccagtgatcgttattacgattgcctatgctggtatttactttagaaatgttagacgctcgatggtggaacaattaaatgaagattatgtactttatttaagagcaagcggtgtgaaatctatcacattaatgttgcatgtgttgcgtaatgctatacaagttgcggtatcaatcttttgtatgtctataccaatgataatgggtggactagttgttatcgagtatatctttgcatggcctggactaggtcaattaagtttaaaagcaatacttgaacacgattttccagtcattcaagcatatgtattaattgtagcggtattatttattgtatttaatacattagcagatatcattaatgcgctattaaatccaagattaagggagggcgcacgatga

SEQ ID NO: 408544 - DNA, 1599 bp, Staphylococcus aureus
atgagaaaactaactaaaatgagtgcaatgttacttgcatcagggctaattttaactggttgtggcggtaataaaggtttagaggagaaaaaagaaaacaagcaattaacgtatacgacggttaaagatatcggtgatatgaatccgcatgtttacggtggatcaatgtctgctgaaagtatgatatacgagccgcttgtacgtaacacgaaagatggtattaagcctttactagctaaaaaatgggatgtgtctgaagatgggaagacttatacattccatttaagagatgatgtgaaattccatgatggaacaacatttgatgctgacgcagttaagaaaaatattgatgcggttcaacaaaataaaaaattgcattcttggttaaagatttcaacattaattgacaatgttaaagttaaagataagtacacggttgaattgaatttgaaagaagcatatcaacctgcattggctgaattagcgatgcctcgtccatatgtatttgtgtctccaaaagactttaaaaacggtacaacaaaagatggcgttaaaaagttcgatggtactggtccatttaaattaggtgaacacaaaaaagatgagtctgcagactttaacaaaaatgatcaatactggggcgaaaagtctaaacttaacaaagtacaagcaaaagtaatgcctgctggtgaaacagcattcctatcaatgaaaaaaggtgaaacgaactttgccttcacagatgatagaggtacggatagcttagacaaagactctttaaaacaattgaaagatacaggtgactatcaagttaagcgtagtcaacctatgaatacgaaaatgttagttgtcaattctggtaaaaaagataacgctgtcagtgacaaaacagtcagacaagcgattggtcatatggtaaacagagataaaattgccaaagaaattttagatggtcaagaaaaaccagcaactcaattatttgcgaaaaatgtaacagacattaatttcgatatgccaacacgtaagtatgaccttaaaaaagcagaatcattattagatgaagctggttggaagaaaggtaaagacagtgatgttcgtcaaaaagatggtaaaaaccttgaaatggcaatgtactatgacaaaggttcttcaagtcaaaaagaacaagcagaatacttacaagcagaatttaagaaaatgggtattaagttaaacatcaatggcgaaacatcagataaaattgctgaacgtcgtacttctggtgattatgacttaatgttcaaccaaacttggggattattgtacgatccacaaagtactattgcagcatttaaagcgaaaaatggttatgaaagtgcaacatcaggcattgagaacaaagataaaatatacaacagcattgatgacgcatttaaaatccaaaacggtaaagagcgttcagacgcttataaaaacattttgaaacaaattgatgatgaaggtatctttatccctatttcacacggtagtatgacagttgttgcgccgaaagatttagaaaaagtatcattcacacaatcacagtatgaattaccattcaatgaaatgcagtataaataa

SEQ ID NO: 408545 - DNA, 819 bp, Staphylococcus aureus
atgaataactttaataatgaaatcaaattgatattacaacaatatttggaaaagtttgaagcgcattacgagcgtgtattacaagacgatcaatatatcgaagcattagaaacattgatggatgactatagtgaatttattttaaatcctatttatgaacaacaatttaatgcttggcgtgacgttgaagaaaaagcacaattaataaaatcactgcaatatattacagcgcagtgtgttaaacaagtggaagtcattagagctagacgtctattagacggacaggcgtctaccacaggttactttgacaatatagaacattgtattgatgaagagtttggacaatgtagtatcactagcaatgacaaattattgttagttggttcaggtgcatatccaatgacgttaattcaagtagcaaaagaaacaggtgcttcagttatcggtattgatattgatccacaagccgttgacctagggcgcagaatcgttaacgtcttagcaccaaatgaagatataacaattacggatcaaaaggtatctgaacttaaagatatcaaagatgtgacgcatatcatattcagctcgacaattcctttaaagtacagcattttagaagaattatatgatttaacaaatgaaaatgtcgtagttgcaatgcgctttggtgatggcatcaaagcaatatttaattatccgtcacaagaaacagcggaagataagtggcaatgtgtgaataaacatatgagaccacagcaaatttttgatatagcactttataaaaaagcagctataaaggtaggtattacggatgtctaa

SEQ ID NO: 408546 - DNA, 822 bp, Staphylococcus aureus; identical to SEQ ID NO: 408061

SEQ ID NO: 408547 - DNA, 819 bp, Staphylococcus aureus; identical to SEQ ID NO: 408059

SEQ ID NO: 408548 - DNA, 771 bp, Staphylococcus aureus
atgcattcaaagaaattaatgctcggtatatgtttggtattactcattatattgattgtaggttatgtcattatgacaaaaataaatagtcgaagcgcccaaattaaagacacatttaatcaaacattaaaattatatccaaccaaaaatcttgaagacttttatgataaggaaggctttcgagatcaagagtttgaaaagggcgacaaaggcaattggattgttgattctgagatggtaattgagctgaaggataaaaaaatggaatctagaagtatggtgctctatataaatcgtaatactagaacaacgaaaggtaattttattgttagagaattgtgggaagatagtaaagggtatgcacaaagtaaagatacaaaatatccagtgaaaatggaacataatcgaattatcccaacgaaaccgatagctgatgataaattaagaaaagaaatagaaaactttaaattctttgtacaatacggtgactttaaagatattaatgattataaagatggtgacatttcatataatcctaatgttccaagttattccgcaaaatatcaattgaaaaacgatgattacaatgtgaagcaacttcgaaaaagatataatattccaaccaacaaagctccgaaactattattgaaaggtgatggtgatttaaaaggttcatcaataggatcaaaaaatctagaatttacctttgtagaaaataaagaagagaacatttatttttctgatagtattaatttcaaacctactgaatag

SEQ ID NO: 408549 - DNA, 171 bp, Staphylococcus aureus; identical to SEQ ID NO: 408046

SEQ ID NO: 408550 - DNA, 1077 bp, Staphylococcus aureus
atgttgtacttagaagttttgaaaaatagaaactttacatatttattgattggtaatttcttacgtcggagttgctttgtgctgttttcgttacaaataatttggtttactgttgaattgacaaaccaatcatctttaaaattatcaatgatggttatgagtcaaacacttccatttattatatttggtattttcggtggcgcatattctgataaacataataaaaagaaaatactttatctatctgatcttatactaagtttgattataataattattcctttacttgcaataacatcaaatttaaattatctgacgcttctaaccatatctacagctatcaccattattaactgctatacggatcctgcgtttagggcaattcttcctgaaattattgatgaggagcatttagcaacaagtaatgcgttaatcgatagtttgcaaagaggctcaaatattattttacctgctttaattggtgtcattgtaatactagttggtaatgttggcgtcttttttatttgcagtatattgctatttttaggatttatttttaatgcacttttaaaatatacaaataacaacatgattgatagacactcaaaagaagatttttctgaaacttgggaattcttgaaacaatctaaagaaattccatttatcataatcatccaatttgcctgcatattgattaatactggcctttggcgtgttgcattaccattgtttatttccaatatattaaaagagggcgttggtgtatatggactagctacatcatgtttaggtatagcatctttattaatgtcattgattatgggtttactatcagaaaaacgattaatctttaaatttagtattggtgttttagtttgggggattggcttatcgataattaatgtgtttccaagtgtggcgatactatatataggtgcaacattagtgggacttggacaatctatagagggactaacaagatcagttgccattcaaataaaaacgccaaatcatttgatggggaaagtatttagtatctcatctacatcgaattacgcagcggatacattatcttag

SEQ ID NO: 408551 - DNA, 330 bp, Staphylococcus aureus
gtgatttcttctttcgattcacctttactaataatttctccagttaatggattttttagtgttggtgtcgttattgtcttctcacctttttgtccttctcttgttactttttctgtccctggtgctaaatcaggattaaatttacgttctttctcgaatggaatttcttctttttctacaatcgagtctccttttacaggtccatattttgttacgctatcgaccggtggtctaactacatctcctgtttctggattcttaattcctggtttacctggaacttcttctttctctcctgttggtaacttcggatcaaattcgtctcgatga

SEQ ID NO: 408552 - DNA, 330 bp, Staphylococcus aureus
gtgatctcttctttcgattcacctttactaataatttctccagttaatggattttttagtgttggcgtcgttattgtcttctcacctttttgtccttctcttgttactttttctgttcctggtgctaaatcaggattaaatttacgttctttcttgaatggaatttcttctttttctacaatcgagtctccttttacaggtccatattttgttacactatcgaccggtggtctaactacgtctcctgtttctggattcttaattcctggtttacctggaacttcttctttctctcctgttggtaacttcggatcaaattcgtctcgatga

SEQ ID NO: 408553 - DNA, 1335 bp, Staphylococcus aureus
atgagagataagaaaggaccggtaaataaaagagtagattttctatcaaataaattgaataaatattcaataagaaaatttacagttggaacagcatctattttaattggctcactaatgtatttgggaactcaacaagaagcagaagcagctgaaaacaatattgagaatccaactacattaaaagataatgtccaatcaaaagaagtgaagattgaagaagtaacaaacaaagacactgcaccacaaggtgtagaagctaaatctgaagtaacttcaaacaaagacacaatcgaacatgaagcatcagtaaaagctgaagatatatcaaaaaaggaggatacaccaaaagaagtagctaatgttgctgaagttcagccgaaatcgtcagtcactcataacgcagaggcacctaaggttagaaaagctcgttctgttgatgaaggctcttttgatattacaagagattctaaaaatgtagttgaatctaccccaattacaattcaaggtaaagaacattttgaaggttacggaagtgttgatatacaaaaaaacccaacagatttaggggtatcagaggtaaccaggtttaatgttggtaatgaaagtaatggtttgataggagctttacaattaaaaaataaaatagattttagtaaggatttcaattttaaagttagagtggcaaataaccatcaatcaaataccacaggtgctgatggttgggggttcttatttagtaaaggaaatgcagaagaatatttaactaatggtggaatccttggggataaaggtctggtaaattcaggcggatttaaaattgatactggatacatttatacaagttccatggacaaaactgaaaagcaagctggacaaggttatagaggatacggagcttttgtgaaaaatgacagttctggtaattcacaaatggttggagaaaatattgataaatcaaaaactaattttttaaactatgcggacaattcaactaatacatcagatggaaagtttcatgggcaacgtttaaatgatgtcatcttaacttatgttgcttcaactggtaaaatgagagcagaatatgctggtaaaacttgggagacttcaataacagatttaggtttatctaaaaatcaggcatataatttcttaattacatctagtcaaagatggggccttaatcaagggataaatgcaaatggctggatgagaactgacttgaaaggttcagagtttacttttacaccagaagcgccaaaaacaataacagaattagaaaaaaagttgaagagattccattcaagaaagaacgtaaatttaatccggatttag

SEQ ID NO: 408554 - DNA, 357 bp, Staphylococcus aureus; identical to SEQ ID NO: 408044

SEQ ID NO: 408555 - DNA, 744 bp, Staphylococcus aureus; identical to SEQ ID NO: 404905

SEQ ID NO: 408556 - DNA, 1746 bp, Staphylococcus aureus; identical to SEQ ID NO: 408112

SEQ ID NO: 408557 - DNA, 2790 bp, Staphylococcus aureus
atggcataccaaagtgaatacgcattagaaaatgaaatgatgaatcaacttgaacaattgggttacgaaagagtaacgatacgtgataataagcaattgcttgataattttagaacgattttaaatgagcgtcatgcggacaaattagaaggcaatcccttaacagataaagaatttcaacgtctgttaacgatgattgatgggaaaagtattttcgagagtgcccgtattttacgtgataaattaccacttagacgtgatgatgagtctgagatttatttgtcgtttttagataagaaaagttggtgtaaaaataagtttcaagtgacgaatcaagtatctgtcgaggatacatataaagcacgttatgatgtaacgatattaatcaacggactaccccttgtccaagttgaattgaaacgtcgaggtattgatattaatgaggcgtttaaccaagtaaaacgttaccgcaaacaaaattacacaggcttattccgctacatacaaatgtttatcattagtaatggtgttgaaacgcgatacttttctaataatgatagcgaactattgaagagtcacatgttttattggagtgataaacagaataaccgaatcaatacattacaatcatttgctgagtcgtttatgagaccctgtcaattagctaagatgatatcgcgctatatgattattaatgaaacagatagaatactgatggcaatgcgtccgtatcaagtgtatgcggtagaagcacttattcaacaagcgactgagacagggaataatggatatgtatggcatacaactggaagtggtaagacattgacttcttttaaagcgagtcagattttatcacagcaagatgacattaagaaagttatctttttggttgaccgtaaagacttggatagtcaaacagaagaggaatttaataaatttgctaagggtgctgtagacaaaacttttaatacctcgcaactggtacgccaactaaatgataaaagtttgccacttattgtaacgacgattcaaaaaatggctaaagcgattcaagggaatgcccatttattagaacagtataaaacgaataaagttgtatttattattgatgagtgtcatcgcagtcaatttggtgacatgcatcgtctagttaaacaacatttcaaaaatgcccaatactttggattcactggtacgccacgttttccagaaaatagtagtcaagatggtagaacaactgcagatattttcggtagatgcttacatacgtatttaattagagatgccattcatgatggtaatgtacttggtttctcagttgactatattaatacttttaaaaataaagctttaaaagcagaagataacagcatggttgaagcaattgatacggaagaagtatggttagcggataaacgtgtggaattagtaacacgacatatcatcaataatcatgataaatatacacgtaatcgtcaatattcaagtatatttacagtccaaagtattcacgcgcttattaaatattatgagacatttaagcgacttaacaaaaagttggaacaaccgttaacgatagctggtatatttacgtttaaacctaatgaagatgatcgtgatggtgaagtgccatatcattcacgtgaaaaattagagataatgattagtgattataataaaaagttcgagacgaatttttcaacagacacaactaatgagtattttaatcatatttcaaaaaacgttaaaaagggcgttaaagatagtaaaattgatatcttaatcgttgttaatatgttcttaactggttttgatagtaaagtactgaacactttatatgttgataagaatttaatgtatcatgatttaattcaagcgtattcacgtacaaatagggttgaaaaagaatcaaagccatttggtaaaattgtaaactatcgtgacttgaaaaaagagacagacgatgcactgagagtattctcacaaacaaatgatacggatacaattttaatgcgcagttatgaagagtataaaaaagaatttatggacgcttatcgtgagcttaaaatgattgtgccgacaccacacatggttgatgacattcaagatgaagaagagctaaagcgctttgttgaagcttatcgtttattagctaaaataatattacgtttaaaagcatttgacgagtttgagtttacaattgatgaaattggaatggatgaacaagagaatgaagactataaaagtaaatatttagctgtgtacgatcaagtaaaaagagcgacggctgagaaaaataaagtatccattttaaatgatattgatttcgaaatagaaatgatgcgtaatgatacgattaatgtgaattatattatgaatatattgagacaaattgatcttgaagacaaagcggaacaacgtcgtaaccaagaacaaattagacgcattttagatcatgcagatgatccgacattgaggttaaaacgagatctaattagagaattcatcgacaatgttgtaccttctttaaataaggatgatgatatcgatcaagaatatgttaatttcgaaagtattaaaaaagaagcggagttcaaaggatttgctggagagagatctatcgatgaacaagccctaaaaacaatttcaaatgactaccagtatagtggtgttgtaaacccacatcaccttaaaaaaatgattggtgatttgccattgaaagaaaagcgtaaagcaagaaaagccattgaatctttcgtggcagaaacaactgaaaaatacggtgtgtaa

SEQ ID NO: 408558 - DNA, 681 bp, Staphylococcus aureus; identical to SEQ ID NO: 408074

SEQ ID NO: 408559 - DNA, 492 bp, Staphylococcus aureus
atgacatttgaagagaagcttagcaaaatatacaatgaaattgcgaatgagattagcaatatgataccggtagagtgggaaaaagtatatacaatggcttatatagatgatggaggaggggaggtattctttaattatactaagccaggtagtgatgacttgaattattacaccgatatacctaaggagtataacatttctgtgcaagtatttgatgatttatggatggatttatatgatttgtttgaggagttaagagatttatttaaagaagaagatttagaaccatggacatcatgtgaatttgactttacaagagagggtaaattgaaagtatcatttgattatatagattggataaatacagagtttgatcaattgggccgtgaaaattattatatgtacaaaaaatttggggttataccagaaatggaatatgaaatggaggaggttaaacaaatcgagcaatatattaaagagcaagaagaatag

SEQ ID NO: 408560 - DNA, 789 bp, Staphylococcus aureus
atgatgggatattcaaaaaggtttgcattgtacataagcgttatgattttaatatttgcgatagcaggttgtggcaaaagtgatgaaacaaaagaaggttccaaagaagaacaaattaaaaagagctttgcgaaaacgttagatatgtacccaattaagaatctcgaggacttatatgacaaagaaggatatcgagatggcgaatttaaaaagggtgacaaagggacatgggttatcagttcagtaatggttaaacagccaaaaggtgaaattatgaaatcaagagggatgtatctatttttaaatagaaatacaagaaccgcaaaaggatattttattgtagatgaaacaagtaatgatactttaaaaaaaacagaggataaagaaaaacgttatccagtaaagatggtgaataataaaatagtacctattgatccaattaatgataaaggtgtaaaaaaagaaatagaaaattttaagtttttctcacaatatggtgattttaaagaattaaaaaattataaaaatggagaggtttcatacaattctgaagcccctatctactcagcaaaatatcaactgaaaaataatgattataatgtaaagcaattacgtaaaagatatgatatatcaacagaaaaggctcccaaattgttgttgaaaggtactggagatttaaaaggttcatcaatcggacataaggacattgagtttacattcgtggagaatcaagaagagaatatattttttactgatagtttggagtttacctcaagtgagaactattag

SEQ ID NO: 408561 - DNA, 762 bp, Staphylococcus aureus; identical to SEQ ID NO: 408179

SEQ ID NO: 408562 - DNA, 486 bp, Staphylococcus aureus
atgatgggttatttaaaaagacttgtattgtacatagttattatggttatgagtgtttttataataggttgtgataaatcaagcgatactgcagaaaatccaaaagaaggttcaaaagaagcacaaattaaaaagagtttttcgaaaacgttagatatgtatccaattaagaatctcgagaatctatatgacaaagaaggatatcgtgatggcgaatttaaaaaaggtgataaagggacttggacaatatcaacagattttgctaaaagcaacaagcaaggtgaaatgaatagcgaaggtatggtactacattttaatagaaatacgaggacagcaacaggatattatactgtaagaacaacttatgatgaagtggataagttggcacgcgaaaaaaaatatcgtgttgaatttaaaaacaataagatagttctattggacaaagtagaagatgaaaatcttaaacaaaaaaatagaaaattttaa

SEQ ID NO: 408563 - DNA, 1443 bp, Staphylococcus aureus
atggctaaagttgaattaacaacccggagacgaaacttcatagttgctgttatgttgattagtgcgtttgtagctattttaaatcaaacattattaaatacagcgttacctagtataatgagagaattaaatattaatgaaagtacatcgcaatggctagttactgggtttatgcttgttaatggcgtcatgatacctctgacggcatatctaatggatagaattaaaactagacctttatacttagcggcgatggggacatttttattaggttctattgttgcagccttagctccgaattttggagttttaatgttagcacgtgtaattcaagcgatgggtgcaggcgtacttatgcccttaatgcaatttacgttatttacattgttcagtaaagaacatcgaggttttgcaatgggactagcaggtttagtaattcaatttgcaccagcaataggccctacagttacaggattaattattgatcaagcgagttggcgagtaccatttattataattgtaggaattgctttagttgcctttgttttcggcttagtttcaatctcaagttacaatgaagtgaaatatacgaaattagataagcgctcagtaatgtattcaactattggattcgggttaatgctatacgcatttagtagtgcaggagatttaggatttacaagtccaatagtaataggtgcgttgataataagtatggttattatctatttatttatacgtagacaatttaatattactaatgtacttttaaatttaagggtttttaaaaatagaacatttgcattatgtacgattagttcaatgattataatgatgtcaatggttggacctgcgctgcttataccgctatatgttcaaaatagtttatctttatctgccttgttatcaggacttgttatcatgcctggtgcaataataaatggtattatgtcagtttttacaggtaaattttatgataagtatggtcctagaccattgatttatactggttttacaattttaacaattactacaattatgttgtgtttcttgcatacagacacatcttatacgtatttaatagtcgtatatgcaattagaatgttttcagtttctttactcatgatgccgataaatactacaggaattaattctttgagaaatgaagaaatctcacatggcacggctattatgaactttggtcgtgtaatggctggttcactaggcacagctttaatggttacattaatgagttttggtgcaaaaatatttttatctacatcgccatcgcatttaactgcaactgaaattaaacagcaatccattgctataggggtggatatctcatttgcttttgtagctgtgcttgttatggcagcttatgtgatagcactttttataagagaacctaaagaaatagaaagtaatagaaggaaattttaa

SEQ ID NO: 408564 - DNA, 468 bp, Staphylococcus aureus
gtgaattatcttaaacataagttttataacttgttaactacaatgattgttctctttatttttgtactttctggtgcgatttttttaacatttctagggtttggtttatatggattaagtagaatacttatttattttaggttgggtgactttacatataatagaagtatgtacgataacctattatattatggcagttatataatctttgggtacttcatcatatttgcagtcgagcatttaatggattattttagaaaaatgttgcctgaaaatgcatattttagaggcgcgacttttcatttgatttcttacacagttgcaacaacgttattttatttcatcattcatttaaattatgtttatatcaatatcgatttttgggtcatcatggttattatagggttcttatatgtttgtaagcttcaattttaccctgaaagtaaaaatttaaataatagaaaatag

SEQ ID NO: 408565 - DNA, 1173 bp, Staphylococcus aureus
atgaaaatagcaactctgaacaaaggcaaagaaacaaaatattttaatggatatcctttaattgaagaagaggatatctattcacaagatcatttaaaagaaggagatatttttcaaattgtgactgataaatcacaatatgttgcaacggcttatgttggtcgccaacataaaggattaggttgggttctaacatacgataaagctcaagaaatcaacacagctttctttgtgaaattgtttaatactgcattagcagaacgtgattattattttaatatagatggaacaaatgcttttagattatttaatgctgaaggtgatggtgttgggggattaacaatcgacaattacgatggtcatttgttgattcaatggtactcaaaaggtatttataaatttaaatatgccattcttgaagcggttagaaaagtatttgattataaatctatttacgaaaaagtaagatttaaagacagcgaatatagtggtggttttgttgaaggcgatgcacctgagtttccaattgttatcgaagaaaacttcacattttataatgtagaccttgaagatggtttgatgacaggtatctttttagatcaaaaagaagtgcgcaagaaattaaggggtcaatatgccaaagaacgccatgttttaaacttatttagttatacaggtgctttttctgtaatagcagcaagtgaggcatcttcaacaacaagtgtagatttggctaatcgttctcgtagtttaactgaagaaaattttggattaaatgctattgatcctaaatcccaatatatttatgtcatggacacttttgatttctataaatatgctgcacgacatggacatagttatgacacgatcgtgattgatccacctagctttgcacgcaacaaaaaacgtacattttcagtgcaaaaagattatgacaaattaattaatggcgccttaaatattttatcatctgaaggaacattattgttatgtacaaatgcaagtgtatatccattaaagcaatttaaaaatactattaaaaagacgcttgaagagagtggcgttgattatgaattaactgaagttatgggtttaccaaaagattttaaaacgcatccacattataagccatctaaatatttaaaagctgtttttgtaaatattagacattaa

SEQ ID NO: 408566 - DNA, 210 bp, Staphylococcus aureus
atgcgccgagcacatgcaaaaaagcccctaacaactaaaagttgtaaggtaaaagagggatacatgcgccgagcacatgcaaaaaagcccctaacaactaaaagttgtaaggtaaaagagggatacatgcaccgagcgcaagcaaaaaagcccctaacaactaaaggttgtaaggaagaagagggatacatgcaccgagcacatgcataa

SEQ ID NO: 408567 - DNA, 243 bp, Staphylococcus aureus
gtggggccccaacacagagaatttcgaaaagaaattctacaaacaatgcaagttggggtggggccacaacagagagaaataggatcaccaattccaacagacaatgcaagttggcggggccccaacatagagaaattggatcaccaatttcaacagacaatgcaagttggggtggggcccaacacagaagctggcgaaaagtcagcatacaaaaatgtgcaagttggcggggccccaacatag

SEQ ID NO: 408568 - DNA, 711 bp, Staphylococcus aureus
atgaaaatatatagtcaaggtgaccaagccattgtagtcgcaattgaaaaagaagtatctaaaagtttaaccgaagatttattaacacttcgctcatatttaattgaacaaaattatccatttattatagaaattgtgccatcagaatcagacatgatgattgtctatgacgcaagggatatgattaaacaccataatatacaatcaccttttttatacatgaaagcactaatagaatcgattcatttaaacataaaacatgattttaaccagcaagatttgattgaaataccaattgtgtatggttcgaaatatggtccggatatagaatcacttttaaaacattacaaaatcaagctagaaacttttattgaattacattctaagacgcaatattttgtttcgatgatgggatattcacctgggtttccttatttaactggattaaataagaaattgtatattaatcacacgagtaaacagaaaaaattcattccagctggttctgtagtacttgaagggaaaaaatgcggtattgtaacaacggatacaattaatgattggttagttattggttatacaccattatcactttttaatccgaaagaatcagatttcgcacgcttaaagttaggcgataatattaaatttagacctatcaatgaaaatgaattagaagtaggagcgtttaaagatgtcaatcataattga

SEQ ID NO: 408569 - DNA, 1068 bp, Staphylococcus aureus
atgatgatgaataaagaagcaacaaaaattggatttgcctacgtcggcattgtagtgggcgcaggattttcaactggacaagaagttatgcaatttttcactaaatatggcttgtgggcttatttaggtgttattatatctggttttattttagcttttattgggcgccaagtagcaaaaattggtactgcctttgaagcgacaaaccatgaatcaacattacaatacgtattcggtgaaaagtttagtaaagtctttgattatattttaatcttcttcttatttggtatagctgtaaccatgatagctggtgcaggcgcaacatttgaagaaagttataacatacctacatggctaggtgctttaattatgacattagcgatttatattacgttgctattagactttaataaaatagtacgtgcacttggtatcgttacaccatttttaattgttttagttgtattaatcgctggcgtttatttatttaaaggtcatgtttcattagcagaagttaaccaagtagtgcctgaagcaagtatttggaagggaatctggtttggtacaatatatggtggattagctttttctgtaggttttagtaccatcgtagcaatcggtggggatacagaaaagcgtacagtgtcaggtgcaggcgcgatgtatggtggtattatctatactgtattactagcattgatcaactttgcattgcaaagtgaatatccaactattaaaaatgcctcaattccaacattgacgttagcaaataatatccatcctttaatagcaacagtgttatctgttattatgctggcggttatgtataatactattctaggactaatgtattcatttgcagcacgttttacagaaccatacagtaaaaattatcatatctttattattataatgatggtagcaggttatttattaagtttcgtaggatttgctgaattaattaataagttatatacaattatgggatatgtaggcttatttattgtagtagctgtaattattaaatatttcaaacgtaaaaatgcggataaaaaacatattgcttaa

SEQ ID NO: 408570 - DNA, 969 bp, Staphylococcus aureus
atgatgaaaaagttaatcaataaaaaagaaacatttttaactgatatgcttgaaggattgttaattgcgcacccagagttagatctgattgctaatacagttattgtaaaaaaagctaagaaagaacatggtgtagcaatagtctctggaggtggaagcggacatgaacctgcgcatgccggttttgttgcagaaggtatgctagatgcagcggtttgtggcgaagtatttacatcacctacacctgataaaatattagaagctattaaagcagtagatactggtgatggtgtattactagttgtaaaaaactatgcaggtgacgtgatgaatttcgaaatggcacaagagcttgcagaaatggaaggtataaatgttcaaactgttattgttcgtgacgacattgctgtgacaaacgaagtacaacgtcgtggtgttgcaggaacagtgtttgttcataagcttgccggttatcttgctgaaaaaggttattcattaacagagataaaatcgcgtgtagaagcgttgttacctgaaattaaaagtattggtatggcaattgagccaccgcttgttccaactactggaaaatatggctttgatattgaagacgacaaaatggaaatcggtattggtatacatggtgaaaaaggtattcatagggaagaagtaaaggatattgatcatattgttggaacattgttagacgaattgtataaagaagttactgccaatgatgtcatattaatggtaaatggtatgggtggtacgccgttatctgaattaaatatcgtaactaaatatattcaacaaaatttagctgcaagaacggttaatgttgctaaatggtttgttggtgattatatgacatctttagacatgcaaggtttttctataactatcgtgcctaataaaccagaatatttggaagcatttttagcaccaacaacaagtcaatactttaaataa

SEQ ID NO: 408571 - DNA, 2937 bp, Staphylococcus aureus
atgataattaaatcacttgaaatttatggttacggtcaatttgttcaacgtaaaattgaatttaataaaaacttcactgaaatttttggtgaaaatgaagcgggtaaatcgacgattcaagcattcatccattcgatattatttggttttccaactaaaaagtctaaagagccaagactagaaccacgtctaggtaaccaatacggtggtaaattagtacttattcttgatgatggcttagagattgaagttgaacgaattaaaggcagtgctcaaggtgatgtgaaagtatatttacctaatggtgctgtgcgtgatgatgcttggttacaaaagaaacttaattatatttctaaaaagacatatcaaggtatcttttcatttgatgtactagggcttcaagacattcatagaaatctaaatgaaaaacaattgcaagattatttattacaagcaggggctttaggatcaactgaattcacgtcaatgcgcgaagtgattaatcgtaaaaaagatgaattatataaaaaatcaggtaaaaatccgatcattaatcaacaaattgagcaattaaaacaactagaaagtcaaattcgtgaagaagaagcaaagctagaaacatatcatcgcttagtagatgatcgagataaatcatcacgtcgattagagaatttaaagcataatttaaatcaattatcaaaaatgcatgaagaaaaacaaaaagaggttgctttacatgatcattcacaagaatggaagtctctagaacaacagttaaatattgagccaatcacattcccagaaaaaggtgtggatcgttacgaaaaagcgcgagcgcataagcaatcgttagaaagagatattggtttaagaaatgagcgtttagctcaacttaaagaagaagcgactcaattagagccagttaaacaatctgatattgacgccttcattagtttgaatcaacaagaaaatgaaattaaaaataaagaatttgaacttactgcaatcgaaaaggatattgcgaataaacaacgtgataaagatgaattgcaagcaaatattggttggtctgaaacgcatcatgacgtagatagttcagaggcaatgaaaagttatgtcagtgagcaaatcaagaataaacaagaacaagctgcatacattaaacaattagaacgtagtttagaagaaaataaaatcgaagataatgcggttcatagcgaactagattctgttgaagaaaaaatagttcctgaagagacttttgaaaagaaaaaagaatactcacaacaagtcattgaattaaacgaaaaagagaacttgtatagcaaattgaaagaacgtttcgaaattgagcaacaagaaaaacaaaaacgtcaaaaattgttacgaacaacgtttattcttttaacattagtaggtattggtttaactgccttctcatttatttcaaacaacatgttgtttggtattattttcgcagtattaactttagtatttgttatcggtatcatcatgtctaaatcaaaagaagtagattatagcgaggccatcacagatgaaatcgaagaaattaaagcacaactagccattttagatgaaaattatgacttagattttgatcttgatgagcaatatcgcattcgtgatcactggcaacaagctttgaaaaataaagatattttagaagagaaacgtcagtatattgaaggtcgtttaaatgatgcgaaagggcgtcatgatgaattacaatcgacagttgagaacgttaaggatgaattatacttatcatctaaaatttcaaatgatttaattgttgatagtatttctacaatggcgaatattaaagcattagatcaacatatcagtgatttaaatcaacaacgccagcaattggttcaagaattagatacattctacaatcatgctgaagctgttacaaaatcacaatttgtttatttcaacaaattatctttattccacgatgtgcaacaatggttgaaatcagctgaagacacgaatgaaaaatggcgtattaatgctgaaaataccaaacttgttacaaatgaattaaatcatttaaatgctcaattagaagaaaataataaagaaattacagcactattcgattttatcaatgttggtactgaagaagatttttaccaacatcatgaagattaccaaacttatactagtaatttgagtcgttttaatgatttaactaaatatcttgagaaccaaaactattcttatgaattaagttctagtttaagtgaaaaaacaactgcacaacttgaagaagaagatcatttattggctactcaagttgacgaatataatgagcaatatcttgaaatgcaagcacaagtcagtgatttaagtgcacaaatcaatcacatggaaactgatacaacgcttgctaatttaagacatgaatatcacagtcttaaaaatcaacttaatgatatcgcaaaagattgggcaagtttaagttatttacaaagtttagttgatgaacacattaaacaaattaaagataaacgtttgcctcaagttattaatgaagcggtagaaatattgaagcatttaacagatggcagatatacgatgattaactataatgaagattcaattacggttaaacatgttaatggtcaattatatgatcctgttgaactaagtcaatctacaaaagaattactttatgtagctttacgtatcagtttaattaaggtactaagaccatattatccgttcccattaattgttgatgatgcatttgttcattttgataaaaagcgtactgaaaaaatgttgaattatttacgatcattatcagaacactatcaagtactatactttacatgtgtaaaagataatattgttccatcaaaagaagtgattacattaaacaaaatagaggaaggcgggaaacgatga

SEQ ID NO: 408572 - DNA, 1878 bp, Staphylococcus aureus
atggaagcatataaaattgaacatttaaataaatcttatgccgataagactatattcgataacctagatttatcaatttcagaaggtgaaaaaataggtttggtgggcataaatggtacagggaaaagtacgttgttaaaagtaattggtggtattgatgatgattttacagccaatgttatgcatccaaatcaatatcgaattcgatattcgtctcagaaacaggaccttaatgaagatatgacagtttttgatgcagtattaagttctgatacaacaactttacgcatcatcaagcaatatgagcaggcagtacaagcttatgcggatgaccaaagtgataaattgttcaagcgaatgatagatgcgcaagatgctatggatcaacatgatgcttgggactataacgctgaaattaaaacaatcctctcaaaactaggtatacatgatactactaaatacattaaagaattatccggcggacaacaaaaacgtgttgtacttgctaaaacattaatagaacaaccagatttattgttattagatgaacctacgaaccatttagacttcgaatcaatcagctggttgatcaattatgtgaagcaatatcctcatacagttttattcgtaacccatgatcgatattttttaaatgaagtttccactagaattattgaactaaacagaggtaagttagcgtcatatcctggtaactatgaatcttatattgaaatgcgcgctgaaagagaagtaacacttcaaaagcaacaacaaaagcaacgagctttatataaggaagaacttgcttggatgagggctggagctaaggctcgtactacaaagcaacaagctagaattaatcgatttaatgacctagaaaatgaagttaaccagcaatataaagacgataaaggtgaattgaatcttgcttattcaagattaggtaagcaagtgttcgaattagaagacttatcaaaggctattaatgataaagtattatttgaacatctgacggaaattattcaaaaaggtgagcgtattggtgttgttgggccaaatggagctggtaaaacaacactcttaaatattttgagtggagaagaccaacaattcgaaggtaaattgaagactgggcagacggttaaagtagcttattttaagcaaacagatgagaccctggatagagatattcgtatgattgattatttaagagaagaaagtgaggtcgcaaaagaaaaagatggaacctcggtatctattacacaacttcttgaacgatttttatttccaagtgcaactcatggtaaaaaagtttataaattatctggtggagagcaaaagcgtttgtatttattacgtctactcgtacaccagccaaatgttctgttgttagatgaaccgacaaatgatttagatactgagactttaacaatacttgaagattatattcatactttcggtggtacagtgattaccgtaagccatgatcgctacttcttaaataaagttgcacagtcatattggtttattcatgatggtcagatggaaaagattatcggaacttttgaagattatgaaagttataaaaaatcattagataaaaataaatccacattgaagcaacaatctaaatcttatacaactgtacgtaagaaaaatggtttatcatataaagaaaaattagaatatgaacaattgatgaaacgcatagaacaagcggaagtaagaatggaagaaattgatgtgctcatgattgaggcaagtgcagattatgggaaaattaaagaactaaacgaagaaaaagaacaacttgaaattcaatatgatttagacatcacaagatggagtgagttagaagaaattaaagaacaacaataa

SEQ ID NO: 408573 - DNA, 1782 bp, Staphylococcus aureus
atgatgcaacaaacattatcgcattactttgggtatgaaacatttcgaccaggacaagaagaaattattagcaaagtattagaccatcgtaatgtgcttggtgtcttaccaactggtggaggtaagtctatatgctatcaagtaccaggtttattgttaggtggtacaacaattgtaataagtccactaatatcattaatgaaagatcaagtggatcaattaaaagcgatgggaattcaagctgcttttttaaatagtagtttgactcaaaaagagcaacaacgtattgaaaaagcattatcaaatggagaaattcaatttttgtatgttgcaccagaacgatttgaaaaccgatattttttaaatatgcttcagcgtataaagattcacttagtcgcgtttgatgaagcgcattgtatttctaaatggggtcatgatttcaggccgagttaccaaaatgttatttcaaaagtatttacgttacctcaagattttacaataatagcgttgacagcaactgccacggttgaagtacagcaagatattagagaaaagttaaatatcgctcaaactgatcaaattaaaacgagtactaagcgtagaaacttaatttttaaagtaaatcctacttatcaacgtcaaaaatttatattggattatattaaaacacatgatgaagatgcaggtattatttattgttctacacgtaagcaagttgaagagcttcaagaagccttagaaagtcagaaaattgaaagtgttatatatcatgcaggtttgagcaataaagaaagagaagaagcgcagaatgattttttatttgatcgtgttaaagtagtcgttgctacaaatgcttttggtatgggtattgataaatccaatgtacgttttgttattcattataatatgcctggagatttagaatcttattatcaagaagcgggtcgtgcaggtcgtgacgggttgaaaagtgaatgtattttgttatttagcgaacgcgatatcaatttacacgagtattttataacagtctctcaagctgatgatgactataaagataaaatgggcgaaaagttaactaaaatgattcaatatacaaaaacaaaaaaatgtctagaagcaacaattgtccattattttgaaccgaatgaaaaattagaagaatgtgaacaatgtagtaattgtgttcaacaagataaatcatataatatgacacaagaagctaagatgattattagttgcatcgctcgtatgaaacaacaagagagttatagtgttatcattcaagtgttaagaggagagtcaacagattatattaagtataaaggttatgaccaaatttcaacccatggtttaatgaaaggttacacaacatcagaattaagtcacttaatagatgaattaagattcaaagggttcttaaatgaaaatgacgaaatattaatgtgtgatacttcaattaaaaaattactcagtaatgaagtagaagtattcacaacaccatttaagcaaaaagcgactgaaaaagtatttataaatacggttgaaggggttgaccgagtattattcagtcagttggtagaagttcgtaaaaagttaagtgacaaattaacgatagcacctgtaagtatattttctgattacacgttggaggaatttgctaaacgtaagcctgcttcgaaacaagatatgattaatattgatggcgtaggtagttacaaattaaaacattattgtccagcatttttagaaacgattcaaaattataaagccaaagtatag

SEQ ID NO: 408574 - DNA, 432 bp, Staphylococcus aureus
atgataccggtagagtgggaaaaagtatatacaatggcttatatagatgatggaggaggtgaagtattctttaattatactaaaccaggtagtgatgacttgaattattacaccgatatacctaaggagtataacatttctgtgcaagtatttgatgatttatggatggatttatatgatttgtttgaggagttaagagatttatttaaagaagaagatttagaaccatggacatcatgtgaatttgattttacaagtgaaggtaaattaaaagtttcacttgattatattgattggataaatacagagtttgatcaattaggccgtgaaaattattatatgtacaaaaaatttggggttataccagaaatggaatatgaaatggaggaggttaaacaaatcgagcaatatattaaagagcaagaagaatag

SEQ ID NO: 408575 - DNA, 684 bp, Staphylococcus aureus; identical to SEQ ID NO: 408089

SEQ ID NO: 408576 - DNA, 219 bp, Staphylococcus aureus; identical to SEQ ID NO: 408091

SEQ ID NO: 408577 - DNA, 1320 bp, Staphylococcus aureus; identical to SEQ ID NO: 408215

SEQ ID NO: 408578 - DNA, 543 bp, Staphylococcus aureus
atgacccgtaaatcaatcgcgattgatatggatgaagtattggcagatacattaggagaaatcattgatgctgtcaattttagagcggatttaggtattaaaatggaagctttgaatggtcaaaaacttaaacatgttattcctgaacatgatggattaattacagaagtattgagagaaccaggcttcttcagacatcttaaagtgatgccacatgcacaagaagttgtgaaaaaattaactgaacattatgatgtatatattgctacagcagcaatggatgtaccaacatcatttagtgataaatatgaatggttactagagttctttccatttttagatcctcagcattttgttttttgtggtagaaaaaacatcgttaaagctgattatttaatagatgacaatcctagacagcttgaaatttttactggtacaccgattatgtttacagcagtgcataatattaatgatgatcgatttgaacgcgtaaatagctggaaagatgtagaacagtattttttagataatattgagaaataa

SEQ ID NO: 408579 - DNA, 462 bp, Staphylococcus aureus; identical to SEQ ID NO: 408096

SEQ ID NO: 408580 - DNA, 477 bp, Staphylococcus aureus; identical to SEQ ID NO: 407374

SEQ ID NO: 408581 - DNA, 630 bp, Staphylococcus aureus
ttgaagcctgagtcaacacgtacgcaaatcgatcaaatcatcgatgaagcgaaagcatacaattttaaatctgtatgtgtgaatccaacgcatgttaaatatgcagcagagcgactagctgattcagaggtgctcgtttgtacggtaataggattcccattaggtgcgtcgacaactgcaacgaaagcatttgaaacagaagatgcaattcaaaatggtgcagatgaaattgacatggtcatcaacatcggcgcattaaaagatggacgttttgatgatgtacaacaagacattgaagcagtggttaaagctgcgaaaggtcacacagtaaaagtgattattgagacggtattgttggaccatgacgaaattgtaaaagcgagtgaattaacaaaagcggctggtgcggacttcgttaaaacttcaacaggttttgcaggtggcggtgcgactgcagaagacgttaaattaatgaaagatacagtaggtgctgatgtagaagtaaaagcatcaggtggcgtacgtaatttagaagatttcaataaaatggttgaagcaggtgcgacacgtattggtgcgagcgcaggcgttcaaattatgcaaggtttagaagcagattcagattactaa

SEQ ID NO: 408582 - DNA, 369 bp, Staphylococcus aureus
ttgatttcaataacaggtgttactactttaccttgttccactggtttagaaggctttttaggttcttcttttgcgggtggtactggtttaccaggttcagctggtacctctggtgttggcggtgttggtgtttctggctcactcggcacttctggtgtcggtggtgttggtgtttccggctcacttggtacttccggagtcggtggtgttggtgtttccggctcacttggtacctctggtgttggtggcgttggtgtttccggctcactcggtacttctggtgtcggtggcattggtgtttccggctcactcggtacttctggtgtcggtggcgttggcggcgttgtatcttcttcaatcgtttgttga

SEQ ID NO: 408583 - DNA, 618 bp, Staphylococcus aureus
atgcatgtgccgaagtattttcaagtagatgattttaaagaaattgaaaagtttattcaaagtaattcttttggaatgattgtaactgtggatcaaggaaagcctattgctacgcatgtaccattagttttagataaaaaaggggacgactattatattagtgggcatctagctaaaacaaatcctcaatgtaatacattaaaagataatcaaaatgtattaatcgtatatcaaggtgcacattcttacgtttcttcagcgtggtatgaaaaagaaaatgtacctacttggaattatcaagcagttcatttatatggtgaatcaagtatattaagtgaggaagaaacaatagatgacttgaaaagcctattggtaaagtatgaaaggcatcgtgaagatccagtattatgggacaatatttctgaaaataccaaaatgcaggccaaaggtattgtaggatttaaagtcaagatacacaagatagaggctgcatacaaaatgagtcagaatcgtaatgaaaaggattataataacataattgaaaagcttgaagatgaatctaatgcaagtagtgttgctgtagctgaagtaatgaaaaatattcatccatattcataa

SEQ ID NO: 408584 - DNA, 870 bp, Staphylococcus aureus
atggaaaatgaatcaagtaaagacacgaatatagaaacaaaatcagtaccagaagaaatggaagcttccaaatatgtaggtcaaggcttccaaccacctgcagaaaaagacgcgattgaatttgcgaagaagcataaagataaaattgctaaacgtggcgaacaattttttatggataacttcggtctaaaagttaaaactacgaatgttgtaggtagtggcgacggcgtagaagtatacgtgcattgtgatgaccacgacatcgtatttaatgcgagtattccatttgataaatcgataattgagagtgatagctcattaagaagtgaggacaaaagtggtgatatgagtatgatggtgggtacagtgttgagtggctttgaatatcgagcgcaaaaagaaaagtatgataacttatataaatttttcaaagataatgaagagaaataccaatatacaggctttacaaaagaagcaattaacaagacgcaaaatgttggatataaaaatgaatatttttatattacatactcttctagaagtttaaaagaatatcgaaagtattatgaactattgattcgaaaaaatgataaagaatttaaagaaggaatggaacgagccagaaaagaagtgaattatgctgctgatacagacgcagtaacgacattgtttagtacaaagaaaaattttactaaagacaatacagtagatgatgtgattgaactaagtgataaattatataattttaaaaataaaccagaaaaatctacaattacaattcaaatagggaagcctactattaatactaaaaaagccttttatgatgataatcatccaatagaatatggggtgtatcgtaaagatgaataa

SEQ ID NO: 408585 - DNA, 1731 bp, Staphylococcus aureus
atggaatcaagtaacttcaaaaacaaaaccattgtggcggatggcggtaattcggaaggcggtgcaggagcaaaatatcaaggagcgaaacatccaaatgaaaaagttgttgctactgacccagcaatggtaccttatgctgcttggcagaaatttgctagaccacgctttgataatatgattagttttaatagtaccaacgatctattaacatggttacaagatccattcatcaaagatatgccgggaaaacgcgttaacattagtgatggtgtgcccaggttagatgctttaatagacagccatgtaggttataaaaggaagttaaatagaaaagataacacatacgatactgtaccactaatcaaaattaagtcggtaaaagatacagaaattaaaaatggaaaaaaagtaaaaaagactattaacataacattagatatggatgggcgaattccaataaatgtttggacaggagattcgattgcacgttctggaagaggaactttaattaaacttaatttagaaaatcttgatgcgttgagtaaactgattactggtgaaactagtggtatgttagcagaatgcgtaatctttttaaatgaaagttttaacatctcagaaaatgaaaataaaaattttgcagatagaaagaaacaattatcagaaggatttaaggataagattaacttatttcaattagaagaaatggaaagaactttaattagtaaaataaactcacttgaagaagttgcagatgaaacaatagaaagtattagtgctgttaaacacttattacctgattttgcattggatgcattaaaagaaagaattaatgagttgtttaaaggtataaaatcttttatagaaaaagtgtatgatagtatagataatgaaattttagaaattttcaaaaatattgatcatgacttcaaggatggagtatctgaagaaatgatgaaacatttgaaagtagtaaaacagaatattcagcaaataaaaaatcaaaatgatatttatggtaggcaaattgcagatattagaagtattatgaagcaacaagatgcaacaattttagatggaaattatcaaattaattatagcggtgaaaatatggtgcagggtctagctttaccttctaattatttaggaagaaaaatgaaaatattaaaagaccatatcgatgatggtattaaaaaaatagcagactatgttcaaggtatatatgatgaatatgcatcgaaaattgtcgatgtaataaaatatttgattaatacaattcccaaaatacgtaagaatttaagacatgcaattgaaatgttaaatgtaaaaaagaaagaatttttgtccctgattcctaatgtaacttgtaattatattaaaactaaattagaagaattagataatactttaggcaaatgggagccttttcttaatgatttaaaagcagtgtcaccaattttagataaccatttagatgatattgttaagaacatgaagcctttgattgtacaaatgatatttgaaccatcacattatgacgatatgtttattttaaacacacaagctcatgcgcgtcttgatcaaatggcacaacagtttgaagttgtttgtaatggcttgaacgaaaatgaaggacaagcaattcaaacgatggatcaatccgcctctctaatacggtcaaacttaattcaagttaaagaacaattagaaaaactagctgtatactaa

SEQ ID NO: 408586 - DNA, 1002 bp, Staphylococcus aureus
gtgaaattgacggctgtgcatttttataaatatagtgaaccatttaagtctaaaattgtaactccgaaagtcactttaactcatcgtgattgtttgtttattgaaataattgatgataaaggcaatgcatatttcggggaatgtaacgcttttcaaacagattggtatgattttgaaacgattgattcagtaaaagaagcacttcaacaatggttcatagatattaaaaataaatcattcgaatcgtatgaagcggcacttgagttattgtcacctttggaagatactcctgctgcaagagcaactgttgtcatggcattgtatcaaatgtttcacactttaccgtcattttcagtagcatatggtgcgacagtaagtgggttatctaacaaacaactagctgccttgaaagaaacaaaacctgccagaattaaattaaaatggacgcctcaaattatagatcaaataaaatcgttacgtgagttaaactttcagtttcaattagttatagatgcaaatgagtcattgacccgtcaagacatgacacagttacaattattagcagatgaaaatatactttatatcgaagagccatttaaagaaatttcaatgattgatgaagtagtggctgaaaaaactcctccaatcgctcttgatgaaaaggcgacgtcactgtcggccataattaatttgatagaattatacaatgtgaaagttgttgtattaaaaccatttcgtctaggtggcattgataaagtgcaaacggcaattgatactttaaaaagtcatggtgtaaaagtggtaattggcggcatgtacgaatatggtttaagccgttattttacagcgatgcttgctcgtaaaggtgattatccaggagatgttacaccagcaggttattattttgaacaagatgtggtggcgcattcaggcatattaaaagaggggcgactcgaatttcgcccccctttagtagatataactcaattacaaccatattaa

SEQ ID NO: 408587 - DNA, 627 bp, Staphylococcus aureus
atgaaattcaaagctatcgttgcaatcacattatcattgtcactattaactgcctgtggtgctaatcaacataaagaaaatagtagtaaatcaaatgacactaataaaaagacgcaacaaactgacaacactacacagtcaaatagagaaaagcaaatgacaccacaagaagccgaagatatcgttcgaaacgattacaaagcaagaggtgttaatgaatatcaaacattaaattttaaaacaaatcttgaacgaagtaatgaacatgaatattatgttgaacatttagtccgcgatgcagttggcacacctttaaaacgttgcgctattgttaatcgacacaatggtacgattattaatatttttgatgatatgtcagaaaaagataaagaagaatttgaagcatttaaaaagagaagccctaaatacaacccaggtatgagtgatcaagctgaaacggataatgagtcggaagacattcaacatcatgatattgacaataacaaagccattcaaaatgatacaccaaatcaaaaagtcgatgataaaaacgataaaaatgctgataataaagaagaaaaacacgataaccgtgaaaataattcagcagaaactaaagttaaataa

SEQ ID NO: 408588 - DNA, 444 bp, Staphylococcus aureus
atgaaaaagaaatatatcttaaaagtagttgtagtaattataataggtttggtagtcgtggcatgtgtgactcataaacatagaaaagattattacattgagacgcaagaaaagcgtatagatttgtattttaagtataaccttaataattatagttctatgaaagttacaagttttaaaaagaatccaatgggtggttattttataaagggctttgtcaataataaaaataattataaatttgatgctgtgatattttctgatactaataaacaatttaaaggagatttaggttataaagaggataaaataggtgaattatttagagaaaaagatgctaaagacagattaaatgttgatgaaataattgaaaaagaacatttggataaaagtgattatgtagcggaaccaccattattcttcttttcggggagattagagtga

SEQ ID NO: 408589 - DNA, 444 bp, Staphylococcus aureus
atggaaagaaaaaaaataatatttataatttccttaattatagcactcttaataagtactggctatttaatcaataaaaacaaaaaagaccattacattgaaatacaagaaaagagaatagatttatattttaaatataaccttaataattatcattcaatgaaagttactagttttaaaaagacgcctatgggtggctatattgtggatggatatgttaatcacaacaaaaattatgattttaaagttctcatctctgcaactgacaatcatcaatttgaagatagcataggatacgatgataagacatttggtaaattatttaaagaaaaagaccataaaaatgaattaaaatctacagatattataaaaaaagaacacttggataaaagtgaatatgaagccgagccaccgttatttttcttttcaggtccaattgaataa

SEQ ID NO: 408590 - DNA, 390 bp, Staphylococcus aureus
gtgttatatactaaaccccttatcggtgatcgaacacctgctaaatttgcaccgtctcaaatggacgaaagtgatgcttttactgaatcagtaaaaaagaaatatccagatagtgagatacacccaataggacatagtttaggtgcatttttagctcaatataatttaataaaacataatctagataacggtacaacgtttgcagcacctaacttataccattcatttactggcgactttaaaaaagaaattgataatggtgtctatgattcaaaaatacgcaatattggccattttgatgatcctattgtcaatagcggtttaaaaatgctgttttatggcggtttgaaaatgtcgttttttagcggtttaagattgtcgtatatttaa

SEQ ID NO: 408591 - DNA, 768 bp, Staphylococcus aureus
atgaatacgaaccatcaaaaattactcaataactttgaaatattaaaactaaaaaaattcaaagattattatccaaactatattgaattactttctaaaaatgagaaatctttaactgaaatattgattgatttaacggaaaaagaaatagaataccaatcagaattaaaatttaaacgtgctgtgaattcagcacgtttccctaaaataaagtatttacatgattttgatttcatgtttcaacctagtataaatcaacaagaaatactcactttaaaatctatgcattttttagaagatagtataaatatttgtttcttaggtaatagtggtgttggtaaaacgcacctagcaatctcattaggaatagaggcatgtaagcaaaatataaagactagattctatactttcaaagaattaatagacttattaactgtctcagattccaaaggaatcattaataaaacattaaaacaattaagcagaatagagttacttatcattgatgaaattggttatactcccatcaccaaagaacaagctgatttattctaccagttaatgtcactaaggtatgaatggaaatcaacaataattacgactaatattccattttcaagttggggagagtcatttagtaataagattgtatcagcagctataattgatcggttagttcaccattcaaaagtatttaaaattactggagaatcatatcgattaaaagattataaaaccgaaaaatcattaaatatacgacaatcttaa

SEQ ID NO: 408592 - DNA, 999 bp, Staphylococcus aureus
atggccatttttaaatatatagagaaaaagggttatgaaggtaaatatactattctacgagaatactgtaaaaataaaaaacaaaatgagactaaaaaagcaactatacgcgtagaaactaatcccggtatagctgctcaagtagactggaaagaagatatggtaatgcatgataagtttggcagaacttatcaattcaacatctttctttacgttctacactattcaaaaatgaagtatatcacattaacttgggatagaaaacaagataccttatttgaatgtttaaaagacgcttttgaatacaccgaaggggttccaaaagaaatctggttcgataatatgagaactgtagttgatcgaccgagaacacaatataaaaaagtcgtttttaataatttattttatcaatttagtaaggatgccaactttgaacctattgcttgtagaccctatcgccctcaaacaaaagggtctgttgaatcattagctaaatttgttgaacagcgcttaagaccctatgattatgaattttatgatgctgtagaacttattgagctagtagacgatttatgtcacgaattgaatcacttagaaatttcacaagcaacagaacaacgacctatcgacgttttcaattatgaagaaaaagaacatttaaatttttttaatgccaagttactagatacttacatcgaaaatgagtgtataagaatcgtttctaaagaatcgatgattaactttagaaaaggtaaatactcggtacctactaaatacattggtgaagaagtacaagtgatattcaacaattctactgatgaattgctgatttattatgatggtgaattaataagacggcataatctatccgaaagaaaatttaattatatcgttgaagatatgagtgaaatattaaaatcagatgtatttaaacataaggatgacaaagaaattcttacgtatatagaaaattcattattactgtatgacgaaatttag

SEQ ID NO: 408593 - DNA, 186 bp, Staphylococcus aureus
atgaaaggtattaaaccaaattatgctgagcttggtcgacaatataattgtgatccaagaacagttaaaaaatattatgaagcaggaaaagaaaatgaattagaacgattgaagaagagacaacaaaataagaaagcatcaaaactagatccatttaaagaaattattaataaaaaattgaattag

SEQ ID NO: 408594 - DNA, 2205 bp, Staphylococcus aureus
atgattaaaaaaatttcacttcaaaacattgcgacttatagaaattatgtagaaataaaacctaaaaaaataaattttatttatggtagtaatggcagtggtaaaactactatttcgaatttgataggaagatttaataagtccgacgattgtgttattgaaactaaaaaaaatagtaactcaagtattttggtttataacaaaaaatttgttgaaaaaaactttagtcagtctgatatcggtctaaagggaattttcactttaggagaaaattccataaatttacaagataatttaaatgaattaagaagaaaaatacaggttaatgaagaaaatatatatattaaagaaaaaactataagaggctttgaagaagaaattgaagaaagaacaaatataattaaagataaaatttggaatcatcaaaaagagattagtaaagactttccagaagcctttgttggctataagaataacaaacaaaaattcttaaatcagtgtataaaagtttatgaagaaaatattttagaaaaatcagaggaaatcttaacaaatagtttagaaaaattaaaagaaaattataatataagtttttctgatgatattaaattatacgaagtgtttaatgttaatgatacggaaaagattctggaaatagaaaaaacgaatttgatagaaaaagttattgttggaggcaatgatagtctaatcggacaatttatacagtcacttaaaaatagtgattgggttaaacaaggtttggattatttggactactctaatcatacttgcccattttgtaatcaaagtatttctgaaaaactagaacaagaaataaaagactactttaacgaagagtatgaacaagatttaaaaaaaataaaagaaattaaacaagtatatagcagttgttttgaaaagattgaaagcaatatgttgtttatattgaggaagtcaataccctatcttaatacaaaattacttagtaaagagtttgaagtacttgagaaacaatatgaagttaatcaaaaacaattgaaagaaaaactgagaaatccatcacagaaattgaaaataaaaagtctggttcctaaaattgaaaatattaatgaaataattagctctctaaatgaatcgatcgaaactaataataatattattagaaataaagagagagaacaaaataaatttaagaaaaacctatggatatatattgtaaataatatgaagcaagatttaaaagagtatgttaattttaaaaatggaaaatttaaagctattgctaatattcgacgacaaatttctggtttaaaaaatgaaaataaaaaaactaataaggaaataggagaaatagaaacaaatattactagcgtagaacctactgtgaaaaacattaatgaaattttaaataaatttgatttcaaaggatttaaacttcaagagaatagtaatgcaaaagggacatacctcattgtaagagaagacggatcaaatgccaatgaaacaatgagcgaaggtgaatataactttattacatttttatatttttattacttagtttatggtagtcacgagagtacaagtttaacttcaaataaaatcgttattatagatgatccaatttctagcttagatagtaatgtattatttattgttagtactttagttaagaatttgataaatgactgtagaaataataagaatggaatacaacaaatattcaatcttactcataatatttactttcataaagaaatcacttttttaggaagtagagaaaggttttcgcctaatgaagtaatgtatggaattattagaaaaaaggataatataagttattttaatacttatgagaataatcctatagaatcttcatatcaattaatgtggaaagaacttaattctgaagaaatgtcaccaataacatcatttaatactatgcgtagaatactagaatattattttaatattatagggggcatggattatgaaaaatgtattaataaatttgacggtatagacaaaatattatgtaaatcacttatttcaggaataaatgacggatcacattttataagcgatgattttgttattacctttgatgaagcaagtatgagaaattataaaagagtctttaagttagtctttgaaaaacttggacatatccaacactttgaaatgatgagtaagaataagattaaataa

SEQ ID NO: 408595 - DNA, 2991 bp, Staphylococcus aureus
atgaacaaaaatgtgttgaagtttatggtctttataatgttattaaatatcatcacacctttatttaataaaaatgaagcatttgcagcacgagatatttcatcaacgaatgttacagatttaactgtatcaccgtctaagatagaagatggtggtaaaacgacagtaaaaatgacgttcgacgataaaaatggaaaaatacaaaatggtgacacgattaaagtggcatggccgacaagcggtacagtaaagatagagggttatagtaaaacagtaccattaactgttaaaggtgaacaggtgggtcaagcagttattacaccagacggtgcaacaattacattcaatgataaagtagaaaaattaagtgatgtttcgggatttgcagaatttgaagtacaaggaagaaatttaacgcaaacaaatacttcagatgacaaagtagctacgataacatctgggaataaatcaacgaatgttacggttcataaaagtgaagcgggaacaagtagtgttttctattataaaacgggagatatgctaccagaagatacgacacatgtacgatggtttttaaatattaacaatgaaaaaagttatgtatcgaaagatattactataaaggatcagattcaaggtggacagcagttagatttaagcacattaaacattaatgtgacaggtacacatagcgattattatagtggaccaaatgcaattactgattttgaaaaagcctttccaggttctaaaataactgttgataatacgaagaacacaattgatgtaacaattccacaaggctatgggtcacttaatagtttttcaattaactacaaaaccaaaattacgaatgaacagcaaaaagagtttgttaataattcacaagcttggtatcaagagcatggtaaggaagaagtgaacggaaaatcatttaatcatactgtgcacaatattaatgctaatgccggtattgaaggtactgtaaaaggtgaattaaaagttttaaaacaggataaagataccaaagctcctatagctaatgtaaaatttaaactttctaaaaaagatggatcagttgtaaaggacaatcaaaaagaaattgagattaaaacagatgcaaacggtattgctaatattaaagcgttgcctagcggagactatattttaaaagaaatagaggcgccagcaccgtatatatttgataaggataaagaatatccgtttactatgaaagatacagataatcagggatattttacgactattgaaaatgcaaaagagatagaaaaaacaaaagatgtttctgctcaaaaggtttgggaaggcactcaaaaagtgaaaccaacgatttatttcaagttgtacaaacaagatgacaatcaaaacacaacaccagtagacaaagcagagattaaaaaattagaagatggaacgacaaaagtgacatggtctaatcttccagaaaatgacaaaaatggcaagactattaaatatttggttaaagaagtaaatgctcaaggtgaagatgcaacaccagaaggatatactaaaaaagaaaatggtttagtggttactaatactgaaaaaccaatcgaaacaacatcaattagtggtgaaaaagtatgggacgacaaagacaatcaagatggtaagagaccagaaaaagtcagtgtgaatttattggctaacggagagaaagtaaaaacgttagacgtgacatctgaaacaaactggaagtatgaatttaaaaacttaccgaagtatgatgaaggaaagaaaatagaatatacagtgaccgaagatcacgtaaaagactacacaacagacatcaacggtacgacaataacgaacaagtacacaccaggagagacatcggcaacagtaacaaaaaattgggatgacaataataaccaagacggaaaacgaccaactgaaatcaaagttgagttatatcaagatggaaaagcaacaggaaaaacggcaacattaaatgaatctaataactggacccatacgtggacaggattagatgaaaaagcaaaaggtcaacaagtaaaatacacagtcgaggaattaacaaaagttaatggctatacaacgcatgtggataacaatgatatgggtaacttgattgtgacgaataaatatacgccagaaacaacatcaattagtggtgaaaaagtatgggatgacaaagacaatcaagatggtaagagaccagaaaaagtcagtgtgaatttattggctaacggagagaaagtaaaaacgttagacgtgacatctgaaacaaactggaagtatgaatttaaaaacttaccgaagtatgatgaaggaaagaaaatagaatatacagtgaccgaagatcacgtaaaagactacacaacagacatcaacggtacgataataacgaacaagtatacaccaggagagacatcggcaacagtaacgaaaaattgggatgacaataataaccaagacggaaaacgaccaactgaaatcaaagttgagttatatcaagatggaaaagcaacaggaaaaacggcaacattaaatgaatctaataactggacccatacgtggacaggattagatgaaaaagcaaaaggacaacaagtaaaatacacagtcgaggaattaacaaaggtcaaaggttatacaacacatgtggataacaatgatatgggcaacttgattgtgacgaataaatatacgccagaaaaaccgaataaaccaatctatcctgaaaaaccaaaagacaaaacaccaccaactaaacctgatcattctaataaagttaaaccaactcccccagataagccatcaaaagtggataaggatgatcaacctaaagataataaaaccaaacctgaaaatcctctaaaagaattaccaaaaactggtatgaagattataacttcatggattacatgggtatttataggtatattgggactgtatttaattttaagaaaaagatttaactcataa

SEQ ID NO: 408596 - DNA, 1125 bp, Staphylococcus aureus
atgcataaaaaatatttattgctattttttctgttattatcagttgcattgttatatagctgttccaagcaaaatgagaaagctcaaaataaatctgctaatccaaatgagtatgcaaagcataaatcgaaaatggatgaacattgggaaacatatcacggccaagtttatcatgtgttttatcatccattaattacagacccaaaagttgcgtttacaggagatacacaccaagctaagggcaacaatgattggatgattactgtaagtgaatttaaaaaatcattgaacgaattatataaaaataattacatcatcgttaatccacatgatgtatacgacttatcatctcatcatgtaaaagccaaaaaaataaaattgccgaaaggtaaaaagccactaatcatctcaattgatgatatgaattactatagttacatgagacaccatggttatgctgaccgcttagtacttgataaaaataagcatgttgtatctgaaacgacagactcaaaaggccatgctacttattctgatgacaatgatatcgtgccaattttaaataaatttgtaaaagagcatccagatttttctttaaatggtgaaaaaggtgttgttgctttaaccggttatgagggcgtattaggttatcggacgaatgaattaacgagtaaagattatacaaagaataaaaaagcagctgaagaagttgttcgcgcaatgaaacgggatggatggtcatttgcgagtcattcatatggtcacattaattttgaaaaaacatctttggagggtattcaacgtgatactaaaaggtggaaagatgaagttgaatcaattgtagggaaaacagacatgtttgtatttccacacggtgcacaagataggcatacattagcgtatgattatttggtcgataaagcaggctttaaatttattgcaggtgttggtccaaataattttacagacatatcaacaacgaatgtttatcaagatagggttgcgattgatggtctaaacttatttgaatttaaatataaactcaaaccgttttttaatcctgaaaatgtatatagtaaacaagatagacaattctttaaaggtaatcgggattatgaagaatag

SEQ ID NO: 408597 - DNA, 1014 bp, Staphylococcus aureus
atgatttatattgataaaaatgaaagcccagttacgccgttggatgaaaaaacaatgacgtctattattagtgcaacgccatataatttatatccggatgcagcatatgaacaattcaaggaagcttatgctaaattttacggattatcgtctgaacagattattgcaggaaatggctctgatgaattgattcaaaagttaatgctgatcatgccagaaggtccggcgttaacgctaaatccagatttttttatgtatcaagcatatgcggcacaagtaaatcgtgaaattgcatttgtagatgcaggatcagatttaacgtttgatttggaaaccattttaacgaaaatcgatgaagtacaaccatcattttttattatgagtaatccacataacccttcaggcaagcaatttgatacggtatttttaacagctattgcagataagatgaaagcaataaacggatactttgtcattgatgaagcatatttagattatggcaaggcatatgatgttgaaatggcaccacacattttaagaatgcgcacattatcaaaggcgtttggaattgccggcttaaggttgggtgtattaatgagtactgctgaaacgatacagcgtattcaaaaaatagaacatccatatccattaaatgtatttacgctaaatattgcgacttatatttttagacatagagaagagacaagacaatttttaacaatgcaacgacagttagctgagcagttaaaacaaatatttgatacacatgttgcagacaaaatgtcagtattcccatcaaatgctaattttgtacttactaaaggttcagcggcgcaacaattaggacaatacgtatatgaacaaggatttaaacctcgtttttatgatgagccggtgatgaagggctatgtaagatattcaattgcaacagcatcacagttaaagcaattagaagaaattgttaaagaatggagtgcaaaatatgatttatcaaaaacaacgaaacacagctga

SEQ ID NO: 408598 - DNA, 1905 bp, Staphylococcus aureus
atgagaaaaaatgatcatataaccgatttagatgctattgaattaagtagtgggtggaattacaatgacaaaataaccttgtcagacgagattcatgttaatggaaataaatataaagttattaaagatcaaaaaccgactaatacaggtctcggttataagttatatgaacgttatgataatgatagaagtacaggaaagttaatcatatcatttgatggtactgactttagtgacctaaacgatgtaggtacagatttaagactcgctggagactccattccaaatcaattggaagaagcacacaaagtgtattctgatttaaaacaaaaatacagtgatgcaagttctttaagtgatattgaattttataataaatataaagaagagtctattgattacaaaggaaaatcaatcacaaatgcaggggggaattcactctctggagccatagcccagtatttaggtgtgttagatccaagtcttagcgtaactactacaaattctgcacctataccaaaatctcttacccgtatggctcgtcgagatgcaaataatatacataattaccacagtagaagtgataccttaactagaattaacataggtggacttatgtatcattccatggtcggaaagcacattttcctagaaaatggtgtgtctacgtttggagcattggtacctgctcatactggatacaactttgaagaaaaagagaagttagaccattttgatcaaaacaatattattaacaaggaagtctacacgagtcgcaatggattgaaaatttatgctgacatggatgaacacactccaatatttgtatggagtggtgatgctattggtgctggtacatcaaaaataaaattagacaaaggacatctggcggatctgaatgactatgtgcatggtagattaaccgaatatgtaaataatattgatattaaaatgaaagacattcgaacatccgttgaacgtgaaaataataattttagtcaacatgtaaatgaaacgaaagatcattttaaaaaagtaataaaacttaacgaattagaaggttggattcacaacatatccaatctgattaggactaaaattgaaagtaaagcggatgaattaaaaggtgacctcagaacacttagagaccaagataatattttagatttagtaggtgccgatcatattattaattcaattattgattttattgataaaattaccgataaaatttcaaaattcattaaatatggtgatgatttcatggaagctgcttttgatatagttagcaacactattgtcaaaatgtttgtcaacttatcagaaggatttgaggatggtgttagagaagaggttttagcccatttgaatgttgtcataccaaatattcaaattatcaaaagtcaagtcactaatttcggtgatggcattaatgatatattgacccaaatgacccatttggatgacaatgtaatggttaacaacgtacccatcaataaaaatgctacgaagcaaacatcaaaaccacttgcagaatctaagaatttattattaaatttagaaattcgaaataaagtgatggaagctggtttggcttcacttgcgtcaagtataaatattttattagtaccaattacatcaaaactcttttatatcattacgtttgttgatgcatgcacgccaacattatctaattttgttggtaagattgaatggattgcctccaaagttccatttgccaagacaacagcggaaacacttaaatctttcaaaaatcttgttgataaattacatcaacaattaactgatatgcgattaatccttggtgaactaattttacagaatttgttattattgagatgcaagactttttcaaaaatgccctactatcagatagccttttaa

SEQ ID NO: 408599 - DNA, 945 bp, Staphylococcus aureus
atgagaaaagtaactggctttgtattgtgtacatcacttattttaggaggctgttcttttatgcataaagatcacacaaaagatatcccaaagacggttagcgtcaaagattatgatggtaaatatattggtgaacataaaaaaagaaatgaagtatttctgaaaaaacataaagatgaagcaatcaaaaaatacaaagactatgtgaaagacacctttggttatgattgtaaagttaatttagttgaggcctatactaataaatctgggtttagtgagaaaagtaaaacagatggcttagtagtcgttggtacggtcaattatgatattccttttcagtttagactgatttttgttgaatctgacaatggcataactatcacaacatttacacctggccataaaaacgaaacgtcagccgcagttgcagccatgatgtataaacattatgaacacgatatagaacaagctcggttaaaatttaaatcagaagttgagaaaaacggttattatgccatgaatgaaaaacttcaaaagaaacaagaattcaatggtgttactaaacaatatttaaattttaataccgttagtatagatgacctagataagtttaaaaaggaattcaagcctgtcatgcacttaaaaggagatgcattcaatcaacaattacaaaatttaattaataaatatccacaaatacaaaaaaatatgaagtccgagtttattgcctattacgataaagatgcaaataaagaaactgtagctgattatgcttggagtctaaaaaaacccactaacgaaattatgaaaacatacccaggtgaaaaacgtatgagattttacaaagataaagtatcaccttatgaacttgatcaatatgggcgcttaaatcctgatgcagatgaaatatatgttatcgggggcaattataatgagaaaaaatga

SEQ ID NO: 408600 - DNA, 444 bp, Staphylococcus aureus
ttgaaaaaatttcttattactattgttatcatcttgttaattggtgcacttggattcgccatttatgctgcaataaatcattctacatcgtcaaatcataataatgagcaagataataaagctacccatcaaaagaaagatactgaagtaaatcatcaaaaagacgaaaatacaaacaacacaaatgaaaatcaaaacaacaacggtgttactaatggcaatcaatcatctacgccatcaactgtccaaaataacggttcaacagcaccagcgaatacacaaccatctaatccgaatcaatcaaattcaaatcacggcggtggcagtcaatcgtcaacaaacaaccaaaataatcaacaacagaacacaccacctgctaataaatcaaataataccaatacgccttctaaacaaacacctcaagcacaatcacctaaaaattaa

SEQ ID NO: 408601 - DNA, 765 bp, Staphylococcus aureus
atgtctaactattcgactggagaactcgcaaaattatgcaatgtgacaacacgaacgattcaatattatgatcgcaaaggtattttgaaaccacaaggatttacagaaggaaagcgtcgtgtgtatacagaacaacagcgacaaacattagagttaatcttattgcttaaagatttaggttgtgcgttaagcgatatagatatgttgctaaaaggtgaaggtactttgaagacactcaataccttactaactatgaaacaacaagaaattaatcaacaagtcaaacagcaacaagcggtattagacaaaattaaaaatgttcaatattacgtaaatgaagcgtcgacgtctccaatcacacatttaaaagacatagagcatgtcatgagtaaatcagctgaaatgaaaagtattcgtcgtaatatttggattagtgctggtattataggaataattcaatattctagcattataagtgcaattttgatgaaaaataaatggccgtttttaattgctttaccatttatgattagttatggcattggtattactatctactatcaacgcaaagttgcctatttatgccctaactgccagcatatattctcaccgtctttgtgggcagttatcaaagcgaaacatacagcgacaacacgtcgattcgaatgtccaaactgtcatgaaacgcattattgcattgaagtacctaaaacacatatgagtacagaacaattagaagtaccccgcactaaaaataacaattaa

SEQ ID NO: 408602 - DNA, 309 bp, Staphylococcus aureus
atgaccgtcaacatcgtagtctctattgtgttttgtatcagtatggttgtattaagcatttatgtcgcaataactaaagatttcacactaatttcttatataaatcaaacgaccattgcagataaacacaagaaccaaattgcatatatatttgcgttatgtatcagtttgagtgcagtatttttaatgtctgcaattctatgctttgaatatgattttattgcattggcattcttatttttaacgatagcattattacttatcgcattattctacgtttgcttttataaaattacaaaatacccataa

SEQ ID NO: 408603 - DNA, 1194 bp, Staphylococcus aureus
atgtataataatattataacaaaaaatgaaagcgataatagtatccctttaaattatggtgattttattaaagaaaaacgcaataaactcaacatgactcaaaaggaattagcagattctataggtttacctaaatttggcgatagaacaattcgcagatgggaaaattatgaaacatcaccttcatatctagaatataaaacaattatgaacttcccagataccccaccttatttaaatcctaatatttatgattataaaatgattgatctttttgctggtattggaggaacaagattaggatttcaattacatggcaatgttaaatgtgtttttagtagtgagtgggataaattttctgcaaaaacttacaaagcaaattttggtgaaactcccaaaggtgatataactcaaatcattgcagatgaaatacctacccatgatatattagttgctggatttccttgtcaagctttttcccaagcaggtttaaaaaaagggtttaacgacactagaggcactcttttctttgatattgcacgaattttaaaggcaaagagaccaaaatgttttttacttgaaaacgtaaaaaatttacgctcccatgataaaggaaaaaccttcgatattataatgaatactttgttagagttggattacgatgtatcatcatcaatacttagagcgagagattttggctgtccacaaaatagagaacgaatttatatagttggttttgataagcaacagattaaaaatgccgaaaatttttcattccctgaaccattaccaatagaaacttctttaggtagtatacttgaaagcaatgtaaatgataagtatacaatatcagatagactttggtatggtcatcaaagaagaaaaagagaacataaagctaaaggtaatggatttggatattcaatatttaatgagacaagcccttatacaaacaccttatctgcaagatattacaaagatggtagtgaaattttgattgagcaaaataaaaaaaatcccagaaaattaacacctcgagaagctgcacgactacaaggatttcctgaaaactatataattcctgtaagcgatactcaagcttataaacagtttggcaattctgtttctgtacccgttgtacacgctatagcttctaatattttccaagtcttacaacaaaataagaataattaa

SEQ ID NO: 408604 - DNA, 921 bp, Staphylococcus aureus
ttgaataaccaattaaaagaatttaaaaatactataaaggttgagagatctaaattacttccaagtccatttgatatggtatataaaaactttgaaaaattaggatatcacaaacagaatgagcaatttttctacgataatgccagtataattattgatgaacttagaaatcagagctggattgaatttaaaaaaatagagaaagagttttcgaaaaagctttattctcatctattagatcaagatagtgaaaattataaaaacatgactgttaaagaagggattgaaaaattcacatctaaacatactgacgaaatatatgctttacaattatctaatacacaaagtagaagatccagagctggaaaagaatttgaatcaataatagaattggtgttaatgggagccaacattgaatttgtaactcaaggttcgattgggagcggagtttttgaatcttcagaactagcaaaattagttgattgtgtagtgcctggagctgcagaatataacttaaataaaagaaataccagtttaattagcgcaaagaccagtttgagagaaagatggcaagaagtcggcgatgagatgtctaggactaaagctaaagaaatgtatttggtaaccttagatgaaagtataagtgaaaaaacattaaagctgatagaaaaaaataatataattatcgtaactacaaagtctgttattgacaaaaattatctaaatagttcaaatgttattagttttgaagatatgttaaatgaattacatatacagttattacaatggaataactatggctatccagcaacagaacttaataataaaaaggaattatatcaaactttaatagaaaaatatgatggaaatatgtttgttagaaactattatgaaaatatgttgagtaatataaatgtgtag

SEQ ID NO: 408605 - DNA, 774 bp, Staphylococcus aureus
atgattcattcaagaaagttgaggctttgcctgtatttagtattattagctgtttttataggggcttgcggaatgaaaaaagaagaaagtagtaaagataaacaaattaaagaaaacttcaccaaaacgttgaacctgtatccaactaaaaatcttgaagacttttatgataaggaaggatttcgagatcaagagtttgaaaagggcgacaaaggcacttggattgttgattctgagatggtaattgagttgaaggataaaaaaatggaatccagaagtatggtgctctatataaatcgaaatactagaacaacgaaaggtaattttattgttagagaattgtgggaagacagtaaagggtatgcccaaagtaaagatacaaaatatccagtaaaaatggaacataataaaattatcccaaccaaaccgatagctgatgataaattaagaaaagaaatcgaaaactttaagttttttgtacaatacggtgactttaaagatattaatgattataaagatggtgacatttcatataattcgaatgtgccaagttattcagcaaagtatcaattaagtaatgatgactacaatgtgaagcaacttagaaagaggtatgatataccaactaagaaagcacctaaattattaataaaaggcgatggtgatttaaaaggatcatctatagcacacaaaaatttagagtttacatttatagaaaataaagaagaaaacatctattttacggatagtattaatttcaaacctactgaatag

SEQ ID NO: 408606 - DNA, 765 bp, Staphylococcus aureus
atgattcattcaaagaaattaacgctcggtatatgtttggtattactcattatattgattgtaggttatgtcattatgacaaaaacaaatggtcgaaacgctcaaattaaagaagcatttaataaaacattaaatgtgtatccaaccaagaatcttgaagacttttacgataaggaaggttttcgcgatcaagaatttgataaaagagataaagggacttggattattaattctggaatgaacatccaattaaaaggaggagccttaaaatccagagcgatggtactttacatcaatcgtaacactagaacagctaagggatattttttaataagtgagacaacagaagacaaaaaaggatacgtccataataaagataaaaaataccctgtcaagatggaacataatcaaattattccaacgaagcccataagggatgataagttaaaaaaagagattgaaaactttaagttctttgtacaatatggggattttaaagattataaagatggggatatttcatacaatcctaacgtaccaagttattccgcaaactatcaattgaataatgatgattataatgtccaacaattaagaaaacgatatgatatatcaaccaaaagggcgccggaattaaaattgagaggatctggcgatttaaaaggctcatccgtaggttctaaagaacttgaatttaactttataagaaataaagaagaaaatgtttattttacggatagtattaatttcaaacctactgaatag

SEQ ID NO: 408607 - DNA, 786 bp, Staphylococcus aureus
atgattcattcaaaaaagttaaaattgtgtttatgcttaataatactatctgtttttatagggggttgtggaatgaaaaaagaagaaagtagtaaagataaacaaattaaagaaaatttcaacaaaacattgagtttatatccaaccaaaaatcttgaagacttttatgataaagaaggctttcgtgacgaagagtttgaaaaaggagataaaggcacttggataattcactctaaaatgataattgagacaaatggtaggaatatggaatctagaggaatggttctctatataaatcgtaatactagaacaacgaaaggtaattttgttattagagaaataaccgaggatagtaaagggtattcagacagtaaagataaaaaatatccggtgaaaatggaaaataatagaatcgttccaatgaaaccaatacatgatgagaagttaagaaaagaaattgaagactttaagttttttgtacaatatggcaactttaaagatattaatgattataaagatggtgacatttcatataatccgaatgtgccaagttattcagcaaagtatcaattaagtaatgatgactacaatgttaagcaacttagaaagaggtatgatatacctactaagaaagctcctaaactattgttgaagggcgatggcgatttaaaaggttcatcagtaggatcaaaaaatctagaatttacctttgtagaaaacaaagaagaaaacatctattttacagattccgtacaatatactccaagtgaggataacaatttatga

SEQ ID NO: 408608 - DNA, 1356 bp, Staphylococcus aureus
atgagtcaaactgaatatcaaataaaaccgggcaatataaaagctaactctgaagaaacaagtactgtatctaaaattagttatgaaatagaaaacgctaataacagtggtttaaaaaagggtaaaatcaatgaacaaatagagggtcttaaagaggaaggtaaatttcctaaaaacttgaaatacttaaaaagttatactgatccaaacactggtacaactacgactgcgttcaaaaataaagacactggcaaagtaactttaggcatgactggtacaaatttacattttgaagaaatgggaaatgtcttgaaacatccgtttaatcactccgatcaagatatgaaagatatgaaggaaatgttgaaagatttcggagcagacgccaacattggtctaggtgctgtaacggataaagatccacattttaaagatacgcaagactttattaaagatatcaaaaaagaatatgaaattgacacaataactgggcactcacttggcggtagggatgcaattattttaggcgttagtaacgatatcaaaaatattgttgtatataatcctgctccattatcaattacagattttcgtataattgctctgaataatatgacgtacagtgcgattggcgacatagaaattaaggaaatgttgaaaaactataacggacatatagtaaggtttgtttctgataaagatgagttagatggttttgttagtcagtttatgtatgatacagctggtgagaaaatagttttgaacaatggcgaaggccatgatatgggagcctttttaaggaaatatgcacaagctaaaattttagcagaattaagaaaagtcaaaggatacgaagacgcaaataataagtcatttaaatctgtaaaagacaatactaaatcaaaattagggaaagttgaagaacttagagtgaattggcttcaagcaaatggtggagcattaacctcgtctcaactaaaattgttggaatctgtttcagcattaataatagcagagggattaagtcaattagttaaagaggaaagtaaccaactggagaagatgtacgataatatgaaggacaaatttcaagagaattggaagaattcccaagaagctggaaataaaataggaacaaaactttcgcatgacggagtactaacagcattaagaaatggtgatgcgtatgaaagcaagtttgagactgaacctttaaccaaaatcgaacaaaagttaaaagaattgaatgacataaatagtgattgtcacaactacgtctctaaaattaaagatagtgtaaatgcaattgtaggtaatgaccaattattagcgagtcagatagcaggtgtaatataa

SEQ ID NO: 408609 - DNA, 327 bp, Staphylococcus aureus
atgtttactgaatataagaaattaagtgatttggaaactgcatatgatgaagaaagaagaaaattgaacgataaattagagcaacttcaggaaattaagcatcagataaagttggattgtgaatattcatacgattgctttttatatctgaaaaacaaaatggattatagtcaagaatcaaacgttaaaatgacgcatattataaacgagtttaatgatgaaatgacccagcgaattaaaaatgaagagatgaaaatagaacgttctaaagatgaacttaaaagagaatatttaaaagaaattgaaaaaatgggaggtagagagtaa

SEQ ID NO: 408610 - DNA, 294 bp, Staphylococcus aureus
gtgtggtatgaatcagttgttgaaaggttaccaagcgggccgagtattaatgctgttttgcaaatgagacagattactgcagttattgcgcccgagcataacagaattcatcatgaccataaaaataaattgaaaaatgatgaagaacttttaataaatcaaatgagtagtcatttcaaaaaatttaaaggtgaatttgataatgtagctcaaggagattgggttaaaaaggcgaagaatgaactggatgatattagtaagaaattaaaaaatattcaaagaacggaagtttaa

SEQ ID NO: 408611 - DNA, 420 bp, Staphylococcus aureus
atgcccaaaaaaactatttttataattatcggtgttattttatgcatttctatagttactggaggtatctatttaaaaatgaaacatgacgaaaaagaaaaacaaaaagaaatttactacaaagaacagcaggagcgcattacgctttatctaaagcataatactaaagaacccaataccatcaaaactgtacatttcactaatttaaaaacagggcctatgggtgatattgaaatctatggatacattaacagtaaaaaagactatgattttattgcttacaattcacctgaagaaaactatcaattcactggaggattgacaggaagtaatgaagtcttaggaaaattaaagaacgctgaaaatttaaaatctcctgaaaaaattaaagaagaactaaacaacaagaaagaccactaa

SEQ ID NO: 408612 - DNA, 168 bp, Staphylococcus aureus
atgccgaaaaaacctaaagtagacatagatgtactgctttatatatttcaagaatatgaaaaaggtgtatcgtttcaatacctaatcgatacattacaattagatattaatgtcaatactttgtatcctaagtataaatattatccccccatggtattgaagcactaa

SEQ ID NO: 408613 - DNA, 417 bp, Staphylococcus aureus
atgtatactataggaaaagtgattaagaatcaatctccgaaatctagggtgtatatcatgaaagcaagaaaaaccacatttgaagaacgtatcacaattgttgaatattactttaatcataaacaatcttatagagaagttgcagaacactttaatatctcatacggtcaaatataccagtgggcccaaaagtatcaagcacatggtaaaaatgggttaatagatggcagaggcaaaggaaaacccaaatctatgatgacgccagaagagcaaaaggaagctgaaattcaagcattaaaagcacaaaatcgattactagaaatggaaaatgacgttttaaaaaagtttcaagcattagaaagagagatgattcaaagagaaaacaaatcgcagcatacaaaacgattgaagcgttaa

SEQ ID NO: 408614 - DNA, 315 bp, Staphylococcus aureus
atgggttttttagatgatcttgcggaaagcatagaagaacaaagtgatttatctgaatttaaacaagctatgaaaagtgagttacaaactaaagtggaagaagctaaggcaaaaattgaatctattgatgaagatatttgggattggcaaacgacagtaaataataagagagatgctatcgaagaatattgtgaaggtaaaacggctgagcatgcaattgaaagactaatgcaagataagcaagatatcgcaggtatgcgatggacagcagaagatgcagagaaaagctgtaaagtgggtagttggttttggtaa

SEQ ID NO: 408615 - DNA, 1209 bp, Staphylococcus aureus
ttgaatagtatatatgataaagatactacatatcgtgcacttgcaaaagaagcatatcatttagaaccggatcaagaaaaaatttttgtgccttattcgaaagagaaaaaaattgaatttagaattgtagcctttcgtcaaaataagtttaatggattaaaaatggcgggattgtcgcctgttgaaaaaggtgcaaaattgaataccgatgaattatatatagtatatgccggcacagaccctgatttgttagcagatttcggctctgattcaattgaagatttaaaggttggaatggcaaaatttggtggtggtttaagaataccaccaacgaaaaaagaacgcgcaatttatggtaatctgaataaaaaaatgattgattatgatgatgggatttctggaatttcgcaaaatattatgaccaatccaatttctcaaagtaaagagtcatatatttttacaggtgcattaattaataaacaaaaacctaaacatgtatatggtgctgcccatagtttgggtggcggtttagcattgttaaatggtgtgatgtataattttgatggtgtccgtgctttttcagcaccaaatacgtttgatttgttaccagatgaagttaaagcaaattatcgttctgaaaagtatgatggcaagtttataaattatctccatcgttcagatataattggtaattcagacttgtttgcacagcgtataggtacacaaatttatggcaaagatgtagggcgttttagtttgttaaaccctattttgggtcatggtatggatacatttgaatttaaaggtgataatgttcgtatcaaaatggatacagaagaaatgtcaaaaatagcaagtgatttgaaagcatcttgtgaatttgtaaatgatgcgattaaatcttatcaaaagtatatggatgataccaaagcagctgcgaaacgaattgaaagaaaatatacaaaaaaaataagaacaggtaattataagcatataaaaccatcagacatagaggattacatggaagaattatctgtatcgggaaaatatgaattttataatgataccgcatttgaaacagttatgagtgaattaaatcgaattcgaaagaatgttgaatcatttgcggacaaattaaaacatgctggcgagaagatggaatcacgtgataaagaaataggtgaattatataaaatatttgagaggtaa

SEQ ID NO: 408616 - DNA, 384 bp, Staphylococcus aureus
atgttaattatattaattattattgtgtgtgtctatttaaaaattaaaattgatgaaaaagaaaaacaaaaagcaatttattataaagaacaacaagagcgcattacactttatctcaagcataataccgaagaacccaataccatcaaatctgtacatttcacaagtttaaaaagaggacctatgggcgatgcagtaattgaaggttacatcaatgaaaataaagaagatgattttgttgcatatggatctccagaacataattatcaatttggtggagatatggtagaaagtgaaagattaagtgaattactaaaaccagcgcatgaaagaaagtcaccagatgatataaaaaaagaactaaataaaaagaagaatcactaa

SEQ ID NO: 408617 - DNA, 399 bp, Staphylococcus aureus
atgaacaaaaaacatgtttttataattattggtgtcatattatgtatacgtatagttgctacagtcatttatttaaaagtgaaatatgatgaaaaagaaaaacaaaaagcgatttactacaaagaacaacaagaacgtattacactctatcttaagcataatactaaagaaccaaacacgattaaatctgtgcatttcacaagtttaaagacaggacctatgggcgatgccgtaattgaaggttacatcaatgaaaacaaaaaagctgattttgttgcatatgggtctccagaacataattatcaatttggtggagatatgatagaaagtgaaaaattaagtgaattactaaaaccagcacaggaattaaaatcacagaaaaaatcaaagaagaattag

SEQ ID NO: 408618 - DNA, 423 bp, Staphylococcus aureus
atgccgtataattacaagaaacaaaatggagagttaatgtctgtaatgagccaaggtgaaaagtttattcatcaatcacccgttaatgatgaacttagtgcattgattaagttattaatttcaaaaattaacggttgtcattattgtgttgatatccataaaaaagaattaaaggaattgggtgtaacacaaatgaaaattgatgaagtcttgagttttagacatttagatttatttactgatcaagaaaaagtgacgcttgaatttgcagaaatgttaaattcaatcaaagactttaagaagtttgaaattattgaccggctaaaatcattttatgatgaagaacaaattattgatcttgtctttgttgtaaaccaaattaacggttggaacagattaaatattattagtgatagactataa

SEQ ID NO: 408619 - DNA, 363 bp, Staphylococcus aureus
atgttaaaagaaaaagaaagttttagattgctatatcaagctataagagagattgcagataaaattggagataatcagttagaaactaattccgttagtttattattattggactttgattttgaacatgaagtatttgatgaattgtatcttgcgattttaaaatatttaaatacagtaagtatagagaacataagtcatagtgagcttttgaatttaatagaaaatacgattccagaagatcgagagattaacacgtttgtaaaaaataaaataataattggctttgctaataattatttccctgaattacaagtattagcaaacgaaataaaatctgatatggctagttcattaaaataa

SEQ ID NO: 408620 - DNA, 1359 bp, Staphylococcus aureus
atgaattacacacaacaacttaaacaaaaagactcagaatatgtttggcatccatttacacaaatgggtgtatatagcaaagaagaagcaatcatcattgaaaaaggaaagggtagttacctttacgatacgaatggcaataaatatttagatggttatgcatcgttgtgggtcaatgtgcatggtcataataacaaatacttgaataaggtaattaaaaagcaactcaataaaattgcccattctacgctgctaggattatcaaatattccgtcaatagaacttgcggaaaaattaatcgaaatcacgccaagtaatctaagaaaagtattttattctgatacaggcagtgcgtctgttgaaatcgcaataaagatggcatatcagtattggaaaaatattgatagagaaaaatatgccaagaaaaacaagtttataacgctaaatcacggttatcatggggatacgattggtgcggtaagtgttggtggtatcaagacctttcataaaatatttaaagatttaatatttgagaatattcaagtagaaagcccatctttctatcgcagtaattacgatactgaaaatgaaatgatggcagctattttaacgaatatagagcaaattctaattgaaagaaatgatgaaatcgcagggtttatattggaaccgttgattcaaggtgcgacaggcttgtttgttcatcctaaaggctttttgaaagaagtcgagaaattgtgcaaaaaatacgatgtcttattaatttgtgatgaggtagcagttggttttgggagaactggaaagatgtttgcatgcaatcatgaagatgttcaaccggatattatgtgtttaggtaaggcgattacaggtggctacttaccacttgcagctacattgacatctcaaaaaatatacaatgcatttttaagtgattcgcatggtgtgaatacctttttccatggacatacatacaccggaaatcaaatcgtttgtacggttgctttagaaaatataagactatatgaaaaacgtaagttattgtcacatattgaaacgacatcatcaacacttgagaaacagttacatgcgctgaagcgtcatcgaaatgttggtgatgtaagaggacgaggcttaatgtttggagttgaattagtgacagataaagatagtaaaacgccgttagaaattgaaaaagttgaacgtattgtacgtaattgtaaagaaaacgggctaatgattagaaatttagaaaatgtcattacgtttgtgccagtgttaagtatgtcaaataaagaagtgaaaacgatggtacgtatttttaaaaaggcagtacataacattttagataggaagtgttaa

SEQ ID NO: 408621 - DNA, 693 bp, Staphylococcus aureus
atgtatagtataaaaatgcgttctagcaatcaagatgttcatattagtggtgctgaaacgatttgtgagtttgacaaaatagaacagacggtacaaaggttttataataaaggtttttttcatgaaaatgggcaaccggattttctcaatataaaaatacaaaaaatcatggaaccgattcaacaaataaaagcattacaaattattgatgatgataaagcaaatctccaacatttaacacaagaatgtggtgtaactgaacaagcgctaaatcaagggatgacatatattaaaaatgaaacggtttatacaggagctattattctatctgctatatctggtaaacgtttagattcatttggacaaagggggattagggcaacacatttttcgtttgaagatataaataataaaggtgatcttaatgaaagagtgactgatgccttagcaattgctagttgtatcaatgcgcatccgtatgtcaaaggagaactttgcgtgtccgatgacttaacgtatacgacaggttattttgcctctgctaaaattggttaccatcgattatttgatattaaaccagttaatacgagatatggaggcagaataatatttgtggacgatcgtattgatttaaatcattacatatcatttttagaaagcacaccgaagcaagttatttatgaaacggtatag

SEQ ID NO: 408622 - DNA, 216 bp, Staphylococcus aureus
atggaaaatgaaaaaagaaccgcagattcgattgagaatcaacggttctttttaatcacggtttattacgaaaattatttaaaaaatgatgtaaaactagagaagatatttttgattgattatttccagaatgataataaattacttaatgtatttttgattgatgatgcagtttcagctgtagttatagcagctttaactacttttggattttga

SEQ ID NO: 408623 - DNA, 618 bp, Staphylococcus aureus
ttgctttgtgaaaccgaaattatcaataaaaatccaaaatatagagttattaagtatgatgatgagtacttaatggtcgatgtaataagcacttggcttgtatacttttttccatttattaattggttcattccaaaaaggtgcgccaaaattagtagagaagagtatgaaaagctgaacactgttaagccagttaaaaataaaactttttggcctgttgtaggaggaacaatcttactgggtgttacttccagaaagtacatacacttacttaatattcaattagaaaaaatattggttataattatatgcttcgttgtatttctatgtattttaatcttttttgtgcttctgaatcgaaaattaaaattgaaagttttcgataataaaatagaagataaaaaaataatcttagtaccaacattaaaaaatgctgttcttatattatatagctatttgttgattggaggcatgtcaattttagctttaagcatgttactgacattagaaaaccaaaatttaataacttttatagcttggggtattgggttaatgttgtttttcttgatgaatataactctcattgttaataaaaaagccaaagttataaaaaggtga

SEQ ID NO: 408624 - DNA, 624 bp, Staphylococcus aureus
atgttgctgtgcgaatctaaaatcatcaataaaaacccaaaatatagaattattaaatataatgatgagtacttaatgatcgatataataagtacttggattagtttgttttttccatttatcaattggttcatcccaaaaagatacgtcaaaattagtagagaagagtttgaaaatttaagtattgttaaacctgctaaaaagaatgttttttggccagttgcaggtatctctactttattcgcagttacattaagaaagtatacgcatttacttgacactcaacttgataaaaaattagttattgccatatgttgtatcacatttatagggattttaatattttatgtacgcctaattaaaaaatcatctttaaatatttataatactaaaaataaaaggtcgaaaatcatcttaataccaacactaaaaaatttttgtttcacattgttcggatatgtttttttaattttttggacagtggttttctcatatgctctattatcaatgagttatcaaaacataatagtatattttgcttggattacagcaataatgggtttttttctagtgaatatagctttaattatagataaaaacattcatgtcatacttaaaaattaa

SEQ ID NO: 408625 - DNA, 228 bp, Staphylococcus aureus
atgaaaatgcgcttgcaacaagcttttttcaactctagtcaggggccccaacaaagagaaattggattcccaatttctacaggcaatgcgagttggggtggggccccaacacagagaatttcgaaaagaaattctacaagcaatgcgagttggggtgcgggccccaacacagaagctgacgaaaagtcagcttacgataatgtgcaagttggggccggacaacgataa

SEQ ID NO: 408626 - DNA, 546 bp, Staphylococcus aureus
atgtacaaatacttaagaaaaatttccgttgctactattgcgtcttttgttttggtggggcctgtttattctacggtagaatcaggtaaagctaatgctgaaactgctaaagcggttgataaggaaatgaagcaaagagaaaaaattggaaatgctttgttagaagagatagataatagtaaagaagattttaaagacccaagtgtaactgaaaaattaaaagggcaagttagagattataaaaatggtgttgcagagagaggtaaagctactataacggcaaaagctggagctaaagctatccgagctactgtaaataagattggagagaaagcttgggataaattagttgctaaaatagaaaatactactggcacaaagctagttatgttccattatcaaagtattaataagttttgcgatattttaacaggttttgagggtaatttagctgagggtatagctacaggattgactaataattttggtttcaataaacaatttgcatatattgtagcaagagctttcattgctattgtattatag

SEQ ID NO: 408627 - DNA, 1191 bp, Staphylococcus aureus
atgactaaatctgaaaaaattattgagttaacaaatcattacggagcacataattatttaccattgccaattgtcatttcagaagctgaaggggtatgggttaaagatcctgaaggcaataaatatatggatatgttatctgcatattccgctgttaaccaaggtcatagacatccgaaaattattcaagcattaaaagatcaagctgataaagtgactctagtttcacgtgcttttcatagtgataacttaggagaatggtacgaaaaaatttgtaaactggcaggtaaagataaagccttaccaatgaatacaggtgctgaagcagtagaaacagctttgaaagcagcacgacgctgggcatacgatgttaaaggaattgagccaaataaagcagaaatcattgcatttaatggtaacttccatggtcgaacaatggcgccagtttcattatcatcagaagcagaataccaacgtggttatggtccgttattagatggatttagaaaagttgattttggagatgtagatgcattgaaagctgcaattaatgaaaatactgcagcagttttagtagaaccaattcaaggtgaagcgggtataaatataccgccagaaggatatttgaaagcaattagagaattatgtgatgaacataatgtcttatttattgctgacgaaatccaagcaggattaggtcgttcgggtaaattatttgctacggattgggataatgtaaaacctgatgtctatattttaggtaaagcactaggtggtggtgtcttcccaatttctgttgtattagcagataaagaagtattagatgtctttacacctggctcacatggttcaacatttggtggtaatccacttgcttgtgctgcatcaattgctgcattagatgttatcgttgatgaagatttaccaggacgctctttagaattaggagagtattttaaagaacaattaaaacaaattgatcatccatcaattaaagaagtccgtggacgtggtttgtttataggtgtggaacttaatgaaagtgctaggccatactgtgaagcattaaaagaagaaggcttattatgtaaagaaacgcatgatactgtcattcgttttgcaccaccattaattattactaaggaagaattggaccttgcacttgaaaaaataagacatgtatttcaataa

SEQ ID NO: 408628 - DNA, 504 bp, Staphylococcus aureus
atgttcttgagcttagatagaaacacacgtacagctaaggggtactactttgtcaggacattttatcgcaaggataagttaccttatagaaaaaattataaagttgaaatgaaaaataataaaatcattttattagataaagtagaagataaaaagcttaaacaaaaaatagaaaattttaaatttttcagtcaatatgcaaatcttaaagaattgaaaaactacagcaatggtgatgtctcaattaatgagaatgttccaagttatgacgtgaaatataaaatgagtaataaagatgaaaatgttaagcaattaagaagtcgttataatattcctactgataaatcaccggtattaaaaatgcatattgatggtaatttgaaaggaagttccgttggagataggaagttagaaattgatttttcgaaacgtgaaaatagccatttatcagtaatagattctttggattaccagccagcgaaaactaataaagatgatgaataa

SEQ ID NO: 408629 - DNA, 681 bp, Staphylococcus aureus
atgaaattaaaaaatattgctaaagcaagtttagcactagggattttaacaacagggatgattacaactactgctcagccagtaaaagcaagtacattagaggttagatcacaagctactcaagacttaaagggttattatagtggaactggatttaattttcaaaatgtgagtggttatagagaaaacgacaaaatgaatctattttcagggtcacaacttaatgtaatatcactacttggttcagataaagaaagatttaaaaatagtgattatagtggattagatgtatttgtcgtacgtgaaggatctggtagacaagcggataataattctattggtggaattactaagacgaataaaaacaattataaagatttcgttaataatgtaggtctagaaataactaaaccaacaggacataatacagcaacaagacaagtggaaacttatagtattaataaagaagaaatttcattaaaagaacttgattttaaattaagaaagcatttaattgataaacatgatctttataagacagagcctaaagacagtaaaattagagttactatgaaaaatggtgatttttatacttttgaattgaataaaaagttacaaactcatcgtatgggtgatgtgattgatggtagaaatatagagaaaattgaagtgaatttataa

SEQ ID NO: 408630 - DNA, 1095 bp, Staphylococcus aureus
atgagtaatacacaaaagaaaaatgtgccagagttgagattcccagggtttgaaggcgaatgggaagagaagaagctaggtgagtttgctggtaaagttacccaaaaaaatgttgataaaaaatatattgagacattaactaattcagctgagttaggtatcatatctcaaaaggattattttgacaaagaaatttcgaatatagataatattaaaaagtactatgtagttgaagagaatgattttgtttataaccctagaatgtctaattatgctccatttggaccagtaaatagaaataagttagggaaaaaaggggtcatgtcacctctttatactgtgtttaaaattcaaaacattgatttaaactttattgagttttattttaaatcttcaaaatggtatagatttatggcattaaacggtgattcaggtgctcgagcagataggttttctattaaagataggacatttatggaaatgccacttcatatcccatgtatggatgaacaaataaaaatcggtcagttcttcagcaaacttgaccgacaaattgaattagaagaacaaaaacttgaattacttcaacaacagaaaaaaggctatatgcagaaaatcttctcgcaagaattgcgatttaaagatgagaatggtaaagattatccggagtgggaagaaactactataaaagaaattgctcaaattaacactggaaagaaagatacaaaagatgccattactaatgggagttatgatttttacgttagatctccgatagtttataaaattaatacttttagttatgaaggagaggctattttaactgtaggagatggagttggcgtaggtaaagttttccactatgtaaatgggaaatttgattatcatcaaagagtatacaaaatatctgactttaagaattattatggattattgttattttattatttttcacaaaactttttaaaagaaacaaagaaatatagtgcgaagacatcagttgattcagttagaaaagacatgattgctaatatgaaagtaccgcgtcctatttatatagaacaaaaaaaatcggtcaattcattaaaagagtag

SEQ ID NO: 408631 - DNA, 492 bp, Staphylococcus aureus
atgaatttcgaagaaaaactaagtcaaaagtacaacgagattgcgaataaaattagtagcatgataccagtagagtgggaaaaggtatatgcaatggcttatataaatgaaagaaatggagaagttttctacaattatactgagccaagcagtgatgaattgttttactatacgagcgtgttaaataaatataatataccaagatcagaatttatggactcagtatatgaattatataagcaatttgataatttaagagaattgtttatagaagaaggactcgagccatggacatcatgcgaatttgactttacaagagagggtaaattaaacgtatcttttgattatattgattggactaaattagaatttggtcaaatagcaaaagaaaattattatatgtataaaaaatttggagttatgccagaaatgaaatatgaaattaataaagttaaagaagtagagaagtgtattaaagagcaagaagaatag

SEQ ID NO: 408632 - DNA, 501 bp, Staphylococcus aureus
atgactttcgaagaaaaactaagtcaaatgtacaacgagattgcgaatgagatcaatggaatgataccagtagactgggaaaaggtatatgcaatggcatatatagatgatggaggaggagaagtgttctactattacacagaacctggaaggaatgaattatactactatactagtgtattaaataaatatgatatatcagaatcagaatttatggactcagagtatgagttgtataaacaatttcaaaagttaagaaatatatttaaagaagaaggacatgaaccatggacatcatgcgaatttgattttacaagagaaggtaaattaaaagtttcatttgattatatagattggataaattcagaatttggtcaaataggtcgacaaaattactataagtatagaaaatttggaattttaccagaaacggaatatgaaattaataaagttaaagaaatcgagcaatatgttaaagaacaagaagaagctgaaatatag

SEQ ID NO: 408633 - DNA, 612 bp, Staphylococcus aureus
atggagttcttattattaattgtcgtagccggactgtattatattatatatttaactgctgtgatgtattctgaaaaaatagtagtattgcctataatcatctatgccattgtgtttgtagtaattggtatcacttatatttttataggtgacagctatgatcagttaacaaatttcaatgtgattttgtatatggggagtttgttttatgcatggatggcttttagaaatctttggaacagaccattattattaaaatataagaacattacagatagttcaagtggaatagttaataaatctgaatataattcagttgaaagcttacgtataaacattgaaatagctaagtataaagggattatttctttgatagtagctatagtactaacggtattaatgacattaaagtcaacacctcaaatcactgcagaaacacgtgacttaagtatctcatttttcatactcagcttatttatcattataatatttgcagtttgggatttgattattagagttagaaagggaacgtttgcttttgttgtaataaggccaatattatttagttgctggttatttattttgaatatgattttatcaagattattataa

SEQ ID NO: 408634 - DNA, 450 bp, Staphylococcus aureus
atgaatgaattaagctattctactataatgtttagaaatgttatatcaaaagaatatttagatatagacttaaaaaatttaaatgaagtgacaacacattttttaaatgaagtaaagcattatgatttaaatgaaaatggaccattaattctcactattaaccagttgatgaaaaatgagaaagtaaatattacaatttattcatctattaataatataagtagtttacatgattcttttgaatttcaatcttacctttatattgatcaaatgttacataatcaacttagaccactaaattatgaagaagatattaagaagggtttagaagatatagaaagatttgcaaaagaaaatcaacttcaacgtatatcaccatattattttatactcaatgatgtgaatggatttaaatggatcgatattaaagtaaaagttatggaatattga

SEQ ID NO: 408635 - DNA, 450 bp, Staphylococcus aureus
atggaacttgatgcattagtaatgcctaacttagctaaaatggaattttctattaatccagaatattggaaagacgaaatgagcagaattaaatcattttttatagacaaacgtatctatacagttggaccaatagtatttacacgagaagttgtcgggctagatgaaatgaagtttgtaacctatatttcattaaattctgaaattgacgatatacctgaattgaatattaaatttataccttcaattgcccttttaccaactatttctcataaatgctttgatgaagatgaatttgaaaatgtttatatgaaaatcaaagagtttgcagtagaaaataacataacgctatcaaattctccattctaccatgttatggttgattattttggtggtcaagtatatgaaattcacgctgaaatcaatttagatgaggatgaattggaatga

SEQ ID NO: 408636 - DNA, 687 bp, Staphylococcus aureus
atgaataatactaaggaaaatattgatactcttcgaaaaccaggtgcacaagcattgagtttagcatcattatttatgatacttttttcatgtctaactttcttttatggattagattatgaaaggtttccaaattatttaaagataacgacaattatagaattaataattatcataattagtttacttcaatggattagatttatagatttcgaaaaggaaagcgcacagaaatataaaaaaatatatgcccgatttttagttgttataaatgtgctaactactatcaccgcagtatttgcaacatgtaatctttactattttgttgctgtacaaaatcattatgacctattcaattattggttgatgggtacgatttcaatcataattagttatttattattagtaattggcggaatgttcacgttattaaaattacctaaaataacaaaacgatggggtggtaaaactaaaacacattttggtttattattaactgcgttgagcgcatttatatatattgaaagaattatcgaatatatattagttcctaatgtcgtagaatcgaagtttgtcataatggtaagtatcattattattgcttgtacacaatttgtggcatttcaatttattatgcaatacagtaaattctatatttttgaattaaacacagcagatgatgactaa

SEQ ID NO: 408637 - DNA, 1554 bp, Staphylococcus aureus
atggggaataaaataaaaatgtcagaagtgaataattttaatgcttcattacagaaatctctcagtagcttatcgaccaacacaaaaaccttaaagaataatattaataaattgaaagatgatagtgaatttaaagggaagacagcatcgaatattaatagttataatcaaagttttcatattgaaacaataagtagaatcgaaaaaataaaggaggaatttgaaaaaaaattaaaagatgcaattgaagattttcaaaatagtgttgataatgaccataatgcaattttagatgaagatgcaatagaaaaatacaaaggggaagtcaaaaaatctattgaacaaatagagagtattaagacaagaatgaattctactataggaggggttcatgatttaacaacagcaaaaacaataagtggtaaggatgttaaagaaaagggagaaacatttaataagcaaattactgatacattagataattttaataattttcaaagtttacactttttagatgattccgaattattatctatgattacacctgtttctacaatggcctctaaagttaaaaatatgccaagtaatcgatcaactatatctggaaatgctggatatataaaaagtgagtataaacttcattcagaaaacaaccaatttcgtgaattgaaaaaagaattggaaaaatatgaaagcgcaatatatggtggtaataaatatcgaaagactgttaaatctatgattgaaataaaaaatgcattaattgttgcatatatagctggtgacggtaatatctttaaaggtaatgaattattagctaaaaaccagttggggaaattgggaaataaaaaattaaaattaataaatgcaactatgcaaacaaatgttgaaaatattgaaggaaaaagattagttaaagctgctaaatttatacttgataaaaataataaaatgaaattcagtgagaaattaaaagctggttttaaaatgaccagaaattatagcgatactgaattcaagcagctagaaaaagttgcaggaagatacaatggtaaatctgcaatgaaaagaggtgctaaagccgcatgggaaagtatgagtcaaaaacagttacgcgaatttttgaaaaatcctaaaaatttaaaaaatatatgtttggatgaagttaaggattttctaggcaaaaacaaactaggaaaatttttgaaaagtatgagatatgctggtaagcttttaggaccactaggagcagtagcagcagtagcaaataatgttgtaaatgaaaaatcaggacagaaaaaaattgttggatctattgttgatttaggggcaattggtggttcagctgcaactggtacggcaatcggtgctggaattggaggaccttttggtgcagcaataggtgctgcaattggaacaatggtaggtatttcaacagacattaagattgttggtggcaagtcattgactgatcttgctaaagataaacttaataatacggttagttctattagaagtaatggttttggtaaaacgttaagcaatgtattttaa

SEQ ID NO: 408638 - DNA, 396 bp, Staphylococcus aureus
atgactaataaggaagagctcaaaaaaagaaaggcacgatgtatagaacaaaaacatagcaaggaaagtgaattgaaaagcttacaaggagataagaaaaggctgcaagatgcagtgaattctgcacagaccataatagaagatttcaactctgaaaagaagacttatgatggtatagaaattgaaaagaatcaatggtctggacaaacacgtaacaaatcggatgataatcgcaccaatttaaatacgtcaatagataaatataaagaaaagtttgataaggccttaaatcaaatgaagaaggatttggaaaatcttgaaagtaaaatagaaggcgttgaaacggatatttcaaacattgctgctgaaattcaaaatatagacagtcaattataa

SEQ ID NO: 408639 - DNA, 297 bp, Staphylococcus aureus
atgggggaaataaaagttgaaacgagtagtacgataggaaaaattgaaagtatttctaatgctggatcaaatgtttcttttgataatgtatcagactcgttagaatacacaaacatttcaccatttacaggatttgctgctgctagtagtactttaactacagctatttctaattatcattctattatcactcaagacacagaagcaatgaaaactgctgtaaatgattttagagataaggatgctgatatagctggacaaattgatggaaataataatttaggagcaggattataa

SEQ ID NO: 408640 - DNA, 1206 bp, Staphylococcus aureus
atgaaagagaaaattgttttagcatattcaggaggactagatacaagtgtggccgttcaatggcttatcgacaaaggatacgacgttgtagcttgttgcctagatgttggtgaaggtaaagatttagacatcgtttataaaaaagctttagatatgggagctgttgaatgtcatattattgatgccacaaaagaatttagtgatgagtatgtaagttatgcaatcaaaggaaatttaatgtatgaaaatgcatatccattagtttctgctttatcaagaccattaatcgctaaaaaattagtagagattgctgagaaaacaaattcagtaggtattgcacatggttgtactggtaaagggaatgaccaagtacgtttcgaagttgccattaaagcattaaacccatctttgaaagcattcgcacctgtgcgtgagtgggcatggagccgtgaagaagaaattgattatgcaattaaacataatatccctgtatcaatcaatcatgattcaccttattctatcgatcaaaacctatggggcagagcgaatgaatgtggtattttagaagatccttatgctgtgccaccagaggatgcgttcgatctaacaaatgctttagaagaaacaccagatactgctgatgaaatcattttaacgtttgataaaggtatcccagttcaaattgatggcaaaacatatgaattagacgatttaattttaacgttgaatgcattagctggtaagcatggtatcggaagaattgaccatgtagaaaatagacttgtaggtatcaaatcaagagaaatttatgaagcacctgctgcagaagttattttaaaagcacataaagcattagaaacgattacgttaacgaaagatgttgcacactttaaaccaatcattgagaagcaatttgctgaacaactatacaatggactttggttctcacctttaactgatagcttgaaattatttattgatagtactcagcaatacgtaagtggtgatgtcagaattaaattattcaaaggtaatgctatcgtgaatggtagaaaatcaccttacacattatatgatgaaaaattagcaacttatacaaaagaagatgcatttaatcaagacgctgctgttggctttatcgatatctatggtttacctactcaagtaaatgcgatgttacatggaggctatagcaatgagcaataa

SEQ ID NO: 408641 - DNA, 1308 bp, Staphylococcus aureus
atgactcaaactgtaaatgtaataggtgctggtcttgccggttcagaagcggcatatcaattagctgaaagaggaattaaagttaatctaatagagatgagacctgttaaacaaacaccagcgcaccatactgataaatttgcggaacttgtatgttccaattcattacgcggaaatgctttaactaatggtgtgggtgttttaaaagaagaaatgagaagattgaattctataattattgaagcggctgataaggcacgagttccagctggtggtgcattagcagttgatagacacgatttttcaggatatattactgaaacactcaaaaatcatgaaaatatcacagttattaatgaagaaattaatgccattccagatggatacacaattatcgcaacaggaccacttactacagaaacccttgctcaagaaatagtggacattactggtaaagatcaactttatttctatgatgcggctgctccaattattgaaaaagaatctattgatatggataaagtttacttaaagtcccgttatgataaaggtgaagctgcatatttaaactgtcctatgactgaggatgaatttaatcgcttttatgatgcagtattagaagctgaagttgcgcctgtaaattcatttgaaaaagaaaaatatttcgagggttgtatgccttttgaagtaatggcagaacgtggacgcaagacattactatttggaccaatgaaaccagtaggattagaagatccaaagacggggaaacgtccttatgcagtggttcaattaagacaagatgacgctgctggcacactctacaatattgttggcttccaaacgcatttaaaatggggagctcaaaaagaagttattaaattaattccaggtttagaaaatgttgatattgttagatatggtgtgatgcatagaaataccttcattaactcaccggacgtattaaacgagaaatatgaattgatttcacaaccaaacatacagtttgcgggacaaatgactggtgttgaaggttatgtagaaagcgcagctagcggcttagttgcaggcatcaatcttgcgcataaaatattaggcaaaggtgaggtagtatttccgagagaaactatgattggaagtatggcttactatatttctcatgctaaaaacaataagaatttccaacctatgaatgctaacttcgggttattaccatctttagaaactagaattaaagataaaaaagaacgctatgaagcacaagctaatagagctttggattacttagaaaatttcaaaaaaactttataa

SEQ ID NO: 408642 - DNA, 546 bp, Staphylococcus aureus
gtggatttctgtattggattaaaagataaagatgagaatcaacttttaaaagaaatggaataccaaactagaagaaatataaaaaagactattgagattggtgttaaggttgaagatttatctattgaagaaacaaatcgattttataaattgtttcaaatggctgaagaaaaacatggttttcatttcatgaatgaagattattttaaacgaatgcaagaaatatataaagataaggcaaagttaaagatagcttgtatagatcttaatgaatatcaagataaattaaaaatacaattattgaaaatcgaaaatgaaatgatgactgtgaacagagcattaaatgaaaatccaaattctaaaaagaataaatcaaaattaaatcagttaaatatgcaattatctagtattaataatagaattagtaaaaccgaagaactaatattagaagatgggcctgttttggatttagctgctgctttatttatatgtactgatgatgaagtttattatctatcaagtggatcaaatcctaaatataattag

SEQ ID NO: 408643 - DNA, 486 bp, Staphylococcus aureus
atgaaattttcaactttaagtgaagaagaacttaccaactacaccaaaaagcacttcaaacattatacacagtctatagaattatataattatagaaataaaataaatcatgaagcacatattgtgggagtgaagaatgataaaaatgaagttatagctgcatgtttattaacagaggcacgtatttttaaattctacaaatatttctactctcatagaggtcctttacttgattatttcgatgctaaattagtttgttacttttttaaagaattatctaaattcatttataaaaatagaggagtatttattcttgttgatccatatttaatagagaatttaagagatgcaaatggtaggataataaagaattataataattcagtgatagtaaagatgctaggaaaaattgggtatctccatcaaggttatacaacaggatattcaaataaaagtcaaattaggtggatttctgtattggattaa

SEQ ID NO: 408644 - DNA, 213 bp, Staphylococcus aureus
atgaataaacaacaaagtaaagtacgctattcaattagaaaagttagtattggaacatttttaaatggtgattatgatggaaaattaatgaagttccaaagtttagatcaaaactggaataatggtggatggcgtaaagcagaggttgcacataaagttgttcataattatgaaaatgatatgatttttattagaccacttaaaaaagcataa

SEQ ID NO: 408645 - DNA, 2607 bp, Staphylococcus aureus
gtgttaaaaaagtggctaaattcaaacgtcaaacaattctttgttataactttcattagtgtaatattaacgcttattttattttctactcatatctatgattatattgtgaatggtactgtttttagtggggctggagatggattccgtcaaatgatgccatttcaaatgtatttgtatgaacatctaagtagtttttctagtttatatgatgcatcgtttggattaggtggcgattatatgaaaggactatcatattattattcgctgtcacctttaatgtggctaaattttctattcattaaaataggagaaacggttggtatatttaatccgacaacaatacatttttggccgacaaaccaacttattatggctatgatacgagctatcataacatttgtcgtgaccttctacttatttaaaatattacactttaaacgctcaacaaatatgatcgctacgattttatacggcatgtcaactgtcgttatatactttaattttacttggtcattttatggaaatttattatatttattgccattatcgattcttggtttggaaagatattttcaacaacgcaaaatcggtattttcattgttgcgatagccttaacactatttagcaatttttatttcagttattatcaagctattattataggttgctactatttatatcgactcattttcacttacaaatatgacattgtctctagaacacaaaaatttatttgcgtcatatctgctacagttttgagtgtgttatcaagtgtatttggtttattcactggcatttctgcgtttttggaaaatgacagaaagcaaaatcccaatgttgatataccgtttttgacaccacttgattatcattattttttctttagcgatggattttatattacgatttcaattcttactatcgttgcattattgtcattcaaactgtatcgtttttacttttatagacttttcgcaatagtaacatggatattatttataggttcattatcacagtatttcgacagtgcttttaatggtttttcatttccagaaaggcgttgggtgtatatcttagcactatcatcaagtgctctttgcggattgtttattcaacatttatcaacattaaatatgaaatattatttaatcagaacaatacccgtatgcatcatcgcattactttatgtattactatcaccgacacacccacttgcacttatagtaggtattatcctgctaatggtgcttgccgttattttaaaatttagtttatggcgttataaaaaattaaccgttgcaatattagtattaatcgttatgattcaacaaatcgtcattttagataacaacaaaaatatggcaatcaaaccttatcaacaatcaatatcaacgttgaaacaacatgattatcatagtaactatgtaaaccagcttataaaaaagataaatcaaaatgcaacaggcccatttaatcgcattgattatatgtcagactatgcattaaattcaccatttatatatcattataatggcatttcattatattctagtatttttaatggagacattttaaaatattatgacaagacactccaaattaatatgccaattgataaaaacagcacttatagactacttggcaatcgtcaaaatttactatcactttggaatgttaatgatcgaattagagtgaatcatgatgataacttaccatatggatttaaaattaactctgaacacaaagacaataaagttcgttggattcattctaaaaataccatccattatccaagtgcacatattacaaataaggtcttttccaataaagaattaaaatctccattagataaagaacaagcaatgttgcaagggattgtttctaacaatactaaagatgttaatacacattttaaagccaataaaaatttactatcagattcaacaattaaattaaatagtgcagcctggcaatctcctacaaaacatttattacaagttaaacaaaataatggtggtctaactgtacagttgccaaaatcagtatcaaatcaatataaagatttgtatttggaaatggatttagaattactttcgccagataaagcgcatgatgttaaagtgaatgaatatacacaagaaagaaacaaactcacttataaataccgtcgttttgtaacacccgtaacgatacgtattaaatcttcagataggattagattatcattgcctaaaggtaagtatcgagtaaatttaaaagggatatacggcgaagattataccacgcttaaagacgcttcaaattcattagaggctgtcaaagttagtaagacaaagcaaggttatactattactaaaaataaaaattcatctgggtatattgttttgccaacagcatataatcaaggtatgaaagcgacatcaggtgatcaaagtcttaaagttgaacaagtaaatggtattatgaccggcattaaagcacctaaaaatataacaaagattcaattgagctataccccaccatactattatttacttataacaattactatatttggcattatatgtagtattattttcacgagatgggcaagacaaaaataa

SEQ ID NO: 408646 - DNA, 267 bp, Staphylococcus aureus
atgccaagtcattctctgtgttggggcccaccccaacttgcattgcttgtagaatttctattcgaaattctctgtgttggggccccgcaacttgcattgcctgtagaatttctattcgaaattctttttgttggggccccaccccaacttacattgtctgtagaatttctattcgaaattctttttgttggggcccctgtctctaatttaaagtcttgttataatcgcatttttgtttggtcaatgtctgtctatataatattgtag

SEQ ID NO: 408647 - DNA, 840 bp, Staphylococcus aureus
atgattaattttgtaaaagaaaacaataagataatggttactttatcgctaacaattttcacgtctgtaatatttcctgagttaaaaagttggtattcaaaaatcattaatactgaaaacaaatatagaatattcgatagggcaattattatgattggcacagtgttaccaatgtattttcttttaggatttttgaattataaaatatatattaaactgctagaaagacctcatagtgaatttattaatacaatatggttttcattaataggcataagttatggattaatcttatttatagctatttcaacttacagaaattatttagcgattgttaatagatttcaattatataaaatgtgtgaaaattgtgattacatacattcctataggtttgttgtaaacaaagaaagtacattaattaaagattgttttaaagttggcaataatgacctttacgaacctggatcaaactacaaaataattaacctaaatcaaaccatatatggacactatgaaaaagttgaaagtttttatcaaaataaaaacgacaaaatattccatatcattacgctgaatagaaaaaacttaataagaagttggctttttataaataattggtctattattttatgtcgttttacaatgccgatagtgttcactttatttattttttctttatcctattttgataatggcatttataatgcttttattccaattgtgatatacattttcacttttgtttttcaatcaatcatattcaataaaatatatacagagaacaaacaattgaggacacaatatattcaaaagttgaactctggcatagaagtataa

SEQ ID NO: 408648 - DNA, 615 bp, Staphylococcus aureus
atgacaaataaaaaaattgacccacgggtaaagcgaacaaatcaatatttaattaatgcaattgtaaaactactcaatgataaagatatcaataaaatatctatacaaaatattacagattcagcagatttgactcgagcaacgttttatctgcattatcgagataagcaggattttttcaatcgaattgttacaaatgttatagatgatttgatagattatgtaaaagatggacatttgatagcatctggcttaaataatgaatcagatattaaaaatgcatttacgcgattatttgaatatatttatatgaattacgagtttttcagtgtgatgttaagtgatagaggtctatcacaattcagaccgaaattagaatctgtagtacaaaaggaaatttatataccattgtttcatgcacttgttaaaatagacggtgaaaaaacaagtaaatttccacaacattattttttaaattatataacgtccgctcatattggtgttatttgtacttggttaaatgatgatatgaattatagtccgaaatatatggctgaacttctatataaactaactttagaaggtattttttcagtagtacgaagtgaattttaa

SEQ ID NO: 408649 - DNA, 978 bp, Staphylococcus aureus
atggcaaataaaacaggttatattgatattcatcatcacatcattcctgaattttacctagacgcattaaaagaagctgggattgacaaagccggtggtctaaaaattaacaattggcaacctgaaaacagcataaaaatgatggatagattgggtattgaagtagggattacttccatttctgatccagtcgttgaaccacttgaaccaagcaaaagaaaagcaattgcacgagaaattaatttattacaaaaacaaatcatcaaagagtatccaaatcgttttggtgctttcgcaacattgccactacctgatgtggatagtgcaattgaagaagttaaatatgctttggataatttacaattggatggtgtaggtttattatccaactacaatgaagtatttttaggcgatccacaatttgaacctttaatgaaagtactagatgaaagagcaacagtcgtgtttatacatccaagtacaccacctgattatgtacctagaccaaaatatatgcctgttgatttcatagctgagtttacttttaatacaacacgtgctgcagcaaacttaattttaagtggtacaatggatcgctatccaaacattaaatttattttggcacatgccggtggtacattaccatatttaacatggagaattaacgaatgttataaattaatcaaacaaactgcagacgaaagtcaatttgttgttctagcaaaagatcctgaagcttatgttagtgatttctattatgacactgctttatcaacacaatctgcaacatttagagccttagaagaaactactcttgaagatcatattttattcggtagcgatgctcactatgcacctgaaaatttagatcaatcaatgattaatacaataaagcatcaacttgatttaaagaatgaaacaattgaaaatattaaatataatagtgcacttaaattattcccaagattccaaaaatag

SEQ ID NO: 408650 - DNA, 1242 bp, Staphylococcus aureus
atgaaacatcaagaaacgacatcacaacaatataacttttcaattattaaacatggcgatatcagtacacctcaaggcttcacggctggtggtatgcacatcggtttacgcgctaacaaaaaagactttgggtggatttactcatcgtctttagcaagttcagctgccgtatatactttaaaccaatttaaagctgcaccacttattgtcactgaagacactttacaaaagtctaaagggaaattacaagcacttgttgttaattcagctaatgcaaattcttgcacaggtcagcaaggtatcgatgatgcacaacaaactcaaacatgggttgctcaacaacttcaaataccatctgagcatgttgctgttgcttcaactggggtcattggagaatatttaccaatggataaaattaaaactggtacagaacatattaatgatgctaattttacaacgccaggtgcgtttaacgaggcaattttaacaactgatacatgtacaaagcatatcgctgtatcactaaatattgatggtaaaactattacaattggtggcagtgctaaaggatcaggtatgattcacccaaatatggctaccatgcttgcttttataacaaccgatgcatcaattgaatcgaatacacttcatcaattattaaaatcttcgactgaccatacatttaatatgattactgttgatggcgatacaagtacaaatgacatggtattagtcatggcaaatcaacaagttgaacaccaaatacttagtcaagaccatccacaatgggaaacatttgttgatgcattcaattttgtctgtacatttttagctaaagctatagccagagatggcgaaggcgcaacaaagttaatcagcgtcaatgtgtcaggtgctaagtcaatatcagatgcaagaaaaatcggcaaaactatcgtaagttcaaatctagtaaaatcagctatttttggcgaagatgccaattttggtcgaatcattacagctattggctatagcggatgtgaaattgatcctaactgcacatatgttcaactgaaccaaatacctgtcgtggataaaggtatggctgtactatttgatgagcaagctatgtcgaatacattaactcatgaaaatgtcacaattgacgttcagcttggtttaggtaacgctgcagcgactgcatacggttgtgatttatcctatgattatgtgcgtattaacgcatcatatcgaacataa

SEQ ID NO: 408651 - DNA, 1251 bp, Staphylococcus aureus
atgaaacgtttaagtacgactttgaaagtacgattgattagcaattttttacagctaattattacgacagcatttataccgtttatagcactatatttaacagatatgttaagtcaatcaattgtcggtatatatcttgttggtttagtggttctaaaatttccattgtccattatatctggttaccttattgagatttttccgaaaaagttgctagtacttatttatcaagcgacgatggtgataatgcttgtgttcatgggcgtatttgggtcacatcaattgtggcaaattattggtttttgtgttgcatatgccatatttacaatcgtttggggattacaatttccagttatggacacattaattatggatgcaattaccgaagacgtggaacattatatttacaagattagctattggatgacgaacttatcggtagctattggggcattgttaggtggcttgatgtatggctacagtatgttactacttttcttaatagcagcttgtatatttttaattgtactctttattttatatatttggttacctcaagaccgaaatcaagtaaagcaaagtgatgacaagagacatgcaagtcgttatcaaaaattacaaataataaatatatttcgcagttataaattagttttgaaagaccgtaattatatgttattgatttcggggttcagtatcatcatgatgggtgaattttcaatctcctcatatattgctattagactaaaggatcagtttgaaacaataagtataggttcatatgatattacaggtgctaagatgttagcaatcttgctaatgattaatacggtcgtcgtcattttactcacgtattcaatctcgaaagttgtattgaaaatagattttaaaaaagctttaatcactggtttgctgatttatattgttggctatagtggtctaacctatcttaatcagtttggcttattagttgtttttatgataattgcgactgtaggtgaaattatttattcgcctatagtttcagagcaacgttttaaaattattcctaaagctaaaagaggaacatatagtgcagttaatgcattaggcattcatttttcagaaacactagctaggttagggattgtgttgggtgctttcttaacgacattacaaatgggactgtatatgtttatagttttaacaattggtgctagcatgcttgttgctggtgtattcgggggacaaaaacaagtgaatacaaattga

SEQ ID NO: 408652 - DNA, 1674 bp, Staphylococcus aureus
atgggaaatcataaagcagctttaacgaagcaagtttttacatttgcatctgagttatatgcgtacggcgtaagggaagtagttatcagtccgggatcacgctcaacgccacttgcacttgcatttgaagcacatccaaatattaaaacatggatacaccccgatgagcgaagtgcagcgttttttgcagttgggttaattaaaggcagtgaaagacctgtcgctatattatgtacgtcaggtacagcagcagcgaattatacgcctgcaattgctgaaagccaaattagtagaattccattaatcgttttaacaagtgaccgtccgcatgaattaagaagtgtaggcgcaccacaagcgattaatcaagtaaatatgtttaataattatgtaagttatgagttcgatatgcctattgcggatgatagtaaagagaccattgatgcaatttattatcaaatgcaaattgctagtcaatatttatatggaccacataaagggccgattcattttaacttgccatttagagatccgttaacacctgatttgaatgcaacagaattgttaacttctgagatgaagattttaccccactatcaaaaaagtatagatgcatcggcaataagacacattttaaataagaaaaaaggtttaattattgtaggggatatgcagcaccaagaagttgagcaaattctgacgtattcaacgatatatgatttgcctattttagctgatcctttaagtcatttaagaaaatttgatcatccgaatgttatctgtacatatgatttgttgtttagaagcggtttagacttaaaagtcgatttcgtaattcgtgttgggaaaccagtgatttctaaaaagttaaatcaatggttaaagaaaactgatgcatttcaaatattagtgcaaaataatgataagattgatgtctttccaatagcaccagatatttcttatgaaatatctgcgaatgatttctttaggtcattaatgggagacacgacagttaatcgtgtcaattggctagaaaaatggcaaagcttagagaaaaaagggcgccaagagattgaaaattatttggagcaagctacagatgagagtgcattcgttggtgaattgattaagaagacgtttgaagaggatgctttgtttattagtaatagtatgccaatcagagatattgataatttgttattaaacaaaaatatagacatctatgcaaatcgcggcgcaaatggtattgatggtatcgtatcaacagcgcttggtatggctgtgcataaacgagttacattattgataggtgatttgtcattttatcatgatatgaatggactattaatgtcaaaattaaataatattcagatgaatattgtattattgaacaacgatggtggcggtattttttcatatttaccacaaaaagaaagtgcaaccgtctattttgaacggttgtttggcacaccgacgggattggatttcgaatatacagctaagttatatcaattcgattttaaacgttttaacagtgtttcagaatttaaaaatgccacattgttatctgaaacttcgacgatttatgaattgataacgaatcgcgaagataactttaaacagcatcaaattttatatcagaaattgagtgaaatgattcatgacacattataa

SEQ ID NO: 408653 - DNA, 642 bp, Staphylococcus aureus
atgatagaattaaaagatttaaccatacaaaaaggtaatacacatattttgaataaacttaatttgaaatttcaatgtggaaaatcatatgcacttattggtaaaagtggatgcggtaaatctacattattaaatactattgctggacttgaaaaaacagggaaacaatatgtctattttaatggtcaattagaacaatttaaatctaatttttacagagataaattagggtatttatttcaaaattatggattaatcgataatctgacagtatatgaaaatttagatattggattagcatataaaaaaataagtaagaaagaaaaagaacaattaaagatacgttatatagaacagtttggtctgtcaaacagtttaaaaagaaaagttcatacgctaagtggaggtgaacaacaacgtgtcgctttaattagaatgatgttaaaagatccgattgttatgttagctgatgaaccaactggtgcgttagatcctgaaacaggacagatgattattcaatcattatttgatttggtcgatgaaaataaagtgctgattttagcaacacatgatatggctattgcaaatcaatgtgatgaaataatagatttagaacagtatagaaaagtagcatctttgtga

SEQ ID NO: 408654 - DNA, 285 bp, Staphylococcus aureus
atgaagaacaaaatttttggcgctatattatatttatctttagcacttggattatcaacagcagcttatgcatctacagaatacgcagaaggaggcacttggagtcacggtgtcggcagtaagtatgtttggtcgtattattatcatggtcataaaggacatggtgcaacagctattggaaaatacagatcatttagtggttatacaagagctggtgtaaaagcaaaagcatcagctactaaaaataattggtgggtcaatagagcatattataacatttattaa

SEQ ID NO: 408655 - DNA, 1623 bp, Staphylococcus aureus
atggaaatttcaaaattaaagtacttattattaaattttatttttgtattgatactttctggttgtagtaaagaaggtatatattctgataaaggacaagttttcaggaaagtaataccacaagatatgagtactttagatacaactttaataacagatgcagtttcaggtgatatatcaaatcaagtattcgaaggactttttacactagataaaaatgataaagcgaaattagcgttagccaaagaactacctaaaaaaagtaatggtggtaaaactttaacttttaaattaagaaaagacgctaaatggtctaacggtgatccagtaacagcgtatgattttgtatatgcgtggagaaaattagttgatccaaaaacaggatctgaatatgcttacataatgtctgacattgaaaatgcagatagtataaattctggtaaattaccagttgaaaagttaggtattaaagcattaagtaaatatgaacttgagataaagttgaaaagacctataccatacataaatgaattgttagctttaagtaatttttatccacaaaacgaaaaagttgcgaaaaagtatggagaaaagtatggtttgaaacctcaaaatgcagtttataatgggccgtttaaggttgatacttggagagcagaagataagatacttttgtctaagaataatttctattgggataaaaagaacgtaaaattagataaagttaattataaaatattgaaagataaacaagctggtgcttcattatttgaaacaggatctgttgatgatacattaattttagccgatcaagtaaaaaaatatgagaattctagtgctttacaaaagcgtataacttcaggtaattttttcataaaatttaatcaaaaaaaggtcgaagaatttaaaaatcaagatttacgcatggcaatagcattagcaatcgataaaaaaggatatgttgaagcagttaaaaatgatggttctatatacagtaatacatttacagccaaaggtgtcgcaaaacttagtaatggtgatgattatttatcaagtataaattcaccattaaagtatgataagaaagaagcgttgaaacattgggaaaaagcaaagaaagagctaaatataaaaaacttcacattttcaatgaatactgaagatgcaccagattcaaaaatctcagcagagtacattaaggcacaaatagaaaaaaatttacctggtgtaaaaatgaaaattagacaactacctttcaaacagagattaagtgaagaatttaaaatgacatatgaaacatcattaactggttgggctgctgattatcccgatccaacaacttatttgtcgacaatgacaaaagataatccccaaaataatacagactggagtaataaaaaatatgacgattatttaggtgaaataaacggagaattattaggggaagttagcaagagagataatagaatgaaagaagatgaagagttattgttaaatgatgtgcctctagctccaatttatcaaaagggagaagcacatttaactaatcctaaagtaaaaggtcttcaataccatgttgtaggtccagatacaacattaaagtatgtatatatagataaataa

SEQ ID NO: 408656 - DNA, 411 bp, Staphylococcus aureus
ttgattatcgcagatgaacctatttcagctctggatgtatcgatacaagcacaaataataaatatcattaaaaaattacaaaaagaaaggaatactacgcttttatttattgcacatgatttatcaatggttaaatatgtttcagatagaattgcagtcatgcacaaagggaaaatagttgagattgccagttctgaaagactatatcaaaatccattacataattatacaaaatcactaatttcagcaatacctcaaccagacccacaatatgaaagagaaagagttagggaaatttacaaggattcgtttgataataattctgagtacaaactaagggaaatagaaaaagatcattttgtgttcacaagtataaataaggcagaactattgagacaacgaaaactttaa

SEQ ID NO: 408657 - DNA, 477 bp, Staphylococcus aureus
atgaacaataatgtacttgttgaaattaaaaatttaaccaaaatttttaataaaaataaaaataatgaaataaaagcaattgacgacgtgagcattaatataaataaaggcgaggcgcttggtatagtaggagaatctggatgtggaaaatctacatttggaaagtccattattagattattagaagtaccagaagaaactatattctttgaaggaaaggatattaacaaaattacatctagaagagatagccttaacttaaacaaacggattcaaatgatttttcaagatccttatgcttcattaaatcctagacttaaagttatggatattgtgggtgaggggatagacatacataaattggcggaaaataaagctgaaagaaatgaaaaaatttataaattattagaattagtgggtctaaataaagaacatgcaaatcgctatccgcatgaattttcaggtggacaaaggtaa

SEQ ID NO: 408658 - DNA, 1083 bp, Staphylococcus aureus
atgatgaaaaaagtattggaagtaaaaaatctagaagtttctttcgaagttgaagatggcatagttaatgcagtgagaggaattgattattgcatacatgagggagaaatactagcaattgttggagaatcaggatcaggtaaatcagttgctactaaagcaattactaaattgttccaaggggaaaatggaaaaatcacaaatggaaatgtgaagttttttggggaagatttagttgaaaaaaatgaaaaagaacttgctaagatacgtggaaaagatatagccatgatttttcaagatccaatgacatcactaaaccctacaatgcaaataggtaaacagattatggaaccgttgatgatacataaaaaaatgaatagaaaagatgccaaaggaaaagccgtagagattttagatttagtaggtataaaaaatgctgaattaagatttaaagattacccacatcaattttctggtggacaacgtcaaaggattgtaataggtatggctctagcatgcgaaccaaagttattaattgctgatgagccaaccactgcattagatgtaactatgcaatcgcaaattattgatttaatgaaaatattacaaaagaaaacaaatactgcaattatttttattactcatgatttaggagtcgttgctaacattgcagacatagtgtcagttatgtattgtggtgaaattattgagacaggaaaagtagaagaattgttttattatcccaaacatccatatacatgggggcttcttgcttcaatgccgacattagagtctaattcaaagtcaaaattgattgcaattccaggaacaccacctaacttgttgaagccacctattggtgatgcatttgcaagaagaagtgcatatgcgttaaatgttgattttaaatatgaagcgccatggtttcaattatcacctacacatttcgtaaaatcttggttactagatagcagggctccaaaagtaattccgccagaaactgttaagcgtaaatttaaagaactttcttataattttgagagaccgttaaaagtagaaggagtatcatttaatgaacaataa

SEQ ID NO: 408659 - DNA, 1020 bp, Staphylococcus aureus
atggtgattgatgaaaataaaaagcaattgacttcaacggattttgaatttaaaaaagataaaataaatcaagaatttttaaacgttaaaaataagaatttttggcaagatggctggtcacaattaagaaaaaataaattagctgttataggtatgattggattaataatgattattttatttgctttatttgcacccgcagtttctcagcataatagtactgagcagaatgtcacagatagaaatttaccttcgaaaatacctctgttagaaaaagttgattatttgccttttaatggcaaagatgttaacggcaaagatacttataaagaggtaggttcaaaagattattacttatttggaaccgatcagttgggtcgagatttatggtcgagaacatgggaaggtgcacgaatatcattatttattggtgtggttgctgctattttagatatatttattggagttttatttggtgctatatctggtttttatggtggcaaattagatactatcatgcaaagaattatagaaattatagcttcgattcctaatttaataatagtaattttattcgtattaatctttgagccatcaatatggacaattattttagctatgtcagtgactggatggatttcaatgagtagagtagtaagaggagaatttcttaaaattaaaaatttagaatttgtgcaagcgtcaaagacattagaggcttcaaatttgaggttaatattcaaacacatattacctaatacactaggtgcaataatagttacttcgatgttcacagttccaagcgcaattttttttgaagcctttttaagttttattggaattggtgtacctgcacctcaaacatcattaggttcattagtgaatgatggtaaatcaatgctattaatttatccgcatgagttattcatacctgcaacaattttaagtcttttaattttatttttctatttatttagtgatgggctgcgcgatgcgtttgatcctaaaatgcgtaaataa

SEQ ID NO: 408660 - DNA, 903 bp, Staphylococcus aureus
atggcaatttcattagtaattattacaacaataactttttttctaatgaaattaatgcctggttcaccttttaatgatgctaaattaagtccggatcaaaaatatattttaaatgagaaatatggtttaaatgaccctataccaatacaatatttaaattacatgaaaaatgtatttacaggggattttggttattcttttcagtatcataatcaaccagtgtgggacattatcaaaccaaggttaatcccttctctggaaatgggcattacagcaatgataataggagtgttgattggattaattttaggagttgcttctgctgcaaaacaaaatacttggatagattattgtgcaacacttatatcagtattagcagtgtctgttccttctttcgtacttgcagttttattacaatttgtatttgcagttaaattgagatggtttcctgtagctggttgggaaggcatttcaacagttatactgccttcatttgcgctatctgctattgttattgcgacagtcactagatatattcgtgccgaacttttagaggtgttaaaaagtgattatatactgttggctagggcaaaaggtgttcctaataaaagggttttatatacacacgctttaagaaatgctcttatcccacttgtaacagtgctagtaccaatgatggctagtatattaactggtacattaactattgaaaatacttttggagtaccagggttaggagatcaatttgtacgttctattgccacaaatgatttcccagtaataatggctacaactattttatttagtagtttttttatagtgtcaatatttttagtagatatgttatacataattattgatccaagaatacgcatccaaggaggaagaaataatggtgattga

SEQ ID NO: 408661 - DNA, 1656 bp, Staphylococcus aureus
atgacaagaaagttaaaagcgctgattttaatattggttgctacaattgcattaagtggttgtgctaatgatgatggtatttattcagataaaggtcaagtattcagaaaaattttatcatcagacttaacatcccttgatacatcattaataacggatgaaatatcttctgaagtgactgcgcaaacattcgaaggtttatacacattaggaaaaggtgacaaaccggtgttaggtgttgcgaaagcttttcctgaaaagagtaaagatggtaaaactttaaaggttaaattaagaagcgatgctaaatggagcaatggtgacaaagtgactgcacaagactttgtttatgcttggagaaaaacagttgaccctaaaacaggttctgaatttgcatacattatgggggacattaaaaatgcgagtgatattagtactggtaagaaacctgtagagcaattaggtatcaaagcattagatgatgaaacattacaaattgatttagaaaagccggtaccatacattaatcaattattagcacttaatacatttgcacctcaaaatgaaaaagttgccaaaaaatatggtaaaaattatggtacggcagctgatagagcggtatacaatggtccatttaaagttgatgattggaaacaagaagataaaacgttactatctaaaaatcagtattattgggataaaaagaaagtaaaattagataaagtgaattataaagttattaaagacttacaagcaggtgcatcattgtatgatactgaatcagtagatgacgcagttattacagcagatcaagtaaataaatataaagataataaaggattaaactttgtgttaacgactgggacattttttgtaaaaatgaatgaaaaacaatatcctgattttaaaaacaaaaatttaagactggctatcgcacaagcaatagataaaaaaggatacgttgattcagtgaaaaacaatggttcaattccttccgatacactaacagccaaaggcattgcgaaagcacctaatggcaaagattatgcgagtaccatgaattcacctctaaaatataatcctaaagaagcaagagcgcactgggacaaagctaaaaaagagttaggtaaaaatgaattgtcattttcgatgaacacagaagatacaccagatgcaaaaatatctgctgaatacatcaaatcacaagttgagaaaaatttaccaggtgtcactttgaaaattaagcaattaccgtttaaacaaagagtatcactagaactgagtaacaattttgaagcatcacttagtggttggtctgcagattaccctgatcctatggcttacttagaaacaatgaccacaggtagcgcacaaaataatacagactggggtaataaagaatacgatcaattacttaaagtagcgagaaccaaattggcacttcaaccgaacgaacgatatgaaaacttgaaaaaagcagaagaaatgttcctaggagatgcaccggtagcaccaatttatcaaaaaggtgttgcacatttaacaaatcctcaagtaaaaggattaatttaccataaatttggtccaaataactcacttaaacatgtatatattgataaatcgatagataaagaaacaggtaagaagaaaaaataa

SEQ ID NO: 408662 - DNA, 516 bp, Staphylococcus aureus
atgaaaattaacactgaatttaaagggaacaatataccatatgaatacgcagcaggtgcagatgtgagtgattctattaacgggaatccaattaaatcatttccatttgaagtaactgaattaccggaagggactaaatatcttgcttggtctttaattgactatgatgcaatcccagtatgtggctttgcttggattcattggagtgtagctaatgtaagtgttagtggcaattcaatttctattaaagcagatttatcaagaacaaagggcgactatgtacaaggtaaaaatagcttcactagtggtttgttagctgatgatttttcagaaatagaaaatcactatgtaggaccaacaccacctgataaagatcatcaatatgaattaactgtttatgcgttagatcattctttaaatttgaagaatgggttctacttgaatgaatttttaaaagaagtaaatcaacataaaatagatcaaacaagtattaaccttataggaagaaaaatttaa

SEQ ID NO: 408663 - DNA, 870 bp, Staphylococcus aureus
atgaatttggattggtactatacatttgtcattttagcgaagacgttaaactatcgattagctagtgaagaaattaatctcactataccttctatacataagcaaattaaaaatttagaacaacatctcaatgtgaaactatttgaaacttataaaaatcaaattatcttgactgaagatggtcatacatttcttccaattgcgcaaagttttattgaacaatatgaaagtggcatcaaacatatccaacttaaaaaaacgatgtttcaatcgaaattaaatgttgtcgtgtcttcatatatcgcgacattcattatgcccaaatttttaaaatcattctttaacgagcatccttttatcgatgtttctcttcatgtcaaaaatgaaaatattgaaaaagatattaataatcatacgtatgacatcgggattagcagaaatcaacctaaactaagagaagttcattctgaaaaagtatgcgaaggtaaaattgtattgattgctcccaataaagagaataatcatcttctaactgaggcatctttatttgaaaaatacaaaataataagtgataaccatccagaatattggtcatcacttaaaaataatattttaaatatttatgaaaaagcacaatttctatctatcaatgatgtgcatacttcaattaaattaatcgaaatgaatcaaggtatatcattcctgcctatttatataacaaaaaatagtaattacaatatttcggttattaacacgaaaattttacaagcacctatttcatttacatatatatacagcaaaaaagaaaatccagaaatattggcgtttattaaatcatttaaaaagtatattgccaatgaacaattataa

SEQ ID NO: 408664 - DNA, 462 bp, Staphylococcus aureus
atggatataaataaaatgacatatgctgttcaaagtgctttacaacaagcagttgaactgagtcagcaacataaattacaaaatatagaaattgaggcaattttaagcgctgccttaaatgaaagtgaaagcttatataaaagtattttagaacgagcaaatattgaggtagatcaattaaacaaagcttatgaagacaaactaaacacgtatgcatctgtagaaggtgacaatatacaatatggtcaatatattagccaacaagcaaaccaattgataactaaggctgaatcatacatgaaagaatatgaagatgaatatatttcaatggagcatattttacgttcggcaatggacattgatcaaacaacaaaacattatataaataataaagtagaagttatcaaagaaattattaaaaaagtaagaggggggaaatcacgtgacatcacaaaatcctga

SEQ ID NO: 408665 - DNA, 1815 bp, Staphylococcus aureus
atgaacaaaacaaagggttttacaaaatataagaaaatgagatatatgccagggctcgatggtttgagggcaatcgctgttctaggaattattatttaccacttaaataagcaatggttgacaggtggctttttaggtgtggatacattttttgtgatctctggttatttaattacaagcttattactcaaagagtatgatgacacaggtatcattaaattgaaaagcttttggatacgtcgtttaaaacgtttattaccagcagtcatagttttattaatggttgtaggaacagcaaccttattattaaaatcagataatatcattagggttaaacatgatattattgctgcgatattttatgtatcaaactggtggtatatagcaaaagatgttaattattttgagcaattttcatttatgccattaaagcatttatggtctctagcaattgaagaacagttttacatatttttcccagttattttggttacattattgttaacaattaaaaagcgatacaaaataggatttattttttggggagtatcaatgatttctttagggttaatgatgtttatctacagtattaatggggatcattcacgagtgtattttggtacagatactagattacagacattgttactgggtgttattttagcttttttatggccaccgtttaaattgaaaaatgatccacctaaagttgtaaaatatgttattgatagcataggtagtttatcatttatagtacttatattattatttttcattattaatgatgagacgaattggatatatgatggtggtttctatttaatatccatattaacattatttattattgccagtgtcgttcatccatctacatggatagcgaagatattttcaaatccagtgttagtatttatcgggaaaaggtcttatagtctatatttatggcattttgcagtaattagtttcgtacatagttactatgtagacggacagatacctgtatatgtgtactttatagatataagtttaacaattatatttgcagagctatcatatcgctttatagaaactccatttagaaaagaaggtattaaagctttaaattggcgaccttcttatataccacaatttataagaatggcaattgtagtaaccttgttaattccatttatgttgattttagtaggtgcattcaataaatatggtaaagacattataggagaaaaagcgaatagctttgataccactattgaagataattatttaatgcggatagcaccaattgataacattcacattgatggcttagtaagtgagaagaaaaaggaatcttccgacgtatataataatattaaacctcttttaatcggtgattcagtaatggttgatatcggtgagtcatttaagtcatcagttcctaagtctagaattgatggaaaagtagggcgtcaattgtatcaaaccttacctttagttaaagcgaattattcacaatataaaaaatcatctgatcaagtcgtattagaattaggtacaaatggcgactttactgtcaaacagctcgacgatttacttaatcaatttggaaaagccaagatttatttagttaatacacgtgttccaagaatttatgaggcaaatgtaaatcgattattagctgacgcggcgaaacgaaagtccaatgtcacattaattgattggtataaacgatcacaaggacatagtgaatattttgcaccagacggtgtacatttagagtacaaaggagtcctagctttaaaagatgaaatattaaaagcacttaaaaagaaataa

SEQ ID NO: 408666 - DNA, 135 bp, Staphylococcus aureus
atgtataaaaatcataatatgacccaacttacactaccaatagaaacttctgttagaattcctcaaaatgatatttcgcgatatgttaatgaaattgttgaaacgatacctgatagcgaattagatgaattctga

SEQ ID NO: 408667 - DNA, 1059 bp, Staphylococcus aureus
gtgaaaggtccatctatggatgccataaaatcaactgtaaaagatattgaacagaaaatgaaacaggttaaaggtctagccaatgtcaaatctgatttatcgcaaacatatgatcagtatgaaattaaagttgatcaaaataaagcggcagaaaatggtatttctgcaagtcaacttgcaatgcacttgaatgaaaacttaccagaaaaaacagttacgactgttaaagaaaatggtaaaactgttgatgttaaagtcaaacaaaataagcaaacagactggtcagaagataagttgaataatataactttgaaaaagccgactggtggtacgattaaattgggagatatcgctacgttagttaaaacaacgacaccaagtaaattgacgcaagaacaaggtgattatgcaacgacggtatctgctaaagtaacaaataaagatgtgggtggcacaacacgacaagtgatgtctaaaataaataatttggacaaaccgaataatgtaaaggttaatatcggtggtgcatcagatgatattaacaatgcaatgacacaattagcctttgcaatgttagctgcaatcattatcgtatatttaatcctagttattacatttaaaggtggcttagcaccatttacaattttattctctttaccatttacagttatcggtgtgattattgcactattaatcacaggagaaacaatatcagtaccaagtttaattggtatgctaatgttaattggaattgtagtaacaaatgccattgtgttaatagaccgtgtcattaataatgagcagcagggcatggagatgaaagaagcattaatcgaagcaggcggtactagaattagaccgatattaatgacggcgattgcaacaatcggtgcattagttcctttgttatttggtcaagatagctcgattcttatttcgaaaggattagctgctacagttattggtggtttaatttcatcaactttattaacacttgtagttgtaccagtaatatatgaaattctctttactttaaaaaaacgattcactaaacgatag

SEQ ID NO: 408668 - DNA, 411 bp, Staphylococcus aureus
atgattccaaatccaaacgctcctgatagatataaatatgaaacagattacagaaaaataccaagagaatatttaaaccctagaattcctcaaggacgtggaaaaatcaaatggcaggcttttgctacactccctgaacagtttgaaattttaaacaaaataattcaaaatcaagataaaattgagaaacctatattaacagaagatactttggatagcatcaactatatttttcaggtaaaagtaaaaaatgatgaactatgttccatagtatattgggaaaatggtcatctttctacttatacaggaaaaattttaaaaattcatgaaattaacaatacattttcattttgcgactctaacaataatatatataaactaaataatgctaatgtttgtagtattacttaa

SEQ ID NO: 408669 - DNA, 1374 bp, Staphylococcus aureus
atgatgaacaatagaaatgaaaagattcttgaagatattaataatttaaaaggctataaagtgacatatatatatgctactgctataaatataaaagataataatatgaacccttggtttgagaaaattgagtcaattctatttaatttaaaaggagttatacgtattttatctcctgacaaaaagccgttaaattatgattattgggctttacctggaaaatataagaggtacacaaaagaatatcacaaaaaactagaaaaatttttagaaaaatttgctactaatgtaaatattaataaaggattgtttgatcaaaataatatacatggatacaaatataaaaaatatatattcactccatatattgaaattactcatgaaaacactttgaatttattttttttgaccttaactatatttaacaatggtacttttgttatagaaatagttgaagatttagagagtataaattttggagatgacttgtatagtactttctcaattgttgaagataagatatatcctctaattaatcaagaaaataataatagacaaagacagtatcaattgtatgggcatagacaatataaaaatattagagatgtttctaggcaaattaatagaattattaaaaataatagtaatgatatctttgaatataaagtatctagaaatatggggtttgaagtttattatttagctaatgaaaatgaatttgcagacgatcctttttatgaagatgtgaaaattcaagagtggttagtaaatgcgcctattatttcatttgaaggaaaaagtaagcattttaggcaagatggttatagcgataattatataaatttcttaaataaagcatcagtttttgtagtttggatggatgagcaagaaggagatattttagaacaatgttctaaaatggcgctttattttcatagttccgctaatttctttttcttagaaactatgttaaatgaattacaattgtatgggtatcagcaatataatttaaatgggaaaaaagaagccctatattttagacaatggatactaaatttcaagagatctattgcaattatttatagaacagagcttctacctagtttatatttatatttgtatctaaagaataataatgattttaaatctcctcaagatattgaagaattaaataaagaagaattatcactaattgaattggagcagtcttacaaggaagaagaaagaagcgaaaatttaaataaacttttgttaataataactcttttatcaatcttccaggtagtagatatatttttcaatgataaaaataatatattttatatcagtctgatacttataatgattttgctagtagtatttcgaaaaaaataa

SEQ ID NO: 408670 - DNA, 366 bp, Staphylococcus aureus
atgggaaaatttaatagacaagagcaattaaaacagttacatgcagaacgaaaagttaaaaccgagcaaaaagtttctaaagcaataaatgaattggttcaaaaaaatgaagaaattaactttaatattgtagctaagcattcaaatgtatctaaagctactttatacaataataataaaattcgaaatagaattgaaaaattacgtgaacaaagcaaagaaatatttgttcataaaaataaaagtgacggtaaagatgcgttaatttcttctttaaaaagaaaagtaagttctttagaaaaagagaaagaaatgttgaaagaagaaattagcgttttatattctaggatatatgaggatatctaa

SEQ ID NO: 408671 - DNA, 2064 bp, Staphylococcus aureus
atgtcaataccaattaatttacctacaaacagtactctgattaatgaattatgtacattacaaagtagaactataaacataaaaggagaagtgttaataactgaaatatatgatgattactttttaaaaaatgatgaatggcacatttcagcttttaacaagttcaagcaatttcaagatagtatcaagaactataaagacaaaagaaaaaatattttctttagaattaaaagcaaaaatttgaatttagaatttaaatacctttttttgaaacttatagttaaagaggattggtctttatctaatgtatttaatactggagcagtgaaacttaacaagattgctgagttctttaatgaagtttatccaaatttaaattctttactagattgtgatattaatatgctagaaaagtactggtttagttggttgactaaaaataatatacctataaaaagaaaatcatcaacaatagtttttggtgattatgaatacaaaagtgcactagcttcttttttaaagaatatgtatattaatctaaataaatttattgataagcgagaagaatgggaaaaagataaatgggatattagaaatttagaaaaatatggattgagttataataaaacactaactggtaattatttgaactttgaaaaaattgagtcaattaaaatgcgagaagcagcaaaaatatatttaaaaaatcgtttgataactggtgatatagcatttgctacagcaaggttttatataagagttttaactaggttttttcaaaatatatctaaaaataaagaaacaaggaatagtttaaatgaactagatagatgtcatatcgaagcatatatagaatttttatttgaatatgcaactaataaaaatttgcaaagtactaagaactttgtgagggaagaattaaaaacaattagaagattcttaaacgatattataactcaaaactatgctatagcaccgtaccaagatatacgatttttaatttatccacaagacttacctaaacacgaaaagaaaaatagtagccaaatcgattatatcccagattttgtattggaacagctttttgagcatataaatgatttgcacaaagatttaatacctgtagtttggatagcttttaaaacaggactaagaatttctgatgtattaacattaaaaaataattgccttgcaaaagttaatggaaagttttcaataatcactgatattgctaaaacctttgttaaaggacataggataccaatcgataatgaattagctgatatagtagcagttttaatagccaattctaaaattaaaagtacaaaagataacaaccctaataattatatttttgctatttataaaggaaaaagaaaaggaatgccttttacacaacatatggtcagagcacacttaaatcatttagcaaaaacaaaaaatattgttgatgaacaaggagaaattttccatttcaaaactcatcaatttagacatacttatgcagtaaaattactaaatggtggagcagatatattaacgatacaagaattattagcacatgcctcaccagaaatgactctcagatatgctaagttacttgatgatacaaaaagaaaggcttttgaatcagttattgatcaaggggcttttagtttcgatgttgacggtaagattaaaaatattcagcatagtagtgaactatcagaaaaagcattgaattctttatggcaagagcataaattaaacgcaatggataatccttacggtacttgtcatgctagattgagtggtgattgtccatacatggaagctccgccatgcttaacttgtaattctgggaaaccatgtaaggatttagctattggtttttctgatttagatgtggaaaaatatgaattacatatcaaatcaacggtcaaatctatagaattggctaagaataataataggcaagatatggttgaaaagcatactaatatattgaataaatacgaagaaatattaggtaatataaaggatggaaacattatattcgggagaagtaatagaataaaagtatag

SEQ ID NO: 408672 - DNA, 1113 bp, Staphylococcus aureus
atgaaaatagtagaagtaaaatctaagaatggcattaattttatgattttagataataataatgaacctatagtagatgcagtacgctatttgaagtatctggatagtgttaagaagagtttaaatactaaaaaaacctatgcctatgcacttaaaaagttttttatatacttagaaattaaagagatacgctataaagaagtcaattttgataactttgttgattttataagatggatgaaaacaccttttgaatatgagaatgtactatcttataaccaaaaacaaacaagcattagtcctaagacaattaatctgactattacagtagtatctaatttttatgactatctctataggagcaaaaaattagatgttaatttctatgattttttacatacggaaagtaaatattctaaaaaatataaaagtttcatgcatcacgtaaataaggactatggaatgttaaaaaatattttgaaagtaaaagaaccaaagaaaaaactagaagtgttaactagtgttgaggttaaggaattattaggagcagctaataatattagagataaattcctaatacaattattatatgaaacaggattacgtataggtgaggtgttgtcattacgtatcggtgatatcaaatttgattttagaaaaggccatcaaatagttttgaaaaatagatttaatgataatggtacttatttgaaaactggggaaagaaaaatatttatttcccaatcgttaattgatttatacgatgattatgtctacgaaataattgacgaactttcaatatgttctgattatctttttgtaaaaataaaggggagaaatgtaggagaagctatgaattatagtgatatttattcattatttaaaaggctaaaacataaaacatctataaatgttcatcctcatttatttcgccatacacatgcaactgttttttataatgaaactaaggatattaaacaagttcaagaaagactcggtcatagtaatatacaaacgactattaatttatatgttcatcccactgaagaagatatacgtgaagattggaataaagttaagcatcaatttcaagtttttaataaaggggaataa

SEQ ID NO: 408673 - DNA, 558 bp, Staphylococcus aureus
atgaacaagattacttatttaaatgaattagaaacagcacttgatgcgctacctaggcatttaagagatcaaaaaatgtatgaatatgaacgttatttttatgagcaagaacttaatggcgttgatgaagaggaaattttaaagaagttaaaagacccacaagatgttgcagctgaaacaaaagctagaagtgttattgattatgctgaatctaaaccaacatttgaaaatatttcaagagctgttgctgcttcattaagtttaggcattctatctatttttgtcatccttataccagtatctatagttggattatttgtattagcattatttttaatatcacttttgctgctgttttgtccaattattttattagcatcagcaatatccagaggaattgtagactcaattagtaatgtattttttgccatatcatattcaggattaggattagtatttatcattgtcatatttaagattttagaatacatttatcgtttaatcttaaaatatttactttggtatattaaaactgtcaaaggaagcgttagaaaatga

SEQ ID NO: 408674 - DNA, 303 bp, Staphylococcus aureus
atggaagcaaaagtaatggcaagatacgttgtattgattttagcgttagtcaatcagtttttagcgaataaaggtataagcccgataccagtagatgaagaaagtatttcatcgatcatcttaacagttattgctttatacactacgtataaagacaatccaacatcacaagaaggacgttgggcgaatcaaaaattaaagaaatataaagcagaaagtaaatatagaaaagcaacaggacaagcacctatcaaagaagtgatgacacctacaaatatgaacgacacaaatgatttagggtag

SEQ ID NO: 408675 - DNA, 417 bp, Staphylococcus aureus
atgataaagattgagaaacacgatatcaaaaagcttgaagaatacattcagcacatcgataactatcgaagagagttgaagatgcgagaatatgaattacttgaaagtcatgaaccagataatgcgggagctggcaaaagtaatttgccgggtaacccgattgaacgatgtgcaataaagaagtttagtgataacaggtacaatacattaagaaatatagttaacggtgtagatagattgatagatgaaagtgatgaggatacgcttgagttattaaggtttagatattgggattgtcctattggttgttatgaatgggaagatatagcacattactttggtacaagtaagacaagtatattacgtagaaggaatgcactgatcgataagttagcaaagtatattggttatgtgtag

SEQ ID NO: 408676 - DNA, 387 bp, Staphylococcus aureus; identical to SEQ ID NO: 407773

SEQ ID NO: 408677 - DNA, 543 bp, Staphylococcus aureus
atgactaacacattacaagtaaggctattatcagaaaatgctagaatgcccgaacgaaatcataagacggatgcaggttatgacatattctcagctgaaactgtcgtacttgagccacaagaaaaggcagtgattaaaacagatgtagctgtaagcataccagagggctatgtcgggctattaactagccgtagtggtgtaagtagtaaaacacatttagtgattgaaacaggcaagatagacgccggatatcacggcaatttagggattaatattaagaatgatgaagaacgtgatggaataccctttttatatgatgatatagacgctgaattagaagatggattaataagcattttagatataaaaggtaactatgtacaagatggaagaggcataagaagagtttaccaaatcaacaaaggcgacaaactagcacaactggttatcgtgcctatatggacacctgaactaaagcaagtggaggaattcgagagtgtttcagaacgtggagcaaaaggcttcggaagtagcggagtgtaa

SEQ ID NO: 408678 - DNA, 183 bp, Staphylococcus aureus
atgagcattagtgtaggagacaaggtttttaatccagaaacaaattcaactttagaaattgtacaacttgttggcgatattagagacacgcattacaagttatctgacggatctattattagtcttatagactttgttgttaaaccaattcatttaatcaaggaggagcaggaaaatgactaa

SEQ ID NO: 408679 - DNA, 165 bp, Staphylococcus aureus
atgaatgctgaaaagcatatgcaaatgatgcaaatgttacaaaattgtgtgattgataagtatgtatcacacgacgaatacgaagagttaattgccatagataagcatggtaataaaatgtttattaaattttatccgaatacggaggatgacactaatgaataa

SEQ ID NO: 408680 - DNA, 327 bp, Staphylococcus aureus
atgactaaaaattataaagacatgacgcaggaagaattaagagatttattggctgaaaagaatggagaattgtttgaagtagtgaatgaaatcaataaagaaactgaatttgccgttttacttttttcaactgtaggggttagcaatggagatactacatcatcgtcacattgtgcgcttggggatattgtaggtcttgctaatttattgaataacgaaaatgattaccacgatatcgctaatgttatcgaaatgtataaattaaaaaaacttttaggtctagctgacaacaaggaggacgagaatgatgtattacaaaacgggtga

SEQ ID NO: 408681 - DNA, 321 bp, Staphylococcus aureus; identical to SEQ ID NO: 407385

SEQ ID NO: 408682 - DNA, 633 bp, Staphylococcus aureus
gtgtatattgatcctttaaaaaatgttcgtttttctattaataacgtaattagtaatgttgaaatttctaaaagtatggcaattaaacaatctttaaaacctaagtaccaattagatataattaatagaaacaacataaatttattttctgacttcaaagtagactttcatctaaacaacttaattgaaatgaattttaatttgcgtaattctttttcatctctaacatttcaaagaaatttattttctgaagaaacgataaaatcttttaaggaactctataggtttgatgatgagattgtacttcaagcacaacagaccattagagatttttatatcaatccaactgctatctctactttggctgaagccatcaattcgacctatccaataaatgagcaaagtacctacaagagacacgatgaatttgtcaaacgtatcgaaaatgattttccacatcctttcaaaaagttaataagatggtctaatggcattgcagcaggtgctgacattcaaatctttgtaacaaactatataaacgagaacgatttacatattcaaaattcattgatagttgctatagtttgtttattaagttttttatcgacctattgttcacattctaaaaagtaa

SEQ ID NO: 408683 - DNA, 141 bp, Staphylococcus aureus
atgttacaaaaatttagaatcgcgaaagaaaaaaataaattaaaactcaaattactaaagcatgctagttactgtttagaaagaagtaacaaccctgaattgttgcgagcagttgcagagttgttaaagaaggttaactaa

SEQ ID NO: 408684 - DNA, 825 bp, Staphylococcus aureus
atgtatccaaactggggtcaatataagcgtgctgatttaattggacaatcttcttacatcaaaaataatgatgtcgtcatatttaatgaagcatttgataatggtgcatcagacaaattattaagtaatgttaaaaaagaatatccgtaccaaacacctgtccttggtcgttctcaatcaggttgggataaaacagaaggtagctactcatcaactgttgctgaagatggcggcgtagcgattgtaagtaaatatcctattaaagaaaaaatccaacatgttttcaaaagcggttgtggatttgacaatgacagtaataaaggctttgtttatacaaagatagagaaaaatggtaagaacgttcacgttattggtacacatacacaatctgaagattcacgttgtggtgctggacatgatcgaaaaattagagctgaacaaatgaaagaaatcagtgactttgttaaaaagaaaaatatcccaaaagatgaaacggtatatatcggtggcgacttgaatgttaataaaggtactccagagttcaaagatatgcttaaaaacttgaatgtaaatgatgttctatatgcaggacataatagcacatgggaccctcaatcaaattcaattgcgaaatataattatcctaatggtaaaccagaacatttagactatatatttacagataaagatcataaacaaccaaaacaattagtcaatgaagttgtgactgaaaaacctaagccatgggatgtatatgcgttcccatattactacgtttacaatgatttttcagatcattacccaatcaaagcctatagtaaatag

SEQ ID NO: 408685 - DNA, 1224 bp, Staphylococcus aureus
atgacaacttttagtgaaaaagaaaaaattcaattactagcagatattgttgaactacaaactgaaaataataatgaaatagacgtttgtaattatttaaaagatttattcgacaagtacgatattaaatctgaaattttgaaagttaatgaacaccgcgccaatttcgttgcagaaatcggtagtggctctcccatacttgcattgagcggtcatatggatgttgttgatgcaggaaatcaagataattggacttatcccccttttcaactcacagaaaaagatgacaaattatatggtcgaggcacaacagatatgaaaggcggtctgatggctttggtcatcgcactcattgaattaaaagaacaaaaccaattacctcaaggaaccattagattactcgctactgctggtgaagagaaagaacaagaaggcgccaaattattagcagataaaggctatttagatgatgttgatggtctaatgattgctgaaccaactggatctggaatttattatgcacataaagggtctatgtcatgtaaagtaactgcaactggtaaagctgtccatagctcagttccatttattggtgacaatgcaattgatacactgcttgaattttataatcaatttaaagaaaaatatgcagagcttaaaaaaaatgatactaaacatgagttagatgttgctcccatgttcaaatcattgataggaaaagatatttctgaagaggatgcaaattatgcatctggtcttacagctgtatgttcgattataaatggcggtaaacaatttaactctgtcccagatgaagcttcacttgaatttaacgtaagaccagttcctgagtatgataacgactttatagaatcgtttttccaaaatatcattaataatgtggatagcaataagctttcactcgatattccaagtaaccatcgacctgtaacaagcgataaaaatagcaaattaattactacgattaaagatgtagcttctagttatgtagacaaagacgatatatttgtttcggcgcttgtaggtgcaacggatgcttccagcttcttaggagataataaggacaatgttgatttagccatttttggaccaggtaatccattaatggcacatcaaatcgatgaatatattgaaaaagatatgtatctgaaatatattgatattttcaaagaggcttccattcaatatttaaaggagaaataa

SEQ ID NO: 408686 - DNA, 627 bp, Staphylococcus aureus
ttgactgtaaaagtaatatcactttcagaattgttaacaggtgataagcaagaggttaagcgaaagataccttcagttttaaatatagtaaattcatttgagataatatcaatttcaggaagtgaatcagcgcacgatgttgatttatttttgaaaaataagtctatagcatttgatagacaaaacctgtctagaactcatttagttttttcacaattcaaaagcaaacaaatactagttggctattttacaattagcaataaacccttagtttttacaaaacgtatgttagataaaatatcaaacacgttaaagaagaagttatatcaaaagggtgaaactcacagtggaaatgacaatttaatcatacaaggatacttaattgctcaaataggaaaaaattattctgaagaagcattggctacaaaatccataaatggaaacgatttgttaactttagcatatgagaaagttttagaaggtgcgagcatatttggcggttcatatatttggatagagtatgaagatgttgatagattaagagaattttatagaaaatttggatttacagaaatcaaagatcatacaagtgaaaataatttgaagatggctattcttaaaatataa

SEQ ID NO: 408687 - DNA, 1758 bp, Staphylococcus aureus
atggctaagttattaataatgagcatagtaagcttttgttttatatttctattgttattattttttaggtacatattaaaacgctattttaattatatgttaaattataaagtttggtatctaactcttcttgcaggattaattcctttcatccctattaaattctctttttttaaatttaataatttgaataatcaagcgcccacagttgaaagtaattcacacaatttgaatcctaacataaataccactaaacctgttcatgagtttacaacagacatccataagtttgattgggattcaattgataatatctgcacagttatttggatagttttagttattattttaagttttaaatttttaaattctttattatatcttaagtatttaaagaaacagtcactttatctaaataaaaaagaaaaaaataaaataaataagatacttttcaatcatcaatataaaagaaatattgtgattcgaaaagcagaatctattcattctccaacaactttttggtatggaaaatatattattttgattcccagtttatattttaaaagtataaatgacaaaaaactaaaatatataatattgcacgagtatgctcatgctaaaaacagagatactttgcatttaattatctttaatattttttctattgctatgagttataatccactaatacaaattgtaaaaagaaagatgattcatgacaatgaagtagaagccgatagatttgtccttaataatattaacaaaaatgaatttaagtcttatgcggaagctattatggattccgtattaaaaaccccatttttcaacaaaaatatattaagccattcatttaatggtaaaaaatcattactcaaaagaagattaattaatataaaagaagccaatctgaaaaagcagtcaaaattaattctaatttttatttgtatttttactttttttatcatgataattcaaagccagtttttaatagggcaatccttaactgattataattataaaaagcccttacaaagcgattaccaaattttagatgaaagtaaaaattttggttcaaatagtggatctttcgttatgtacagcatgaagaaagacaaatactatatttataatgaaaaagaaagtagaaaaagatattctcctgattcaacttacaaaatttatttagcactgtttggacttgaccgtcatattataagtgataaaaattcacgtatgtcatggaatcataatcagtatcctttcgattcttggaataaggatcaagatttaaatacagcaatgcaaaattcagttaattggtacttcgaacgtattagcaatcaaataccaaagaactatactgcgactcaactcaagctattaaattatggtaataaaaacttgggaagttataaaagttattggatggaagatagtttgaaaatatctaatcttgaacaagtaatagttttaaaaaatatgatggaacaaaatagctattttagtaaaaatgaaaagaaacaattatcttcttcattattgattagaaaaaatgaaaattatgaattgtatgggaaaacaggtacaggtatagtaaatgggaagtataataatgggtggtttgtaggttacgtaattacaaatcatgataagtattatttttctacacatttatcagacgaaaaagcttctggtaaaaatgctgaattaataaacgaaaaaatattaaaagaaatgggtgttttaaatggccaataa

SEQ ID NO: 408688 - DNA, 1683 bp, Staphylococcus aureus
atgtataaaaattataacatgactcaacttactctaccaatggaaacttcagttcttatccccacaaatgatatttcacgacatgtaaatgatattgttgaaacaattcatgacaatgaattcgacgaattcagacatcaccgtggtgcaacttcgtaccatcctaaaatgatgttaaaagtgattctatatgcctacacacaatctgtattctcaggtcgtaaaatagaaaaaatgcttaatgatagcatccgaatgatgtggctatcacaaaatcaaaaaccttcttataaaacaattaatcgatttagagtaaatccaaaagtagatgctttattagaatctttatttattcaattttacagtcagtgtgtaaaacaaaatcttatagatgataaagctatttttattgatggtacaaaaattgaagcaaatgccaatcgatatacatttgtatggaaaaagagtattcaaaaccatgaatcaaagatgaatgaggattctaaagccctctaccatgaattggtaaccaataaaatcataccggaaattaaaaaagatcatgataatgaattaacaaaagaagaaatagatttgattggtagtcacttagataaagaaatcgaagatttaaaccaacatatcaacaatgaaaaatgtactaaaacaagaaaacaaatacgtctcaaaagaactaaaatcaaaaaatacaaaaagcaaatcaatgattattttgagcgaaagtatcgatacgaatttcaaaaatctattttaaaggatagaaatagttattctaagacagatcatgatgcgacatttatgagaatgaaagaagatcacatgaaaaatggacaacttaagccagggtataatttacaaatagcgacaaattcccaatttgttttatcttataatgtgtatcaaaatccaacggatactagaacgatgattccatttttaaattcaattcaagagacctacggtcatttacctgaatatattgtagctgatgcaggttatggtagtgaatcaaattataaggcaattatagatgactttaatcgaacgccactcataacatatggaatgtttataaaagataaaactaaaaaatataaaagtgacatctttaatactcaaaattggaactatgacgaaattaatgacgaattcatttgtccgaataataaacggctaggttttaaaagatatgcctatcgtcatgataagtatggttataagcgagacttcaaattatatgaatgtgatgattgttcagaatgtcctctgaaaaatcaatgtatgaacttcaattcaaaaacaaacaaaaaaataatgaagaattataactgggaatattttaaatcccaaattaacaaaaagctttcagaaccagaaacaaaaaatatctacagtcaaagaaaaattgatgtggaacctgtttttggatttatgaaggctattttgggtttcactcggatgtctgtccgaggactcaataaagtcaaaagagaacttggttttgtattaatggcacttaatataagaaaagtagtagctcaacgagctgaaaataatcaaaaaatttataaaaaagacaatttctatattatttcaatagaaattgtctttttttcacttatccaagaactttatgtcccggactcttcttcgatattatga

SEQ ID NO: 408689 - DNA, 771 bp, Staphylococcus aureus
atgattaatcttgaaaataaaaccttcgtaattatgggtattgctaataaacgtagtatcggatttggcgttgcaaaggtattagatcaattaggggctaaacttgttttcacttatcgtaaagaccgtagccgcaaagaattagaaaaattattagaacaattaaaccaagaagagccaaaattatatcaaatcgatgttcaaaaagatgaagatgtagtaaatggttttgctaaaattggcgaagaagtaggcaatattgatggcgtatatcactctatcgcatttgcaaatattgaagacttacgtggacgtttctctgaaacatcacgtgaaggtttcttacttgcgcaagatatcagttcatattcattaacaattgttgcgcacgaagcgaagaaaataatgccaaacggtggtagtattgttgcaacaacataccttggtggtgaatttgccgttcaaaactataatgtgatgggtgtagctaaagcaagtttagaagctaatgttaaatatttagcttatgatttaggcccggacaacattcgagtaaatgctatttctgctggtccaattcgtacgttaagtgctaaaggtgttggtggttgcaacacaatccttaaagaaattgaagaacgtgcaccattaagacgaaatgtggatcaagaagaagtaggtaaaacagctgcttacttattgagtgatttctcaagtggcgtaactggtgagaatatccatgtagatagtggtttccacgcaataaaataa

SEQ ID NO: 408690 - DNA, 1815 bp, Staphylococcus aureus
atgtctcaaggtttacctttaagagaagatgttcctgtttcagaaacatgggatttaacagacttatttaaagatgatcaacaatattatgaaagcatcgatgcactagtacaacaagcaaatcaatttcatcatacatatgcaacaacattaaattcaatcgaacaaattaatactgctttagctgaattagaaaatattttaattgccttagatcgcttaagtaattatgcagaactacgtttaagtgtagatactagtaatattgaggcacaagtattgagcgctaaattatctactacatacggaaaaattgttagccgattatcatttgtagagtcagaaatacttgaattaccagaagaaatacttcaacaattagaagaatcatgtccatatcaacactatattaaacagttaattaaacaaaagccattccaattatctgcgtcggtagaacaagtattagcaactttatcacctacgctaaatagtccttacgatttatacggcacgacaaaaatgctagatattacattcgattcatttgaacatgatggtacaacgtaccctgtcgactatgctacgtttgaaaatgattatgaagataataaagatcctgagtttagacgtaaaagtttcaaatcgtttagcgatgggattcgaaaatatcagcatactaccgcggctacatataatatgcaagtacaacaagaaaaaattgaagctgatttacgtggatttgaatcagttatcgattatttattacatagtcaagaagtaacgcgtgatatgtttgaccgtcaaatcgatatgattatgcgtgacttggcaccagttatgcagaaatatgctaaacttttacaacgtattcacggattagataacatgcgttttgaagacttgaagatttctgtagaccctgattatgaaccagagatttcaattgaagactcaaaaaattatattttcggtgcgttaagtgttttaggtgatgactatacaaacatgttacgtgaagcatacgatcagcgatggattgattttgcacaaaataaaggtaaagatacaggcgcattttgtgcaagtccatactttacacattcatatgtgtttatttcttggactggtaaaatggctgaagcatttgtcttagcacatgaattaggtcatgcaggtcattttacattagctcaaaaacatcaaccatatcttgaatcagaagcatcaatgtactttgttgaagccccttctacaatgaatgaaatgttgatggccaattatttatttaacacaagtgataatccaagatttaagcgttgggttattggctcaattttatctagaacatattatcataatatggttacccatttattagaagctgcttatcaacgtgaagtgtatcacaaagtagatcaaggtgaatctttaaatgcgccgacattaaatgaaataatgctaaatgtttataaacaatttttcggagatgcagtagacatgactgagggtgctgaattaacatggatgcgtcaacctcattactatatgggattatattcgtatacgtattctgctggtttaacaatcggaactgtcgtttctcaaaagattaaaaatgaaggccaaccagctgttgatgcttggttagaaacattgaaaaaaggtggcagtgtatcacctgtcgaacttgcaaacattgcgggtgtagacattactacagaacagccacttaaatctacaattcagtatatttctgatttagtggatgaagttgaaaaattaacagatgaaattgagcaagcaaataactaa

SEQ ID NO: 408691 - DNA, 1776 bp, Staphylococcus aureus
atgtattacagttatggaaattatgaagcatttgcgcgccctaaaaaacctgaaaatgtagaaaacaaatccgcttacttaatcggatctggtctagcttcacttgctgcagcttgttttttaataagggatggtcaaatggaaggttctaagattcatattttagaagagttacccaaagcgggcggtagtcttgatggtgaaaatatgcctttaaaaggctatgttgtccgaggtggtcgtgaaatggagaaccactttgaatgtttgtgggatttattcagatctatcccttcacttgaaattgatcatgcgtcagtattagatgaattctattggttaaacaaagaagaccctaactattctcgttgtcgtgttattgagaaacagggtcaacgtttagtcacagatggagacttcactttgactaaaacggcgattaaagaaattttagatttatgcttaacgaatgaagaagatttagatgatgtcaaaataacagatgtattttccgacgatttctttaattcaaacttttggatttactggaaaacgatgtttgcatttgaaccgtggcattctgcaatggaaatgcgtcgctatctaatgcgattcgttcatcatattggtggtctcgcagacttttcagctttaaaattcactaaatataatcaatatgaatctttagtattacctatggttgaatatttaaaatcgcatggggttcaatttgaatacgatgtaaaagtagaagatattaaagtagatgttacgacaagtcaaaaaattgcccgagaaatattaattgaccgtaatggtaatgcagaatctattaaactgactataaacgatcttgtctttgttacaaacggtagtattacagaaagctctacttatggtgataatgatacaccagcgccaccaactgacgaattaggtggtagttggacactatggaaaaatttagcgcgacaaagtcctgaatttggtaatcctgataagttttgccaaaatattcctaaaaaaagttggtttgtttcagcaacatcgacaacaaacaataaagatattatcgatacaatagaaagcatttgtaaacgtgatccacttgcaggtaaaacggttactggcggtattattacaatcaatgattctgcatggcaaatcagttttacaatcaatcgtcagcaacagtttaaagaccaacctaaaaatgaaatatctacgtggatttatgccttatattcagatgtaaatggcaattatattaaaaagccaatcacagaatgtagtggtaatgaaatatgtcaagaatggctatatcacttaggtgtaccaactgacaaaattgaagacttagcaaaacatgcatctaatacgattcctgtttatatgccatatattacctcttatttcatgacgcgtgctatcggcgacagacctttagtcgtcccgcatcaatcacaaaatttagcatttattggtaactttgcagaaacagagcgagatactgtatttacaacagaatattcggttcgtactgccatggaagctgtttatcaattactaaatatagatcgtggtattccagaggtcatcaatagtacatttgatcttcgcgtcttaatggatgccgtatacgaactgaatgaccatcaagatttgcgcgagattactaaagattcgaaaatgcaaaaacttgcattagcaggattccttaaaaagataaaaggtacgtacattgagtcattattaaaagaacacaaattgttataa

SEQ ID NO: 408692 - DNA, 243 bp, Staphylococcus aureus
ttggctaaagctaaaacggatagtaacaaagacaatgtatatgtgaatttcttgagtgtagcgtctggaggtagcgcatttaatagtacttataactatgcatcaaatataaatcctgaaattgcaaaaacgattaaagcaaacgggaaagctagaactggttggctgattgttgactatgcaggatatccgtggcctggatatgatgatatcgtaagcgaaattatagatagtaataaataa

SEQ ID NO: 408693 - DNA, 186 bp, Staphylococcus aureus
atgaatttagttttatttgttctcatgttaaagtttctttatatcaacttttattttagtaaacctaaaagagtagcaacttcaaaattcgcatttatagctaaaaataattttgaaatgcacatgtttaaagaatcaaaagtgtgcattgttaaatcatcattttcaattaataaggattattaa

SEQ ID NO: 408694 - DNA, 1392 bp, Staphylococcus aureus
ttgaggaatatatatgcctttaatatagatttgaaacaacggaaccgtgttatagctgtcgtaatgattggtgcttttgttggtgtgctgaatcaaactttgatgactacgatacttccagaaattatgaaagattttacggtatcaagtagtacagcacaatggctcacgacaatttttatgctagtcaatgggattatgattcctatcacagcttttttaattgaacgttttacattacgttctttattttttaatgcaacatgctttttaatgattggttcatttatttgtatgctaggaatcaattttccaatgttattagtagggcgtagtattcaagccttaggtgctggtatactgatgccacttacacagacactccttttcattatgtttccacctgaaaaacgtggaatggcaatgggaatgttcggtcttgtaataggttttgcacccgcgattggaccaactgcagctggttggttcgtcaatattttcgattggcgctatctgttcctaatcgtattactaataggtatgattgattttgtattcgggtatctatcattgccaaatataacagaactaagtaaaccaaacttagacaaactatccattattttatcgacggttagctttggcggcttactatttggttttagtacagcaggaaacttaggttggtcacatccaatggtttatataactattattgctgccatagttatattaacggtatttattttccgacaattaaaactggaatcgccattgttagagtttagagtatttaaatataacgacttttcagtggcaatgattttaattgtactaatgttcatgttatttatagggaatttaacaatcttaccaatttatatgcaaacgatgatgaaatggtctccgttagagtcaggacttattttattacctggtgggttaattatgggactgttatcgcctgtcactggtaaattattcgataaaattggtggacgtatcttgagtattatggggatgctaacgattatgattggcgcattattaatggctcaatttagtcaaaatacaacacaactatatgtgattatttcattttcagttaccatgttaggtaatgctatgatcatgacgcccatgacaactcaagctttaaatgctttgccacgtcaatacattgcacatggtacagccatgaataatacgattagacaagtatcagctgcaataggtactggtatcttggtcacattgatgacaggattaggtaaaacctcttcattaagtggtagtcaaggacttattcatggtctagatattacattctatgtcgtcgcattgattgcctttataggtactatcattgcattctttattcgcaaacagtaa

SEQ ID NO: 408695 - DNA, 660 bp, Staphylococcus aureus
atgaacagaaatcttttaaccattttattattgatagggtatacgtatttaatatttaactttctaacaactgaatactccttggcgccaagaatattctatacattgaactttattagtttgtccttaatattattagcaaaggctaaaagtaagaaattaaataaacacacacacttccttgacgaagtacaactagttttagaaaaaagatattccactataatgtatatattgaatatcgcgttagtagtttcctttatttcattcttaactggttttatatatttaagagaagaatacccacaatttatcctttattcaagtgtattgctagtaatgtctttctattatattaaactattctatgaagataaaaataatattatttatatgaatagaaaaattgtggattttaataactcagaagtagaatgtcagttacagttagatgatggagaaaaaaatatattattgaaacaacttgataatttttataaatcgaccattattttattgtttattaccgaaataatgttgatgttttactccataatatcatctaactatcaaacagtgagtatggttttaattgctatagttattttcatttcatcttcactactaattacaaagaatgtatatacaaatcgcaactaa

SEQ ID NO: 408696 - DNA, 132 bp, Staphylococcus aureus
atggagacattagtaagtgatttaacatatgtaaaagtcgtaggaacatggcaatacatatgtttatttatagatctatttaatagagaaattgttggttacagtgcaggaaaagtaaggatgcaaatatag

SEQ ID NO: 408697 - DNA, 624 bp, Staphylococcus aureus
atgagcaatttacatttgtccaatatacaattaatatttgacgatatgcgtgataaggattatattattgattcatttaaatttaaatataaaaatgaaaattatttagtctttatccgcagattcaaaggaaaatttattaaaagaataaataaattcgcgaaagttcaattaacattttataaagagtcaactatgaaaaattccttggtagttgaagcaaataataatggattaatagtaaatgattacaatatgctatataatttttttggcatcgaatcatctagttttggtaaaggtctatttcctttttatgagagtcttaatgaagcaattcctaacgaagtaaatcttaattcaagtaaagaaaaaaatatttctttatcaaaagaactatataaagatgatatcaaagaaatggataaaatttattgtacaggtgttacacgattatcagaaggtcgaaaaagatcagaaagaagaaatgaaaaagcaaaaaggttaagacctgccctttatgagttttttgatgaccatagtattacatttaacttttcacctcatgaatggaaagaaaaatctgatgaacaaatcaaaaaggatgctgtaaacagactctaa

SEQ ID NO: 408698 - DNA, 2430 bp, Staphylococcus aureus
atgacatatagaatgaagaaatggcaaaaattatctaccattacgttattaatggctggtgtgattactttgaatggtggtgaattcagaagtgttgataaacatcaaatcgctgtggctgatacgaatgttcaaacgccagattatgaaaagttgaggaacacatggctagatgttaactacggttataataagtatgatgagaataatgacgcaatgaagaagaagtttgaggctacggagaaagaggcagagaaattactcagtagcatgaaaactgaaagtggaaggacttacttgtgggcaggagcggaaaaccttgaaactaattcttctcatatgactcgtacctatcgtaatattgagaaaatcgcagaagcgatgaagcataaaaatactaaattaaaaacagatgaaaacaagacaaaagtaaaagatgcacttgagtggttgcatgaaaatgcctatggaaaagagccagataaaaaagttgctgatctaaaaactaatttctcaaaatcagcacctcaaaagaataccaatttaaattggtgggattatgaaattggaacacctagagcattaacaaataccctaatattactgaatggtgatatttcaagtgatgaaaagaaaaaatacactgcccctattaaaactttcgccccaaaaagtgatgaaatattatcttctgtaggaaaagctgaacctgctaaaggcggaaatttagtagacatttctaaagtaaaacttttagaaagtattatcgaagaagatacaactatgatgaaagaatcaatagttgcatttaataaagtcttcacttacgttcaaagtaatgcaactgataaagaacgtaatggattttataaagatggttcatatatcgaccataaagatgtcccgtacactggtgcttatggcgttgtactcttagaggggatttctcaaatgatgccgatgataaaagaaacaccttttaatgataaaacccaaaataatacaaccttaaaatcatggattgacgacggatttttgccactcatttacaaaggtgaaatgatggatttatcacgtggtagagctatcagtcgcgaaaatgaaacgagtcatacagcatctgcaacagtaatgaaatcattgttgagattgagtgataccatggatgattcaacaaaaacaaagtataagcaaatcatcaaaacttctgttaaatctgattcaagttacaaccaaaatgattatttaaattcatattcagacatagataaaatgaaaaagttaattgatgataaatctattactactaacgatttaacacaacaacttaaaatatataatgacatggatcgtgtcacctatcacaataaagacttagactttgcatttggtttaagtatgacgtcgaaaaacgtcgcacgttacgaaagtatcaacggagagaacttaaaaggttggcacactggtgctggaatgtcttatttatacaatagcgatgtgaaacactaccgtgataacttctgggcgacagctgatatgaaacgtttagcaggtactacaactttagataatgaagaacctaaaagtacggatgttaaaaagtctagtaaaacttttgtaggaggaacaaaattcgatgaccaacatgctagtatcggaatggattttgaaaatcaggacaaaactttaactgccaaaaaatcatatttcatattaaacgataaaattgtcttcttaggaactggcattaaaagtactgattcatcaaagaatccagttacaacgattgaaaatcgcaaagcgaatgggtatacgttatatacagacgataaacaaacaaccgcttccgataatcagggaaccaattcagtctttttagagtcaaccaataaacctaaaaacaacataggctatcattttttaaacaaaccgaaaataactgtaacaaaagaaactcatactggaaattggaaagaaataaataaaagccaaaaggatacacaaaaaactgatgagtattatgaagtaactcaaaagcattctaattctgacaataaatatggatatgtgttgtatccaggcttatctaaagatgtctttaaatccaaagcaagccaagtaactgtcgttaaacaagatgatgacttccacgttgtgaaagataatgaatcggtttgggctggtgttaattacagcgatagcactcaaaattttgaaattaatggtactaaagtcgaagttaaagccaaaggaatgtttattcttaaaaagaaagatgataacacttatgaatgtagcttctataatcccgaatctacaaattccgcttcagatattgaatctaaaatttcaatgactggatactctattacaaacaaaaatacatcgactacaaatgaatccggcgtgcgctttgaactaactaaataa

SEQ ID NO: 408699 - DNA, 390 bp, Staphylococcus aureus
atgaataatgttatactaaaaacctttgattttaaagataaaaatattatttttgacggtaaacttgagaaaattgagtataaagggagaaagtgtttcttttattacgcaaaactaatctatacacctgaggtgtgcccaaactgcaattgtaaaaacattaatggtaatttaatcaaaaatgggtctaagacttctagaatcactatgcctaaaatctccgaatatccaacttatatcatgttgcgtaagcaacgttttaaatgtaaaacgtgcgaacgatactttacagctgaaacacctgaagttgataaatactgttttatatcaaaaaaacacgatcagctgtacttaataaagcagcagaaattcgttctgaaaaatctatag

SEQ ID NO: 408700 - DNA, 831 bp, Staphylococcus aureus
atgattaaacctaaaatagcattaaccattgcaggtactgatccaacaggtggtgccggcgtaatggctgatttaaaatcatttcattcatgtggtgtatatggtatgggcgtcgttacaagtattgttgctcaaaatacattgggcgtacaaaatattcataatttaaatcatcaatgggtagatgaacaacttgatagtgtcttcaacgataccttaccgcatgctattaaaacggggatgattgctacagcagatactatggaaacgattcgtcattatttaatgcaacatgaatctattccatatgtaattgatcctgttatgttggcgaaaagcggtgattcattaatggataatgacacaaagcaaaacttgcagcatacgttattgccattagctgatgtagtaacaccgaatttaccagaagctgaagaaataacgggactaaccattgatagtgaagaaaaaattatgcaggctggccgcatctttattaatgaaattggtagtaaaggtgtcatcgttaaaggcggtcattcaaatgatactgatatagcaaaagattatttatttactaaagaaggtgttcaaacatttgaaaatgaacgatttaaaacaaaacatacgcatggaacagggtgtacattttcagcagttataacggcagaacttgcaaaaggtagaccattatttgatgctgtacagaaggctaaaaagtttatttcaatgagtatacaatatacgcctgaaatcggtcgtggtagaggtccagtgaatcattttgcatatttaaagaaagagggattagacgatgaattatctaaataa

SEQ ID NO: 408701 - DNA, 648 bp, Staphylococcus aureus
atgcaacaatcagacatcattagtgcagccaaaaaatatatggaatctattcatcaaaatgattatacaggccatgatattgctcatgtatatcgtgtcactgctttagctaaatcaatcgctgaaaatgaaggtgttaatgatactttagtcattgaactcgcatgtttgcttcatgataccgttgacgaaaaagttgtagatgctaacaaacaatatgctgaattgaagtcctttttatcttctttatcactatcaaccgaagatcaagagcacattttatttattattaataatatgagctatcgcaatggtaaaaacgatcatgtcactttaactttagaaggtcaaattgtcagggatgcagatcgtcttgatgctataggcgctataggtgttgcacgaacatttcaatttgcaggacactttggtgaacctatgtggacagaacaaatgtcactagataagattaatgatgatttagttgaacagttgccaccatctgcaattaaacatttctttgaaaaattacttaagttagaatctttaatgcatacagatacggcgaagatgattgctaaagaacgtcacgactttatgatgatctacttgaaacagttttttacggaatggaattatcacgactag

SEQ ID NO: 408702 - DNA, 783 bp, Staphylococcus aureus
atgttaattcaattagatcaagttgggcgaatgaagcaaggaaaaacaattttaaaaaatatttcttggcaaattaatggaggtgacaaatggattctatatggtttaaatggtgctggtaagacaacgctattaaatatattaaatgcatatgagcctgcgacaactggcagtgttaatctatttggtaaaatgccaggcaaggtagggtattctgcagaaactgtacgacaacatataggttttgtatctcatagtttactggaaaagtttcaagagggtgagagagtaatcgatgtggtgattagcggtgcttttaaatcaattggtgtttatcaagatattgatgatgaggtacgtaatgaagcacatcaattacttaaattagttggaatgtctgctaaagcgcaacaatatattggttatttatctaccggtgaaaaacaacgagtgatgattgcgcgagctttaatgggacaaccccaggttttaattttagatgagccagcagctggtttagactttattgcacgcgaatcgttgttaagtatacttgactcattgtcagattcatatccaacgcttgcgatgatttatgtgacgcactttattgaagaaattactgggaactttactaaaattttgctattaaaagatggggaaagtgtacaacaagggttaatagatgatattttgacatctgaaaacatgtcacgatttttccagaaaaatgtagcagttcaaagatggaataatcgattttctatggcgatgttagagtaa

SEQ ID NO: 408703 - DNA, 609 bp, Staphylococcus aureus
ttggcgcgtaaaacatttatttcatataaatactctgaagcaaaagatttaagagataaaatagtggaatctctaggagaagatgctaaatattatcaaggagagacaagtgattctcctgatatgtccgatagaataacagagtatattaaaaaagaattaaaaaataagatatattcaacttcagtaacaattgtagttatttcacctaatatgaaagaaagtaattggattgattgggaaatagaatactcagttaaacaaatgaaaagaggagatagaacatctagtactaatggtgttgtaggggttgttatgaagcataatggtgattattcatggttaagaaattctgttattaattcagagggtcataccgcaattcatactgacaatagttatttatatgacataatagtgaagaatagatttaatcaggaacctatagaatatacgtgtgatgaatgtaaaaatatagatgcattaacaggatcttttatttctttagtagaagaagatgaatttttgggtaatccaactaaatatatagaaaatgcatatgaaaaaagtaaaaaagcaacgaattataatatctgtagaagaaaataa

SEQ ID NO: 408704 - DNA, 927 bp, Staphylococcus aureus
gtggaaagacaacaaacttacaaagaaaaagcgcaacacctatataaagttaaaaaaatcaaaaatagatataatacgaaaagtgcagaagaatattttttctcgattcctcaagtaaaatacattctttcagcaggaagaatgaaaaaacataaagagaattataatgcttcagagataaaaataaaaaaagcagctttagaaaagagtaggaagaataagaattggaaaattgaagaacgtttaataaaagctaagagatatactcaaaaagttgatccagaatacttaaatatttatatgaaagcttatcataagaaagatataactacagaagaaaaactagaaattctaacggaattaaaaaaatttgatacagaaaatatagtgcgtttttttagaaaattaaatgatgctgaacaaaataaaatgattagaaatttagcctttaaatatttacaagattacggtcactatgtgaaactaaggaaaaattttaaaggaaagaagaaagtatatcaaactgagagagcttctttagacactaaaaaacctgaagatttatataatgatttaacaaataagaatattcaatctcaaaaagtctatgatatttttatttctcatagtacaaaagataagaagacagttgaagatattataagagtttttaatgaacaaaataaaacgtgttattgtgattggactatggatcaagattatttaaaaaggaagtatgttggtgaatatacaaagcaagtattgaaggctcgtatggagcaaagtaaaatgctggttttgttgagaacggagaattcagttcaatctgattgggttagttttgaaatagaatactttgaaaatctaaaaaaacctatatatatagtagagtctcttgaagaattattagaggctttttcagattag

SEQ ID NO: 408705 - DNA, 327 bp, Staphylococcus aureus
atgatttctgagtgtggaatggcattatttttatttggaaataaagaaaaggatggaaaaattgttttagctgatggattagaagaagaatataaaatagcagaaagacaagaattggttagactccctataaatgtgacaggttataaaacaaagaatctttcagaacaatataacgaagagataaatatacaatttaaagagaaaatattaaaaatgtataacgaaataaatgaatacaaatgtgatttttcaaataaacaaagtattgatgaattagttcaaaaaatagtaaatttagtaattgaaataaaaaaaacaaaataa

SEQ ID NO: 408706 - DNA, 1128 bp, Staphylococcus aureus
atgactatagataagaaaaaattcattgaaaaatatgtaaaagctttagaaagtaatacagcggctatttttgctggagcaggattatcttgtggagcaggttatgttaattggaagacattgcttaatgaagcagcagaagaattagaattaaatatagataaagaagaacatgatcttgtaggattagcacaacattatattaataagaaaagaagtcgtggaaatctaaatacagtaataatggagcaattttcaacaagagcagaattaacagaaaatcataagcttttagcaaaacttcccattgatacatattggacaactaattatgattgtatgattgaaaaagctcttgattctgagggcagaattgtagatgtgaaaagaaatcaaaatcaattaactgtttcagtagccgataaggatgctacagtttataaaatgcatggggatatagacagtatagacaagattattttaactagagatgattatgaaaaatataatctaactcatccaaagtttcgtgaaatattggaaggagatttactttcaaaaacttttctattcataggttttagctttacagatccaaatattagttatatcttatcgagaataagattagtgttagaagacaatactagaccacattattgtattttaaaagaagtagaagaaaaggaatatgataatacagaagaatttatgtatgcaaagataaaacaacaacttcatatagaagatttaagccgattttcaatagaaactttattagttaaagattatattgaaatcacagaaatattagaaagtatttataaaagatatagaagaaaaacaatttttatatcaggaagtgctacagaatatttaccttttaattcagaaacagggaaatattttttacatcaactaagtaaaaaattagttgaaaatgattttaaattagttacaggttttggattaggagtaggatcatatgttattaatggagtagctgattatattaatagtaataagaagtctaaactacagaatcatttaaatatattgccattttctcaagattcaagtggcgatttagacttaaaagaagtatggaaaaaaatcgcttggaaatga

SEQ ID NO: 408707 - DNA, 291 bp, Staphylococcus aureus
atggtcatggaagaaaacgccttctacgatgccttagcttcacatgatacagctgagcatgttctaggtgatgatacattaaaaatcattgctcatgaactaactcagtctattaaagaaaatatgagtattgattggaacttatgcgaatcagcacgtgcaaaaatgcgagttatcgtaagacgcctattgaaaaagtacggatatccaccagaaatcagtaaacaagcagtagaaaccgtcattgaacaagcagagctgatgtcagagcagctggcgatggaattataa

SEQ ID NO: 408708 - DNA, 405 bp, Staphylococcus aureus
ttgcaagaactagaggattataaagaagtacaattaattattatacagatgagttcattgccaataggagatgggaaaagagtatttagctatttagaagatggtgtaacacctcgtcaatatgcactagcgacagttagtctatttaacggcaatgagtttaaaattttagaagtagaaagagaaaattgtgcactttccatgttgattttatcttcgacgggattggttaattggaatccattgattgatagcttgctgttgaatttagttaatagtagtgggacatgggtgaaagaatcgcttgaaattttagagagaagtaatgtaatcatacaaaaagcaaagcatagtaaaaaggaatatgcacatagggcgaaattattgattcataaaatgttataa

SEQ ID NO: 408709 - DNA, 321 bp, Staphylococcus aureus
ttgaagtttgagtggttatttaaacaacctatttcaattaaagcagttgtaaaaaccggagggataattttaagagtaaatgaagtgaagaagaaggaaataccatttgacgttatatcattttcacatcccgaattatcaaaatatgaaaaatctaacgaacctaagaaatatacgatgcatgaattaaaattatctactgaagaaaaggaaaagataatagatgaaacggtagaaggtgcaacagaggattttgaattagctgaaatgaataaacaagttcatgagtatgccgaatctccaagcatagtgaaaatttaa

SEQ ID NO: 408710 - DNA, 222 bp, Staphylococcus aureus
atgcatattttagagcgaaagggagaactggaaaaaatcttaatagattggggcatgttacctatattagctattcaacatatgtatatagatggtgatttacgtcatagtttgccacctgacaatttagaagaagttgatttgacgattttcccgcaattagtacgttatacagagagaatggactgtacaaggaacgaacgatcaggatatgtcaagtag

SEQ ID NO: 408711 - DNA, 1839 bp, Staphylococcus aureus
atgctacctttcttcacgaatccatatccagatgaattattgtattcagcaattgcacgttatcatttttatagtgggaatcttgattgtaaagatacattagaagagttatttgatagtcgttctgtgattccgagtatggagattggtagtcatcttactaatttagtagagaaattaggacctcaatattcggtagagtatttattagctaaccatacgatttatccttactatgcttcatttttatctaaacaacgacagatggagattttagaagatgtcaaaaataatgggcaggctttatatacaaggcttggtattgtagctggaggcatttgtcgtaaagatgggctatattactgtgatatgtgtgctaaatctgattcagataagtatagagagccgtatattcacagagaacatcaattacaaggaataagttattgtgcacaccatgaaattccgttgagggagtatccggtaacaggcgatagtcgcatcgaatacattcgctttgaattacgctacatgaatctatcagatttatacgaagtggagccatatgaagaaatagtcattcaattagcaaagcaggcatataaactattaaaaataccgttacattcattaaccaaagtagaaatagattcgatgtataaggcattacttagaaagaaaaatttaattacagccgccaatcgggtgagacaacaagatttatatcaaatgataaaaatcgacttatcagaagagcatttaacgtactatgagagcaattttaatgaagaaaatgaatataattgggtaaaagtattaactcgtaattcaacgaggcatgtgaacccattacgccatttattaatattgttatatttgaagcaagatgtaggagatttgattgtagataacggtccatttagaaaaggtccttacccgtgtttgaatagagctgcgaaacattacaaaaagttagttataccatctgtaaaagttacgagggattttaaaacaaaagctccaatcggtacattttgttgttcttgtggctttgtgtatgcgcgtaaagggccagataataatgtggaagatcaatatagaattggtagaataaaagcttttggtcatgtatggcgtaaactactaaaaaaattgttgaatacaggaatgagtattcgagctattgctaaagagctaggggtagatcctaaaactgttaagaaatatgcagaagaaccaactctaaaagaggctaaggcaattaaaccagatagattagaaacctatcgtaatgatttgtccgaaataatgtgtactcaaccgcaattaactcgaactgaaataaggaatcaactatgtaaacagtatatgtatttgtatagatatgctaaagagtggctaatggctaacttaccaatccagcgaaagtatacagaaccgaatagacttgtggattggaatgcgcgagaccgagaatatgttcaacgtataaaggcgttacatcaggaattattaactgttgagaagcctgttcgaataacaaattctttaatttggaagcgattaggtattacagcaaatatagaaggttattcagctaagttgccaagtacgacaactttattgaacgaaataatagaaaccgttaaagcatttcaaattagacgttgttgtaaggtgattgaccagatgctagaagaaaatgaagtgataaagctttggaaagtacaacggatagcagcgataaagtcgcatcactttcatgaaataaaaaaggaattatctaaatacattcaaaaaagccagggtgtgaaaagagatgaaccacaaagtatataa

SEQ ID NO: 408712 - DNA, 456 bp, Staphylococcus aureus
atggatgccacgagtgaattggcgaagaatgataatgttttcgaagattataattttggttacaaattaacaaatgaatctaaatataactggttatgtattaatcctaatgttggtgaagtagtgaattttgaagaattgataattactacttcagagctttgtaaacaaacagcagaacatattaaacaagcacaggaacaactgaatagagtgaatgaacttagagctagaaaagatgctatacgtgattgtttatcggctatggaagctttaatgacttatttgacaggaacgacggatatttcagcagctgataaagctatgagagatgatgaagagacatggggacaaggttttattattaaagagggcattactatgtggaacatgtttcataataaatataaagatattaggcatgggaacaactttgatatcagtttaattagttag

SEQ ID NO: 408713 - DNA, 222 bp, Staphylococcus aureus
atggaatttaaaaaacaatttcctgattatttaaattataaaaatgaagagtatttaatgaatgttgtaacagaggaattacttagagaaattgctcaaagactaccaagggtatatattcagcaaaaacagcaaaacaggtatttaaatttagatgaaactattaaaaatgcttgcgatgtagtatcgatttacactaataataaaaaatcggggatatga

SEQ ID NO: 408714 - DNA, 978 bp, Staphylococcus aureus
atgtatggtgttggcgtacttgtaattgatgagattcaacatttattacatgcaaaaaatgacaaagaagatatgcttaatttctttgtaaccttgtctaatacggttggtgttccaacagttttgattggtacatctaaggctcaacaattatttaaaggaaacttccgtcaggctcgtcgtgcagccagtgaaggttcgattatttgggatcgcatgaatgaggatagtgaagaatgggagttctttttagaaacattatgggaattacaatgtcttaaaacttactcagagcttacacaggacgttaaaaaggctttctataatgactgtcaggggattacttcagtcgctgttaatctatttatattggctcaagaaagagcactatatgatgaatcgaacgaagatgaaaaattgacgataagagttttaaagaaaacggcaaaagaagatatgaaaatcattcagccaacgttaaatgctattcgaaaaaatgattttagagcaatgtataagtatgaagatattatgattaatttagatgaattaatgcaaagtcataagcaaaatactgagtatgaaggtcgaattaaagaggccatgaaagagcgaaaaaatactttaacatacaagcgccaagagttgattgaaggtttgagtgaagaagttgcagcaatcggcatttttgatgctttaactccaagtcacattaaagaaactacaaaaaaattagtagaaaattcatcgatagaaacggattataacctactgaaaacacaacttattcctaatttaattgagttgaataagaagcttaatgagaaaaaagtgaaggtagtaccttcgggtaaagtattaccactattagatgctagggagaaagcgttgaatcagaagaaacatgtgtatgaaggacttaaagaagaaaattatataaaaaatccaatggtagaatttttcgtaactttggaatga

SEQ ID NO: 408715 - DNA, 195 bp, Staphylococcus aureus
atggtggcatcacgaataacaaatcaagataagcagagtgcgacaaacattcgctatcatgtgcttaaacgtataaaaaaatttattcagccattacctattcatttcgaagtaaaacgtcgattatctacgttgattcgtagaggttacttagccagaaaccctttggataaaacatttttggaacgtatttga

SEQ ID NO: 408716 - DNA, 465 bp, Staphylococcus aureus
atgaagagattattaggtttattattagctagtacgttagtgctagtcgcatgcggaaatgatgagaataaggaagaatctaaaaaagaagttaaatcaaaagaaaagaaaattgagaaggaaaaggaaaataaatcgaaaaaagacaaggaaaaagaagttgcaacacaacaacaaccagataatcaaaccgttgaacaaccccaatcacaagagcaatcggttcaacaaccgcaacaacagttaccacaaaatagtgttcctcagcaaaatgcccaagttcaacaaaacaaaaagcaaaaagttgatttaaataatatgcctcccactgatttttctacagagggtatgtctgagcaggctcaaaaacaaattgaagagcttacaatgcaaaaagactatcatggtctgtcacaaagagaatacaatgatagagtttctgaaattataaataatgataattaa

SEQ ID NO: 408717 - DNA, 261 bp, Staphylococcus aureus
atgaaaggtattaaaccaaattatgctgagcttggtcgacaatataattgtgatccaagaacagttaaaaaatattatgaagcaggaaaagaaaatgaattagaacgattgaagaagagacaacaaaataagaaagcatcaaaactagatccatttaaagaaattattaataaaaaaattgaattaggatgtacagctatggccatttttaaatatatagagaaaaaggggttctgttgcaaagtaaaaaaatatagctaa

SEQ ID NO: 408718 - DNA, 675 bp, Staphylococcus aureus
atgaactatttcagatataaacaatttaacaaggatgttatcactgtagccgttggctactatctaagatatgcattgagttatcgtgatatatctgaaatattaagggaacgtggtgtaaacgttcatcattcaacggtctaccgttgggttcaagaatatgccccaattttatatcaaatttggaagaaaaagcataaaaaagcttattacaaatggcgtattgatgagacgtacatcaaaataaaaggaaaatggagctatttatatcgtgccattgatgcagagggacatacattagatatttggttgcgtaagcaacgagataatcattcagcatatgcgtttatcaaacgtctcattaaacaatttggtaaacctcaaaaggtaattacagatcaggcaccttcaacgaaggtagcaatggctaaagtaattaaagcttttaaacttaaacctgactgtcattgtacatcgaaatatctgaataacctcattgagcaagatcaccgtcatattaaagtaagaaagacaaggtatcaaagtatcaatacagcaaagaatactttaaaaggtattgaatgtatttacgctctatataaaaagaaccgcaggtctcttcagatctacggattttcgccatgccacgaaattagcatcatgctagcaagttaa

SEQ ID NO: 408719 - DNA, 735 bp, Staphylococcus aureus
atgaacaaaaaaaatataaaagatagtcaaaactttattacttcaaagtatcatataaatgaaattttgagaaatatacgtttaaatacaaatgataatattattgagattggttcagggaaaggtcatttcacgtttgaattagctaaaaggtgtaattatgtaaccgccattgaaatagaccctaaattatgtaggacaactaaaaacaaacttattgaatatgagaacttccaggttatcaataaagatattttacaatttaagtttcctaaaaataagtcatataagatatatggaaatataccctacaatataagtacagatataattcgaaaaattgtttttgaaagcacagctacagaaagttatttaatagtggaatatggatttgctaaaaggttgctaaatacaaatcgttcactagcactatttttaatgacagaagttgatatatccatattaagtaaaatccctagagaatactttcatccaaaacctagagttaatagctcgttaattgtattaaaaagacacccttcaaaaatatcactcaaagatagaaaacaatatgaaaattttgttatgaaatgggttaacaaagaatacatgaaactatttaccaaaaaccaattttatcaagccttaaaatatgcaagaattgacgatttaaacaatattagctttgaacaattcttgtctcttttcaatagctataaattattttatagataa

SEQ ID NO: 408720 - DNA, 753 bp, Staphylococcus aureus
atggatttagttgaagattgtaatacatttctgtcttttgtagctgataaaactttagaaaaacagaaattatataaagctaattcttgtaaaaatcgattttgtcctgtctgtgcttggagaaaagctagaaaagatgctttaggtttatctttgatgatgcaatatattaagcagcaagaaaataaggagtttatttttttaactttgactacacctaatgtaatgtgtgaggaattagaaaatgaaataaaacgttacaataattcttttagaaaacttataaaaagaaaaaaagtaggtagtgttataaagggatatgtccgtaagttagagattacatataataaaaaaagagatgactataatcctcattttcatgtgttaattgcagtaaataaatcgtatttcacagataaaagatattatattagccaacaagaatggttagatttatggcgtgacgtaacaggcatttcagaaatcacacaagttcaagttcaaaaaataagacaaaataacaataaagagttatatgaaatggctaagtattctggtaaagatagtgattatttaataaatcaaaaagtatttgatgcattctataaatcacttaaaggtaaacaggtattagtttattcaggattatttaaagaggctaaaaagaaattgaaaaatggggatttagattatttaaaagaaattgatccaaccgaatatatctatcaaatttttggttctgttgcaaagtaa

SEQ ID NO: 408721 - DNA, 675 bp, Staphylococcus aureus; identical to SEQ ID NO: 408718

SEQ ID NO: 408722 - DNA, 657 bp, Staphylococcus aureus
atgatgttaaaaattatcttatatgcatacactcaatctgtattttctggtcgtagaatagagaaattacttcatgacagtattcgaatgatgtggttagctcaaaatcaaacaccttcttataaaactattaatcgttttagagtaaatcctaatactgatgcattaattgaatctttatttatccagtttcatagtcaatgtttaaagcaaaatcttattgatgataattcaatttttatcgatggtacaaaagtagaagctagtgccaataggtatacatttgtgtggaagaaaagtattcaaaatcacgaattgaaattgaatgaaaattcaaaagcattatatcgtgacttagttgaagaaaaaataatactagagattaaagaagatggagatagcgatttaacaacagaagaaattgatttagttggtagtcatttagataaagaaatcgaagatttaaatcattctattgagaacgaaaactgtactcaaagaggaataaataaagttaaacgagagctaggttttgtattaatggcacttaatataaggaaaatagcagctcaacgagctgtacattataaaatacatatcaaaaaagctgatttctatcaaataattaatagaaatcggcttttttacattgcctaa

SEQ ID NO: 408723 - DNA, 174 bp, Staphylococcus aureus
ttgagacatgacatttatgaaggagtgctattttacattacgaaaggtattaaaccaaattatgctgagcttggtcgacaatataattgtgatccaataacagttaaaaaatattatgaagcaggaaaagaaaatgaattagaacgattgaagaaaagacaacaaaataagtaa

SEQ ID NO: 408724 - DNA, 705 bp, Staphylococcus aureus
atgataccaggtgtgaatgcgccacctatgcatccttggtgtagaagtaccacagtgccacatgtcggcagttggcgagacaagttctttaaagagcgtgaaggtaaatatcaagtagaagatgacacaaccaaagatgaattacaacaagctaaagtattaggaaagaaaatatatattactgatcaagcgattgataaagtaagatacgttgatattccaacacataccaaagaagaaaatcaatttatacaagaacaacataaagccttgcttaaagacgccaaagaaaacaatgatagcaatgaagtagcttatttattaaaagatggtaaagttacaaaagtatatggtgatcaagatagtgtatcttttgcaccaggggaaaaagaaacagaattgttatttaacagtaaaccgaattcaattgttatgttacataaccatcctgggcagtctagtttttctcttacagacttgtatttatttatatttaataattctattaaaacactgacaattgttacaaataaaggtcaaacaaagtacttaactaagacaaaagaatattgcaaatcaacttgtattgattgtattaaaaaatataataaaaataataatataaaaaaattcaatcataaggatattgatatgattctaaagagattatataatagtggtaacataatatataaagttaggtga

SEQ ID NO: 408725 - DNA, 138 bp, Staphylococcus aureus
ttgagtgatatcttaaaggaacgttacggagaagatgcaattcaaaattacagaccgagtgaatggtttaaaacatgtaatttagtagatgttgaaattagtgaagaaaaatttaaggagttgcttaataatgactaa

SEQ ID NO: 408726 - DNA, 237 bp, Staphylococcus aureus
atgaaaagtacatttgattacaacttactaatggacagaatgaatgaatatagatacagtcaaaattcattagctaatgctatacctatttcaagaacatcgataaatcacaagttgaaaggtaaaaatttatttacacaatgggaaataaaaaggatttgtgaactattagatattccgcccaacaaagtagggcaatatttttttaaagtaaaagttcggaaaactgtacaatag

SEQ ID NO: 408727 - DNA, 786 bp, Staphylococcus aureus; identical to SEQ ID NO: 407557

SEQ ID NO: 408728 - DNA, 192 bp, Staphylococcus aureus
atgagaaaagagattgaagcgcttattttctcagacgtaagtagctatgatatttacgtgaacactggtgtaaatcaaggattgattggtgacatcaaagatggttacctaactattgattctatgccttacattgatgctgagcgtttgtatcactttgctatggaacgtaaatcgttagtcactaactag

SEQ ID NO: 408729 - DNA, 282 bp, Staphylococcus aureus
gtgacatatcatgagcgtgttttagcattaagagcagaaagtaaaagaactgcatttgattttcgattcgaagatttatttagcaaagaagaatggctaagtatgtcgcttgcagaaagacaaaaagctgaaaaagcatttcgacacgaagttaaaaatatggacgatgtaagaatgcccttctcaagtgtccatgacgcccaagtaaaattatataatgttatatattcttataacggcattaaacgtaattttaaacaagttgaaaatgaaggattctaa

SEQ ID NO: 408730 - DNA, 696 bp, Staphylococcus aureus
atgacagtattaacagataaagtagcactagttacaggtgcaggtagtggtattggagaagcaatcgctacattattacatgaagaaggggcgaaagttgtcttagccggtagaaataaagataaactacaaaatgtggcgaatcaattagctcaagatagtgtgaaggtagtgccaacagatgtaacgaaaaaagaagaagtcgatgaattgataaaaattgcacaacaaacattcggtggtttggatattgttatcaatagtgcgggacaaatgttatcgtctaagattactgattatcaagtagatgagtgggatagtatgattgatgtgaatatcaaaggcactttatatacggcacaggctgcattaccaactatgttagaacaatcaagtggccatcttattaacattgcatctatttctggctttgaagtaacgaaaagtagtacgatttatagtgcgacgaaagtagcagttcacactattactcaaggattagaaaaagagttggcaaagacaggcgttaaagtaacaagcatttctccaggaatggtagatacagccataactgccgcatacaatccaacagatcgtaaaaaacttgaaccacaagatattgcagaagcagtattatatgcattaacacaaccaaagcacgttaacgtgaatgaaattacagtgcgtcctgtataa

SEQ ID NO: 408731 - DNA, 423 bp, Staphylococcus aureus; identical to SEQ ID NO: 407558

SEQ ID NO: 408732 - DNA, 420 bp, Staphylococcus aureus; identical to SEQ ID NO: 407561

SEQ ID NO: 408733 - DNA, 819 bp, Staphylococcus aureus
atgaaacgtttggaaaataaagttgcagttgtaacaggggcaagtacaggtatcggtcaagcttcagcaatcgctttagctcaagaaggtgcatatgtattggcggtagacatagctgaagcggtatcggagactgtagataagattaaaagtaatggtgacaatgcgaaggcgtataatgtggatatttcagatgaacaacaagtggtagactttgtatctgacataaaggaacagtttggaagaatcgatgtgttgtttaataatgcgggcgttgacaatgctgcaggtagaattcatgaatacccgttagatgtgtatgacaagattatgaatgtagatatgcgtggaacatttttgatgacgaaaatgatgttacctttaatgatgactcaaggtggctctattgttaacacgtcttcattttccggacaagcagcagacttgtatcgctctggatataatgctgcgaaaggtgcagtgataaattttacaaaatcaatcgcaattgagtatggccgtgatggcattcgagccaatgcaattgcaccaggtacaattgaaaccccgttagtagataaactgacaggtactagcgaagatgaggaaggcaaagcgtttagagaaaatcagaaatggatgacaccgctgggacgtttaggtaaaccagaagaagtaggcaagctcgttgtctttttagcatctgatgagagttcatttattactggtgaaacaattcgcattgatggcggtgttatggcttacacatggcctggcgagatgttgagtgatgattcgtggaagcggacattggaataa

SEQ ID NO: 408734 - DNA, 663 bp, Staphylococcus aureus
atgtcaatcatgcgtttatttactttcattttaagtattttcatagtaggaatggttgaaatgatggttgcaggaattatgaacttgatgagtcaggacttacatgtatcagaagctgtcgttggtcaattagtgacaatgtacgctttaacatttgcgatatgtggacctattctggttaaattaacgaaccgtttttcatcaagacctgtattattatggacattacttatatttatcattggtaatggcattattgctgtagcgccaaatttttcaatattagtagttggtagaattatctcatctgcagcagcagcagcactaattatcgtaaaagtattagctattacagcgatgttatcagcacctgaaaatcgtggcaaaatgattggacttgtctatacagggtttagtggtgccaatgtttttggtgtaccaattggaacggttatcggcgatttagtaggttggcgctatacatttctattcttaattattgtgagtgttattgttggcttcttgatgatgatctatttaccgaaggatcaggaaatacaacgaggccctgtgaatcatgaggcaccatctcatgaaaatcatgttacttcgaaaatattaagacctgctgaagtagcaaaatatttattattacgtttttag

SEQ ID NO: 408735 - DNA, 510 bp, Staphylococcus aureus
gtgacattcgtctttataaatccacttattttatctaatggtcatgatatgtcattcgtttcattagcacttctagtaaatggaatcgctggcgttattggaacatcattaggtggtatattctccgataaaattacaagtaagcgttggttaatgatttctgtttctatttttatcgtcatgatgttacttatgaatttaatcttacctggttcaggtctattgttagcaggactgtttatatggaatatcatgcaatggagtactaatccagcagtacaaagcggtgtgattcaacacgttgaaggcgacacaagccaagtaatgagttggaacatgtctagtttaaacgctggtattggtgttggaggcattattggaggcttggtcatgacacatgtttctgttcaagctatcacgtatacgagtgccatcattggcgcattaggattaatcgttgttttcacattgaaaaataatcattatgctaaaacattcaaatcatcataa

SEQ ID NO: 408736 - DNA, 1470 bp, Staphylococcus aureus
atgaataaagacaagcaattgcacaacgacaaaatcaatctatcccaattagtcttattagggttaggttctttaataggatctggttggctatttggtgcgtgggaagcatcatcaatagctggaccagcagcaatcatatcatgggttcttggattcctagtcattggaaccattgcctataactacattgaaatcggcacaatgtttcctcaatcaggtggcatgagtaactatgcccagtatacacatggctcattattaggctttattgctgcttgggcgaactgggtgtctttggtgacaataatacctatcgaagctgtgtcagctgttcaatatatgagttcttggccgtggcattgggcgaaaccaatgaaacatttaatggaaaatggctctattagcacatacggattgctagctgtatatctcatcattgttattttttcattattaaactattggtccgtaaaacttttaacatcatttacgagtttaatttctgtatttaaattaggcgtacccatgttaaccatcatcatgttgatgttatcaggattcgacacttcaaattacggccattcggcaagcacatttatgccttacggaagtgcaccaatttttgctgcaacaacagcatcagggattattttttcattcaattcattccagacaattattaatatgggttcagaaattaaaaatcctgaaaaaaatatcgcaagaggcatcgctatctcactgtcaatcagtgcagtgttgtacatcattttacaaagtacgtttatcacttctatgcctcaatcaatgttacaacatagtggatggaatggcatcaacttcaattcaccatttgctgatttagctatcttattaggaattaattggctcgcaattttactatatattgaagcttttgtatcaccattcggtactggcgtgtcatttgtcgccgttacaggtcgagttttacgagcaatggagaaaaatggacatatccctaaatttcttgggaagatgaatgaaaaatatcatattccacgtgtagcaattatctttaatgccatcattagtatgattatggttacgttatttagagattggggtacgctagcagcagttatttctactgcaactttagtagcctatttaactggcccaacgacagtgattgcattaagaaaaatgggaccaacaatgactcgtccatttagagcaaaaattttaaaagtaatggcaccattatcatttgtattagcttcattagctatatattgggcaatgtggccaacaacggctgaagttattttaatcattatacttggcttaccaatctacttcttctatgaatatcgtatgaattggcgtaatacaaagaaacaaattggtggtagcttatggattattgtatatttaatcgtgctatcaatactgtcatttataggaagcaaagaatttaaaggctga

SEQ ID NO: 408737 - DNA, 588 bp, Staphylococcus aureus
atgttaggtagtgaacaaatgattgaaagtaaatccatagatccaagaatcgttagaaccaaacaattgcttgtcgatgcttttcttaaaatttctagagaaaagaaattatctcaaattacagttaaagatatcactgatattgctacgctaaatcgtgcaacattttacgctcatttcactgataaagaagacctcctagactacacattgtctgtaaccattttaaaagacttgaatgataacttgagcatttctaatgtcattaatgaaaaggtactgcgtaatattttcatttcaattgcgagttatatcaaagatgctgcaaagtcttgcgaattaaatagtgaagcattttgcaacaaagcacatcaacgtattaataatgaattagaagatatttttgcgattatgttagaaaacagctatccggagcatcaacgagatatcattgtaaatagtgcgagttttttagcagctggtatctcaggcttagcattacattggtttaacacgagtcaagaaacagccgatgtgtttatcgatcgcaaccttccatttttaattcatcatatagcacatttttaa

SEQ ID NO: 408738 - DNA, 999 bp, Staphylococcus aureus
atgacaaaaattaaaatcatgagtgtacgtgatgaagatatgccttatatcaaggcgtgggcagagaaacatcatgttgaggtagatattactaaagaagcattaactgatgacaatgttgaaggtgtcgctggttatgatggcttatcgctatcacaacaaataccattatcagagcatgtttataaacgattaaatgaactaggtattaaacaaatcgcacaacgtagtgctggatttgatacatatgatttggagttagcaaacaagtataacttgattgtgtcaaatgtgccgtcatactctccgaattcaattgcggagtttgctgtgaatcaggctattaatgtggttcgtcattttaatcaaattcaaacgaaagtgcgagagcatgattttagatgggaacctactattttatcgaaatccattaaagatttaaaagtagctgttattggtacaggtcgaattggccgtgtagtagccgatatatttgccaatggttatcaaagtgatgtggtcgcatacgacccgtttcctaatgctaaaattgcaacgtatgtcgattacaaagatacgattgaggaagcggttgaaggtgctgatatcgtgacattacatgtacctgcaacgaaatataatcattatctatttaatgctgaattatttaaacactttaaaaagggcgcagtatttgtcaattgtgcaagaggttctttagtagatactaaggcgttattagacgcattagacaatggtgtgattaaaggtgcagcacttgatacgtatgaatttgaacgcaaacttttcccaagtgatcaaaggggcaaaacactgaacgatccattgttagaatcgttgattgacagggaagatgtcatattaacaccacatattgcgttttatactgaagctgcagttgaaaatctaattgtcgatgcattagatgcaacattagatgtattgcagactggagatactaggttacgagtaaattaa

SEQ ID NO: 408739 - DNA, 1848 bp, Staphylococcus aureus
atgaagcataaaagtgtgtatcttttatgctttttaattttgcctattctgcttttaacatctgtgagtgcttacgctgtttctaatccagttggagagccctcacatgcagttaagccaaaaattgaaaagtatgatttatcacattatcgttcaatatatagtgaaaaaggcgactggaatccgtttggtcaagaagaaatttcacgacaaattaataatgtgtcagattttttcttttctatgactaagattttagcaggtgttacagattatgcgattgaaaatttatttcaactagatgttattaatgattttgcggataaaatcggcgattttgttggcgatatatatcaaaagttattgagtaatttggcaataacattatttattattgtttgttttaacgcatttattatttttagtgtacaaggtaatgcaagagaagcattaaaacgagcgtttttaattatgtgtttaattggttttggtgttggtatacttgcgaatgcaggtaatattatacgtggtacaaacaatattggtaaggatttgaataatataattatgaatagtacatctactattgatgggaatattgattatattcatgagaattcaggtatgaatcatatacgtaatcaattatttgatatgacgatatatagaacatatttagtaatgaattatggaactgtagacgaaaaagagataaaagcaaaaggtaaagaccgtattgataacattttaaaacaagatttttcaaaaaaaggacaagatgagattgataaaattgtaaaaaatgaggttgagaaaaaagataataaatatatgacgcaaggttatgtatttcaaaagttggctatttcagtgattggctttattattactgtttttatgtcaattgtatttttatcaattagttttgcgaagttgattttttctacatttgctttatttttatttttatttttagtattcagttggatagtgagttttataccaggatttgaattatctgttttctctgcgtttgcaaaaacgttaggctatattattttaagtgcctgtatgacattcttatttgtgatagttggtttgtgtatcaagcttgcaaatagttttattgaaccggatagtcagaatgcttattttttaaattcaatatttataattgtaatattgtttgtaatgtataaaaaacgggctcaaattatcaattttgtaagtcgtggtaatattagtttttctcctagtgcaattggtgctggtgtgatgaatcgaacacaagaacgttttaataagattcgtcatgaacaagcgcaaaataagaaagctaagcgagaaaatcaaagagatgaacccgccccaccacttcaaaatgataatgatttaagaagaaggcagcaggataaaccaatgcctttatttataaataaagataatcaaaaaaatggtaataagcgaagagaacaacaagagtcaatgaatggtaacgatgtaaaatctgcttctgttgaatcaaatgcaaataattattctaaacaaccacaaaaagcatcacagcaagagcatcaagtacgagaaacaagacagcgaaaagatatacaaaggtcgccacaagtggttaatcagccattaaataatgagaatcattcaataaatcgtaaagaacagaagtcagttcaaactgcttatgatactgatgttcaaaaacgacaaatacaaaatgcaacacagaatcaacaaagtagacaatctggaaatcgtaatcaacctattacacgtaattctcagtcaaaagaccgtctaaaagagcaaaaggatatcaataagcatggtaaataa

SEQ ID NO: 408740 - DNA, 261 bp, Staphylococcus aureus
atgagtggtttatttagttttttggttttaggtgctgaccgtccatctattgatggacttggggattggataggtaatgaagttggtactggtattggtttgatagtattaattgttggtattgtacattgggctactggtaagtatgggcgaatgattgcattgtttattgttggtggtcttttattcttagtttctaaaggtcctgaacaagtgtttaatgcaatttctggtatttggaaaatgatttttggcggttga

SEQ ID NO: 408741 - DNA, 1056 bp, Staphylococcus aureus
atgaaaataataagcaagtacattttaacacgattttctaaaaacggaaagcattttgatattcctaaagaacaacgccgagtaattccaaaatttaaaaatcgtcgtaagatgattgtaatttgtttttactcattattagctattttgttaattcttttattagcttcttttattaaagctacaagagcaaataatgatagtaaagaagcagttaataaaacgaatatgattcaaaaaaagtatgaagataatgcgaatacagttcagtatagtcctaaattaaagttatatgctgataaatttattgatacgtatatgaatatttctaaagactcaaaagaattagaatctagagaaaaagagttattgaaatattttccatcagattataaaaagcctgaagaaaaaacatcagatactgaacgtaaattaaatagtaaggaattttataatattaaacgtaaagataaacaaacgattatacagtatattgttaattatgatgtgaatattactgaaaagaaagaagttaaagtaaagaagaaaaagaaaaatgataaagataaagatgagtatgaaacaaaaacagaagaaaagcaacgtaaagtaaatcaaaatattctaattaatatacctattaagagtgagaataataagtatgttgttgttgaatatccttattttactccaattcctgatagtcaattaaataaagctaagatggttgaggataacttgaaagataataaacgtgaagataatccgaaagcaaaagcatttattgaggatttctttaataaatatgcttctagtaagcctgatgatatggcttatttaatggataatcctgagggattagaaggaactagagaagtttctcaaataagagaaattaggttatatccaaaaggcgatgattatgttgctaaagttgaaattttgatgaaagataaagattctcctttggagaatttggaacattacacattagatataacgaaaaaagatggtaaatattacgttaaaaatatgactaattctattggaggttaa

SEQ ID NO: 408742 - DNA, 867 bp, Staphylococcus aureus; identical to SEQ ID NO: 407548

SEQ ID NO: 408743 - DNA, 762 bp, Staphylococcus aureus; identical to SEQ ID NO: 407553

SEQ ID NO: 408744 - DNA, 774 bp, Staphylococcus aureus; identical to SEQ ID NO: 407554

SEQ ID NO: 408745 - DNA, 447 bp, Staphylococcus aureus
atgattcattcaaagaaattaacgctcggtatatgtttggtattactcattatattgattggaggttgtgtcattatgacaaaaacaaatggtcgaaacgctcaaattaaagaaaatttcaacaaaacattaagtgtatatccaaccaagaatctcgatgatttttacgataaggaaggttttcgagatcaagaatttgataaaagagataaagggacttggattatttattctgaaatggttatcgaaccaaaagggaaaaatatggaatcgagaggaatggtgctctatatcaatcgcaatactagaacaacgaagggtaattttattgtcaccgaaataactgaagatagtaaaggatattcacgtagtaaagaaaaaaatatcctgtcaagatggaaaataatcgaattattccaacaaagcctataccggatgacaagttaa

SEQ ID NO: 408746 - DNA, 390 bp, Staphylococcus aureus
atggaaaataatcgaattattccaacaaagcctataccggatgacaagttaaaaaaagagattgaaaactttaagttctttgtacaatatggaaattttaaagattttaaagattataaaaatggtgatatttcatataatcctaatgtgccaagttattctgcaaagtatcaattgaataatgatgactataatgttcaacagttaagaaaacgatatcatattccaaccaaacaagcgcccgaattaaaattgaaaggatccggcaatttaaaaggctcatccgtaggatctaaggatctagaatttacgtttgtagaaaatcaagaagagaatatctatttttcagattcggtcgaatttacacctagcgaggatgataaatcatga

SEQ ID NO: 408747 - DNA, 327 bp, Staphylococcus aureus
atgtttactacgtataaaaatattaatgaacttgaaaatgcctatgatgaagaaagaaagcaattgaatgatgcattcaatcaacttgatgaattaagacatcaaacacgtaggaaatgtgaacaaatgtatgatcatttcttatatctcaaacataaaatgaattatagtgaagacgctatgatcaggatgacacgtattatagaatctttcgatagagaaacgaatcaacgtatccgacatcacgaaatgaaattagaagattataaagatgatttaagaagagaatatctaaaacaatctgacagaattgaaggagatgaataa

SEQ ID NO: 408748 - DNA, 1005 bp, Staphylococcus aureus
atgatgactaaaaatgatgatgataatccaacgactgagaaaccaccaaagcgaagtttatacgctttaattatgacgttatgtggtgtgcatggaacaatttctttagcaatcgcattaacgttaccgtattttttagcagggcatcatgcttttacgtatagaaacgacttattatttattgcatctggtatggttattattagtttggtagttgcgcaagtattattgccattattaacgaaacctgcacctaaaacagtaattggcaatatgtcgtttaaagttgctagaatttatatattagaacaagttattgattatctaaatcaaaaatctactttcgaaacaagttttaaatatggtaatgtgattaaagaatatcatgataaattagcatttttaaaaactgtagagaaagatgatgaaaactctaaagaattagaacgtctacaaaaaatagcttttaatgtagaaacaaaaacattagagtctttagtagatgaaggacaaataacgaatagtgtacttgaaaactatatgcgttatgctgaaagaacacaagtatatagacaagcatcattaataagaagaatgattgtattattacgaggtgctttattaaaacgaagagtacaaacgagagtgaactcggcatcttcacttagtgttacggataacttaatggaattaaataaaattaataaattagtccattataatgtggttagtcgtttgtctaaggaaacaacaaaagataatacacttgaagttggaatggtttgtgacggttatttaatgcgaattgaaaacttaacaccgtctaatttcttcaattcagcaagtgaagatacgattactaaaattaaattaaatgcattgagagaacaacgtcgaattttacgtgagttgattgatacagatgaagtatcagaaggtacagcgttaaaactaagagaagcaatcaattatgatgaaatggttattgtagatagtatgacgtag

SEQ ID NO: 408749 - DNA, 570 bp, Staphylococcus aureus
  misc_feature (541)..(565): n is a, c, g, or t
ttgttttgttttttacgacgaccgaatagtaataatgatcctaatgccgcgaataatccaccgaataatgtgccattatttgaattattattttcagtacctgtttccggtaatgctttcgctttattgttatggtctttaactgcactcattggtttagccggtgtatgtttacctgcatttgagtcggagtcgctgtctgaatctgaatcgctgtccgaatctgaatcgctgtctgagtctgaatcactatctgaatctgagtcgctatctgaatctgaatcgctgtctgaatctgagtcgctatctgagtctgaatcgctgtccgaatctgaatcgctgtctgagtctgaatcactatctgaatctgaatcgctatctgagtctgagtcgctgtctgaatctgagtcgctatctgaatctgaatcgctatccgaatctgaatcgctgtctgaatctgagtcgctatctgagtctgagtcactgtctgagtctgagtcgctgtctgaatctgagtcgctgtctgaatctgagtcgctgnnnnnnnnnnnnnnnnnnnnnnnnntctga

SEQ ID NO: 408750 - DNA, 438 bp, Staphylococcus aureus
atggatattaactggaaattgagatttaaaaataaagcagtattaacaggtttagttggtgcattgttgttatttatcaaacaaatcacagatttattcggattcgatttatcaactcaattaaatcaagccagcgcgattataggtgctatcctcacgctacttacaggtattggtgttattactgacccaacgtcaaaaggtgttgctgattcatctatagcacagacatatcaagcgcctagagatagtagcaaagaagaacaacaagtcacttggaaaacttcacaagatactagcttaacaccggaattaagtacaaaagcaccgaaagagtatgacacatcacaaccatttacagacacctctaatgaaatcggttttgacgtgaacgagtatcatcacggaggtggcgacaatgcaagcaaaattgactaa

SEQ ID NO: 408751 - DNA, 1446 bp, Staphylococcus aureus
atgcaagcaaaattgactaaaaaagagtttatagagtggttgaaaacttctgagggaaaacaatttaatatcgacttttggtatgcatttcaatgctttgattatgctaatgctggttggaaagctttgtttggattactcctaaaaggtgtaggcgcaaaagatattccattcgccaacaattttgacggactagctactgtataccaaaacacaccagacttcttagcacaacctggcgacatggttgtattcggtagtaactacggtgctggatatggtcacgttgcatgggttatcgaagcaactttagattatatcattgtatatgagcagaattggctcggcggtggttggactgacggaattgaacaacccggctggggttgggaaaaagttacaagacgccaacacgcttacgacttccctatgtggtttatccgtcctaacttcaaaagcgaaacagctccacgatcagttcagtctcctacacaagcacctaaaaaagaaacagctaaaccacaacctaaagcgattgaacttaaaatcatcaaagatgtagttaaaggttacgacctacctaaacgtggtggtaatcctaaaggtatagtcattcataacgacgcaggaagcaaaggagcgacagcagaagcttatcgcaacggattagttaacgcacctttatcgagattagaagcaggtattgcacatagttatgtatcaggtaacacagtgtggcaagccttagatgaatcacaagtcggttggcatactgctaaccaagtaggcaataaatattattacggtattgaagtgtgtcaatcaatgggcgcagataacgcgacattcttaaaaaatgaacaggcaactttccaagaatgcgctagattgttgaaaaaatggggattaccagcaaacagaaatacaatcagattgcacaatgaatttacttcaacatcatgccctcatagaagttcggttttacacactggttttgacccagtaactcgcggtctattgccagaagacaagcggttgcaacttaaagactactttatcaagcagattagggcgtacatggatggtaaaataccggttgccactgtctctaatgagtcaagcgcttcaagtaatacagttaaaccagttgcaagtgcatggaaacgtaataaatatggtacttactacatggaagaaagtgctagattcacaaacggtaatcaaccaatcactgtaagaaaaataggaccattcttatcatgcccggtagcttaccaattccaacctggtggatattgtgattatacagaagtgatgttacaagattgtcatgtttgggtaggatatacatgggaggggcaacgttattacttgcctattagaacatggaatggttctgccccacctaatcagatattaggtgacttatggggagaaatcagttag

SEQ ID NO: 408752 - DNA, 723 bp, Staphylococcus aureus
atgggagaaaagtttctatacatagatgattcagggcaattaagcgataatgggacacatgagtattttatatattctggtgtttttattgagaacaaaaatataattaacgaattaaaaagaagagtaaatggattagctaaagtaaataaaattaagggtgagtttaaaggttctgaattaggtggacggcatcgaagaaaattacttaaaattattgatgataccgacggtgttcatactttttttgttgttgaaaaaacaagtttgttaacacgagttgattttgagaatcctcagaaagtaagatatcacaaaaattatctgattagaagattgattgaagagattatagaacaaagtttagtatctgattcagattttctttatacgtatatcgacaatgaagcatcaaatgacactaaccaagcagagcatcttaacaatcatttgaatgaatattggaaattaagtagcagaggtttatattacaaacactccgtttatggtcaatttattcctcgctgtgatgttaatattaaagttaaatatttggattccaagcatgagagaatgatacagctagctgatattttagcaaattcaaaatataaaagatttagtaataaaaaggggtgccattctgagctaatacatcctaagagatgtttaaagctacctgaaatattttttagccccaaaaatgatgtttacaatagctaa

SEQ ID NO: 408753 - DNA, 729 bp, Staphylococcus aureus
atgaaaaaagtaatggggatattattagcaagtacacttatcttaggtgcttgtggacatcatcaagatagtgcaaaaaaagagagcactagtcacaaaaagaaagaaaatgacaatgaagaattaaatgaagaacttaaagaatttaaaagcaaaaaaaatatggaaataaaaattaaaggcgatactattgttagtgacaaatttgaagctaaaataaaagaaccgtttatcatcaatgaaaaagatgagaaaaagaaatatatcgcttttaaaatggaaattactgctaaaaaagacgataaagatttaaatccatcttctatttctcatgactatattaatatcactcaagatgataaaaatacagtaaataaattaagagatggttatcttttaagtgataaaaaatataaagattggacagaacataaccaagatcaaattaaaaaaggcaaaactgcacaagccatgtttatctatgagataagaggtgatggaaacattaatttaaatgtccataaatactcagaagataaaacagttgattctaaatcatttaaatttagtaaacttaaaaccgaagatttttctcatagagcggaaacaagagaagaagtagaaaagaaagaaaaagaatttgaagaagagtacaaaaaagaacaagaacgagagaaagaaaaagaaaagcaaaaagatgacgaccacagtggtttagatgaagtataa

SEQ ID NO: 408754 - DNA, 705 bp, Staphylococcus aureus
atgactaatgttttataccaacatggtacattaggcacattaatggcaggattattaaaaggaactgcatcaataaatgaattattgcaacatggtgatttaggtatcgctacactaacaggttcaaatggtgaggtcatctttttagatggaaaagcctatcatgcaaatgaacataaagaatttgtggaattaaaaggtgacgagttaacaccgtatgcaactgtaactaaattcgtagcagatacaagctatgaaacgaaagataaatcttctgaagcagtttttgcagaaattaaggaaaagatgttgagtgaaaatttattttctgcagtaaaaatttcaggcttatttaaaaaaatgcatatacgtatgatgccggcacaagagccaccttatacacgtttaattgattcagctagaagacaacctgaacaaactgaaacatacgtcaaaggttcagtcgttgggttctttacaccagaactattccatggtatcggatcagcaggattccatgtacactttgcaaatgatgatcgtaactttggcggacatgtcttagattttgaagtagaagatgttaaggtagaaatccaaaatatagaaacatttgaacagcattttccaattcatgatgaagatttcactaatgcaaatattgactataaagatatttcagatgaaattagagaagctgaataa

SEQ ID NO: 408755 - DNA, 1035 bp, Staphylococcus aureus
atgagaagttcaagtgcagacgaaacaaatgccattcgcaaattagttgagcgcacgaatttaccagttgtagaaacattccaaggtgcgggtgtaattagtcgtgaattagaaaatcatttcttcggacgtgtgggcttattccgcaatcaagttggtgatgaattattacgtaaaagtgatttagttgttacaatcggttatgatccaattgaatacgaagctagtaactggaataaagaattagaaacacaaattatcaatattgacgaagttcaagctgaaattactaattatatgcaaccgaaaaaagaattgattggtaatattgctaaaacgattgaaatgatttctgaaaaagtggatgaaccatttataaatcaacaacatttagatgaattagaacaactaagaacacatattgatgaagaaactggtattaaagcgacacatgaagaaggtattctacatccagtcgaaattattgaatctatgcaaaaggtattaacagatgatactacagtaacagttgatgttggtagtcactatatttggatggcacgtaatttcagaagttataatccaagacatttattatttagtaacggtatgcaaacacttggtgtagcattaccatgggcaatttcagctgctcttgtacgccctaatacgcaagttgtatccgttgctggcgatggaggctttttattttcatcacaagatttagaaacggccgtacgtaaaaatctaaacattatccaacttatttggaatgatggaaaatataatatggttgaattccaagaagaaatgaaatataaacgttcatcaggtgtagacttcggtcctgtagattttgtaaaatatgcagaatcatttggcgcaaaaggtttacgagttactaatcaagaagaattagaagcggcaattaaagagggctatgaaacagatggtccagtattaattgatatacctgtaaattacaaagataatatcaaactttcaacaaatatgttacctgacgtatttaactaa

SEQ ID NO: 408756 - DNA, 540 bp, Staphylococcus aureus
atgactgataaaaagtacactgcagccgatatcgttattgatactttgaaaaataatggggtagaatatgtttttggtattccgggtgcaaagattgactatctatttaatgctttaattgatgatggtcctgaacttattgtcacgcgtcatgaacaaaatgccgcaatgatggcgcaaggtattggaagattaacaggcaaaccgggtatagtacttgttacaagtggccctggtgtaagtaatttaacgactggactattaacagctacatctgaaggggatcctgtattagcgttaggtggccaagtgaaacgtaatgatttattacgattaacgcatcaaagtattgataatgctgcgctattaaaatattcatcaaaatacagtgaagaagtacaagatcctgaatcattatcagaagttatgacaaatgcaattcgaattgctacttcaggaaaaaatggcgcaagttttattagtattccgcaagacgtgatttcttcaccagttgaatctaaagcgatatcactttgctaa

SEQ ID NO: 408757 - DNA, 207 bp, Staphylococcus aureus
atgcagaaattcaaggatttgttttacgatgatttatcagttgcacgtggaaattattttctaactttattatccgcattctttattactattattctactaattggcttcgttgtcagtgatacacacatactttatggcgtgtttatagtgctcatcggtatcgtgttattacggttattcaaaattaatttactctcattttaa

SEQ ID NO: 408758 - DNA, 1020 bp, Staphylococcus aureus; identical to SEQ ID NO: 407759

SEQ ID NO: 408759 - DNA, 528 bp, Staphylococcus aureus
gtgtatccaagaggtactattgtatacgctaaacttggtgttaacattggttctgaattctcagggaatcatttttgcgtcgttttaaataaaaatgacaacaaacgcaatgagctaattactatagttccacttacttcaaaagacaccaaattttctttaaaattacaagagaatttaatactaaaagctttagaaaaaatgaaaactgaccacaaaactttacgattcgatttggatagaataaaagaaatgcacgcaagatccacaaaagtaaaaaacttaaattcagcaatcgaaaaagaacttgatgagattgaaaataattatatgcaactcgcaaaaataattgagcgttacgaaaggtttgtaggcaaacaaacttatgcaattccatctcaagttatcactatcagtaaaaaaagaataagcacacttaatgattacgatccaactggccatatatctttcaatgaagaaactttaaaaattatagaagattttatgaaagctaacattttatcataa

SEQ ID NO: 408760 - DNA, 168 bp, Staphylococcus aureus
atgaaaataactaattgcaaaataaaaaaagaaactatagtatatgaagttttaactagtggtaatcaaccattcacttatgagttacctaaagatttatcgtcacataatgcgcgtaaatacttggaatttatttcacaaaaaatagatggcgataagttaaattaa

SEQ ID NO: 408761 - DNA, 720 bp, Staphylococcus aureus
atggataaaaaagaattagcgaaatttataggcaataaaatcagatactatagaaccaaattgaacttaactcaagatcaacttggagaaaaactcaacactaaaaaggctactatttcaaattatgagacagggtacagaactcctaaacaagatgatttgtttgaaattgctcatattttaaatatcagtatcgatgatttgtttcctacaagaaataataaaaaaaacgacatcacttccatatacagtaaactcacgcctccaagacaagaaaacgtacttaactatgcaaatgagcaattagatgaacagaataaagtcacttctatagatggatataaagagtctaaactagtatcgtatattgcatgtggtgcaactggtgctggcataggagaagaattatatgatgacatattgcatgaagaagtattttttaaagaagacgaaacgccatcaaatgctgatttttgtattttagttaatggtgattcaatggaacctatgttaaaacaaggaacatacgcttttattaagaaagaagattctattaaagatggtacaattgcactcgttgtattagatggagtaagtcttatcaagcgtgtagatatatgcgaagactatattaatttggtatctctaaatccgaagtatgatgatatcaaagtcgcttcgtttagtgatattaaagtaatgggcaaagttgtattgtga

SEQ ID NO: 408762 - DNA, 219 bp, Staphylococcus aureus
atgcaatggaatttaataaagttgagaaaagaaagaaagtgtactcaagaagatttagcaaacctcttgaatatatcaactgaaggttatcgtttaaaggaattaggaaagcatcaatttaagaatgatgagatgtttattatcgctgatttttttgacgaaaatattggagatatttttttacccacaaagtacacgaaacgcaaacaaacatcttaa

SEQ ID NO: 408763 - DNA, 777 bp, Staphylococcus aureus
atgcaagcattacaaacatttaattttgaagaattaccagtaagaacattaacagtagataacgaaccatattttgtaggtaaagatgtggcagaaatcttaggatactcaaatacgcgtgacgcattaagtaaacacgttgatgaagacgataaggaaattctaacgtcgcgaaacacgactttagaaaatttgccaaatcgaggacttactgcagtcaacgaatcaggtttatacagcttaatcttctcatcaaaactagaatcagctaaacgattcaaacgttgggtaacttcagacgtcctacccgctattcgaaaacacggtatctacgcaacagacaatgtaattgaacaaacattaaaagatccagactacatcattacagtgttgactgagtataagaaagaaaaagagcaaaacttacttttacaacaagaaattggagagctaaaacccaaagcagactatgtagatgaaatcttaaagtcaactggaacattagctacaactcaaatcgcggcagactacggtatatcagcacaaaagttaaacaaactactacacgaagctagattacaacgaaaagtgaataaacagtgggtgctttactcagaacacatgggcaagagttacacagaatcagacactataccaattgtacgctctgacggtagagaagacacagttttacaaactagatggacacaaaaaggtagattgaaaatacatgaaatcatgactgaattcggttatgaagctaacgtaactgcttaa

SEQ ID NO: 408764 - DNA, 195 bp, Staphylococcus aureus
atggaagctcaaaacaaaaaagtcatctattactactatgacgaagaaggtaatagacgactattatcaattggtaatttagatacctatttattagcagatatcaaatcaagatttggtttatataaaaaggcaatccctgatttagataatctatacattcaaatagatggtatcgaatttaaattatattaa

SEQ ID NO: 408765 - DNA, 222 bp, Staphylococcus aureus
atgataaaaaatagtttgcaagctaaagaacttgcagtaattttatctgtttctaaatccaaagcaggacaaataataagagaactgaataaagagcttgaagacaagggatacattgcgatacgaggcagaataccagtccaattagctagagaaaaattcccttatcacggcttatcagaccagagaataatggaggagttgaaaaaagtaaatgagtaa

SEQ ID NO: 408766 - DNA, 162 bp, Staphylococcus aureus
atgagtaaaacttataaaagctacctattagcagtactgtgcttcacagtcttagcgattgtacttatgccgtttctatacttcactacagcatggtcaattgcgggattcgcaagtatcgcgacattcatattttataaggaatacttttatgaagaataa

SEQ ID NO: 408767 - DNA, 261 bp, Staphylococcus aureus
atgtattacgaaataggcgaaatcatacgcaaaaatattcatgttaacggattcgattttaagctattcattttaaaaggtcatatgggcatatcaatacaagttaaagatatgaacaacgtaccaattaaacatgcttatgtcgtagatgagaatgacttagatatggcatcagacttatttaaccaagcaatagatgaatggattgaagagaacacagacgaacaggacagactaattaacttagtcgtgaaatggtag

SEQ ID NO: 408768 - DNA, 264 bp, Staphylococcus aureus
atgagagatacagaaagaaatatattgaatatttttaagacattattcgacgaatatactttgtcaaaccaacgagcactattggaaattgaacgtaatcatcacggatacttatcgattaatttcttgcactatcacgacagttacaaaacaaacaataagcttgtgcagatacatgaaatcaatccagatagccatgaacgaataaaaaatttaattatcgaggtgctaagaggtcatcggaagattaaaaaaggagcatga

SEQ ID NO: 408769 - DNA, 372 bp, Staphylococcus aureus
atggcgagaaaagcaaggattgtaacaataaatgataaaccatataggtttaccaaatctgaaatggaattaatagaaagtcacggtataaccgctggaatggtttctaagagagtaaaagacggttgggaactacatgaagcaatggacgcaccagaaggtacgcgtttaagcgagtacagagaaaagaaaacaatagaaagactggaacaagctagactcgaacgcaaattggaaagagagcgaaagaaagaggctgagctaagaagaaagaagccacatttgtttaatgtaccacagaaacattcacgtgatccgtactggtttgataatacttataaccaaatgttcaagaagtggcaggaagtataa

SEQ ID NO: 408770 - DNA, 402 bp, Staphylococcus aureus
atgaaaatcaaagttaaaaaagaaatgagactggatgaattaattaagtgggcgcgagaaaatccggagctatcaaaaggaaaaatttttcttgcaaaagtttttagtaatggattcgttcgttttcaacgaaatacaaatacgtgttcgatatcaagttttattccaattgatactcctttcatagttgaagttgaagaggaaatcacagaagatacagtatttgataggttgtttgaagtgtacgagcttcaagagggagcctatatgtcagcgttacacacaagtattagtatcaacgaacgtttagagaacacgtttttccctaccaaagcattctacatcttgaacgacggcctagctatgacattaatttggaaagatgggagattggtagaatga

SEQ ID NO: 408771 - DNA, 366 bp, Staphylococcus aureus
atgaactatgaaacagggttccaactaagcgtaatggacgctaggttgaagaagatgagaaaacaacgtgatgagtacaagaagcaacgtgacgagcttattggggatatagctaagttaagagagcgtaacgaagagttggagatcatgtggcgcacagtcaaaaatgaattgcttggaagatacgaacattactgttttaaatttagagaactacaccctgagagcaaagcgaacaggataggagctctctatataggagataaaggcactgcagatattttactgtcgcgaatggaagaactagacggaacaaatgagttctacgaatttttagggcaaatggaggaagacacaaatgaataa

SEQ ID NO: 408772 - DNA, 207 bp, Staphylococcus aureus
atgagtagtccgaaaattaagccctgccctttttgtggcggtctagcagatatacgatatagctttgatacattattaattgaatgtactaataaaaattgcaaactacaaccatctacatggtcacacgttcataccaataatgcagaaaaacttataaaaatttggaataaaagaaaagatttggaggaacaggaaaatgactaa

SEQ ID NO: 408773 - DNA, 540 bp, Staphylococcus aureus
atgactaacacattaacaactgatcagttacaagagttattacaaatacaaaaggagttcgacgatagaataccgacgctgaacttacgagatagcaaaatagcatatgtagtcgaattctttgaatggtttaatacattggaaacgtttaagaactggaagaagaagccggggaagccgttagacgtacaacttgatgaattagctgacatgttggcgtttggtttgagtattgcgaatcaaagtaaaattaatgaagagctaaaagaatatattttgtattctatatcaacaagcgaaaaggtttatggtgattttgattttacaaacgaaaatgtaattaaatcagtaattatagatatgcctgaggagttatttgaaaatagtgatgattcaaaaatccttgcgccaagtttaccatttgttctagctaaaaattattacactatcaaccaactaatcacagcatataaaaagaaaatgaaaaggaaccacgaaagacaagatggaacagcagacgcagggaaaggatacgtgtaa

SEQ ID NO: 408774 - DNA, 207 bp, Staphylococcus aureus
gtgacgcaatacttagtcacaacattcaaagattcaacaggacaaccacatgaacattttactgctgttagagataatcagacgtttacagttgttgaggcggagagtaaagaagaagcgaaagagaagtacgaggcacaagttaaaagggatgcaattattaaattaggtcagttgtttgaaaatataagggagtgtgggaaatga

SEQ ID NO: 408775 - DNA, 195 bp, Staphylococcus aureus
atgacggatgttaaaattaaaactatttcaggtggagtttattttgtaaaaacagctgaaccttttgaaaaatatgttgaaagaatgacgagttttaatggttatatttacgcaagtactataatcaagcaaccaacgtatattaaaacagatacgattgaatcaatcacacttattgaggagcgtgggaaatga

SEQ ID NO: 408776 - DNA, 237 bp, Staphylococcus aureus
atgattaatattcctaaaatgaaattcccggaaaagtacactgaaataatcaaaaaatataaaaataaaacacctgaagaaaaagctaagattgaagatgatttcattaaagaaattaatgataaagacagtgaattttacagtcctatgatggctaatatgaatgaacatgaattaagggctatgttaagaatgatgcctagtttaattgatactggagatgacaatgatgattaa

SEQ ID NO: 408777 - DNA, 387 bp, Staphylococcus aureus
atgatgattaaaaaacttaaaaatatggattggttcgatatctttattgttggaatactgcgattattcggcgtaatcgcactgatgcttgttgtcatatcgcctatctatacagtggctagttaccaaaacaaagaagtatatcaagggacaattacagataaatataacaagagacaagataaagaagacaagttctatattgtgttagacaacaagcaagtcatcgaaaactctgacttactattcaaaaagaaatttgatagcgcagacatacaagctaggttaaaagtaggcgacaaagtagaagttaaaacgattggttatagaatacactttttaaatttatatccggtcttatacgaagtaaagaaggtagataaataa

SEQ ID NO: 408778 - DNA, 174 bp, Staphylococcus aureus
atgattaaacaaatattaagactattattcttactagcgatgtatgagctaggtaagtatgtaactgagaaagtatatattatgacgacggctaatgatgatgtagaggcgccgagtgacttcgcaaagttgagcgatcagtctgatttgatgagggcggaggtgtcagagtag

SEQ ID NO: 408779 - DNA, 663 bp, Staphylococcus aureus
atgaatagtgcaaaattgattgatcacactttactgaagcctgagtcaacacgtacgcaaatcgatcaaatcatcgatgaagcgaaagcataccattttaaatctgtatgtgtgaatccaacgcatgttaaatatgtagcagagcgactagctgattcagatgtgctcgtttgtacggtaataggattcccattaggtgcatcgacaactgcaacgaaagcatttgaaacagaagatgcaattcaaaatggtgcagatgaaattgatatggttatcaacatcggcgcattaaaagatggacgttttgatgatgtacaacaagatattgaagcagtggttaaagctgcgaaaggtcacacggtgaaagtgattattgagacggtattgttggaccatgacgaaatcgtaaaagcaagtgaattaacaaaagcggcaggtgcggacttcgttaaaacttcaacaggttttgcaggtggcggtgcgactgcagaagtcgttaaattaatgaaagatacagtaggtgctgatgtagaagtaaaagcatcaggtggcgtacgcaatttagaagatttcaataaaatggttgaagcaggtgcaacacgtattggtgcgagcgcaggcgttcaaattatgcaaggcttagaagcagattcagattactaa

SEQ ID NO: 408780 - DNA, 1302 bp, Staphylococcus aureus
atgagaatgatagatattattgagaaaaaacgtgacggtcatgcattaactactgaagaaattaatttctttattgatgggtatgttaaaggggatattcctgattaccaagcatcaagtttagcaatggcgatttatttccaagatatgaatgatgatgagcgtgcagcattaacgatggctatggttaattctggtgatatgatagatttgagtgatattaaaggtgtcaaagtagataagcactcaacaggtggtgtaggagatacaactacattggttttagccccattagtagcagctgtagatgttcctgttgcaaaaatgagtgggcgtggattaggtcatacaggtggtacaattgataaattagaagcaattgatggttttcatgttgaaatagatgaagcaacatttgtgaaattggttaatgaaaataaagtggcagttgtaggacaatcaggaaatttaactcctgcagacaaaaaattatatgccttaagggatgttactggtaccgtcaattcaataccattaattgcctcttcaattatgagtaaaaagattgccgctggtgcagatgcaattgtattagatgtaaaaactggtagcggtgcatttatgaaaacattagaagatgctgaagcattagcgcacgcaatggtacgtattggtaataatgtgggacgtaatacgatggcgattatttctgatatgaatcagccacttggtcgtgcgattggcaatgcgcttgagttacaagaagcaattgatacgttgaaaggacatggtccgaaagatttaacagaacttgtactaacattaggttctcaaatggttgtacttgcaaacaaagctgaaacgcttgaagaagcgagagcattgctaattgaggcaattgattcaggtgcagcattagaaaaattcaaaacatttattaaaaaccaaggtggcgacgaaacagttattgaccatccagagcgtttgccacaagctcaatatcaaatcgaatataaagctaaaaaatcaggttatgtgactgagttagtctctaacgatataggtgtcgcttcgatgatgttaggagcgggacgtttaacaaaagaggatgatattgatttagcggttggtattgttttaaataaaaaaattggggataaagtagaagaaggagaatcattattaacgattcacagtaatcgccaagatgtagacgatgttgttaaaaaattagattcaagtataacaattgctgatcatgttgtatcgcctacattaattcataaaatcattacagagtag

SEQ ID NO: 408781 - DNA, 672 bp, Staphylococcus aureus
atgtcttataaagcatatccattctttagagatatattaataaatgaatgtatttatttcgcctctaaaaataaaaaactagtacgcctaaattataaaagtgaagcgtatgtaggcgtttggacagaagaaagtgtggccgtatcatttttaacaagtcgtgatattccatttgataaagttgtaaaaatggacgttgatcgttttgctacttatgaattagatgaattgtttgatgaacaagaccatattattatgaatcaaacaatggaagaagaaggtcatctactaaacgttgtagctgttacacaagaagtgatgacggaattagataaaattagaatcaaagaatttgtccaagatgtagcgaaatatgatgaagtatacggcttaactaaaaaaggaagtaagcagtttattctcattagtgaaaatgatagcgacgaaaaaaagccgcatattatgcctgtatggagtattaaaaacagagcgttaaaagttcgagatgaagattttgaagagtgtgatttaattacgattgaaggttctgttttcggagaatggctagatgaacttagagatgatcataaagccgttgcgatagatttaaaaactggcgtggttggtacaattgtttcagcgcaaaaattgtctaatgaacttacattttaa

SEQ ID NO: 408782 - DNA, 564 bp, Staphylococcus aureus
atggttaaaacagtttatgtaacaggttataaatcattcgaattaaacatttttaaagatgacgcacctgaagtacattatttaaaacaatttataaaacataaaattgaacaactgttggatgaaggattagaatgggtgttaatacaagggcaaatgggtatagaattatggactgcagaagttgttattgaattacaacgaacatatgattcgttaaagtttgctgtaattacaccattccaaggacatacagaaaagtggaatgaacataatcaaagtaagtatgccaacataattaagtatgcagattatgttgatagtatttttcatacgtcgtatcaaggtccctttcaatttaaacaagcagatcaatttatgcttgaacattcggatcaaacattgctcatttatgatgaggaacaagaggcgagtcctaagttcttcaagcagaagttagttgattttatggataaaacaaactatacttgtgatattgtgacgttcgatgaattaacagcattcatcaatgacttacagtggtctgaagatcaaagtttctaa

SEQ ID NO: 408783 - DNA, 333 bp, Staphylococcus aureus
atgggtaaaaaaatgggtctaggtttatctatagcattggttgttattggtattgccgttgtatgtttaatgattttttctagtcaaaaaacgacttattttggttatatgaatagtaatacaaatgcagaaaaagttgtcagcgaaaaagatggattagtcaaacataatatcaaagtagaaccatcaaatgattttaaaccgaaaaaaggagactttgtaaaattagtttctaaagatgatgggaagacattttataaacaagaaattgttaaacatgatgacgtcccacacggtttaatgatgaaaattcacgacatgcatatgaattaa

SEQ ID NO: 408784 - DNA, 888 bp, Staphylococcus aureus
atgattttatctggtacttatttactcattaagaagcaattaatttctaacaaaagtaaggcacttcgttggcaaaagtggcacgcaatgattggagttatcattgcaattccagtatttgtattagttttaactggattgccatggtctggttttatgggcagtaaaattgccggtatgatggacacaaacggtgatcttggtcaaggtgaattagcgattaatccacctaaatcagatttgaatgagttaccttgggctacacgtaaaaataaacagccagcttcatcggaaaaaggttcaagtagtcatcatggcaatgcagcaatgcctcaaaccaaattagattatcaaatatctattgataaggtcgttgaacaggcacaaaaatctggtattaaaaagccgttttcaatcgtatatccaagtgataaaattggcacctttattgtatctaatactagtaattcaggtgttactgggctagatgtatcaccttacaaggaacaaacactttatttcgatcaatatagcggtaaaaagctaggtacgattaaatatgatgactacggtattattgctaaatggtttacatggggcattccgcttcacgaaggtcatttattcggtattttaaataaaatcattaatttatttgtatgtatcgctttattagtagccattggtatgggatttgtctcttggataaagcgtacaaaaaatactgcagtaaaagtaccacatcgcgtaaaaaaaccagcatctatatcactcatcatatgtttaattgtattaggactattaatgccattatttggattatcacttatactagtatttataattgaattaatattatatgttaaagatcgtcgtgctaaacaataa

SEQ ID NO: 408785 - DNA, 879 bp, Staphylococcus aureus
atgcctaataaaatattacttgtagatggtatggcgctattatttagacatttctatgctacaagtcttcataaacaatttatgtacaattcacaaggtgtacctacaaatggaatacaaggatttgtgcgtcatatcttttcggcaatacatgaaatacgccctacacatgtagctgtatgttgggatatgggacaatcaacttttagaaatgatatgtttgatggttataagcaaaatcgttctgcaccaccagaagaattgataccacaatttgattatgttaaagaaatttcagagcaatttggctttgtaaatattggcgttaaaaactatgaagcggatgatgttataggtacattagcacgacaatattcaactgataacgatgtctatattattacgggcgacaaagatttactgcaatgtattaatgacaatgttgaagtttggctaattaaaaaaggttttaacatttataatagatatacattgaatcgttttaatgaagaatatgcacttgaaccacaacaattaattgatattaaagcgtttatgggtgatacagcagacggttatgctggtgtaaaaggtattggagaaaaaacggcaattaagctcattcagcaatatcaaagtgttgaaaatgtagttgaaaatatcgatgcattatcagctgggcaacgtaataagattaatgacaatttagatgaactatatttatcgaagcgacttgctgaaattcacacacaagtaccgattgatagtgaatcgctttttgaaaaaatggcatttgcaacaacacttaatcatattttatcgatttgtaacgaatatgaattacatgtatctggaaaatacatttcatcccatttttaa

SEQ ID NO: 408786 - DNA, 2610 bp, Staphylococcus aureus
atgttaactatacctgaaaaagaaaatcgtggatcgaaagaacaagaagtggcaattatgattgatgctctagctgacaaagggaaaaaagcattagaaacattatctaaaaagtcacaagaagaaattgatcatattgttcatcaaatgagcttagcagctgttgatcaacatatggtgctagcaaaattagcacatgaagaaactggaagaggtatatacgaagataaagcgattaaaaatttatacgcttctgaatatatatggaattcaataaaagacaataagacagtagggattattggtgaagataaagaaaaaggattaacgtatgtagcggaaccaattggtgttatttgtggtgttacgccaacaacaaatcctacgtcgacaactatttttaaagcgatgattgcaattaagacaggaaatccaatcatttttgcattccatccaagtgcacaagaatcgtcgaagcgtgcagcagaagttgtattagaagcggcaatgaaggcaggtgcacctaaagatattattcaatggattgaagtgccttctatcgaagcaacaaaacaattaatgaatcacaaaggtattgcattagttctagcaacaggtggttcgggcatggttaagtctgcatattcaactggtaaaccggcattaggtgtgggaccaggtaacgtgccgtcttacattgaaaaaacagcacacattaagcgtgcagtaaatgatatcattggttcaaaaacatttgataatggtatgatttgtgcttctgaacaagttgtagtcattgataaagaaatttataaagacgttactaatgaatttaaagcacatcaagcatattttgttaaaaaagatgaattacaacgcttagaaaatgcaattatgaatgaacaaaaaacaggtattaagcctgatattgtcggtaaatctgcagttgaaatagctgaattagcaggtatacctgtccccgaaaatacaaaacttatcatagccgaaattagcggtgtaggttcagactatccgttatctcgtgaaaaattatctccagtattagccttagtaaaagcccaatctacaaaacaagcatttcaaatttgtgaagacacactacattttggtggattaggacacacagccgttatccatacagaagatgaaacattacaaaaagattttggactaagaatgaaagcttgtcgtgtacttgtaaatacaccatcagcggttggaggtattggtgatatgtataacgaattgattccgtctttaacattaggttgtggttcgtacggtagaaactcaatttcacataatgttagtgcgacagatttattaaacattaaaacaattgctaaacgacgtaataatactcaaattttcaaggtgcctgctcaaatttattttgaagaaaatgcaattatgagtctaacaacaatggacaagattgaaaaagtgatgattgtctgtgaccctggtatggtcgaattcggttatacaaaaacagttgagaatgtattaagacaaagaacggaacagcctcaaattaaaatatttagcgaagtcgaaccgaacccatcaactaatacagtatataaaggtctggaaatgatggttgatttccaaccggatacaatcattgcacttggtggtggttcagcgatggatgctgcaaaagcaatgtggatgttctttgaacaccctgagacatcattcttcggtgctaaacaaaagttcctagacatcggtaaacgtacttataaaataggcatgcctgaaaatgcgacgttcatttgtatccctacgacatcaggtacaggttcagaagtaacaccatttgcagttatcacagatagtgaaacaaatgtaaaatatccgttggctgattttgctttaacacctgatgttgcaattattgaccctcaatttgtgatgagtgtgccaaaaagcgttacagcagatacaggaatggatgtactaacgcatgcaatggaatcatatgtatctgtaatggcttcagattacacaagaggtttgagtctacaagcgattaaattgacgttcgaatatttaaaatcatctgttgaaaaaggtgataaagtttcaagagagaaaatgcataacgcatcaactttggctggtatggcatttgcaaatgcattcttaggcattgcacactcaattgcgcataaaattggtggcgaatatggtattccgcatggtagagcgaatgcgatattactaccgcatattatccgttataatgccaaagacccgcaaaaacatgcattattccctaaatatgagttcttcagagcagatacagattatgcagatattgccaaattcttaggattaaaaggtaatacgacagaagcactcgtagaatcattagctaaagctgtctacgaattaggtcaatcagtcggaattgaaatgaatttgaaatcacaaggtgtgtctgaagaagaattaaatgagtcaattgatagaatggcagagctcgcatttgaagatcagtgtacaactgctaatcctaaagaagcactaatcagtgaaatcaaagatatcattcaaacatcatatgattataagcaataa

SEQ ID NO: 408787 - DNA, 459 bp, Staphylococcus aureus
gtgagcaaagaaattttagcagaagctaaaaagctaaacgatgctcaagcaccaaaagaggaagacggcaacaaacctggtaaagaagacaacaaaaaacctggcaaagaagacggcaacaaacctggtaaagaagacaacaaaaaacctggtaaagaagacggcaacggagtacatgtcgttaaacctggtgatacagtaaatgacattgcaaaagcaaacggcactactgctgacaaaattgcttcagataacaaattagctgataaaaacatgatcaaacctggtcaagaacttgttgttgataagaagcaaccagcaaatcatgcagatgctaacaaagctcaagcattaccagaaactggtgaagaaaatccattcatcggtacaactgtatttggtggattatcattagcgttaggtgcagcattattagctggacgtcgtcgcgaactataa

SEQ ID NO: 408788 - DNA, 1398 bp, Staphylococcus aureus
atgacgaaatataaagatattgctagtgacatcagagataaaataatcgcaggggattggttttatggaatgaagataccttcacagaggcagttggcgatacaatacaacgtaaatagagtgacgattattaaaagtattgagttattagaggctgaaggatttatctatactaaggtggggagtggaacatatgttaatgactatttgaacgaagcacatattacaaataaatggtctgaaatgatgttatggtcctctcgacaaagaagtcagtatacggtgcaattaattaataaaattgagacagatgacacgtatatacatataagtaaaggtgaattgggtcaaccattaatgccacatattcaattgaaaaaagccatgtctaatacagccagtcatattgaagacttatcttttggttataataacggctatggttatatcaagttaagagatatcatcgttgaacgaatgtcaaagcaaggtataaatgtaggtagagaaaatgtaatgatcacttcaggcgctttacatgccattcaacttttatctattgggtttttaggtcaagatgccataataatttcaaatacaccatcatatattcactctaccaatgtttttgagcaattgaattttagacatattgatgttccttataatcaaattaatgaaattaataccatcattgatagatttattaattttaaaaataaagcgatttacatagaacctaggtttaataacccgacaggttgttctttaacgaatgagcaaaagcaaaatataattacttatagcgaaagacataatatacctatcattgaagatgatatctttagagatattttctttagcaatccaactcctgctatcaaaacttatgataaattgggaaaagttatacatataagcagtttttcaaaaacgattgcaccagcaataagaataggttggattgttgcttctgaaaaaataatagagcaattggcagatgtaagaatgcaaattgactatggatccagtattttgtcacaaatggttgtatatgagatgttgaaaaataagtcttatgataaacacttagtaaagttaaggtatgttttaaaagataaacgagactttatgttaaacatcctcaataatttatttaaggatatagcacattgggaagttccaagtggaggttattttgtatggttagtctttaaaatagatatagatattaaatatttattctacgaattgttaagtaaagaaaaaatactaatcaatccgggttacatttatggcagtaaagaaaagagtataaggctatcttttgcctttgaatcaaatgaaaatattaagcatgcgctctataaaatttatacatatgtgaaaaaggtttaa

SEQ ID NO: 408789 - DNA, 1776 bp, Staphylococcus aureus
atgtattacagttatggaaattatgaagcatttgcgcgccctaaaaaacctgaaaatgtagaaaacaaatctgcttacttaatcgggtctgggttagcttcacttgcggcagcttgtttcttaattagggatggtcaaatggaaggttctaagattcatattttagaagagttacccaaagcgggcggcagtcttgatggtgaaaatatgcctttaaaaggctatgttgtccgaggtggtcgtgaaatggagaaccactttgaatgtttgtgggatttattcagatctatcccttcgcttgaaattgatcatgcgtcagtattagatgaattctattggttaaacaaagaagaccctaactattctcgttgtcgtgttattgagaaacagggtcaacgtttagtcacagatggagacttcactttgactaaaacggcaattaaagaaattttagatttatgcttaacgaatgaagaagatttagatgatgtcaaaataacagatgtattttccgatgacttctttaattcaaacttttggatttactggaaaacgatgtttgcatttgaaccgtggcattctgctatggaaatgcgtcgctatctaatgcgattcgttcatcatattggtggtctcgcagacttttcagctttaaaattcactaaatataatcaatatgaatctttagtattacctatggttgaatatttaaaatcgcatggggttcaatttgaatacgatgtaaaagtagaagatattaaagtagatgttacgacaagtcaaaaaattgcccgagaaatattaattcaccgacatggcaaagcagagtcaattaaactgactgtagatgatcttgtctttgtgacaaacggtagtattacggaaagctctacgtatggtgataatgatacaccagcaccaccaactgacgaattaggtggtagttggacactatggaaaaatttagcgcgacaaagtcctgaatttggtaatcctgataagttttgccaaaatattcctcaaaagagttggtttgtttctgcaacatcgacaacaaacaataaagatattatcgatacaatagaaagcatttgtaaacgtgaccctcttgcaggcaaaacggttactggcggaattattacaatcaatgattctgcatggcaaatcagttttacaatcaatcgtcagcaacagtttaaagaccaacctaaaaatgaaatatctacatggatttatgccttatattcagatgtaaacggcgattatattaaaaagccaatcacagaatgtagtggtaatgaaatatgtcaagaatggctgtatcacttaggtgtaccaactgacaaaattgaagacttagcaaaacatgcatctaatacgattcctgtttatatgccatatattacctcttatttcatgacgcgtgctatcggcgacagacctttagtcgtcccgcatcaatcacaaaatttagcatttattggtaactttgcagaaacagagcgagatactgtatttacaacagaatattcggttcgtactgccatggaagctgtttatcaattactaaatatagatcgtggtattccagaggtcatcaatagtacatttgatcttcgcgtcttaatggatgccatatacgaactgaatgaccatcaagatttgcgcgagattactaaagattcgaaaatacaaaaactcgcattagcaggattccttaaaaagataaaaggtacgtacattgagtcattattaaaagaacacaaattgttataa

SEQ ID NO: 408790 - DNA, 681 bp, Staphylococcus aureus; identical to SEQ ID NO: 407719

SEQ ID NO: 408791 - DNA, 501 bp, Staphylococcus aureus; identical to SEQ ID NO: 407671

SEQ ID NO: 408792 - DNA, 501 bp, Staphylococcus aureus
atgactttcgaagaaaaactaaggcaaatgtacaatgaaattgcaaataaaattagcagtatgataccggtagaatgggaaaaggtatatgcaatggcttatgtaaatgaaagaagtggagaagtgttctacaattatactgaaccaagaagtgatgaattagtttactatacgagcgtgttaaataaatataatatatcaagatcagaatttatggactcagtatatgaattatataagcaatttgataaactaagagatttatttaaagaagaaggacatgacccatggacatcatgtgaatttgactttacaagagacggcaaattgaatgtttcatttgattatattgattgggcgaattcagagtttggacaaatgggaagagaacattattacatgtataaaaaatttggaatttggcctgaaaaagaatatgccataaattgggttgaaaaaataaaaaattatgttaaagagcaagaagaaactaacctttag

SEQ ID NO: 408793 - DNA, 501 bp, Staphylococcus aureus
atgactttcgaagaaaaactaagtcaaatgtataacgagattgcgaatgagattagtgggatgataccaatagagtgggaaaaggtatatacaattgcttatgtagatgatgaaggtggagaggtcgtttttaattatactaaaccaggtagcgatgaattgaattattacacatatatccctagagagtataatgtctctgaaaaagtattttatgatttgtggacggatttatatagattgtttaagaagttaagaaatgcatttaaagaagaaggacttgacccatggacatcatgtgaatttgattttacaagcgaaggtaaattatacgtatctttcgactatatagattggattaaattaggttttggcccatcaggaaaggaaaactattatatgtataaaaagtttggtgttttaccagaaatggaatacgaaatggaagaaattaaagaaatcgagcaatatattaaagagcaagatgaagctgaactatag

SEQ ID NO: 408794 - DNA, 501 bp, Staphylococcus aureus
atgactttcgaagaaaaattaagtgaaatgtacaatgaaattgcgaatgagattagcagtatgataccggtagaatgggagcaagtatttacaatagcttatgtaactgatcaagctggagaagtaatctttaattatactaaaccaggtagtgatgaattgaattattattcagatatacctaaagattgtaatgtctctaaagatatttttaagaattcatggtttaaagtttatcgaatgtttgatgagttaagagaaacttttaaaaaagaagggcttgaaccatggacatcatgcggatttgactttacaagagacggtaaattgaatgtatcttttgattatattgattgggtgaatttagaatttggaccattagcaaaagaaaattactatatgtataaaaaatttggggttataccagaaatggaatatgaaattaataaagttaaagaaatcgagcaatatgttgaagagcaagatgaagctgaaatatag

SEQ ID NO: 408795 - DNA, 1359 bp, Staphylococcus aureus
atgaattttcttaaacctgcaaagcatattaagcctttgccagaaaatcagatagatgatacctataaacgattacgtctccaagtatttcttggtattttcatcggttacgctgggtactatttattacgtaaaaacttttcattagcgatgccggcattgcaagagcaaggttttacaaaagcggaactaggttttgcactttctgctgtttccatcgcatatggatttagtaagttctttatgggtactgtaagtgatcggagcaatgctcggatattcttagttcttggattagtactcactgctatcgtcaatttgttaatgggatttgtaccgttctttacatcaggtatcggtattatgtttgtcctattattcttaaatggatggtttcaaggtatgggctggccaccttcaggccgtgttctcgttcactggtttagtgtaagtgaacgcggaagtaagactgccctttggaacgttgcgcataatgttggtggaggtattatggctcctattgctgcttggggtattacaacaacagcatttatcaactttggttatttaaaaggtttcgaaggtgtattcatttaccctgcactcttagcacttatcattgccgcaatttcatacgtattgattagagacacacctcaatctcaaggtttacctccaatcgaaatttataaaaatgactttgctacaagcgataagaaaacattagaaacagaattaactacaaaagaaattttatttaaatatgtactgaacaataaatgggtatgggcaattgcctttgcaaatatatttgtttatttcgtgcgttatggtgtacttgattgggcgccggtctacttaagtgaagaaaaacatttcgacttaaaagcatcaggttgggcatacttcttatacgaatgggctggaattcctggtacattattatgtggttacatttctgataaattattcaaaggtcgccgtggacctgcaggtttcttctttatgttaggtgtcacagtatttgtattaatttattggttaaatcctccaggcaatgcttggttagacaatgtctcattaattgccattggtttcttaatatatggaccagttatgttaattggtttacaagcattagattatgttcctaaaaaagcagctggcacagcagctggattaacaggattatttggttatctgtttggtgctgtaatggccaacatcgtcttaggtgctgtagttgataaattcggatgggatgtcggttttattttattaacagcaatcagtgtgtttgcaatgttgagctttatcctcacttggaataaagtaggacaagaaaccgttcatcattaa

SEQ ID NO: 408796 - DNA, 1116 bp, Staphylococcus aureus
atggttaaaaatcataaccctaaaaatgaaatgcaagatatgttaacgcctttagatgctgaagaagcagctaaaacaaaattacgcttagatatgagagagattcctaagtcttcaattaaaccagaacattttcatttaatgtacttattagaacaacattctccatattttatagatgctgaattaactgaactacgtgacagtttccaaatacattatgacattaatgacaatcatacaccttttgataatattaaatcatttactaaaaatgaaaaattacgttacttactcaatatcaaaaatttagaagaagtaaatcgtacacgctacacatttgtgttggcaccagatgaattatttttcacaagagatggattaccaattgctaaaacaagagggttacaaaatgttgttgatccattacctgtgtcagaagctgaatttttaacaagatataaagcactggttatctgtgcattcaatgagaaacaatcatttgatgctttagttgaaggaaacttagaactacataaaggaacgccatttgaaactaaagttattgaagcggcaactttagatttactaacggcatttttagatgaacagtatcagaaacaagaacaagattatagtcaaaattatgcatatgtacgtaaagtaggacataccgtttttaaatgggttgctatcggtatgacaacgttaagtgttttattaattgcattcttagcctttttatatttttcagtaatgaagcataatgagcgcattgaaaaaggataccaagcatttgtaaaggatgattatacgcaagtactaaatacgtatgatgatttagatggaaaaaaattagataaagaggcactttacatttatgccaaaagttatatccaaacaaataaacaaggtttagaaaaagataagaaagaaaatttacttaataacgtgacaccaaattcaaacaaagactacttgttatattggatggaattaggacaaggacatcttgatgaagcgattaatattgccacttatttagatgataacgatattacaaagttagcgttgattaataaattaaatgagattaaaaataacggagatttatag

SEQ ID NO: 408797 - DNA, 177 bp, Staphylococcus aureus
ttgcaagatattttagacaaagaaaaacaagttaaagatgaaaaagcgaaatctgaagaagagaaagcaaaagcgaaagatgagaaattaaagcaacaagaagagaacgaaaagaaacaaaaagaacaagcacaaaaagataaagaaaaacgccaagaagctgaaagaaaaaaatag

SEQ ID NO: 408798 - DNA, 4440 bp, Staphylococcus aureus
atgcataaattgattataaaatataacaaacaattgaagatgctcaatttgcgagatggtaagacatatactattagcgaagacgagcgtgcagatattacgttgaaatcgttaggcgaagtcattcatttagaacaaaataatcaaggtacttggcaagcgaatcatacttctattaataaggtgcatgttagaaaaggtgaccttgatgacattacattacagctttatacagaagctgattatgcatcatttgcgtatccttcaattcaagatacgatgacaattggaccaaatgcatatgatgatatggttattcaaagcttgatgaatgccatcattattaaagattttcaatcaatacaagaatcacaatacgtacgcattgtgcacgataaaaatacagatgtatatattaactatgaactacaagagcaattaacgaacaaagcttacattggtgatcatatttatgttgaagggatatggctcgaagtacaagctgatggtttaaatgtattgagtcagaatacagtggcatcgtcattaattcgcttaacacaagagatgccacatgcacaggcagatgattacaatacgtaccatcgttcgccaaggattattcaccgtgaaccgaccgatgatattaagattgaaagaccaccacaaccaatacagaagaacaatacagtgatatggcgttccattataccgccattagtaatgattgctttaactgttgtcatctttttagtgagaccaattggtatttatattttaatgatgattggtatgagtacagtaacgatagtatttggtattacaacgtatttctctgaaaagaaaaagtataacaaagatgttgaaaaacgagagaaagattacaaagcttatttggataataaatctaaagagattaataaagcgattaaaacacaacgttttagtttgaattatcattatccaacggttgctgaaattaaagatatcgttgaaacgaaagcaccaagaatatatgaaaaaacatcgcatcatcacgatttcttacattataagttaggtattgcgaatgtagaaaagtcattcaaattagattaccaagaagaagaatttaaccaacgtcgtgatgaactattcgacgatgctaaagaattgtatgaattttacacagatgtagaacaagcaccattaatcaatgatttaaatcatggaccaattgcatatattggtgcacgacatctcattttagaagaattggagaaaatgctaatccaattgtcaacgttccatagttatcatgatttagagtttctatttgtgacacgtgaagatgaagttgaaacattgaaatgggcacgttggctgccacatatgacattgagaggtcaaaacattagagggtttgtttacaatcaacgaacgcgtgaccaaattttaacgtcaatttatagcatgatcaaagaacgaatccaagctgtgcgtgaacgcagcagaagtaatgagcaaattattttcacaccgcaattagtgtttgtcattacagatatgtcattaattattgatcatgtcattttagaatatgtaaaccaagatttatcagaatatggtatttcattaatctttgttgaagatgtgattgaaagtttgccagagcatgtagataccattattgatatcaagtctcgtactgaaggcgaactgattacgaaagaaaaagaattggttcaattgaaatttacacctgaaaatattgataacgtcgataaagaatatatcgcgcgacgtttggcgaatttgatacacgtcgaacatttgaaaaatgcaattcctgatagtattacatttttagagatgtataacgtgaaagaagtagatcagcttgatgtggttaatcgatggagacaaaacgaaacatacaaaacgatggcagtacctttaggtgtaagaggtaaagatgatattttatcattgaacttacatgaaaaagcacacggaccacatggtttagttgctggtaccactggttcggggaaatctgagattatccaatcatacattttatcgttagctattaattttcaccctcatgaagttgcattcctattgattgactataaaggtgggggtatggcgaacttatttaaagatttagtccatttagttggtacgattacaaacttagatggcgatgaagcgatgcgtgccttaacatcaatcaaagccgaattgagaaaacgtcaacgtttattcggagagcatgatgttaaccatattaatcaataccataagttatttaaagaaggtgttgcgacagaaccaatgccacatttattcattatttccgatgagtttgccgaattaaaatcagaacaacctgattttatgaaagagcttgtatcaacggcacgtattggacgttcgttaggtattcatttaatacttgcgacacaaaaaccatcgggtgttgttgatgaccaaatttggtctaactctaaatttaaattggcattaaaagtacaagatagacaagacagtaatgaaattttaaaaacaccagatgcagcagacattacaataccaggtcgtgcgtatttacaagttggtaataatgaaatttatgaattgttccaatctgcatggagtggagcaacatatgacatcgaaggcgataaattagaagttgaagataagacgatttacatgattaatgattatggtcaacttcaagcaatcaacaaagacttgagtggacttgaagatgaagaaacaaaagaaaatcaaactgagttagaagcggttatagatcatatcgaatctattacaacacgattagaaattgaagaagttaagcgtccatggctaccaccattgccagaaaatgtatatcaagaagatttagtagaaacagattttagaaaattatggtcagatgatgcaaaagaagtggaattaacattaggacttaaagacgtaccagaagaacaatatcaagggccgatggtattacaattgaaaaaagctggtcacatcgcgttaatcggaagtccaggatatggtagaacaacgttcttacacaacattattttcgatgttgcaagacaccatcgtcctgatcaagcacacatgtacttgttcgatttcggtaccaatggtttgatgccagtcacagacataccacatgtcgctgattactttacagtagatcaagaagacaagattgcgaaggcgatacggatatttaatgatgaaatcgatcgccgtaagaagattttaagtcagtatcgtgttactagtatttctgaatatcgaaaattatctggtgaaacaattccgcatgtctttattcttattgataactttgacgcagtaaaagattcacctttccaagaagtttttgaaaatatgatgattaaaatgacgcgtgaagggctagcattagacatgcaagtaaccttaactgcctcaagagctaatgctatgaaaacaccaatgtacattaatatgaaaacacgtatcgccatgtttttatatgataaatcagaggtgtcgaacgtagtaggacagcaaaaatttgcggttaaagatgtagtgggtcgagcattgttaagtagcgatgacaacgtatcattccatatcggccaaccatttaaacatgatgagaccaaatcatataatgatcaaattaatgatgaagtatcagcgatgacagaattttataaaggtgaaacaccaagtgatattcctatgatgccagatgaaattaaatatgaagattacagagaatcattaagcttaccggatatagttgctaatggtgctttaccaattggattagattatgaaggtgttacactacaaaaaattaaattaactgaaccagcaatgatttcatcagaaaatccgagagaaattgcgcatattgccgaaattatgatgaaagagattgacatattaaatgaaaaatatgcgatttgtatcgcagactcaagtggagagtttaaagcttataggcatcaagtggctaactttgccgaagaaagagaagacattaaagcgattcatcaactaatgattgaagacttaaaacaaagagaaatggacggtccgtttgaaaaagattcactttacattatcaatgattttaaaacatttattgattgcacgtatattccggaagatgatgttaaaaaacttattacaaaaggaccagaacttggcttgaacattttatttgtcggcattcataaagaattaatagatgcttatgataaacagattgatgttgcacgtaaaatgattaaccaatttagtataggtattcgtatttcagaccaacaattctttaaatttagatttattcaacgagaaccagttattaaagaaaatgaagcatatatggtcgcaaaccaagcttatcaaaagattagatggtttaaatag

SEQ ID NO: 408799 - DNA, 678 bp, Staphylococcus aureus
atgatgaaagatgttaagcgaatagattatttttcttacgaagaattaacaattttaggtggtagtaaattacctctcgtaaattttgaattgtttgatccatcaaattttgaagaagctaaagctgctttaattgaaaaggaattagtaacagagaatgacaagttaactgatgcaggttttaaagtggctacattagtcagagagtatattagcgcaattgtaaatattcgaattaatgatatgtattttgcaccatttagctatgaaaaagatgaatatattttgttgagccggtttaaaaataatggatttcaaatacgaattataaataaagacattgtatggtggtcgattgtacaatcatatcctttattaatgagacaagaaaagtccaatgattgggactttaaacaaattgacgatgaaacattggagaacttaaataatgaaagtatcgatacgattgggcgtgtgttagaaattgaaatatacaatcatcaaggtgaccctcaacaaagtttatataacatttatgaacaaaatgatttgctactcattcgatacccattaaaagataaagtactgaatgttcatattggcgtcattaatacatttatacgagaattatttggattcaatactgatgaaaatcatattaataaagcagaggagtaa

SEQ ID NO: 408800 - DNA, 684 bp, Staphylococcus aureus; identical to SEQ ID NO: 407672

SEQ ID NO: 408801 - DNA, 1095 bp, Staphylococcus aureus
ttggaaccgttattatcattaaaatcagttagtaaaagctatgatgatcttaatatcttagatgacatagatattgatattgaatcaggatacttttatacattattaggtccttcaggttgtggtaaaacaacaattttaaaattaattgcagggtttgaatatcctgatagtggtgaagtgatttatcaaaacaaaccaattggtaatttaccaccaaataaacgtaaagtgaatacagtctttcaagattatgcattatttccacacttaaacgtctatgataatatcgctttcggtttgaaattaaaaaaattatcaaaaaccgaaattgatcaaaaagtaactgaggcattaaaattagttaagctttcaggttatgaaaaaagaaatattaatgaaatgagtggcggacaaaagcaacgtgttgcaattgcacgtgctatcgtaaatgaaccagaaatattattgttagatgaatctttatccgcattagatttgaaattgcgtactgatatgcaatatgaattaagggaattgcaatctagattaggtattacatttatatttgtaacacatgatcaagaagaagcgttagcactaagtgactttctttttgtattaaaagatgggaaaattcaacaatttggtacaccaacagatatatatgacgaaccagtgaatcgatttgtagctgattttattggagaatctaatattgttgaagggcgcatggttagagattatgtcgtgaatatttatgggcaagatttcgaatgtgtcgatatgggtattcctgaaaataaaaaagtagaagtcgttattcgaccagaagatatatcattaatcaaagcagaagaaggattatttaaagcaactgttgattctatgttatttagaggggtccactatgaaatatgttgtatagacaataaaggttatgaatgggtaatacaaacgactaaaaaagctgaagtaggcagtgaagttggtctttattttgatcctgaagccattcatattatggttcctggagaaacagaagaagagtttgataaacgtattgaaagctatgaggaagtagacaatgcgtaa

SEQ ID NO: 408802 - DNA, 1455 bp, Staphylococcus aureus
atgagtaaaagacagaaagaatttcatgacagcttagcaaacgaaaaaacaagagtaaggctttataaatctggaaaaaattgggtgaaatccggaattaaagaaatagaaatgttcaaaataatgggactaccatttattagtcatagtatagtgagtcaagataatcaaagcattagtaaaaaaatgacgggatacggactgaaaactacggcggttattggtggtgcattcacggtaaacatgttgcatgaccagcaagcttttgcggcttctgatgcaccattaacatctgaattaaatacacaaagtgaaacagtaggtaatcaaaactcaacgacaatcgaagcatcaacatcaacagccgattccacaagcgtaacgaaaaatagtagttcggtacaaacatcaaatagtgacacagtctcaagtgaaaagtctgaaaatgtcacttcgacaactaatagtacaagcaatcaacaagaaaaattgacatctacatcagaatcaacattctcaaagaatactacatcaagttctgatactaaatctgtagcttcaacttcaagtacagaacaaccaattaatacatcaacaaatcaaagtactgcatcaaataacacttcacaaagcacaacgccatcttcagccaacttaaacaaaactagcacaacgtcaactagcaccgcaccagtaaaaattcgaactttcagtcgcttagctatgtcaacatttgcgtcagcagcgacgacaagtgcagtaaccgctaatacgattacggttaataaagataacctcaaacaatatatgacaacgtcaggtaatgctacttatgatcaaagtaccggtattgtgacgttaacgcaggatgcatacagccaaaaaggtgctattacattaggaacacgtattgactctaataaaagttttcatttttctggaaaagtaaatttaggtaacaaatatgaagggcatggaaatggtggagatggtatcggttttgccttttcacctggtgtattgggagaaacagggttaaacggtgccgcagtaggtattggtggcttaagtaacgcatttggcttcaaattggatacgtatcacaatacatctacaccgaatgcatcagcaaaggcgaaagctgacccatctagtgttgctggtggaggtgcgtttggtgcctttgtaacaacagatagttatggtgttgcatcaacatatacatcaagttcagcagctgataatgctgcaaagttaaatgttcaaccaacaaataacgcatttcaagattttgatattaattataatggtgatacaaaagttatgactgtcacgtatgcaggtcaaacatggacacgtaatatttcagattggattgcaaaaagtggtacgaccaacttttcattatcaatgacagcctcaacaggtggcgcgacaaatttacaacaagtataa

SEQ ID NO: 408803 - DNA, 186 bp, Staphylococcus aureus
atgcaacaacaagcatatataaacgcaacgattgatataaggatacctacagaagttgaatatcagcattttgatgatgtggataaagaaaaagaaacgctggcagattacttatataacaatcctgacgaaatactagagtatgacaatctaaaaattagaaatgtaaatgtagaggtggaataa

SEQ ID NO: 408804 - DNA, 408 bp, Staphylococcus aureus
atggaaatagaaattaaatttaacgaaacgtttgaagcacctatgggctcgcctcgtccacgctttcgtaatacaggtagatttgttcaaacttacatgcctacgtcttatacaaagcataaagcgtatatacaagggcaaatgcctaagttaaatctagagcatgcactaaaaatcgaattagacttttactttccattgcttaaatcgtggtcgaagaaaaagaaaaacgaaatggttggacaatataaagtgactaagccggatatcgataacttaattaaaacggtattagatgcttgtaatggtcatgtatggaaagacgataaccaaattacagaaataactagctcaaagcgttatggactagaacccaaaataatcatgcgagttgaggaagtgatctaa

SEQ ID NO: 408805 - DNA, 159 bp, Staphylococcus aureus
atggtaaccaaagaatttttgaaaattaaacttgagtgttcagatatgtacgctcagaaactcatagacgaggcgcagggcgatgaaaataagttatatgacctatttatccaaaaacttgcagaacgtcatacacgccccgctatcgtcgaatattaa

SEQ ID NO: 408806 - DNA, 780 bp, Staphylococcus aureus
atgaaaccactattcagcgaaaagataaacgaaagcttgaaaaaatatcaacctactcatgtcgaaaaaggattgaaatgtgagagatgtggaagtgaatacgacttatataagtttgctcctactaaaaaacacccgaatggttacgagtataaagacggttgcaaatgtgaaatctatgaggaatataagcgaaacaagcaacggaagataaacaacatattcaatcaatcaaacgttaatccgtctttaagagatgcaacagtcaaaaactacaagccacaaaatgaaaaacaagtacacgctaaacaaacagcaatagagtacgttcaaggcttctctacaaaagagccaaaatcattaatattgcaaggttcatacggaactggtaaaagccacctagcatacgctatcgcaaaagcagttaaagctaaagggcatacggttgcttttatgcacataccaatgttgatggatcgtatcaaagcgacatacaacaaaaatgcagtagagactacagacgagctagtcagattgctaagtgatattgatttacttgtactagatgatatgggtgtagaaaacacagagcacactttaaataaacttttcagcattgttgataacagagtaggtaaaaacaacatctttacaactaactttagtgataaagaactaaatcaaaatatgaactggcaacgtatcaattcaagaatgaaacacaatgcaagaaaagtaagagtaatcggagacgatttcagggagcgagacgcatggtaa

SEQ ID NO: 408807 - DNA, 771 bp, Staphylococcus aureus
atggcaacatttagagtttacaaagaatcaggtaactttgtcacagtacacaaagattttatacatgattctaatataagttggaaggctaaaggtattctactttatttgttaagtcgacctgataactggcaaatttacgaaacagaactagagcaacattcaactgatggacttagcggtttaaagagtggaatcaaggaactggaagaaattggatacattcaacgtagtagaaaacgtgataaaagtggtaggttaaatggttatgagtacttagtatatgagcaaccgcaccacattcgattttccaacgttggaaaaaccgttaacggtaaaaccaacaatggaaaaaccgttaatggtaaatcgcatactactaataataatagtactaataatgatttaactaataataacaatactaataatgaaggaagtatattgtcgggcaacccgacggtgtcttccattccctataaagaaattatcgaatacttaaataaaaaagcaggaaagcattttaaacataatacagctaaaacaaaagattttattaaagcaagatggaatcaagattttaggttggaggattttaaaaaggtgattgatatcaaaacagctgaatggttaaacacggatagcgataaataccttagaccagaaacactttttggcagtaaatttgaggggtacctcaatcaaaaaatacaaccaactggcacgaatcaattggaacgcatgaagtacgacgaaagttattgggattag

SEQ ID NO: 408808 - DNA, 282 bp, Staphylococcus aureus
atggaaaaaccttatatgttaacatatgatttaaactcacccggacaaaaatatgaggaattgagaaatgttataaaaaaggaaatttctaatggtcattgcaattattggaaatcttcatttttattccgttcttctttatcaacttcagaaatgatagaaaagttgaaaccttatctcgattctggagataagctgtttgttacagaaatagtcaataacaaacaagggtggttaacaaaagaacaatgggattttatcaaccataatatttttatttag

SEQ ID NO: 408809 - DNA, 150 bp, Staphylococcus aureus
atgaatagactaagaataataaaaatagcactcctaatcgtcatcttggcggaagagattagaagcgctaaaaaaattaaaaaatttacccctgaggattctaaaggttttcctgatataacaaaagattcaataaaagaacctaaataa

SEQ ID NO: 408810 - DNA, 492 bp, Staphylococcus aureus
atgtgtagagatatagaacttcactggggcgaaccagtagaatcaactagaaaattattacaaacagaattggaaattatgaaaggttatgaagaaatcagtctgcgcgactgttctatgaaagttgcaagggagttaatagaactgattatagcgtttatgtttcatcatcaaatacctatgagtttagaaacgagtaagttgttaagcgaagataaagcgttattatattgggctacaatcaaccgcaactgtgtaatttgtggaaagcctcacgcagacctagcgcattatgaagcagtcggcagaggaatgaacagaaacaaaatgaatcactacaacaaacatgtattagcgttatgtcgcgaacatcataaccagcaacatgcgattggcgttaagtcgtttgatgataaatatcacttgcatgactcgtggataaaagttgatgagaggctcaataaaatgctgaaaggagagaaaaaggaatga

SEQ ID NO: 408811 - DNA, 555 bp, Staphylococcus aureus
atgaaaatcactggtagaacacaatacattcaagaaactaatcaagaggcattcatgaaaggtggggactttttaggagctggagaatttacagtaaaagttgcaaatgtcgagtttaacgacagagaaaacagatacttcacgattgtttttgaaaacaacgaaggtaaacaatacaaacacaaccaatttgtcccaccattccaacaagattatcaagaaaaacaatatatcgagttacttagtagattaggaattaaattgaacttaccagatttaacttttgacacagatcaattaattaacaaaatcggaactattgtacttaaaaataaatttaacgaggaacaaggcaagtattttgtaagactctcatatgtaaaagtttggaataaagacgatgaagtagttaataaaccagaacctaaaactgatgagatgaaacaaaaagaacagcaagcaaatgggaaacagacgccaatgagtcaacaatcaaacccatttgctaatgctaatggtcctatagaaatctctgacgatgatttaccgttctag

SEQ ID NO: 408812 - DNA, 780 bp, Staphylococcus aureus
atgactgaacaaactaatcaagatgtcgatattttaacgcaactaggtgtaaaagacatcagcaaacaaaatgcaaacaagttttataaatttgcgatatacggcaagttcggtactggtaaaactacttttttaacaaaagataacaatgccttagtactagatataaatgaggacggaacaacggtaacagaagatggggcagttgtgcagattaagaattataagcattttagtgcagtgattaaaatgctgcctaaaattattgaacaactaagagaaaacggaaaacaaattgatgttgtagtgattgaaacaatccaaaagttacgtgatatcactatggacgacatcatggacggtaaatcaaagaaaccgacatttaatgattggggcgagtgtgctacacgcattgtaagtatttatcggtatatttctaaattacaagaacattatcaatttcatcttgctataagcggacacgagggcattaacaaagacaaagatgatgagggaagtactatcaatccaacaatcacgatagaggcacaagaccaaataaaaaaagcagtcatcagtcaatctgacgtgttagcaagaatgacaatagaagaacatgagcaagacggtgaaaaaacttatcaatatgtacttaacgctgaaccatcaaatttattcgagacaaagataagacactcaagcaacatcaaaattaacaacaaacgtttcattaatccaagtattaacgatgttgtacaagcaattagaaatggtaattaa

SEQ ID NO: 408813 - DNA, 222 bp, Staphylococcus aureus
atgaagcagactgtaacttacatcatccgtcatagggatatgccaatttatataactaacaaaccaactgataacaattcagatgttagttactccacaaatagaaatagagctagggagtttaacggtatggaagaagcgagtatcaatatggattatcacaaagcaatcaagaaaacagtgacagaaactattgagtacgaggaggtagaacatgactga

SEQ ID NO: 408814 - DNA, 654 bp, Staphylococcus aureus
atgaataatataaatctcactcaacgacagttagatttaataaagaaaaatcaagctatcttgtctaaattgcctgtcgaagcttacgctaaagccgcaaatactatgaataattcgtatgttatgaacgctctggaaattcaatcgacggttaataatgttatgaatagcattagaattaaccaatcgaaattatctaattgggcttcctatatgcatcaagtaactaagaatcatccaatgttcaaatctaatttattttctaatgaggttcttaatagttttataaaatctacgagcattcctaaaaacgatattttgaaaatgtcttatgctcttagaaatttgaatgtcgatgtagctaatagttctacttttattaaatccatcaatcctgcccatccagtagagcaaaaacaacatgaaagcaataattacagcggtaaaaaaattgtcgacataatgcatattaatcactccagtttaggttttattaatgctagttctgtaggtgtaagcggtaatgctatttgggactttttattaaagtttattaacaacgaaccaataaatactcctttttatatttcggtactttttatagcgtatttttgctatctattaaccagtttttcaaattcaaatgatgattag

SEQ ID NO: 408815 - DNA, 144 bp, Staphylococcus aureus
atgttacaaaaatttagaatcgctaaagaaaaaagtaaattaaaactcaatttactaaaacatgcaaacagtaatttagaaacaagaaacaaccctgaactgttgcgagcagttgcagagttgcttaaagagattaatcgataa

SEQ ID NO: 408816 - DNA, 750 bp, Staphylococcus aureus
atgcaagcattacaaacaaaatcgaacatcggagaaatgttcaatattcaagaaaaagaaaatggagaaatcgcaataagtgcaagagagttatataaagctttggaagttaaaaagcgttttagcgcttgggcagaaattaacttgaagcatttcaaagaaaatagggattttacaagtgtacttacaagtacggttgttaataacggagctgtaagacaactagaagattatgctttaacacttgatgtagctaaacatgttgcgatgatgtcaggtacagaaaaaggttttgattttagagagtatttcatccaaattgaaaaagcatggaacagtccagaaatgattatgcaacgtgctttaaaaattgctaacaacacaatcaatcaattagagacaaagattgaacgtgataaaccaaaaattgtatttgcagatgcagtagctactactaagacatcaattttagttggagagttagcaaagatcattaaacaaaacggtataaacatcgggcaacgcagattgtttgagtggttacgtcaaaacggattccttattaaacgcaagggtgtggattataacatgcctacacagtattcaatggaacgtgagttattcgaaattaaagaaacatcaatcacacattcggacggtcacacatcaattagtaagacgccaaaagtaacaggtaaaggacaacaatactttgttaacaagtttttaggagaaaaacaaacatcttaa

SEQ ID NO: 408817 - DNA, 483 bp, Staphylococcus aureus
atggaattcatacaatctactttgttttcaaacgttgtagcttttctagctttaggtctatctgcatactcaattttttatactcgttctcaaaataagttcagttttgttattagcgatcttaatttctactatgaaaataattttgtagaattaaattttgtcgtcgctaatgactcgtctagaactcatactttagaagaattaatatttttagataaaaacaaaaatgttttaacacctattaacgtagtattggaatctgatgaatattcatctctcggtatatataatccaagttatttgcatgctccaatcgataaacaattagataaaccagaagttatgatagctaattcgtcatcagagtttttatataaattcgaattagaacctgcgtttataaagattgtttctaatcaacgaataaacaaacttaaaaagtataagttaatctctaccgattcttacgagcataattaa

SEQ ID NO: 408818 - DNA, 180 bp, Staphylococcus aureus
atggaacaaacaatcaaacaatttttagaatttagaaagcaattcacacccgcacagtggcacgaaatcaacagaattattgacggacaatttagtaaaaaagccgccgagctacaactcgacgaccaagatgttgaggttattaaaaatattattactcaacaaaagattatgaagtaa

SEQ ID NO: 408819 - DNA, 237 bp, Staphylococcus aureus
atgcctatagatactaaacttttgaaatctaaaatggctttgaaagaacataacatcaaaaccctttctgaagaaattggtgtcaatagagatactttatctaacatgatacacgggagaacaaaaccatcctacccggtaataaatggtatttattttgcgttagaattgacacctcaagaaggaagagatattttttttaacgaagacttacgcaaaaagaaagttttaacttaa

SEQ ID NO: 408820 - DNA, 315 bp, Staphylococcus aureus
atgtgcttttcaaaaagaatgaaacaatcaagagaaaaacaaggtatgactttggccgaactaggaagaaaaattggtaaaactgaagctactgtacaacgttatgaaagcggaaatatcaaaaatctaaaaaacgatactatagaaagtatagctactgcattaaatgttaatcctgcgtatttaatggggtgggttgaagaaaacgatgatgaagtacaacatcgtgcagctcatcttgaaggagaattgacagatgacgaatggcaaagagttttagattatgcagattatataagaagcaaacgtaagtaa

SEQ ID NO: 408821 - DNA, 462 bp, Staphylococcus aureus
atgggattatatgaagaaactttaatacaacatgattatattgaaataagagaggctgatgtgcttccagataatttagacggggtatggttaggagatttaattttgataaagcgtggtttatcagatagagaaaaggcagggattctctttgaagaattagcacataataaacttacatacggtgatatagccgattactcgaaattcaacaatcgcaagttcgaaaattacgcaagacgacacggctttatctcagctgttccattacgtgaaattgtagaagcttataattatggcgtacgtaacttgtatgagttgtctgagtatctacaattaagcgaagaatacatattagaagcaatagaacaatataaaaagatatatggtattggaactcactatggcgagtattctattacatttgagccgttgagagtttttaaatataagaaaatataa

SEQ ID NO: 408822 - DNA, 135 bp, Staphylococcus aureus
atgagaaaatataattttgataaattcttcttatatatggcggtactgtcattaccaatagtcatattttttccattaatgttaagcatcccaatcatcttttttattttttcaataagaaagaaggaagattaa

SEQ ID NO: 408823 - DNA, 522 bp, Staphylococcus aureus
atgaacgttccaaatagcgatattgatatacgccctatgttaagcaatttacaattttacataggtcaaacaggaaaaacagagcatgacccattattagatttctctttactatatgagcatgcagaactaggcgtgcgctttacattaagtggtttagatagaattaataatccatatagtgataaaaacgaattatatttgatgattcttttgtatgataaagtcggaggtattggttttgatttacgtaatttttggacattaaagttaaatagtgaaaccatgaaaaaatcatatgaaactattcaattcacactatataagttcgaaccgaataatagaagttatgattttactaatatctatcaacagttaaagatattagttttgccagaagaagttgataaagagaaaatcgataaagaaacatttatgaactggatgacgtggtcgcaacacaatgaaatattaagtacaaaaatacctatatatcatcgtaaggagataaataatgactaa

SEQ ID NO: 408824 - DNA, 471 bp, Staphylococcus aureus
atgactaacttaatgcctactccacatgaagagtttttaaaaagaagatttccgaacaataatgttccggttaacttcaatttagatactgaaaaccagaaagatgatataatggaattaaatgaaaacgatgattccggaggtggtaatatgggcaattacgtaacaagagacgaattcaataatagtatgagagagttcaaagatgagatgcgtgctatgagaactgacatgaacaataatatgaacagtttacgttctgaattgaatacaaatatcaataatttacgtatcgaaacgcaaaattctattagtaagctaccaagtaattttgatgtaaaaaatatgttgctagaaaataataaagaattagaaagagaagcaaaacaaaacaggaataccattataagttggactattggtattgttggtttaggattcacaatagctaaaggttttggttggatataa

SEQ ID NO: 408825 - DNA, 1050 bp, Staphylococcus aureus
atgccagtatataagaatgataatacaggtaaatggtatttttccattagatataaagatgtatacggtaataacaaacgtaagatgcaacgcggtttttcaactaagcgtgaagctaagagagcagaggctatttttttgaatgacgtaaacgaaggatatagtgattcgaaaacatttgattatgtttttcatcactacttagaaaatagcgatttgagacctaaaacaaaacgacgcaaacaaaatgaatatcataaacactttaaagctaagttcgggcacataaaaatgaataagataacacaaaatcaatgccaagagtttcgtaaatatctaatagagaatgtagcatcaacaaattctgctcgtacaatttggtcaggttttaaagttgtaattaattatgccaaaaaatactttggattacgtacagatccaacaatatcaattaaacctattccgcgtgtaaagccaaaacctaagtttatgatgcgtgaagaatttgaagaaagaatcaaagacattgaagagcaagattacagagagttatttacattaatgttttatacaggtttaaggattggcgaagctatggctcttgtttggacagactacaataaatacaaaaaagagatatccataaataaaacaatggacatctctaatagaactatatatccgagaccaaaaacagatagttcagaggatattgttcctttacctaaattcatcaatacaatgttaactgaacgacatcaacgtgaaaaagagttaaacaaatattttgatgaacgtagttattttattttcggaggaatggctcccaaacattacagtcatgttcaaaagaaatttcaaaaagctttccctcattataacattcacgcgttaagacattcttatgcatcttatcttgcaaataatggtgtagatattttcgttttacagtcactcatgagacatgctcaaatcactgaaacgatgggcacttacagccatttatatactcagaaaaaacacgatgcaatagccatttttgacaagtaa

SEQ ID NO: 408826 - DNA, 1053 bp, Staphylococcus aureus
atgaaaaagattagacttgaactcgtatatttacgtgctattatatgtgcaattattattatcacacatttacttacacaaattactttaaaacatgaaaatttggagggaggatccttagtattacaattttacattcgtaatattgtgatttttggtacaccttgctttattatcttgtcacagttactgacaaccttgaattaccaaaaagtcacctatagatatttaactacacgcgtaaaatatatacttattccttacatattaatggggttgttttacagttatagtgaatcattattaacagattcaagtttcaataaacaattcattgaaaatgtcctattaggtcaatggtatggctattttatcgttgttatcatgcaattctttattttgagttatatcatttttaaaattaactataacctattcaacagtaaaatattattattgttatcttttattttacagcaatcatttttatattactttacgaacaatacagcgtttcacgataccgtgctacactattatccattaagtgaaaacactataatattcggatggattttttatttctttttaggtgcatatatgggttataactacgaacgtgttttaaatttcttagaacgttatttagttattatgattgtattagctgtagctacttattttgtgtttattgcgttagcaaatggagactattggaacgttaccagcttttcatattcattaacaccatataatagtattatgtttattgttatcttgggtatttgcacgcattttaaaacaatgttatttaatacgattcaaatgattagtgctttctcattctttatttatttattacatccaatcattctagactcattgtttgcatatacaaatatatttgaggataatacaatggtctttctagcgatatcactactattcattttaggattatgtataggtgtcggtatgatattgcgtgaattctatatctttaggtttattattggaaaacaaccatataaattgaacattaatgcttattaa

SEQ ID NO: 408827 - DNA, 579 bp, Staphylococcus aureus
atgattgtcatcgttgattatggattagggaatattagtaatgtaaaacgcgctattgaatatttggggtatgaggtggttgtctcaaataagcaaaatataatcgatcaagcagaaacaatcatattaccgggtgttggtcattttaaagatgcgatgtcagagataaagcgattaaatctcgatgcaatattggctaagaatactgataagaaaatgatcggtatttgtttaggcatgcagttaatgtatgagcatagtgatgaaggcgatgcatctggattagggtttatccaaggaaatatttcgcgtatccaaacagaatacccagtgccgcacttaggttggaataatttagtgagtaagcatcctatgttaaatcaagatgtttacttcgtacattcttatcaagcgccgatgtcagaaaatgtcattgcatatgcgcagtatgggactgatattccagcaattgttcaatttaacaattatattggtattcaattccatcctgaaaaaagcggtacatatgggttacaaattttgcgtcaggcaatacaagggggatttataaatgattga

SEQ ID NO: 408828 - DNA, 756 bp, Staphylococcus aureus
atgaaaacatacagtgaagcaagagcaaggttacgttggtatcaaggtagatatattgattttgacggttggtatggttaccaatgtgcagatttagcagttgattacatttattggttgttagaaattagaatgtggggaaatgcaaaagatgcaatcaataacgattttaaaaacatggcaacagtatatgaaaacacaccatcgtttgttccacaaataggtgatgtggctgtatttaccaaaggaatatataaacaatacggtcatattggtttagtgtttaatggtggtaatacaaatcaatttttaattttggaacagaactatgacggtaacgcaaatacgcctgcaaagttacgttgggataattattacggctgtactcactttattagacctaagtataaaagtgagggcttaatgaataagatcacaaataaagttaaaccacctgctcaaaaagcagtcggtaaatctgcaagtaaaataacagttggaagtaaagcgccttataaccttaaatggtcaaaaggtgcttattttaatgcgaaaatcgacggcttaggtgctacttcagccactagatacggtgataatcgtactaactatagattcgatgttggacaggctgtatacgcgcctggaacattaatatatgtgtttgaaattatagatggttggtgtcgcatttattggaacaatcataatgagtggatatggcatgagagattgattgtgaaagaagtgttttaa

SEQ ID NO: 408829 - DNA, 255 bp, Staphylococcus aureus
atgattaattggaaaattagaatgaaacaaaaatcattttgggtagcgatattgtcagctatctttttatttgctcaaaacatcgcaaaagctattgggtatgatatccaagtttatacagagcaattaacagacggtttaaacgctatattaggatttttagtattaactggtgtgattcaagacccgactactaaaggtataggtgatagccaccaagctttagaatatgaagaaccaagaagaaaatactag

SEQ ID NO: 408830 - DNA, 1887 bp, Staphylococcus aureus
atgccaattttattaaaaagtctacagggtgtagggcacgctattaatgttagtacaaaggtaagtaaaaagctaaatgaagatagttctttggatctaactattatcgagaacgcgagtacgtttgacgcaataggtgctataactaaaatgtggacgatcactcatgttgaaggtgaagatgatttcaacgaatatgtaattgtcatacttgataagtctactattggcgaaaaaataaggcttgatatcaaagctaggcaaaaagaacttgatgaccttaacaattctaggatttaccaagagtataacgaaagttttacaggcgttgagttcttcaatactgtctttaaaggaacgggttataagtatgtattacatccaaaagtagatgcatctaaattcgagggattaggcaaaggagatacacgattagaaatctttaaaaaaggacttgagcgttatcatctcgaatatgaatacgatgcaaagactaaaacgtttcatttgtatgatgaattatctaagtttgccaattattacattaaagctggtgtgaatgctgataacgtcaaaatacaagaagacgcatctaaatgttatacctttattaaaggttatggtgattttgatggacaacagacttttgcagaagcgggactacaaattgaattcactcatccattagcacaattgataggtaaaagagaagcgccaccgcttgttgatggacgtattaaaaaagaagatagtttaaaaaaagcaatggagctagtgataaagaaaagtgtcactgcttctatttccttagactttgtagcgttacgtgaacatttcccagaagctaaccctaaaataggtgatgttgttagagtggtggattctgccataggatataacgacttagtgagaatagtcgaaatcactacacatagagatgcgtacaataatatcactaagcaagatgtagtattaggagactttacaaggcgtaatcgttataacaaagcagttcatgatgctgcaaattatgttaaaagcgtaaaatctacaaaatccgacccatctaaagaactaaaagcattaaacgcaaaagttaacgcaagtttatctataaataatgaattggttaagcagaatgaaaaaataaacgctaaagtcgataagatgaatactaaaacagttacaactgctaatggtacgatcatgtacgactttacgagtcaatcaagtataagaaacatcaaatcaattggaacgattggcgactctgtagctagagggtcgcacgcaaaaactaatttcacagaaatgttaggcaagaaattgaaagccaaaacgactaatcttgcaagaggtggcgcaacaatggcaacagttccaataggtaaagaagcggtagaaaacagcatttataggcaagcagagcaaataagaggcgacctaatcatattacaaggcacagatgatgactggttacatgattattgggcaggcgtaccgataggcactgataaaacggacactaaaacgttttacggtgccttttgttctgcaattgaagttatacggaagaataatccagattcaaaaatactagtgatgacagctacaagacaatgccctatgagtggtacaacaatacgccgtaaagacacggacaaaaacaaactagggttaacacttgaggactatgtaaacgctcaaatattagcttgtagtgagttagatgtaccagtgtttgacgcatatcacacagattactttaagccatacaatccagcttttaggaaagcgagcatggaggacggcttacaccctaacgaaaaaggtcacgaggttattatgtacgagttaatcaaggattattacagtttttacgactaa

SEQ ID NO: 408831 - DNA, 942 bp, Staphylococcus aureus
ttgatagcgcacgatatagaagtaataaggaatggttcgcagtatcgcgtcagtgacaatcctttcacttataatcacttggaagtagttgaatataacgttacaggcgcaggatatcatcgtaactattctgatatagagggtattgatggtagatttcataattacgctaaagaagaacttaaaaaagtagagcttaagataaggtataaagtacctaaaattgcttatgcttcacatttaaagtcagacgtccaagcactatttgctggacgtttttatttaagggaattagctacaccagacaattcaattaagtatgagcatatattagatataccaaaagacaaacaagcatttgagcttgattatgttgatggacgacaactttttgtaggactagtaagtgaagtttcttttgacacaacacaaacatcaggggaattttctttgtcgtttgaaacaaccgaactaccatactttgaaagtgtcggttatagtactgatcttgaaagtaataacgaccctgaaaaatggtcggtacctgatagattgcctacaaacgaaggtgataagaggcgtcaaatgacattttacaacactaactcaggagaagtttattataacggtgatgttcctttaacacagtttaatcagtttaatgttgttgaaatagagttagctgaagatgttaaagctaatgataaggaggggttcactttctatacagataaaggaaatatctcagttattaaggaagttgatttaaaagccggagataaaataatcttcgacggtaaacatacctatagaggttatttaaatatagattcttttaataaaactttagaacaaccggttttatatccaggctggaatcgattcaagtctaataaagtaatgaaacaaattacatttagacacaaattatattttagataa

SEQ ID NO: 408832 - DNA, 2886 bp, Staphylococcus aureus
ttggatactcattttatggcaaagattatggccaatattagagatttccaaagcaacgtaaggaaagctcaacgattagcaaagacgtctgtaccaaacgaaattgaaacagatgtaaaagcagatatttcaagattccaaagagctttacaacgcgctaaagctatggcgcaaaaatggcgtgaacataacgttaaaatagatggtaataattcaccgttaaaacgtgcaattgctagtgcaaaaacgatgttggccacgttacacaacaaaacaataaaagttaatttcgatacgagaggtatgacaaaaacccaaattttaactaaggcactgaatcagtccttaactgattatagtgagaaaatggacgcgctagctactaaaattcgtacatttggtacaatttttgcacaacaagttaaaggcttaatgattgctagtatacaagcattgataccagtgattgccggattagtacctgcaataatggcagtacttaatgcggttggtgtattaggtggtggcgttttaggtttagttggcgcattctctgtcgcaggtcttggagttgttggctttggtgcaatggctattagcgctcttaaaatggttgaagatggaacattggcagtaacaaaagaagttcaaaactttagagatgcgagcgatcagttaaaaactacatggcgtgatattgttaaagagaatcaagcaagtatctttaatgcgatgtcagcaggattaagaggtattgcaagcgcgttaactaaaatgaaacctttcttgtctgaggtatcaatgttagttgaagcgaatgtgcgtaagtttgaagaatgggtcaaaacgtctaacactgcaaaaaaagcgttcgagtcgttgaataccatcggtggggctatatttggtgatttattgaacgctgcaggacgatttggtgatggattagtcaatatctttactcaattgatgccgttatttaaattcatgtcacaaggtctgcaaaacatgtctatagatttccaaaattgggctaatagtgtagcaggacaaaatgcgatacaagcatttatcgagtacactaagataaatctacccaagataggtaaaatattcggaaacgtttttaaaggtattggtaatttaatgattgcgttcagtcaaaacagttctaatatttttgactggctcgtcgaattgacaaataagtttagagaatggtctgaacaagtagggcaatctcaaggttttaaagatttcatcaactatgttcaagagaatggcccaactattatgaaattaatcggtaacattgttaaagcgttagtagcgtttggtaaagcaatggcacctatagctagtaaattactagatttcatcaccaatctagctgattttatcggtaagttatttgaaactcatccggcagtagctctggctatgggtattttaggtatattaggcggtgcattctgggctttgatggctccgattgcagcagtgagtagtgttttaagcaatgtgtttggtacaagtttattaagaattataaagaaaatgttagatttaacagggataccgaaattgttatctaaagcttttgcgccattagctggtgtgtttacaagtatttcttggcctgtattactagttattgcaattatagctgcgttcatcggtgttgtcgtttacttatggaaaactaacgagactttcagaaagaatatgacaaaagcgtgggaagatatcaaaagcgctgtttctgaagcgattcaaggcgtaattgattggttaagtgaactatgggataaaatacagaccacaatagaaccaatcaaaccgatattagaagcgttaggtaaagtttttatgactgtgttaggcgttttagtgataggtgtcatagtaaacgtaatgaatgtcattcaaggattatggacagtgataaaaatagcattcgaagccataggaacagtaatatccgtagcagcccaaatcatagtaggtttgttcactgctttaattcagttgcttactggcgacttctcaggtgcttgggagactattaaaactacggttaccaatgtacttgatacgatttggcaatacatgcaatcagtttgggagtcaattatcggctttttaactggcgtaatgaatcgaacgctttctatgtttggtacaagttggtcacagatatggagtacaatcactaattttgttagcagtatttggaacactgttacaagttggttcagtcgtgttgcttggagtgtagctgaaaaaatgggacaagcattaaactttattatcacaaaaggttctgaatgggtttctaacatttggaatacagttacaagtttcgcgagtaaagtagctgatgggtttaaaagagttgtctcaaatgtaggtgacggtatgagtgatgcacttggtaagattaaaagtttcttcagtgatttcttaaatgccggagcggaattaatcggcaaagtagctgagggtgtagccaatgctgcgcacaaagtagtcagcgcggtaggcgatgcgatttcatcagcttgggactctgtaacttcattcgtaagtggacacggtggaggtagtagcttaggtaaaggtttagcggtatcgcaagcaaaagtaattgctacagactttggcagtgcctttaataaagagctatcctctactttgacagatagtatagtagatcctgtaagtacttctatagacagacacatgactagcgatgttcaacatagcttaaaagaaaataatagacctattgtgaatgtaacgattagaaatgagggcaaccttgatttaattaaatcacgcattgatgacatgaacgctatagacggaagtttcaacttattataa

SEQ ID NO: 408833 - DNA, 285 bp, Staphylococcus aureus
ttgttagcactaacacctgctgaatggcgtgattggcttattggtggtcaggataggtacctagatcaaagacaattattaattgaacaagcgcaagctaacggcttagtacaagcttctaagaggctaactagtatgattcgtgacattgagaaacaacgttacgaaataagagaacctggtagctatgctcgtgtacaaaaagctagattagaagaagaaaaaagaagacgtgaactcttcaaagaaggtacaagaaaattccttgaatcgaaaggaggttag
